(19) United States
(12) Patent Application Publication
(10) Pub. No.: US 2008/0070235 A1
(43) Pub. Date: Mar. 20, 2008

(54) Method for Recognizing Acute Generalized Inflammatory Conditions (Sirs), Sepsis, Sepsis-Like Conditions and Systemic Infections

(75) Inventors: Stefan Russwurm, Jena (DE); Konrad Reinhart, Jena (DE); Hans-Peter Saluz, Jena (DE); Eberhard Straube, Jena (DE); Peter F. Zipfel, Jena (DE); Hans-Peter Deigner, Lampertheim (DE)

Correspondence Address: AKERMAN SENTERFITT, P.O. BOX 3188, WEST PALM BEACH, FL, 33402-3188, US

(73) Assignee: SIRS-Lab GMBH, Jena (DE)

(21) Appl. No.: 10/551,874

(22) PCT Filed: Mar. 31, 2004
(86) PCT No.: PCT/EP04/03419

§ 371 Date: May 7, 2007

(30) Foreign Application Priority Data
Apr. 2, 2003 (DE) 103 15 031 5
Aug. 8, 2003 (DE) 103365.7
Sep. 2, 2003 (DE) 103 40 395.7

(51) Int. Cl. C12Q 1/68; C12P 19/34

(52) U.S. Cl. 435/6; 435/7.21; 436/501; 436/94; 435/91.2

(57) ABSTRACT

The present invention relates to a method for in vitro detection of SIRS, sepsis and/or sepsis-like conditions. This method renders the evaluation of the severity and/or the therapeutic progress of sepsis and severe infections, in particular sepsis-like systemic infections possible. Further, the present invention relates to the use of recombinantly or synthetically prepared nucleic acid sequences or peptide sequences derived therefrom as calibrator in sepsis assays and/or for the evaluation of the effect and the toxicity during screening of the active agents and/or the preparation of therapeutics for the prevention and treatment of SIRS, sepsis, sepsis-like systemic inflammatory conditions and sepsis-like systemic infections.

### CROSS REFERENCE TO RELATED APPLICATIONS

[0001] This application is a National Stage of International Application PCT/EP04/03419, filed Mar. 31, 2004. International Application PCT/EP04/03419 cites for priority German application numbers 103 15 031.5 (filed Apr. 2, 2003), 103 36 511.7 (filed Aug. 8, 2003), and 103 40 395.7 (filed Sep. 2, 2003). This application incorporates by reference International Application PCT/EP04/03419, German application number 103 15 031.5, German Application Number 103 36 511.7, and German Application Number 103 40 395.7. This application incorporates by reference the Sequence Listing electronically submitted under file name “3535-027SuppSequence.TXT”, with the listed creation date of “May 7, 2007” and being “9,409 KB” in size.

### BACKGROUND OF THE INVENTION

[0002] The present invention relates to a method for in vitro detection of acute generalized inflammatory conditions (SIRS), sepsis, sepsis-like conditions, and systemic infections, as well as the use of recombinantly or synthetically prepared nucleic acid sequences or peptide sequences derived therefrom.

[0003] Part of the description of the present invention is a sequence listing of 1430 pages, consisting of SEQ ID No: 1 through SEQ ID No: 10,540.

[0004] The complete sequence listing is incorporated herein by reference, is part of the description and, thus, part of the disclosure of the present invention.

[0005] The present invention particularly refers to labels for gene activity for the diagnosis and for the optimization of the therapy of acute generalized inflammatory conditions (Systemic Inflammatory Response Syndrome (SIRS)). Additionally, the present invention relates to methods for detecting acute generalized inflammatory conditions and/or sepsis, sepsis-like conditions, severe sepsis and systemic infections as well as for a corresponding improvement of therapy of acute generalized inflammatory conditions (SIRS).

[0006] Further, for patients suffering from acute generalized inflammatory conditions (SIRS) the present invention relates to new possibilities of diagnosis that are obtained from experimentally proofed findings in connection with the occurrence of changes in gene activity (transcription and subsequent protein expression).

[0007] In spite of the fact that there have been improvements of the pathophysiologic understanding and the supportive treatment of patients in intensive care units, SIRS is a disease that occurs very frequently and contributes considerably to mortality in patients in intensive care units [2-5].

[0008] The criteria of the American College of Chest Physicians/Society of Critical Care Medicine Consensus Conference (ACCP/SCCM) of 1992 are the ones that became most accepted in the international literature as definition of the term SIRS [4]. According to this definition, SIRS (in this patent described as acute generalized inflammatory conditions) is defined as systemic response of the inflammatory system triggered by a noninfectious stimulus. At least two of the following criteria have to be fulfilled in this context: Fever>38° C. or hypothermia<36° C., leukocytosis>12 G/1 or leukopenia<4 G/1 or shift to the left in the haemogram, heart rate>90/min, tachypnoea>20 breaths/min or PaCO2<4.3 kPa, respectively.

[0009] The mortality rate in SIRS amounts to about 20% and increases with the development of more severe organ dysfunctions [6]. The contribution of SIRS to morbidity and lethality is of multidisciplinary interest, as it increasingly puts the success of the most advanced or experimental treatment methods of many medicinal fields (e.g. cardiosurgery, traumatology, transplantation medicine, heamatology/onkology) at a risk, as they all are threatened by an increased risk of the development of an acute generalized inflammatory conditions. Thus, the decrease of morbidity and lethality of many seriously ill patients goes along with the improvement of prevention, treatment and particularly detection and observation of the progress of acute generalized inflammatory conditions.

[0010] SIRS is a result of complex and very heterogeneous molecular processes that are characterized by the incorporation of many components and their interactions on every organizational level of the human body: genes, cells, tissues, organs. The complexity of the underlying biological and immunological processes resulted in many kinds of studies comprising a wide range of clinical aspects. One of the results from these studies was that the evaluation of new therapies is rendered more difficult due to the presently used criteria which are quite unspecific and clinical based and which do not sufficiently show the molecular mechanisms [7].

[0011] Unfortunately, sepsis and consecutive organ dysfunctions still rank among the principal causes of death in non-cardiologic intensive care units [1-3]. It is supposed that 400,000 patients suffer from sepsis in the USA each year [4]. Lethality is about 40% and increases to 70-80% if a shock develops [5, 6]. The excess lethality independent from the underlying disease of the patient and the underlying infection amounts to 35% [8].

[0012] The criteria of the American College of Chest Physicians/Society of Critical Care Medicine Consensus Conference (ACCP/SCCM) of 1992 are the ones that became most accepted in the international literature as definition of the term sepsis [4]. According to these criteria [4] the grades of severity “systemic inflammatory response syndrom” (SIRS), “sepsis”, “severe sepsis” and “septic shock” are clinically defined. According to this definition, SIRS (in this patent described as acute generalized inflammatory conditions) is defined as the systemic response of the inflammatory system triggered by a noninfectious stimulus. At least two of the following criteria have to be fulfilled in this context: Fever>38° C. or hypothermia<36° C., leukocytosis>12G/1 or leukopenia<4G/1 or shift to the left in the haemogram, heart rate>90/min, tachypnoea>20 breaths/min or PaCO2<4.3 kPa, respectively. According to the definition, sepsis are those clinical conditions in which the criteria of SIRS are fulfilled and an infection is detected as cause or it is at least very likely that it is the cause. A severe sepsis is characterized by the additional occurrence of organ dysfunctions. Frequent organ dysfunctions are changes in the state of consciousness, oliguria, lactate acidosis or sepsis-induced hypotension with a systolic blood pressure lower than 90 mmHg, or a pressure decrease of more than 40 mmHg of the initial value, respectively. If such a hypotension cannot be treated by administration of crystalloids and/or colloids and the patient further needs treatment with catecholamines, this is called a septic shock. Such a septic shock is detected in about 20% of all sepsis patients.

[0013] Whether and how catecholamines are administered during the treatment of patients suffering from severe sepsis depends on the physician. If the blood pressure decreases, many physicians react by administering large quantities of infusion solutions and, thus, avoid administering catecholamines, however, there are also many physicians who refuse this kind of proceeding and who administer catecholamines much earlier and at a higher dose, if the patient shows the same clinical severity. The consequence is that in everyday practice patients suffering from the same clinical severity can be rated as belonging to the group “severe sepsis” or to the group “septic shock” [4] due to subjective reasons. This is why it became common in international literature to pool patients with the severity grades “severe sepsis” and “septic shock” [4] in one group. This is why the term “severe sepsis” used in this description is used according to the above mentioned consensus conference for patients with sepsis and additional proof of organ dysfunctions and, thus, comprises all patients of the groups “severe sepsis” and “septic shock” according to [4].

[0014] The mortality rate in sepsis amounts to about 40% and increases to 70-80%, if a severe sepsis develops [5, 6]. The contribution of sepsis and severe sepsis to morbidity and lethality is of multidisciplinary interest. By comparison, the number of cases rose continuously (by 139% from 73.6 to 176 cases per 100,000 hospital patients from 1970 and 1977, for example) [7]. This increasingly puts the success of the most advanced or experimental treatment methods of many medicinal fields (e.g. visceral surgery, transplantation medicine, heamatology/onkology) at a risk, as they all are threatened by an increased risk of the development of acute generalized inflammatory conditions. Thus, the decrease of morbidity and lethality of many seriously ill patients goes along with a progress in prevention and treatment and especially detection and observation of the progress of the sepsis and severe sepsis. This is why well-known authors have been criticizing for a long time that too much energy and financial resources have been spend on the search for therapeutics for sepsis in the past decade, instead of using them for improving sepsis diagnosis.

[0015] Sepsis is a result of complex and highly heterogeneous molecular processes that are characterized by the incorporation of many components and their interactions on every organizational level of the human body: genes, cells, tissues, organs. The complexity of the underlying biological and immunological processes resulted in many kinds of studies comprising a wide range of clinical aspects. One of the results from these studies was that the evaluation of new sepsis therapies is rendered more difficult due to the unspecific clinically based inclusioncriteria, which does not sufficiently show the molecular mechanisms [9].

[0016] These facts have created need for innovative diagnostic means that are supposed to improve the capability of the person skilled in the art to diagnose patients suffering from SIRS, sepsis, sepsis-like conditions, severe sepsis and systemic infection at an early stage, to render the severity of a SIRS measurable on a molecular basis and to make it comparable in the clinical progress and to derive information concerning the individual prognosis and the reaction on specific treatments.

[0017] The contribution of sepsis with regard to morbidity and lethality is of multidisciplinary interest. Lethality of sepsis changed only marginally within the last decades, whereas, in comparison, the indices increased continuously (e.g. from 1979 to 1987 by 139% from 73.6 to 176 per 100,000 in-patients) [7]. This increasingly puts the success of treatment of the most advanced or experimental therapy methods of various special fields (visceral surgery, transplantation medicine, heamatology/onkology) at a risk due to the fact that they all imply without exception an increase of the risk of sepsis. Thus, the decrease of morbidity and lethality of many seriously ill patients goes along with a progress in prevention and treatment and especially diagnosis of sepsis.

[0018] Sepsis is a result highly heterogeneous molecular processes that are characterized by the incorporation of many components and their interactions on every organizational level of the human body: genes, cells, tissues, organs. The complexity of the underlying biological and immunological processes resulted in many kinds of studies comprising a wide range of clinical aspects. One of the results from these studies was that the evaluation of new sepsis therapies is rendered more difficult due to relatively unspecific clinically-based inclusioncriteria which do not sufficiently show the molecular mechanisms [9].

[0019] Technological improvements, especially the development of microarray technology, are now rendering it possible for the person skilled in the art to compare 10 000 genes or more and their gene products at the same time. The use of such microarray technologies can now give hints on the conditions of health, regulation mechanisms, biochemical interactions and signalization networks. As the comprehension how an organism reacts to infections is improved this way, this should facilitate the development of enhanced modalities of detection, diagnosis and therapy of systemic disorders.

[0020] Microarrays have their origin in “southern blotting” [10], the first approach to immobilize DNA-molecules so that it can be addressed three-dimensionally on a solid matrix. The first microarrays consisted of DNA-fragments, frequently with unknown sequence, and were applied dotwise onto a porous membrane (normally nylon). It was routine to use cDNA, genomic DNA or plasmid libraries, and to mark the hybridized material with a radioactive group [11-13].

[0021] Recently, the use of glass as substrate and fluorescence for detection together with the development of new technologies for the synthesis and for the application of nucleic acids in very high densities allowed the miniaturizing of the nucleic acid arrays. At the same time, the experimental throughput and the information content were increased [14-16].

[0022] Further, it is known from WO 03/002763 that microarrays basically can be used for the diagnosis of sepsis and sepsis-like conditions.

[0023] The first explanation for the applicability of microarray technology was obtained through clinical studies on the field of cancer research. Here, expression profiles proofed to be valuable with regard to identification of activities of individual genes or groups of genes, correlating with certain clinical phenotypes [17]. Many samples of individuals with or without leukemia or diffuse lymphoma of large B-cells were analyzed and gene expression labels (RNA) were found and used for the classification of those kinds of cancer [17, 18]. Golub et al. found out that an individual gene is not enough to make reliable predictions, however, that predictions made on gene expression profiles of 53 genes (selected from more than 6000 genes that were present on the arrays) are highly accurate [17].

[0024] Alisadeh et al. [18] examined large B-cell lymphoma (DLBCL). The authors created expression profiles with a “lymph chip”, a microarray bearing 18 000 clones of complementary DNA that was developed to monitor genes that are involved in normal and abnormal development of lymphocytes. By using cluster analysis, they managed to classify DILBCL in two categories that showed great differences with regard to the survival chance of patients. The gene expression profiles of these subtypes corresponded to two important stages of differentiation of B-cells.

[0025] To differentiate between symptoms that base on microbial infections and other symptoms of non-infectious etiology, which could indicate sepsis due to their clinical appearance, but are in fact not based on a systemic microbial infection, e.g. of symptoms that base on non-infectious inflammation of individual organs, the determination of gene expression profiles via differential diagnostics proofed to be particularly advantageous [19-22]. The use of body fluids for the measurement of gene expression profiles for the diagnosis of SIRS has not yet been described.

[0026] The point of origin of the invention disclosed in the present patent application is the realization that RNA levels different from normal values respectively peptide levels or peptide segment levels derivable from the RNA levels, that can be detected in a serum or plasma of a patient whose risk is high that he will be suffering from SIRS, or who suffers from symptoms that are typical for SIRS, can be detected before SIRS, sepsis, sepsis-like conditions, severe sepsis and systemic Infections are detected in biological samples.

[0027] Thus, it is an object of the present invention to provide a method for the detection, evaluation of the degree of severity, and/or the progress of the therapy, of SIRS and/or sepsis and/or severe sepsis and/or systemic infections.

[0028] The method of the invention is characterized in that the activity of one or more leading genes can be determined in a sample of a biological liquid of an individual. Additionally, SIRS and/or the success of a therapeutic treatment can be deduced from the presence and/or, if present, the amount of the determined gene product.

[0029] One embodiment of the present invention is characterized in that the method for in vitro detection of SIRS comprises the following steps:
[0030] a) Isolation of sample RNA from a sample of a mammal;
[0031] b) Labelling of the sample RNA and/or at least one DNA being a gene or gene fragment specific for SIRS, with a detectable label.
[0032] c) Contacting the sample RNA with the DNA under hybridization conditions;
[0033] d) Contacting control RNA representing a control for non-pathologic conditions, with at least one DNA, under hybridization conditions, whereby the DNA is a gene or gene fragment specific for SIRS;
[0034] e) Quantitative detection of the label signals of the hybridized sample RNA and control RNA;
[0035] f) Comparing the quantitative data of the label signals in order to determine whether the genes or gene fragments specific for SIRS are more expressed in the sample than in the control, or less.

[0036] One alternative embodiment of the present invention is characterized in that the method for in vitro detection of sepsis and/or sepsis-like conditions comprises the following steps:
[0037] g) Isolation of sample RNA from a sample of a mammal;
[0038] h) Labelling of the sample RNA and/or at least one DNA being a specific gene or gene fragment for sepsis and/or sepsis-like conditions, with a detectable label.
[0039] i) Contacting the sample RNA with the DNA under hybridization conditions;
[0040] j) Contacting sample RNA representing a control for non-pathologic conditions, with at least one DNA, under hybridization conditions, whereby the DNA is a gene or gene fragment specific for sepsis and/or sepsis-like conditions;
[0041] k) Quantitative detection of the label signals of the hybridized sample RNA and control RNA;
[0042] l) Comparing the quantitative data of the marking signals in order to determine whether the genes or gene fragments specific for sepsis and/or sepsis-like conditions are more expressed in the sample than in the control, or less.

[0043] One embodiment of the present invention is characterized in that the method for in vitro detection of severe sepsis comprises the following steps:
[0044] m) Isolation of sample RNA from a sample of a mammal;
[0045] n) Labelling of the sample RNA and/or at least one DNA being a specific gene or gene fragment for severe sepsis, with a detectable label.
[0046] o) Contacting the sample RNA with the DNA under hybridization conditions;
[0047] p) Contacting sample RNA representing a control for non-pathologic conditions, with at least one DNA, under hybridization conditions, whereby the DNA is a gene or gene fragment specific for severe sepsis;
[0048] q) Quantitative detection of the label signals of the hybridized sample RNA and control RNA;
[0049] r) Comparing the quantitative data of the label signals in order to determine whether the genes or gene fragments specific for severe sepsis are more expressed in the sample than in the control, or less.

[0050] A further embodiment of the present invention is characterized in that the control RNA is hybridized with the DNA before the measurement of the sample RNA and the label signals of the control RNA/DNA complex is gathered and, if necessary, recorded in form of a calibration curve or table.

[0051] Another embodiment of the present invention is characterized in that mRNA is used as sample RNA.

[0052] Another embodiment of the present invention is characterized in that the DNA is arranged, particularly immobilized, on predetermined areas on a carrier in form of a microarray.

[0053] Another embodiment of the invention is characterized in that the method is used for early detection by means of differential diagnostics, for control of the therapeutic progress, for risk evaluation for patients as well as for post mortem diagnosis of SIRS and/or sepsis and/or severe sepsis and/or systemic infections and/or septic conditions and/or infections.

[0054] Another embodiment of the present invention is characterized in that the sample is selected from: body fluids, in particular blood, liquor, urine, ascitic fluid, seminal fluid, saliva, puncture fluid, cell content, or a mixture thereof.

[0055] Another embodiment of the present invention is characterized in that cell samples are subjected a lytic treatment, if necessary, in order to free their cell contents.

[0056] Another embodiment of the present invention is characterized in that the mammal is a human.

[0057] Another embodiment of the invention is characterized in that the gene or gene segment specific for SIRS is selected from the group consisting of SEQ. ID No. 6373 to SEQ. ID No. 10540, as well as from gene fragments thereof having at least 5-2000, preferably 20-200, more preferably 20-80 nucleotides.

[0058] Another embodiment of the invention is characterized in that the gene or gene segment specific for sepsis and/or sepsis-like conditions is selected from the group consisting of SEQ. ID No. 1 to SEQ. ID No. 6242, as well as gene fragments thereof with 5-2000 or more, preferably 20-200, more preferably 20-80 nucleotides.

[0059] Another embodiment of the invention is characterized in that the gene or gene segment specific for severe sepsis is selected from the group consisting of SEQ. ID No. 6243 to SEQ. ID No. 6372, as well as gene fragments thereof with 5-2000 or more, preferably 20-200, more preferably 20-80 nucleotides.

[0060] Another embodiment of the present invention is characterized in that the immobilized probes are labelled. As probes for this embodiment serve self-complementary oligonucleotides, so called molecular beacons. They bear a fluorophore/quencher pair at their ends, so that they are present in a folded hairpin structure and only deliver a fluorescence signal with corresponding sample sequence. The hairpin structure of the molecular beacons is stable until the sample hybridizes at the specific catcher sequence, this leading to a change in conformation and, thus, to the release of reporter fluorescence.

[0061] Another embodiment of the present invention is characterized in that at least 2 to 100 different cDNAs are used.

[0062] Another embodiment of the present invention is characterized in that at least 200 different cDNAs are used.

[0063] Another embodiment of the present invention is characterized in that at least 200 to 500 different cDNAs are used.

[0064] Another embodiment of the present invention is characterized in that at least 500 to 1000 different cDNAs are used.

[0065] Another embodiment of the present invention is characterized in that at least 1000 to 2000 different cDNAs are used.

[0066] Another embodiment of the present invention is characterized in that the cDNA of the genes listed in claim 10 is replaced by synthetic analoga as well as peptidonucleic acids.

[0067] Another embodiment of the present invention is characterized in that the synthetic analoga of the genes comprise 5-100, in particular about 70 base pairs.

[0068] Another embodiment of the present invention is characterized in that a radioactive label is used as detectable label, in particular ³²P, ¹⁴C, ¹²⁵I, ¹⁵⁵Eu, ³³P or ³H.

[0069] Another embodiment of the present invention is characterized in that a non-radioactive label is used as detectable label, in particular a color- or fluorescence label, an enzyme label or immune label, and/or quantum dots or an electrically measurable signal, in particular the change in potential, and/or conductivity and/or capacity during hybridizations.

[0070] Another embodiment of the present invention is characterized in that the sample RNA and control RNA bear the same label.

[0071] Another embodiment of the present invention is characterized in that the sample RNA and control RNA bear different labels.

[0072] Another embodiment of the present invention is characterized in that the cDNA probes are immobilized on glass or plastics.

[0073] Another embodiment of the present invention is characterized in that the individual cDNA molecules are immobilized onto the carrier material by means of a covalent binding.

[0074] Another embodiment of the present invention is characterized in that the individual cDNA molecules are immobilized onto the carrier material by means of adsorption, in particular by means of electrostatic and/or dipole-dipole and/or hydrophobic interactions and/or hydrogen bridges.

[0075] Another embodiment of the method according to the present invention for in vitro detection of SIRS is characterized in that it comprises the following steps:
[0076] a) Isolation of sample peptides from a sample of a mammal;
[0077] b) Labelling of the sample peptides with a detectable label;
[0078] c) Contacting the labelled sample peptides with at least one antibody or its binding fragment, whereby the antibody binds a peptide or peptide fragment specific for SIRS;
[0079] d) Contacting the labelled control peptides originating from healthy subjects, with at least one antibody or its binding fragment immobilized in form of a microarray on a carrier, whereby the antibody binds a peptide or peptide fragment specific for SIRS;
[0080] e) Quantitative detection of the label signals of the sample peptides and the control peptides;
[0081] f) Comparing the quantitative data of the label signals in order to determine whether the genes or gene fragments specific for SIRS are more expressed in the sample than in the control, or less.

[0082] Another alternative embodiment of the method according to the present invention for in vitro detection of sepsis and/or sepsis-like conditions is characterized in comprising the following steps:
[0083] g) Isolation of sample peptides from a sample of a mammal;
[0084] h) Labelling of the sample peptides with a detectable label;
[0085] i) Contacting the labelled sample peptides with at least one antibody or its binding fragment, whereby the antibody binds a peptide or peptide fragment specific for sepsis and/or sepsis-like conditions;
[0086] j) Contacting the labelled control peptides originating from healthy subjects, with at least one antibody or its binding fragment immobilized on a carrier in form of a microarray, whereby the antibody binds a peptide or peptide fragment specific for sepsis and/or sepsis-like conditions;
[0087] k) Quantitative detection of the label signals of the sample peptides and the control peptides;
[0088] l) Comparing the quantitative data of the label signals in order to determine whether the genes or gene fragments specific for sepsis and/or sepsis-like conditions are more expressed in the sample than in the control, or less.

[0089] Another embodiment of the method according to the present invention for in vitro detection of severe sepsis is characterized in comprising the following steps:
[0090] m) Isolation of sample peptides from a sample of a mammal;
[0091] n) Labelling of the sample peptides with a detectable label;
[0092] o) Contacting the labelled sample peptides with at least one antibody or its binding fragment, whereby the antibody binds a peptide or peptide fragment specific for severe sepsis;
[0093] p) Contacting the labelled control peptides stemming from healthy subjects, with at least one antibody or its binding fragment immobilized on a carrier in form of a microarray, whereby the antibody binds a peptide or peptide fragment specific for severe sepsis;
[0094] q) Quantitative detection of the label signals of the sample peptides and the control peptides;
[0095] r) Comparing the quantitative data of the label signals in order to determine whether the genes or gene fragments specific for severe sepsis are more expressed in the sample than in the control, or less.

[0096] Another embodiment of the present invention is characterized in that the antibody is immobilized on a carrier in form of a microarray.

[0097] Another embodiment of the present invention is characterized in providing an immunoassay.

[0098] Another embodiment of the invention is characterized in that the method is used for early detection by means of differential diagnostics, for control of the therapeutic progress, for risk evaluation for patients as well as for post mortem diagnosis of SIRS and/or sepsis and/or severe sepsis and/or systemic infections.

[0099] Another embodiment of the present invention is characterized in that the sample is selected from: body fluids, in particular blood, liquor, urine, ascitic fluid, seminal fluid, saliva, puncture fluid, cell content, or a mixture thereof.

[0100] Another embodiment of the present invention is characterized in that tissue- and cell samples are subjected to a lytic treatment, if necessary, in order to free the content of the cells.

[0101] Another embodiment of the present invention is characterized in that the mammal is a human.

[0102] Another embodiment of the invention is characterized in that the peptide specific for SIRS is an expression product of a gene or gene fragment selected from the group consisting of SEQ. ID No. 6373 to SEQ. ID No. 10540, as well as gene fragments thereof with 5-2000 or more, preferably 20-200, more preferably 20-80 nucleotides.

[0103] Another embodiment of the invention is characterized in that the peptide specific for sepsis and/or sepsis-like conditions is an expression product of a gene or gene fragment selected from the group consisting of SEQ. ID No. 1 to SEQ. ID No. 6242, as well as gene fragments thereof with 5-2000 nucleotides or more, preferably 20-200, more preferable 20-80 nucleotides.

[0104] Another embodiment of the invention is characterized in that the peptide specific for severe sepsis is an expression product of a gene or gene fragment selected from the group consisting of SEQ. ID No. 6243 to SEQ. ID No. 6372, as well as gene fragments thereof with 5-2000 or more, preferably 20-200, more preferably 20-80 nucleotides.

[0105] Another embodiment of the present invention is characterized in that at least 2 to 100 different peptides are used.

[0106] Another embodiment of the present invention is characterized in that at least 200 different peptides are used.

[0107] Another embodiment of the present invention is characterized in that at least 200 to 500 different peptides are used.

[0108] Another embodiment of the present invention is characterized in that at least 500 to 1000 different peptides are used.

[0109] Another embodiment of the present invention is characterized in that at least 1000 to 2000 different peptides are used.

[0110] Another embodiment of the present invention is characterized in that a radioactive label is used as detectable label, in particular ³²P, ¹⁴C, ¹²⁵I, ¹⁵⁵Eu, ³³P or ³H.

[0111] Another embodiment of the present invention is characterized in that a non-radioactive label is used as detectable label, in particular a color- or fluorescence label, an enzyme label or immune label, and/or quantum dots or an electrically measurable signal, in particular the change in potential, and/or conductivity and/or capacity during hybridizations.

[0112] Another embodiment of the present invention is characterized in that the sample peptides and control peptides bear the same label.

[0113] Another embodiment of the present invention is characterized in that the sample peptides and control peptides bear different labels.

[0114] Another embodiment of the present invention is characterized in that the peptide probes are immobilized on glass or plastics.

[0115] Another embodiment of the present invention is characterized in that the individual peptide molecules are immobilized onto the carrier material by means of a covalent binding.

[0116] Another embodiment of the present invention is characterized in that the individual peptide molecules are immobilized on the carrier material by means of adsorption, in particular by means of electrostatic and/or dipole-dipole and/or hydrophobic interactions and/or hydrogen bridges.

[0117] Another embodiment of the present invention is characterized in that the individual peptide molecules are detected by means of monoclonal antibodies or their binding fragments.

[0118] Another embodiment of the present invention is characterized in that the determination of individual peptides by means of immunoassay or precipitation assay is carried out using monoclonal antibodies.

[0119] Another embodiment of the present invention is the use of recombinantly or synthetically produced nucleic acid sequences, partial sequences or protein-/peptide-sequences derived thereof, specific for SIRS, individually or as partial quantities as calibrator in SIRS-assays and/or to evaluate the effects and toxicity when screening for active agents and/or for the preparation of therapeutics as well as of substances and compounds that are designed to act as therapeutics, for prevention and treatment of SIRS.

[0120] Another embodiment of the present invention is the use of recombinantly or synthetically produced nucleic acid sequences, partial sequences or protein-/peptide-sequences derived thereof, specific for sepsis and/or sepsis-like conditions, individually or as partial quantities as calibrator in sepsis-assays and/or to evaluate the effects and toxicity when screening for active agents and/or for the preparation of therapeutics as well as of substances and compounds that are designed to act as therapeutics, for prevention and treatment of sepsis, sepsis-like systemic inflammatory conditions and sepsis-like systemic infections.

[0121] Another embodiment of the present invention is the use of recombinantly or synthetically produced nucleic acid sequences, partial sequences or protein-/peptide-sequences derived thereof, specific for severe sepsis, individually or as partial quantities as calibrator in sepsis-assays and/or to evaluate the effects and toxicity when screening for active agents and/or for the preparation of therapeutics as well as of substances and compounds that are designed to act as therapeutics, for prevention and treatment of severe sepsis.

[0122] It is obvious to the person skilled in the art that the individual features of the present invention shown in the claims can be combined with each other in any desired way.

[0123] The term leading genes as used in the present invention means all derived DNA-sequences, partial sequences and synthetic analoga (for example peptido-nucleic acids, PNA). In the present invention, it further means all proteins, peptides or partial sequences, respectively, or synthetic peptide mimetics decoded by leading genes are meant. The description of the invention referring to the determination of the gene expression is not a restriction but only an exemplary application of the present invention.

[0124] The description of the invention referring to blood is only an exemplary embodiment of the present invention. The term biological liquids as used in the present invention means all human body fluids.

[0125] One application of the method according to the invention is the measurement of differential gene expression with SIRS, sepsis, sepsis-like conditions, severe sepsis and systemic infections. For this measurement, the RNA is isolated from the whole blood of corresponding patients and a control sample of a healthy subject or of a subject that is not suffering from one of the above-mentioned disorders. Subsequently, the RNA is labelled, for example radioactively with ³²P or with dye molecules (fluorescence). All molecules and/or detection signals known in the state of the art for labelling molecules may be used as labelling molecules. The person skilled in the art is also aware of the corresponding molecules and/or methods.

[0126] The RNA thus labelled is subsequently hybridized with cDNA-molecules that are immobilized on a microarray. The cDNA-molecules immobilized on the microarray are a specific selection of genes according to claim 12 of the present invention for the measurement of SIRS, according to claim 13 for sepsis and sepsis-like conditions, according to claim 14 for severe sepsis and systemic infections.

[0127] The intensity signals of the hybridized molecules are measured afterwards by means of suitable instruments (phosphorimager, microarray scanner) and analyzed by means of additional computer-based analysis. The expression ratios of the sample of the patient and the control are determined with the signal intensities measured. The expression ratios of the under- and/or overregulated genes indicate, as in the experiments described below, whether SIRS, sepsis, sepsis-like conditions, severe sepsis and systemic infections are present or not.

[0128] Another use of the method according to the invention is the measurement of the differential gene expression to determine how probable it is that the patient will respond to the planned therapy, and/or for determination of the reaction to a specialized therapy and/or the settlement of the end of the therapy in terms of a “drug monitoring” with patients suffering from SIRS, sepsis, sepsis-like conditions, severe sepsis and systemic infections. For this purpose, the RNA (sample RNA) is isolated from the blood samples of the patient, that have been taken in time intervals. The different RNA samples are labelled together with the control sample and hybridized with the selected genes that are immobilized on a microarray. Thus, the corresponding expression ratios show the probability that patients respond to the planned therapy, and/or whether the started therapy is effective, and/or how long the patients' treatment has to go on, and/or whether the maximum effect of the therapy has already been achieved with the dose and duration applied.

[0129] Another use of the method according to the invention is the measurement of the binding grade of proteins, for example monoclonal antibodies, by means of the use of immunoassays, protein- and peptide arrays or precipitation assays. Durch die Bestimmung der Konzentration der von den Sequenzen der in Anwendungsbeispiel 1 aufgeführten Nukleinsäuren entsprechenden Proteine or Peptide kann auf ein erhöhtes Risiko zur Entwicklung einer SIRS geschlossen werden. Additionally, this procedure allows the differential diagnostic determination in patients suffering from SIRS, sepsis, sepsis-like conditions, severe sepsis and systemic infections.

[0130] Additionally, this indicates a higher risk of development of sepsis, sepsis-like conditions, severe sepsis and systemic infections.

[0131] Further advantages and features of the present invention will become apparent from the description of the embodiments as well as from the drawing.

### BRIEF DESCRIPTION OF THE DRAWINGS

[0132] FIG. 1 is a 2-dimensional gel comprising a precipitated serum protein of a patient suffering from sepsis that is applied to it.

[0133] FIG. 2 is a 2-dimensional gel comprising a precipitated serum protein of a control that is applied to it.

### DETAILED DESCRIPTION OF THE PREFERRED EMBODIMENTS

### Embodiment 1

### SIRS

[0134] Studies of differential gene expression with patients suffering from SIRS.

[0135] Whole blood samples of patients who were under the care of a surgical intensive care unit were examined for the measurement of the differential gene expression in connection with SIRS.

[0136] Control samples were whole blood samples of the patients that were drawn immediately before the operation. No one of these patients showed an infection and/or clinical signs of SIRS (defined according to the SIRS-criteria [4]) at this point of time or before the stationary treatment.

[0137] Additionally, whole blood samples of the same patients who had been subjected to a surgery, were drawn four hours after the operation (patient samples). Each of these patients developed SIRS after the surgery. A range of characteristics of the patients suffering from SIRS are shown in table 1. In Table 1, data with regard to age, gender, diagnosis as well as duration of the extracorporeal treatment are given.

TABLE 1
Data of the group of patients

| | | | | Duration of |
|---|---|---|---|---|
| | | | | extracorporeal |
| Patient | Gender | Age | Diagnosis | treatment [min] |
| 1 | male | 57 | coronary heart disease | 82 |
| 2 | male | 70 | coronary heart disease | 83 |
| 3 | female | 67 | coronary heart disease | 72 |
| 4 | male | 70 | coronary heart disease | 55 |

[0138] After the whole blood had been drawn, the total RNA was isolated using the PAXGene Blood RNA Kit according to the producer's (Quiagen) instructions. Subsequently, the cDNA was synthesized from the total RNA by means of reverse transcriptions with Superscript II RT (Invitrogen) according to the producer's instructions, labelled with aminoallyl-dUTP and succinimidylester of the fluorescent dyes Cy3 and Cy5 (Amersham), and hydrolyzed.

[0139] The microarrays (Lab-Arraytor human 500-1 cDNA) of the company SIRS-Lab GmbH were used for the hybridization. These micorarrays are loaded with 340 humane cDNA-molecules. The 340 humane cDNA-molecules are 3-fold immobilized in three subarrays on each microarray.

[0140] The prepared and labelled samples were hybridized with the microarrays according to the producer's instructions and subsequently washed. The fluorescence signals of the hybridized molecules were measured by means of a scanner (AXON 4000B).

Analysis

[0141] One test was analyzed by means of scanned pictures of the microarrays after hybridization. The mean intensity value of the detected spots was defined as the measured expression value of the corresponding gene. Spots were automatically identified and their homogeneity was checked. The analysis was controlled manually. In addition to the desired information, namely the amount of nucleic acids bound, contain the detected signals also background signals which are caused by unspecific bindings to the surface of the membrane. The definition of the signals of the background rendered the optimum differentiation between spots and the surface of the chip possible, which also showed color effects. For the analysis of the microarrays blank spots were chosen as background. The mean expression value of the chosen blank spots within one block (of 14 times 14 spots) was subtracted from the expression values of the gene spots (in the corresponding block).

[0142] Point signals not caused by binding of nucleic acids but by dust particles or other disturbances on the filter, could be told from real spots because of their irregular shape and were excluded from further analysis.

[0143] In order to render the values between the 3 subarrays and between different microarrays comparable, it was necessary to normalize the data afterwards. Due to the high number of spots on the microarray, the mean value of all expression values was set as normalization reference. The mean expression per gene was calculated by choosing the two (from three) repetitions that were closest to each other.

[0144] The expression ratios of the samples of the control and the patients were calculated from the signal intensities using the software AIDA Array Evaluation. The criteria for the grading of the examined genes was the level of the expression ratio. The interesting genes were those which were most overexpressed or underexpressed, respectively, compared with the control samples.

[0145] Table 2 shows that 57 genes of the patient sample were found, which were significantly overexpressed, if compared with the control sample. Table 3 shows that 16 genes of the patient sample were found, which were significantly underexpressed, if compared with the control sample. Those results show that the genes listed in table 2 and table 3 correlate with the occurrence of SIRS. Thus, the gene activities of the genes mentioned are labels for a diagnosis of SIRS.

TABLE 2
Significantly increased transcription activities and
their relative ratio to the control sample in SIRS

| GenBank | | | | | | SEQUENCE- |
|---|---|---|---|---|---|---|
| Accession-No. | Hugo-Name | Patient 1 | Patient 2 | Patient 3 | Patient 4 | ID |
| XM_051958 | ALOX5 | 2.43 | 1.49 | 1.81 | 1.40 | 6408 |
| XM_015396 | ALOX5AP | 3.71 | 7.39 | 3.89 | 2.68 | 6409 |
| XM_008738 | BCL2 | 1.16 | 6.76 | 1.55 | 1.04 | 6410 |
| BC016281 | BCL2A1 | 13.71 | 10.29 | 1.41 | 4.36 | 6468 |
| NM_021073 | BMP5 | 2.02 | 1.83 | 1.78 | 1.51 | 6411 |
| XM_002101 | BMP8 | 2.32 | 10.85 | 1.31 | 0.87 | 6412 |
| XM_045933 | CAMKK2 | 2.20 | 1.26 | 1.95 | 1.13 | 6413 |
| XM_055386 | CASP1 | 1.40 | 1.76 | 1.89 | 1.45 | 6414 |
| NM_004347 | CASP5 | 1.92 | 2.77 | 0.67 | 1.89 | 6415 |
| NM_004166 | CCL14 | 1.24 | 1.58 | 2.46 | 0.77 | 6463 |
| XM_012649 | SCYA7 | 1.24 | 9.78 | 0.85 | 1.82 | 6465 |
| NM_001760 | CCND3 | 1.23 | 2.68 | 1.56 | 1.12 | 6416 |
| NM_000591 | CD14 | 3.45 | 4.43 | 1.76 | 2.05 | 6417 |
| XM_038773 | CD164 | 0.84 | 1.91 | 3.26 | 3.15 | 6418 |
| XM_048792 | CD1A | 3.24 | 3.10 | 1.00 | 1.11 | 6419 |
| NM_001779 | CD58 | 2.14 | 2.11 | 1.54 | 2.91 | 6420 |
| XM_002948 | CD80 | 1.69 | 1.16 | 2.25 | 0.69 | 6423 |
| XM_027978 | CFLAR | 2.33 | 4.97 | 1.44 | 1.39 | 6424 |
| NM_000760 | CSF3R | 1.55 | 1.47 | 1.81 | 1.02 | 6425 |
| XM_012717 | CSNK1D | 1.95 | 3.15 | 1.24 | 1.32 | 6426 |
| XM_048068 | SCYD1 | 3.70 | 12.12 | 0.86 | 3.88 | 6466 |
| XM_051229 | CXCR4 | 2.33 | 2.10 | 2.15 | 1.60 | 6427 |
| XM_039625 | DUSP10 | 2.49 | 3.77 | 0.90 | 1.10 | 6429 |
| XM_010177 | DUSP9 | 2.17 | 5.27 | 1.12 | 1.63 | 6430 |
| XM_055699 | ENTPD1 | 1.91 | 3.18 | 0.71 | 0.86 | 6431 |
| XM_007189 | FOXO1A | 1.61 | 3.10 | 1.09 | 1.67 | 6432 |
| XM_012039 | FUT4 | 1.55 | 5.07 | 1.88 | 0.93 | 6433 |
| XM_040683 | HPRT1 | 5.15 | 66.19 | 1.44 | 2.28 | 6434 |
| NM_017526 | OBRGRP | 1.93 | 1.10 | 1.53 | 1.40 | 6435 |
| XM_049516 | ICAM1 | 1.27 | 1.88 | 2.05 | 1.30 | 6436 |
| XM_049531 | ICAM3 | 2.31 | 2.32 | 1.61 | 1.45 | 6437 |
| XM_041744 | IER3 | 4.17 | 7.25 | 1.98 | 2.08 | 6438 |
| XM_048562 | IFNAR1 | 2.16 | 4.87 | 1.09 | 2.36 | 6439 |
| XM_006447 | IL10RA | 1.02 | 1.51 | 1.96 | 0.67 | 6440 |
| M90391 | IL-16 | 1.77 | 1.50 | 1.16 | 1.09 | 6441 |
| XM_002765 | IL1R2 | 2.84 | 12.75 | 1.03 | 2.75 | 6442 |
| NM_000418 | IL4R | 3.34 | 6.44 | 2.05 | 2.79 | 6443 |
| XM_057491 | IL6 | 1.72 | 1.48 | 1.53 | 1.37 | 6444 |
| NM_002184 | IL6ST | 2.50 | 9.25 | 1.07 | 1.87 | 6445 |
| NM_000634 | IL8RA | 2.27 | 3.73 | 1.45 | 1.68 | 6446 |
| NM_006084 | ISGF3G | 1.72 | 1.08 | 2.54 | 1.12 | 6447 |
| XM_045985 | ITGA2B | 3.69 | 2.00 | 0.83 | 3.79 | 6448 |
| XM_008432 | ITGA3 | 2.11 | 7.62 | 1.08 | 1.06 | 6449 |
| XM_028642 | ITGA5 | 2.49 | 4.48 | 1.39 | 3.54 | 6450 |
| XM_036107 | ITGB2 | 1.72 | 1.13 | 2.08 | 1.13 | 6451 |
| XM_009064 | JUNB | 2.21 | 1.84 | 3.59 | 2.05 | 6452 |
| XM_036154 | LAMP2 | 1.79 | 1.68 | 1.62 | 1.41 | 6453 |
| XM_042066 | MAP3K1 | 2.06 | 7.67 | 2.91 | 8.93 | 6454 |
| NM_001315 | MAPK14 | 2.50 | 12.01 | 0.90 | 4.20 | 6455 |
| NM_003684 | MKNK1 | 2.58 | 17.17 | 1.74 | 1.83 | 6456 |
| U68162 | MPL | 2.58 | 1.10 | 1.39 | 6.99 | 6457 |
| NM_004555 | NFATC3 | 1.40 | 1.70 | 2.80 | 0.75 | 6458 |
| XM_006931 | OLR1 | 1.53 | 5.01 | 1.10 | 3.16 | 6459 |
| XM_039764 | PDCD5 | 1.11 | 3.09 | 1.21 | 1.95 | 6460 |
| XM_029791 | PIK3C2G | 0.93 | 1.62 | 0.96 | 1.52 | 6461 |
| NM_006219 | PIK3CB | 1.52 | 0.99 | 0.94 | 1.66 | 6467 |
| XM_043864 | PIK3R1 | 1.81 | 4.07 | 1.48 | 1.26 | 6462 |

[0146] TABLE 3
Significantly reduced transcription activities and
their relative ratio to the control sample in SIRS

| GenBank | | | | | | SEQUENCE- |
|---|---|---|---|---|---|---|
| Accession-No. | HUGO Name | Patient 1: | Patient 2: | Patient 3: | Patient 4: | ID |
| BC001374 | CD151 | 0.00 | 0.00 | 0.39 | 0.71 | 6375 |
| XM_006454 | CD3G | 0.63 | 0.40 | 0.75 | 1.01 | 6378 |
| XM_043767 | CD3Z | 0.43 | 0.00 | 0.82 | 0.77 | 6379 |
| XM_056798 | CD81 | 0.50 | 1.12 | 0.32 | 0.00 | 6380 |
| M26315 | CD8A | 1.45 | 0.00 | 0.30 | 1.31 | 6381 |
| NM_004931 | CD8B1 | 0.40 | 0.90 | 0.50 | 1.19 | 6382 |
| NM_001511 | CXCL1 | 0.09 | 0.00 | 0.50 | 1.34 | 6385 |
| XM_057158 | ADCY6 | 1.17 | 0.00 | 0.42 | 1.34 | 6383 |
| XM_044428 | ICAM2 | 0.00 | 1.16 | 0.50 | 1.10 | 6386 |
| NM_000880 | IL7 | 0.00 | 1.06 | 0.74 | 0.10 | 6388 |
| L34657 | PECAM-1 | 0.68 | 0.39 | 1.13 | 0.64 | 6396 |
| XM_044882 | PTGS1 | 0.00 | 1.34 | 0.52 | 0.76 | 6397 |
| XM_035842 | SCYA5 | 0.60 | 0.50 | 0.80 | 0.99 | 6401 |
| NM_021805 | SIGIRR | 0.00 | 0.40 | 0.45 | 0.66 | 6402 |
| XM_057372 | TNFRSF5 | 0.00 | 0.49 | 0.59 | 1.03 | 6406 |
| NM_003809 | TNFSF12 | 1.34 | 0.99 | 0.53 | 0.60 | 6407 |

[0147] These characteristic changes can be used for the method according to the present invention.

[0148] In the appended sequence listing, which is part of the present invention, the gene bank accession numbers indicated in tables 2 and 3 (access via internet via http://www.ncbi.nlm.nih.gov/) of the individual sequences are each allocated to one sequence ID.

### Embodiment 2

### SIRS

[0149] Study of the gene expression of three patients suffering from SIRS, and one control.

[0150] The gene expression of three patients suffering from SIRS and one control were measured. All patients developed SIRS as described in the criteria according to [4]. The control sample was taken from one patient who was subjected to surgical treatment, but who did not show any SIRS during this stationery treatment. The date of the patients suffering from SIRS and the control are summarized in table 4.

TABLE 4
Characteristics of the samples of patients and controls

| | | | | Apache | |
|---|---|---|---|---|---|
| | | | | Score | SAPS II |
| Patient | Gender | Age | Diagnosis | [point] | [point] |
| 1 | male | 50 | coronary heart | 18 | 36 |
| | | | disease | | |
| 2 | male | 70 | caecuM_perforation | 19 | 64 |
| 3 | male | 67 | aortic valve | 9 | 21 |
| | | | insuffiency | | |
| 1 | male | 70 | fracture of the | 1 | 12 |
| | | | skull cap | | |

[0151] After the whole blood had been drawn, the total RNA was isolated using the RNAeasy-Kit according to the producer's (Quiagen) instructions. Subsequently, the cDNA was synthesized from the total RNA by means of reverse transcription with Superscript II RT (Invitrogen), labelled with ³³P according to the producer's instructions, and hydrolyzed.

[0152] For the hybridization membrane filters of the Deutschen Ressourcenzentrum für Genomforschung GmbH (a German center for genome research) (RZPD) were used. This membrane filter was loaded with about 70,000 human cDNA-molecules.

[0153] The prepared and labelled samples were hybridized with the membrane filter according to the RZPD's instructions and subsequently washed. The radioactive signals were analyzed after 24 hours of exposition in a phosphorimager.

Analysis

[0154] The analysis of the gene expression data from the radioactively labelled filters bases on the measurement of the dye intensities in the digitalized picture. This is achieved by the definition of circular areas over all 57600 spot positions, in which the pixel intensities are integrated. The areas are automatically positioned as accurately as possible over the spots by means of the analysis software (AIDA Array Evaluation, raytest Isotopenmessgeräte GmbH).

[0155] In addition to the desired information, namely the amount of nucleic acids bound, contain the detected signals also background signals which are caused by unspecific bindings to the surface of the membrane. In order to eliminate these influences, the background signals are determined in 4608 empty areas of the filter and subtracted as background noise from the hybridization signals.

[0156] In order to render the values of different filters comparable, it is necessary to normalize the data afterwards. Due to the high number of spots on the filter, the mean value of all expression values is set as normalization reference. Further, it is necessary to exclude minor spot signals (lower than 10% of the average expression signal), as these are subject to a percentually high error, and would lead to considerable variations of the results when used later on for calculations.

[0157] The selection of the genes relevant to SIRS bases on the comparison of the gene expression values in a control person not suffering from SIRS compared to the patient suffering from SIRS. The criteria for the grading of the examined genes is the level of the expression ratio. When comparing the genes of the patients with those of the control, the genes, that were significantly overexpressed or underexpressed, respectively, are the interesting ones.

[0158] Table 5 shows that there were 24 genes found in the patient sample, which were significantly overexpressed, if compared with the control sample. Table 6 shows that there were 24 genes found in the patient sample, which were significantly underexpressed, if compared with the control sample. Those results show that the genes listed in table 5 and table 6 correlate with the occurrence of SIRS. Thus, the genes mentioned are leading genes for the diagnosis of SIRS.

TABLE 5
Significantly increased transcription activities and
their relative ratio to the control sample in SIRS

| GenBank | | | | | SEQUENCE- |
|---|---|---|---|---|---|
| Accession No. | HUGO Name | Patient 1: | Patient 2: | Patient 3: | ID |
| R33626 | TFAP2A | 57.57 | 30.43 | 96.57 | 6507 |
| N54839 | CRSP3 | 47.17 | 29.00 | 63.17 | 6552 |
| AA010908 | LCAT | 32.90 | 15.00 | 18.60 | 6561 |
| R59573 | TU12B1 | 85.50 | 60.50 | 49.00 | 6570 |
| R65820 | GEF | 38.00 | 45.80 | 78.00 | 6594 |
| N30458 | NCL | 26.57 | 20.00 | 17.86 | 6624 |
| H86783 | RINZF | 43.33 | 17.00 | 31.33 | 6646 |
| R11676 | CDC20 | 30.75 | 52.00 | 55.25 | 6672 |
| H79834 | SLC20A2 | 16.56 | 14.33 | 27.44 | 6681 |
| H05746 | SLC12A5 | 70.78 | 20.00 | 17.22 | 6685 |
| N21112 | ARHGEF12 | 62.00 | 14.50 | 27.00 | 6693 |
| R71085 | PCANAP7 | 23.00 | 17.63 | 21.96 | 6697 |
| R40287 | NIN283 | 35.00 | 28.00 | 28.00 | 6703 |
| H52708 | PDE2A | 32.78 | 14.11 | 59.22 | 6723 |
| AF086381 | GNPAT | 18.94 | 19.75 | 25.63 | 6725 |
| W57892 | FN1 | 23.61 | 14.67 | 17.06 | 6753 |
| H75516 | KIN | 19.23 | 17.15 | 20.00 | 6761 |
| R59212 | MN1 | 19.65 | 16.65 | 18.61 | 6776 |
| H62284 | CMAH | 23.40 | 36.20 | 32.40 | 6793 |
| W16423 | GCMB | 23.83 | 45.67 | 21.00 | 6818 |
| N40557 | U5 | 55.78 | 20.67 | 22.11 | 6826 |
| H52695 | DDC | 14.80 | 13.70 | 22.30 | 6844 |
| R68244 | HMG14 | 15.81 | 23.19 | 27.56 | 6865 |
| R34679 | ITGB8 | 19.20 | 32.00 | 79.20 | 6874 |

[0159] TABLE 6
Significantly reduced transcription activities and
their relative ratio to the control sample in SIRS

| GenBank | | | | | SEQUENCE- |
|---|---|---|---|---|---|
| Accession No. | HUGO Name | Patient 1: | Patient 2: | Patient 3: | ID |
| H18595 | RPL10A | 0.03 | 0.07 | 0.15 | 6553 |
| N90220 | DGUOK | 0.04 | 0.07 | 0.12 | 6574 |
| R19651 | H19 | 0.09 | 0.07 | 0.19 | 6701 |
| R52108 | UBE2D2 | 0.13 | 0.07 | 0.02 | 6741 |
| R83836 | LYN | 0.07 | 0.03 | 0.18 | 6759 |
| H04648 | CSF2RB | 0.06 | 0.07 | 0.13 | 6767 |
| H27730 | PPP2R1B | 0.09 | 0.07 | 0.16 | 6788 |
| N70020 | PRO2822 | 0.10 | 0.04 | 0.11 | 6794 |
| N52437 | CHI3L2 | 0.07 | 0.08 | 0.16 | 6812 |
| W96179 | GCLM | 0.04 | 0.01 | 0.19 | 6822 |
| H42506 | GABARAP | 0.08 | 0.03 | 0.17 | 6842 |
| H66258 | SCP2 | 0.10 | 0.05 | 0.21 | 6846 |
| N38985 | RAP140 | 0.10 | 0.06 | 0.21 | 6896 |
| N73912 | TMP21 | 0.09 | 0.07 | 0.08 | 6905 |
| N51024 | TEGT | 0.08 | 0.06 | 0.07 | 6909 |
| R99466 | EEF1A1 | 0.07 | 0.02 | 0.14 | 7008 |
| R14080 | CAMLG | 0.11 | 0.02 | 0.18 | 7034 |
| W93782 | XPC | 0.12 | 0.05 | 0.21 | 7036 |
| N91584 | RPS6 | 0.06 | 0.05 | 0.12 | 7353 |
| W52982 | PIG7 | 0.05 | 0.07 | 0.10 | 7412 |
| AA033725 | KLF8 | 0.06 | 0.08 | 0.19 | 7535 |
| N20406 | SRP14 | 0.10 | 0.04 | 0.16 | 7565 |
| T83104 | TAF2F | 0.02 | 0.05 | 0.12 | 7630 |
| H79277 | CASP8 | 0.12 | 0.06 | 0.13 | 7677 |

[0160] These characteristic changes can be used for the method according to the present invention.

[0161] In the appended sequence listing (SEQ. ID No: 6373 to SEQ. ID No: 10540), which is part of the present invention, the gene bank accession numbers indicated in tables 5 and 6 (access via internet via http://www.ncbi.nlm.nih.gov/) of the individual sequences are each allocated to one sequence ID.

### Embodiment 3

### Sepsis

[0162] Study of the gene expression of one patient suffering from an early sepsis and one control sample.

[0163] The gene expression of one case of an early sepsis and one control sample were measured. The patient's data are summarized in table 7.

TABLE 7
Data of the samples of patients and controls

| | | | | | | | | Apache | | |
|---|---|---|---|---|---|---|---|---|---|---|
| | Gen- | Age | Weight/ | | Intercurrent | | | Score | SAPS II | Selection of |
| | der | [a] | Height | Main diagnosis | diagnosis | Operations | Indication | [point] | [point] | clinical data |
| Patient | male | 70 | 78 kg/ | septic shock | intestine-, | 1. Anastomotic- | Sepsis/ | 19 | 64 | temperature: 35.2° C. |
| | | | 178 cm | after caecum | instable | and sigma re- | septic | | | heart rate: 97/min |
| | | | | perforation and | sternum | resection, rectum | shock | | | MAP 1: 62 mmHg; |
| | | | | post operative | | dead end | | | | art. PH: 7.29 |
| | | | | anastomotic leak | | blockage | | | | Na: 135 mmol/l; |
| | | | | | | 2. Punctation | | | | Creatine: 757 mmol/l; |
| | | | | | | tracheotomy | | | | Cholesterol: - |
| | | | | | | (Griggs) | | | | Breathing rate: 16/min |
| | | | | | | 3. re-wiring | | | | Syst. BP: 105 mmHg; |
| | | | | | | 4. subtotal | | | | Haematocrit: 33% |
| | | | | | | hemiclolectomy | | | | Total number of |
| | | | | | | right side | | | | leucocytes: 13100 |
| | | | | | | 5. definitive | | | | Urea: 19 mmol/l; |
| | | | | | | ileostomy | | | | Diast. BP: 40 mmHg; |
| | | | | | | surgery | | | | PaO2: 12.3 kPa; |
| | | | | | | | | | | K: 4.2 mmol/l; |
| | | | | | | | | | | Bilirubin: 15.1 mmol/l; |
| Control | male | 35 | 90 kg/ | Fracture of the | small hygroma | 1. Craniotomy | Intacranial | 1 | 12 | Temp: 38.8° C. |
| | | | 180 cm | skull, scalp | on both sides | and definite | bleeding | | | heart rate: 84/min |
| | | | | haematoma | | haemostasis | | | | MAP 1: 72 mmHg; |
| | | | | | | | | | | art. PH: 7.42/l |
| | | | | | | | | | | Na: 140 mmol |
| | | | | | | | | | | Creatine: 56 μmol/l; |
| | | | | | | | | | | Breathing rate: 13/min |
| | | | | | | | | | | Syst. BD: 107 mmHg; |
| | | | | | | | | | | Haematocrit: 37% |
| | | | | | | | | | | HCO3: 28.2 mmol/l; |
| | | | | | | | | | | Total number of |
| | | | | | | | | | | leucocytes: 12600 |
| | | | | | | | | | | Urea: 4.7 mmol/l; |
| | | | | | | | | | | Diast. Syst. BD: 54 |
| | | | | | | | | | | mmHg; |
| | | | | | | | | | | PaO2: 10.9 kPa; |
| | | | | | | | | | | K: 3.8 mmol/l; |
| | | | | | | | | | | Bilirubin: 13.4 mmol/l; |

[0164] After the whole blood had been drawn, the total RNA was isolated using RNAeasy according to the producer's (Quiagen) instructions. Subsequently, the cDNA was synthesized from the total RNA by means of reverse transcriptions with Superscript II RT (Invitrogen), labelled with ³³P, according to the producer's instructions, and hydrolyzed.

[0165] For the hybridization membrane filters of the Deutschen Ressourcenzentrum für Genomforschung GmbH (RZPD) were used. This membrane filter was loaded with about 70,000 humane cDNA-molecules.

[0166] The prepared and labelled samples were hybridized by means of the membrane filter according to the RZPD's instructions and subsequently washed. The radioactive signals were analyzed after 24 hours of exposition in a phosphorimager.

[0167] The expression ratios of the samples of the patients and the control were calculated from the signal intensities using the AIDA Array Evaluation software.

[0168] Table 8 shows that 230 genes of the patient sample were found, which were significantly overexpressed (expression ratios between 13.67 and 98.33), if compared with the control sample. Table 3 further shows that 206 genes of the patient sample were found, which were significantly underexpressed (expression ratios between 0.01 and 0.09), if compared with the control sample. Those results show that the genes listed in table 2 and table 3 correlate with the occurrence of SIRS. Thus, the genes mentioned are leading genes for the diagnosis of an early sepsis.

TABLE 8
Expression ratio of overexpressed genes
of samples of patients and controls

| GenBank | | | |
|---|---|---|---|
| Gene Bank | | Expression ratio of | |
| Accession | | overexpressed genes | SEQUENCE- |
| No. | HUGO Name | compared to control | ID |
| | FLJ20623 | 90.13 | 325 |
| AI272878 | FGF20 | 73.48 | 268 |
| AI218453 | FLJ22419 | 48.8 | 294 |
| AI473374 | SPAM1 | 42.63 | 235 |
| AI301232 | PRG4 | 36.79 | 262 |
| AI452559 | FLJ13710 | 32 | 240 |
| AI339669 | FLJ21458 | 31 | 248 |
| AI142427 | CGRP-RCP | 30 | 331 |
| AA505969 | LOC56994 | 26.67 | 486 |
| AI333774 | AGM1 | 26.19 | 251 |
| W86875 | PSEN1 | 25.66 | 903 |
| AI591043 | NR2E3 | 25 | 196 |
| AI128812 | RBM9 | 23.56 | 324 |
| AA453019 | FLJ21924 | 23.07 | 672 |
| AI690321 | KCNK15 | 22.71 | 134 |
| AA918208 | ADAM5 | 21.83 | 363 |
| AI344681 | ABCA1 | 21.42 | 259 |
| AI654100 | KIAA0610 | 21.04 | 168 |
| AI086719 | FLJ12604 | 20.95 | 326 |
| AA453038 | LOC63928 | 20.74 | 671 |
| AI740697 | SP3 | 20.5 | 114 |
| AI332438 | KIAA1033 | 20.17 | 253 |
| AI734941 | MSR1 | 19.93 | 116 |
| AA541644 | PRV1 | 19.51 | 489 |
| AA513806 | C5ORF3 | 19.3 | 485 |
| AI381513 | B4GALT7 | 18.81 | 273 |
| AI671360 | SIM1 | 18.55 | 154 |
| AI624830 | SAGE | 17.54 | 187 |
| AI001846 | KIAA0480 | 17.54 | 358 |
| AA504336 | TRAP95 | 17.25 | 495 |
| AI142901 | IMPACT | 17.15 | 330 |
| AI077481 | SEMA5B | 17.13 | 327 |
| H41851 | TNFRSF12 | 17.05 | 1511 |
| AI160574 | FLJ23231 | 17 | 314 |
| AI033829 | KIF13B | 16.59 | 339 |
| AI554655 | HLALS | 16.59 | 219 |
| AI074113 | LOC51095 | 16.4 | 328 |
| AA992716 | KIAA1377 | 16.14 | 348 |
| AI382219 | SETBP1 | 16.08 | 272 |
| AI469528 | KIAA1517 | 15.89 | 232 |
| AI090008 | NFYB | 15.76 | 349 |
| AI203498 | WRN | 15.72 | 310 |
| AI832179 | HPGD | 15.66 | 65 |
| AI278521 | SPRR3 | 15.61 | 265 |
| AA909201 | FLJ23129 | 15.12 | 361 |
| AI383932 | ZNF214 | 14.98 | 269 |
| AA455096 | MDM1 | 14.9 | 652 |
| AA953859 | NOL4 | 14.68 | 363 |
| R56800 | GDF1 | 14.67 | 1755 |
| AI676097 | FCER1A | 14.54 | 151 |
| AI380703 | KIAA1268 | 14.51 | 275 |
| AI832086 | RTKN | 14.51 | 66 |
| AI125328 | FLJ22490 | 14.33 | 317 |
| AI056693 | LOC57115 | 14.3 | 329 |

[0169] TABLE 9
Expression ratio of underexpressed genes
of samples of patients and controls

| GenBank | | Expression ratio of | |
|---|---|---|---|
| Accession | | underexpressed genes | SEQUENCE- |
| No. | Hugo Name | compared to control | ID |
| R15296 | C9ORF9 | 0.01 | 2050 |
| AA609149 | FLJ10058 | 0.01 | 375 |
| AI566451 | KAI1 | 0.01 | 211 |
| AI334246 | PDCD7 | 0.01 | 250 |
| H38679 | NXPH3 | 0.01 | 1477 |
| AI696866 | KIAA1430 | 0.01 | 130 |
| AI922915 | FLJ00012 | 0.01 | 23 |
| AI889612 | KPNA6 | 0.01 | 46 |
| AI921695 | FLJ23556 | 0.02 | 26 |
| AA410933 | HRH1 | 0.02 | 764 |
| AA705423 | LOC57799 | 0.02 | 383 |
| AI206507 | RAD54B | 0.02 | 298 |
| AI921327 | MED6 | 0.02 | 28 |
| AI682701 | VNN1 | 0.02 | 146 |
| H82822 | METAP2 | 0.02 | 1352 |
| AI890612 | MAGE1 | 0.02 | 42 |
| AI262169 | ALDOB | 0.02 | 257 |
| H44908 | C21ORF51 | 0.02 | 1502 |
| AI572407 | FLJ22833 | 0.02 | 203 |
| AI924869 | STX4A | 0.02 | 19 |
| AI925556 | AF140225 | 0.02 | 12 |
| AI798388 | KIAA0912 | 0.03 | 95 |
| AI623978 | SCEL | 0.03 | 188 |
| AI889598 | MLYCD | 0.03 | 47 |
| AI889648 | PAWR | 0.03 | 45 |
| AI431323 | AREG | 0.03 | 237 |
| AA446611 | CDH6 | 0.03 | 706 |
| AI697365 | P53DINP1 | 0.03 | 129 |
| H82767 | VAMP3 | 0.03 | 1353 |
| AI688916 | FLJ10933 | 0.03 | 137 |
| AI888660 | FLJ11506 | 0.03 | 51 |
| AI890314 | RAB6B | 0.03 | 43 |
| AI653893 | LAMA5 | 0.03 | 169 |
| R89811 | HGFAC | 0.03 | 1462 |
| AI863022 | MAGEA4 | 0.04 | 59 |
| AA749151 | XPOT | 0.04 | 378 |
| AI355007 | ITPKB | 0.04 | 246 |
| AI582909 | MESDC2 | 0.04 | 201 |
| AI832016 | APOL1 | 0.04 | 67 |
| H11827 | THOP1 | 0.04 | 1597 |
| AI560205 | KIAA1841 | 0.04 | 216 |
| AA503092 | UMPH1 | 0.04 | 490 |
| AI932616 | FLJ22294 | 0.04 | 5 |
| AI799137 | FLJ11274 | 0.04 | 93 |
| AI686838 | SARDH | 0.04 | 142 |
| AI623132 | SREC | 0.04 | 189 |
| R96713 | DKFZP434A0131 | 0.04 | 1442 |
| AI674926 | LBC | 0.04 | 152 |
| AI886302 | HRI | 0.04 | 53 |
| AI434650 | MGC2560 | 0.04 | 238 |
| AI631380 | GNG4 | 0.04 | 180 |
| AA508868 | ORC6L | 0.04 | 491 |
| AI620374 | HP1-BP74 | 0.04 | 190 |
| AI679115 | KIAA1353 | 0.04 | 148 |
| AA652703 | MRPL49 | 0.04 | 386 |
| AI355775 | CDK3 | 0.04 | 245 |

[0170] These characteristic alterations can be used in particular for the method of the present invention.

[0171] In the appended sequence listing, which is part of the present invention, the gene bank accession numbers (access via internet via http://www.ncbi.nlm.nih.gov/) indicated in tables 8 and 9 of the individual sequences are each allocated to one sequence ID.

Implementation:

[0172] Preparation of RNA. The conditioned media were removed from the culture flasks and the adherent cells were lysed directly in the culture flasks using TRIzol-reagent (GIBCO/BRL) according to the producer's instructions. One deproteinization cycle was carried out and afterwards, the RNA was precipitated by adding isopropyl alcohol, afterwards rinsed with ethyl alcohol, and again solved in 200 μl RNA-save resuspension solution (Ambion, Austin, Tex.). The RNA preparations were degraded with 0.1 units/μl DNase I, in DNase 1 buffer from CLONTECH. Additionally, proteins were removed from the RNA units in an alcohol mixture comprising phenol, chloroform and isoamyl alcohol, precipitated by adding ethyl alcohol, and solved in 50-100 μl RNA-save resuspension solution. The RNA concentration was spectro-photometrically determined, provided that 1A₂₆₀ corresponds to a concentration of 40 μg/ml. The samples were adapted to a final concentration of 1 mg/ml und stored at 80° C. No signs of deterioration of quality were observed. By means of agarose electrophoresis it was evaluated whether the RNA preparations were complete (i.e. they were not decayed into their components), here, RNA-standards (GIBCO/BRL) were used. Each of the preparations described herein contained intact RNA the 28S-, 18S- and 5S-bands of which were clearly detectable (data not given). No recognizable differences between healthy and infectious cells were determined with regard to the electrophoretically determined RNA samples.

[0173] Preparation of radioactively labelled cDNA-samples and hybridizing by means of DNA arrays. The cDNA-synthesis was carried out according to the producer's instructions using gene specific primer (CLONTECH) and [³²P]-dATP with Moloney Murine Leukemea Virus Reverse Transkriptase (SuperScript II, GIBCO/BRL). For the cDNA-synthesis, the same amounts of RNA (5 μg) were used from each sample.

Alternative

[0174] RNA was extracted from the tissue samples by means of guanidinium thiocyanate and afterwards centrifuged in CsCl as described [19]. The RNA was extracted according to the producer's instructions from the cell lines with RNAzol (Biotex Laboratories, Houston). The poly(A) RNA was isolated from 500 μg RNA by means of DynaBeads (Dynal, Oslo), as described in the producer's recommendations.

[0175] The differences in the gene expression were examined using Atlas Array membranes (CLONTECH). A first short step was the transcription of 1 μg RNA of each cell line in [−³²P]dATP-labelled cDNA at a time.

Analysis

[0176] The analysis of the gene expression data from the radioactively labelled filters bases on the measurement of the dye intensities in the digitalized picture. This is achieved by the definition of circular areas over all 57600 spot positions, in which the pixel intensities are integrated. The areas are automatically positioned as accurately as possible over the spots by means of the analysis software (AIDA Array Evaluation, raytest Isotopenmessgeräte GmbH).

[0177] In addition to the desired information, namely the amount of nucleic acids bound, contain the detected signals also background signals which are caused by unspecific bindings to the surface of the membrane. In order to eliminate these influences, the background signals are determined in 4608 empty areas of the filters and subtracted as background noise from the hybridization signals.

[0178] It is possible to distinguish between punctual signals that are caused on the filter by dust particles or other disturbances instead of binding of nucleic acids, and real spots, due to their irregular form, and the punctual signals are excepted from further analysis.

[0179] In order to render the values of different filters comparable, it was necessary to normalize the data afterwards. Due to the high number of spots on the filter, the mean value of all expression values is set as normalization reference. Further, it is necessary to exclude minor spot signals (lower than 10% of the average expression signal), as these are subject to a percentually high error, and would lead to considerable variations of the results when used later on for calculations.

[0180] The selection of the genes relevant to SIRS/sepsis bases on the comparison of the gene expression values in a control person without SIRS/sepsis compared to one patient at a time suffering from sepsis/SIRS. The criteria for the grading of the examined genes is the level of the expression ratio. The interesting genes are those which were most overexpressed or underexpressed, respectively, in the patients compared with the control.

### Embodiment 4

### Sepsis

[0181] Study of the protein expression of one patient suffering from sepsis and one control sample.

[0182] The protein expression of one case of sepsis and one control sample were measured. The patients' data are summarized in table 10.

TABLE 10
Data of the samples of patients and controls

| | | Age | | Main | |
|---|---|---|---|---|---|
| | Gender | [a] | Weight/Height | diagnosis | Intercurrent diagnosis |
| Control | female | 21 | 62 kg/167 cm | cranio- | Generalized cerebral oedema, brain stem contusion, |
| | | | | cerebral- | fracture of the lateral orbital pillar, fracture |
| | | | | trauma | wall left side, lateral fracture of the nasal |
| | | | | | sceleton, bleeding into the right side ventricle, |
| | | | | | free air intracraniellfrontally left side, ethmoid |
| | | | | | bone fracture, fracture of the front pelvic ring with |
| | | | | | impression and dislocation of the fragments, fracture |
| | | | | | of the massa lateralis of the OS sacrum right side |
| | | | | | in the heigh of S1/S2, clavikular fracture left side |
| Patient | male | 59 | 70 kg/175 cm | septic shock | pleural effusions on both sides, multi organ failure, |
| | | | | after | multiple necrosis of the acra and pretibial on both |
| | | | | perforation of | sides, arterial microembolism, arterial thrombosis, |
| | | | | one ulcus | secundary thrombocytopenia, acute kidney failure |
| | | | | pylori and | |
| | | | | subsequent 4 | |
| | | | | quadrant | |
| | | | | peritonitis | |

| | | | Apache | | |
|---|---|---|---|---|---|
| | | | Score | SAPS II | |
| | Operations | Indication | [point] | [point] | Selection of clinical data |
| Control | none | not applicable | 21 | — | temperature: 35.3° c. |
| | | | | | heart rate: 146/min |
| | | | | | map 1: 68 mmhg; art. ph: 7.48 |
| | | | | | na: 145 mmol/l; ceratine: 52 μmol/l; |
| | | | | | syst. bp: 94 mmhg; diast. bp: 56 mmhg; |
| | | | | | haematocrit: 0.26% |
| | | | | | total number of leucocytes: 9200 |
| | | | | | urea: 7.1 mmol/l; |
| | | | | | k: 5 mmol/l; |
| | | | | | bilirubin: 11.1 mmol/l; |
| Patient | relaparotomy, | septic shock | 28 | 74 | temperature: 37.7° c. |
| | lavage, and partial | | | | heart rate: 139/min |
| | resection of the | | | | map 1: 64 mmhg; art. ph: 7.15 |
| | omentum | | | | na: 142 mmol/l, ceratine: 187 mmol/l; |
| | | | | | breathing rate: 19/min |
| | | | | | syst. bp: 99 mmhg; diast. bp: 49 |
| | | | | | mmhg; haematocrit: 24% |
| | | | | | hco3: 13.7 mmol/l, total number of |
| | | | | | leucocytes: 5200 |
| | | | | | urea: 27.6 mmol/l; |
| | | | | | pao2!: 13.2 kpa, k: 5.3 mmol/l; |
| | | | | | bilirubin: 33.9 mmol/l; |
| | | | | | urine: 110 ml, 14 h |

[0183] Whole blood was drawn and inserted into a serum tube and centrifugation (5500 rcf; 10 min; 4° C.) was carried out. The supernatant of serum was transferred into cryo tubes immediately upon centrifugation and stored at −35° C.

[0184] To downgrade the albumin, the serum was treated with Affi-Gel Blue Affinity Chromatography Gel for Enzyme and Blood Protein Purifications (Bio-Rad) according to the producer's instructions. To avoid undesired interactions of protein and matrix, the equilibration- and binding buffer were added 400 mM NaCl.

[0185] Non-binding proteins were collected and precipitated with methanol and chloroform according to the protocol of Wessel and Flügge (Anal. Biochem. 1984 April; 138(1): 141-3). 250 microgram of precipitated serum protein were added to a solution consisting of 8M urea; 2.0 M thiourea; 4% CHAPS; 65 mM DTT and 0.4% (w/v) Bio-Lytes 3/10 (Bio-Rad) and subjected to an isoelectric focusing as well as a subsequent SDS-PAGE.

### SDS-PAGE

[0186] K4 in FIG. 1 and in FIG. 2 is the acute phase protein transthyretin (TTR; P02766, SEQ. ID 6241, SEQ. ID 6242) and K5 and K6 are the vitamin D-binding protein (DBP; P02774, SEQ. ID 1554, SEQ. ID 1555).

[0187] The gels can be produced as follows (Cibacron FT, W1-W3, 400 mM NaCl, IEF pH 3-10, Coomassie):

[0188] 250 microgram of precipitated serum protein were added to a solution consisting of 8M urea; 2.0 M thiourea; 4% CHAPS; 65 mM DTT and 0.4% (w/v) Bio-Lytes 3/10 (Bio-Rad) and subjected to an isoelectric focusing as well as a subsequent SDS-PAGE.

[0189] The prepared 2-dimensional gels were colored with Coomassie Brilliant Blau G-250 and differentially expressed proteins were identified by mass spectroscopy.

[0190] A comparing analysis shows (FIG. 1, FIG. 2=that the acute phase protein transthyretin (TTR; P02766, SEQ. ID: 6241, SEQ. ID 6242), as well as the vitamin D-binding protein (DBP; P02774, SEQ. ID 1554, SEQ. ID 1555) are less expressed by the sepsis patient, if compared with the control patient.

[0191] These results clearly indicate that the protein expression or the protein composition, respectively, of serum and plasma change in the course of the disease.

### Embodiment 5

### Severe Sepsis

[0192] Studies of differential gene expression with patients suffering from severe sepsis.

[0193] Whole blood samples of patients who were under the care of a surgical intensive care unit were examined for the measurement of the differential gene expression in connection with severe sepsis.

[0194] Control samples were whole blood samples of the patients that were drawn after an uncomplicated neurosurgical operation. The patients were treated on the same intensive care unit. No one of these patients developed an infection and/or showed clinical signs of a generalized inflammatory reaction (defined according to the SIRS-criteria [4]) during the whole time of stationary treatment.

[0195] Additionally, whole blood samples were drawn from six male and two female patients (patients' samples). In the time period of 24 hours before the whole blood was drawn, each of these patients developed a new severe sepsis with organ dysfunction. A range of characteristics of the patients suffering from severe sepsis are shown in table 1. Information concerning the age, gender, the cause of the severe sepsis (see diagnosis) as well as concerning the clinical severity, measured with the APACHE-II- and SOFA-Scores (in points each), that are well documented in clinical literature, is given. Equally, the plasma protein levels of procalcitonin (PCT), a new kind of sepsis label, are given, as well as the individual survival conditions.

TABLE 11
Data of the group of patients

| | | | | Apache II | SOFA | | |
|---|---|---|---|---|---|---|---|
| | | | Classification | Score | Score | PCT | survival |
| Age | Gender | Diagnosis | according to [4] | [points] | [points] | [ng/ml] | conditions |
| 68 | female | peritonitis | severe | 17 | 4 | 269 | died |
| | | | sepsis/ | | | | |
| 39 | male | ARDS | septic shock | 17 | 11 | 0.39 | died |
| 36 | male | peritonitis | septic shock | 11 | 7 | 9.77 | survived |
| 80 | male | peritonitis | severe | 28 | 4 | 23.61 | survived |
| | | | sepsis | | | | |
| 32 | male | bacterial | septic shock | 21 | 7 | 1.69 | survived |
| | | pancreatitis | | | | | |
| 73 | male | ARDS | septic shock | 16 | 14 | 9.96 | died |
| 67 | male | ARDS | septic shock | 24 | 12 | 12.88 | survived |
| 76 | female | peritonitis | septic shock | 30 | 11 | 4.19 | died |

[0196] After the whole blood had been drawn, the total RNA was isolated using the PAXGene Blood RNS Kit according to the producer's (Qiagen) instructions. Subsequently, the cDNA was synthesized from the total RNA by means of reverse transcription with Superscript II RT (Invitrogen) according to the producer's instructions, labelled with aminoallyl-dUTP and succinimidylester of the fluorescent dyes Cy3 and Cy5 (Amersham), and hydrolyzed.

[0197] The microarrays (Lab-Arraytor human 500-1 cDNA) of the company SIRS-Lab GmbH were used for the hybridization. These micorarrays are loaded with 340 human cDNA-molecules. The 340 human cDNA-molecules are 3-fold immobilized in three subarrays on each microarray.

[0198] The prepared and labelled samples were hybridized with the microarrays according to the producer's instructions and subsequently washed. The fluorescence signals of the hybridized molecules were measured by means of a scanner (AXON 4000B).

Analysis

[0199] One test was analyzed by means of scanned pictures of the microarrays after hybridization. The mean intensity value of the detected spots were defined as the measured expression value of the corresponding gene. Spots were automatically identified by means of picture analysis and their homogeneity was checked. The analysis was controlled manually. The detected signals comprise not only the desired information, namely the amount of nucleic acids bound, but also background signals which are caused by unspecific bindings to the surface of the membrane. The definition of the signals of the background rendered an optimum differentiation between spots and the surface of the chip possible, which surface also showed color effects. For the analysis of the microarrays blank spots were chosen as background. The mean expression value of the chosen blank spots within one block (of 14 times 14 spots) was subtracted from the expression values of the gene spots (in the corresponding block).

[0200] It was possible to distinguish between punctual signals that were caused on the filter by dust particles or other disturbances instead of bindings of nucleic acids, and real spots, due to their irregular form, and the punctual signals were excepted from further analysis.

[0201] In order to render the values between the 3 subarrays and between different microarrays comparable, it was necessary to normalize the data afterwards. Due to the high number of spots on the microarray, the mean value of all expression values was set as normalization reference. The mean expression per gene was calculated by choosing the two (from three) repetitions that were closest to each other.

[0202] The expression ratios of the samples of the patients and the control were calculated from the signal intensities using the AIDA Array Evaluation software. The criterion for the grading of the examined genes was the level of the expression ratio. The interesting genes were those which were most overexpressed or underexpressed, respectively, compared with the control samples.

[0203] Table 12 shows that 41 genes of the patient sample were found, which were significantly overexpressed, if compared with the control sample. Table 13 shows that 89 genes of the patient sample were found, which were significantly underexpressed, if compared with the control sample. Those results show that the genes listed in table 12 and table 13 correlate with the occurrence of a severe sepsis. Furthermore, these results correlate with the clinical classification according to [4] as well as patients' PCT-concentrations, that are typical for the occurrence of a severe sepsis [23]. Thus, the gene activities of the genes mentioned are labels for the diagnosis of a severe sepsis.

TABLE 12
Expression ratio of overexpressed genes
of samples of patients and controls

| GenBank | | Expression ratio of | |
|---|---|---|---|
| Accession | | overexpressed genes | SEQUENCE- |
| No. | HUGO Name | compared to control | ID |
| XM_086400 | S100A8 | 4.4 | 6243 |
| XM_001682 | S100A12 | 3.03 | 6244 |
| NM_002619 | PF4 | 2.21 | 6245 |
| NM_002704 | PPBP | 1.66 | 6246 |
| NM_001101 | ACTB | 1.65 | 6247 |
| NM_001013 | RPS9 | 1.61 | 6248 |
| XM_057445 | SELP | 1.61 | 6249 |
| BC018761 | IGKC | 1.53 | 6250 |
| XM_030906 | TGFB1 | 1.51 | 6251 |
| NM_001760 | CCND3 | 1.48 | 6252 |
| XM_035922 | IL11 | 1.28 | 6253 |
| XM_039625 | DUSP10 | 1.17 | 6254 |
| XM_002762 | TNFAIP6 | 1.17 | 6255 |
| XM_015396 | ALOX5AP | 1.15 | 6256 |
| NM_003823 | TNFRSF6B | 1.15 | 6257 |
| XM_029300 | DPP4 | 1.15 | 6258 |
| NM_001562 | IL18 | 1.14 | 6259 |
| NM_005037 | PPARG | 1.11 | 6260 |
| M90746 | FCGR3B | 1.07 | 6261 |
| NM_001315 | MAPK14 | 0.99 | 6262 |
| BC001506 | CD59 | 0.88 | 6263 |
| XM_042018 | BSG | 0.88 | 6264 |
| XM_010177 | DUSP9 | 0.87 | 6265 |
| BC013992 | MAPK3 | 0.84 | 6266 |
| NM_001560 | IL13RA1 | 0.82 | 6267 |
| NM_004555 | NFATC3 | 0.74 | 6268 |
| NM_001154 | ANXA5 | 0.73 | 6269 |
| NM_001310 | CREBL2 | 0.7 | 6270 |
| XM_036107 | ITGB2 | 0.65 | 6271 |
| XM_009064 | JUNB | 0.65 | 6272 |
| NM_001774 | CD37 | 0.62 | 6273 |
| XM_049849 | TNFRSF14 | 0.6 | 6274 |
| NM_003327 | TNFRSF4 | 0.57 | 6275 |
| BC001374 | CD151 | 0.56 | 6276 |
| XM_051958 | ALOX5 | 0.56 | 6277 |
| NM_021805 | SIGIRR | 0.5 | 6278 |
| NM_017526 | HSOBRGR | 0.48 | 6279 |
| XM_011780 | DAPK1 | 0.46 | 6280 |
| NM_006017 | PROML1 | 0.44 | 6281 |
| D49410 | IL3RA | 0.43 | 6372 |
| XM_027885 | RPL13A | 0.33 | 6282 |

[0204] TABLE 13
Expression ratio of underexpressed genes
of samples of patients and controls

| GenBank | | Expression ratio of | |
|---|---|---|---|
| Accession | | underexpressed genes | SEQUENCE- |
| No. | HUGO Name | compared to control | ID |
| NM_007289 | MME | −2.11 | 6283 |
| XM_008411 | SCYA13 | −2.06 | 6284 |
| XM_055188 | ENG | −2.01 | 6285 |
| NM_021073 | BMP5 | −1.99 | 6286 |
| XM_007417 | TGFB3 | −1.93 | 6287 |
| NM_001495 | GFRA2 | −1.88 | 6288 |
| XM_009475 | AHCY | −1.86 | 6289 |
| XM_006738 | CD36L1 | −1.86 | 6290 |
| NM_001772 | CD33 | −1.86 | 6291 |
| NM_057158 | DUSP4 | −1.83 | 6292 |
| XM_058179 | CD244 | −1.77 | 6293 |
| NM_001770 | CD19 | −1.75 | 6294 |
| NM_004931 | CD8B1 | −1.73 | 6295 |
| XM_006454 | CD3G | −1.71 | 6296 |
| XM_041847 | TNF | −1.65 | 6297 |
| NM_145319 | MAP3K6 | −1.62 | 6298 |
| XM_045985 | ITGA2B | −1.61 | 6299 |
| XM_055756 | TIMP1 | −1.61 | 6300 |
| NM_004740 | TIAF1 | −1.61 | 6301 |
| XM_008432 | ITGA3 | −1.57 | 6302 |
| XM_034770 | PAFAH1B1 | −1.56 | 6303 |
| NM_014326 | DAPK2 | −1.55 | 6304 |
| XM_043864 | PIK3R1 | −1.49 | 6305 |
| U54994 | CCR5 | −1.49 | 6306 |
| NM_004089 | DSIPI | −1.49 | 6307 |
| XM_037260 | F2R | −1.45 | 6308 |
| NM_172217 | IL16 | −1.45 | 6309 |
| AF244129 | LY9 | −1.45 | 6310 |
| NM_003775 | EDG6 | −1.43 | 6311 |
| NM_001781 | CD69 | −1.41 | 6312 |
| NM_019846 | CCL28 | −1.39 | 6313 |
| NM_001511 | CXCL1 | −1.38 | 6314 |
| NM_006505 | PVR | −1.33 | 6315 |
| NM_000075 | CDK4 | −1.33 | 6316 |
| XM_042066 | MAP3K1 | −1.32 | 6317 |
| NM_003242 | TGFBR2 | −1.31 | 6318 |
| NM_003874 | CD84 | −1.31 | 6319 |
| XM_033972 | ATF6 | −1.3 | 6320 |
| XM_001840 | PLA2G2A | −1.3 | 6321 |
| NM_018310 | BRF2 | −1.29 | 6322 |
| AF212365 | IL17BR | −1.25 | 6323 |
| XM_056798 | CD81 | −1.25 | 6324 |
| NM_000061 | BTK | −1.24 | 6325 |
| XM_001472 | JUN | −1.23 | 6326 |
| XM_007258 | TNFAIP2 | −1.23 | 6327 |
| XM_048555 | IFNAR2 | −1.23 | 6328 |
| XM_041060 | FOS | −1.23 | 6329 |
| XM_056556 | TNFSF7 | −1.23 | 6330 |
| XM_016747 | LTBP1 | −1.22 | 6331 |
| XM_006953 | TNFRSF7 | −1.21 | 6332 |
| NM_015927 | TGFB1I1 | −1.19 | 6333 |
| XM_010807 | INHBB | −1.16 | 6334 |
| NM_002184 | IL6ST | −1.14 | 6335 |
| XM_008570 | VAMP2 | −1.13 | 6336 |
| NM_006856 | ATF7 | −1.1 | 6337 |
| NM_000674 | ADORA1 | −1.09 | 6338 |
| NM_000173 | GP1BA | −1.08 | 6339 |
| XM_048068 | SCYD1 | −1.07 | 6340 |
| NM_022162 | CARD15 | −1.07 | 6341 |
| NM_001199 | BMP1 | −1.02 | 6342 |
| NM_000960 | PTGIR | −1.01 | 6343 |
| XM_012039 | FUT4 | −0.99 | 6344 |
| XM_034166 | NOS2A | −0.99 | 6345 |
| NM_003188 | MAP3K7 | −0.98 | 6346 |
| NM_006609 | MAP3K2 | −0.98 | 6347 |
| XM_027358 | PCMT1 | −0.95 | 6348 |
| XM_007189 | FOXO1A | −0.93 | 6349 |
| XM_030523 | MAP3K8 | −0.92 | 6350 |
| XM_002923 | CCR2 | −0.88 | 6351 |
| XM_054837 | TNFRSF1B | −0.87 | 6352 |
| NM_000634 | IL8RA | −0.87 | 6353 |
| NM_004590 | CCL16 | −0.86 | 6354 |
| XM_012717 | CSNK1D | −0.86 | 6355 |
| XM_012649 | SCYA7 | −0.84 | 6356 |
| XM_008679 | TP53 | −0.84 | 6357 |
| XM_030509 | PTGIS | −0.83 | 6358 |
| XM_039086 | CDW52 | −0.82 | 6359 |
| XM_027978 | CFLAR | −0.81 | 6360 |
| NM_005343 | HRAS | −0.79 | 6361 |
| XM_043574 | DAP3 | −0.78 | 6362 |
| NM_002188 | IL13 | −0.77 | 6363 |
| XM_055699 | ENTPD1 | −0.72 | 6364 |
| NM_000565 | IL6RA | −0.67 | 6365 |
| NM_002211 | ITGB1 | −0.65 | 6366 |
| XM_049864 | CSF3 | −0.63 | 6367 |
| XM_045933 | CAMKK2 | −0.63 | 6368 |
| NM_033357 | CASP8 | −0.55 | 6369 |
| XM_008704 | DNAM-1 | −0.52 | 6370 |
| NM_030751 | TCF8 | −0.5 | 6371 |

[0205] It is for example possible to take advantage of these characteristic changes in the method of the present invention.

[0206] In the appended sequence listing, which is part of the present invention, the gene bank accession numbers (access via internet via http://www.ncbi.nlm.nih.gov/) indicated in tables 12 and 13 of the individual sequences are each allocated to one sequence ID. (SEQ. ID No.: 6243 to SEQ. ID No. 6372). The following sequence listing is part of the present invention.

### REFERENCES

[0207] 1. Natanson C, Hoffmann W D, Suffredini A, Eichacker P Q, and Danner R L: Selected treatment strategies for septic shock based on proposed mechanisms of pathogenesis. Ann Intern Med 1994; 120:771-783
[0208] 2. Danner R L, Elin R J, Hosseini J M, Wesley R A, Reilly J M, Parillo J E: Endotoxemia in human septic shock. Chest 1991; 99: 169-175
[0209] 3. Niederman M S, Fein A M: sepsis syndrome, the adult respiratory distress syndrome, and nosocomial pneumonia. A common clinical sequence. Clin Chest Med 1990; 11: 633-656
[0210] 4. American College of Chest Physicians/Society of Critical Care Medicine Consensus Conference: definitions for sepsis and organ failure and guidelines for the use of innovative therapies in sepsis. Crit Care Med 1992; 20: 864-874
[0211] 5. Brun-Buisson C, Doyon F, Carlet J, Dellamonica P, Gouin F, Lepoutre A, Mercier J C, Offenstadt G, Regnier B: Incidence, risk factors, and outcome of severe sepsis and septic shock in adults. A multicenter prospective study in intensive care units. French ICU Group for Severe Sepsis. JAMA 1995; 274: 968-974
[0212] 6. Le-Gall J R, Lemeshow S, Leleu G, Klar J, Huillard J, Rue M, Teres D, Artigas A: Customized probability models for early severe sepsis in adult intensive care patients. Intensive Care Unit Scoring Group. JAMA 1995; 273: 644-650
[0213] 7. Increase in National Hospital Discharge Survey rates for septicemia—United States, 1979-1987. MMWR Morb Mortal Wkly Rep 1990; 39: 31-34
[0214] 8. Pittet D, Tarara D, Wenzel R P: Nosocomial bloodstream infection in critically ill patients. Excess length of stay, extra costs, and attributable mortality. JAMA 1994; 271: 1598-1601
[0215] 9. Vincent J L, Angus D, Annane D, et al. (2001) Clinical expert round table discussion (session 5) at the Margaux Conference on Critical Illness: outcomes of clinical trials in sepsis: lessons learned. Crit Care Med 29:S136-137.
[0216] 10. Southern E M (1974) An improved method for transferring nucleotides from electrophoresis strips to thin layers of ion-exchange cellulose. Anal Biochem 62:317-318
[0217] 11. Gillespie D, Spiegelman S (1965) A quantitative assay for DNA-RNA hybrids with DNA immobilized on a membrane. J Mol Biol 12:829-842
[0218] 12. Lennon G G, Lehrach H (1991) Hybridization analyses of arrayed cDNA libraries. Trends Genet 7: 314-317
[0219] 13. Kafatos F C, Jones C W, Efstratiadis A (1979) Determination of nucleic acid sequence homologies and relative concentrations by a dot hybridization procedure. Nucl Acid Res 7:1541-1552
[0220] 14. Fodor S P, Read J L, Pirrung M C, Stryer L, Lu A T, Solas D (1991) Light-directed, spatially addressable parallel chemical synthesis. Science 251:767-773
[0221] 15. Pease A C, Solas D, Sullivan E J, Cronin M T, Holmes C P, Fodor SP (1994) Light-generated oligonucleotide arrays for rapid DNA sequence analysis. Proc Natl Acad Sci USA 91:5022-5026
[0222] 16. Schena M, Shalon D, Davis R W, Brown P O (1995) Quantitative monitoring of gene expression patterns with a complementary DNA microarray. Science 270:467-470
[0223] 17. Golub T R, Slonim D K, Tamayo P, et al. (1999) Molecular classification of cancer: class discovery and class prediction by gene expression monitoring. Science 286:531-537
[0224] 18. Alizadeh A A, Eisen M B, Davis R E, et al. (2000) Distinct types of diffuse large B-cell lymphoma identified by gene expression profiling. Nature 403:503-511
[0225] 19. Varambally S, Dhanasekaran S M, Zhou M, et al. (2002) The polycomb group protein EZH2 is involved in progression of prostate cancer. Nature 419:624-629
[0226] 20. Fillion I, Ouellet N, Simard M, et al. (2002) Role of chemokines and formyl peptides in pneumococcal pneumonia-induced monocyte/macrophage recruitment. J. Immunol.; 166(12):7353-61.
[0227] 21. Zhao B, Bowden R A, Stavchansky S A, Bowman P D (2001) Human endothelial cell response to gram-negative lipopolysaccharide assessed with cDNA microarrays. Am J Physiol Cell Physiol. November; 281(5):C1587-95.
[0228] 22. Chinnaiyan A M, Huber-Lang M, Kumar-Sinha C et al. (2001) Molecular signatures of sepsis: multiorgan gene expression profiles of systemic inflammation. Am J Pathol. 159(4):1199-209.

1. A method for in vitro detection of acute generalized inflammatory conditions (SIRS), comprising:
isolating sample RNA from a sample of a mammal;
labelling of the sample RNA and/or at least one DNA being a gene or gene fragment specific for SIRS, with a detectable label.
contacting the sample RNA with the DNA under hybridization conditions;
contacting sample RNA representing a control for non-pathologic conditions, with at least one DNA, under hybridization conditions, whereby the DNA is a gene or gene fragment specific for SIRS;
quantitative detection of the label signals of the hybridized sample RNA and control RNA; and
comparing the quantitative data of the label signals in order to determine whether the genes or gene fragments specific for SIRS are more expressed in the sample than in the control, or less.

2. A method for in vitro detection of sepsis and/or sepsis-like conditions,
isolating of sample RNA from a sample of a mammal;
labelling of the sample RNA and/or at least one DNA being a gene or gene fragment specific for sepsis, with a detectable label.
contacting the sample RNA with the DNA under hybridization conditions;
contacting sample RNA representing a control for non-pathologic conditions, with at least one DNA, under hybridization conditions, whereby the DNA is a gene or gene fragment specific for sepsis and/or sepsis-like conditions;
quantitative detection of the label signals of the hybridized sample RNA and control RNA; and
comparing the quantitative data of the label signals in order to determine whether the genes or gene fragments specific for sepsis and/or sepsis-like conditions are more expressed in the sample than in the control, or less.

3. A method for in vitro detection of severe sepsis, comprising:
isolating of sample RNA from a sample of a mammal;
labelling of the sample RNA and/or at least one DNA being a gene or gene fragment specific for severe sepsis, with a detectable label.
contacting the sample RNA with the DNA under hybridization conditions;
contacting sample RNA representing a control for non-pathologic conditions, with at least one DNA, under hybridization conditions, whereby the DNA is a gene or gene fragment specific for severe sepsis;
quantitative detection of the label signals of the hybridized sample RNA and control RNA; and
comparing the quantitative data of the label signals in order to determine whether the genes or gene fragments specific for severe sepsis are more expressed in the sample than in the control, or less.

4. The method of claim 1, characterized in that the control RNA is hybridized with the DNA before the measurement of the sample RNA and the label signals of the control RNA/DNA-complex is gathered and, if necessary, recorded in form of a calibration curve or table.

5. The method of claim 1, characterized in that unchanged genes from sample and/or control RNA are used as reference genes for the quantification.

6. The method of claim 1, characterized in that mRNA is used as sample RNA.

7. The method of claim 1, characterized in that the DNA is arranged, particularly immobilized, on predetermined areas on a carrier in the form of a microarray.

8. The method of claim 1, characterized in that the method for early detection by means of differential diagnostics, for control of the clinical and therapeutic progress, for the individual risk evaluation in patients, for the evaluation whether the patient will respond to a specific treatment, as well as for post mortem diagnosis of SIRS and/or sepsis and/or severe sepsis and/or systemic infections and/or septic conditions and/or infections.

9. The method of claim 1, characterized in that the sample is selected from the following group: body fluids, in particular blood, liquor, urine, ascitic fluid, seminal fluid, saliva, puncture fluid, cell content, or a mixture thereof.

10. The method of claim 1, characterized in that cell samples are subjected a lytic treatment, if necessary, in order to free their cell contents.

11. The method of claim 1, characterized in that the mammal is a human.

12. The method of claim 1, characterized in that the gene or gene segment specific for SIRS is selected from the group consisting of SEQUENCE ID No. III.1 to SEQUENCE ID No. III.4168, as well as gene fragments thereof with 5-2000 or more, preferably 20-200, more preferably 20-80 nucleotides.

13. The method of claim 2, characterized in that the gene or gene segment specific for sepsis and/or sepsis-like conditions is selected from the group consisting of SEQUENCE ID No. I.1 to SEQUENCE ID No. I.6242, as well as gene fragments thereof with 5-2000 or more, preferably 20-200, more preferably 20-80 nucleotides.

14. The method of claim 3, characterized in that the gene or gene segment specific for severe sepsis is selected from the group consisting of SEQUENCE ID No. II.1 to SEQUENCE ID No. II.130, as well as gene fragments thereof with 5-2000 or more, preferably 20-200, more preferably 20-80 nucleotides.

15. The method of claim 1, characterized in that at least 2 to 100 different cDNAs are used.

16. The method of claim 1, characterized in that at least 200 different cDNAs are used.

17. The method of claim 1, characterized in that at least 200 to 500 different cDNAs are used.

18. The method of claim 1, characterized in that at least 500 to 1000 different cDNAs are used.

19. The method of claim 1, characterized in that at least 1000 to 2000 different cDNAs are used.

20. The method of claim 1, characterized in that the cDNA of SEQUENCE ID No. III.1 to SEQUENCE ID No. III.4168, SEQUENCE ID No. I.1 to SEQUENCE ID No. I.6242 and SEQUENCE ID No. II.1 to SEQUENCE ID No. II.130 replaced by synthetic analoga as well as peptidonucleic acids.

21. The method of claim 20, characterized in that the synthetic analoga of the listed genes comprise 5-100, in particular approximately 70, base pairs.

22. The method one of claim 1, characterized in that a radioactive label, in particular ³²P, ¹⁴C, ¹²⁵I, ¹⁵⁵Eu, ³³P or ³H is used as detectable label.

23. The method of claim 1, characterized in that a non-radioactive label is used as detectable label, in particular a color- or fluorescence label, an enzyme label or immune label, and/or quantum dots or an electrically measurable signal, in particular the change in potential, and/or conductivity and/or capacity by hybridizations.

24. The method of claim 1, characterized in that the sample RNA and control RNA bear the same label.

25. The method of claim 1, characterized in that the sample RNA and control RNA bear different labels.

26. The method of claim 1, characterized in that the immobilized probes bear a label.

27. The method of claim 1, characterized in that the cDNA probes are immobilized on glass or plastics.

28. The method of claim 1, characterized in that the individual cDNA molecules are immobilized on the carrier material by means of a covalent binding.

29. The method of claim 1, characterized in that the individual cDNA molecules are immobilized onto the carrier material by means of adsorption, in particular by means of electrostatic and/or dipole-dipole and/or hydrophobic interactions and/or hydrogen bridges.

30. A method for in vitro detection of SIRS, comprising:
isolating sample peptides from a sample of a mammal;
labelling of the sample peptides with a detectable label;
contacting the labelled sample peptides with at least one antibody or its binding fragment, whereby the antibody binds a peptide or peptide fragment specific for SIRS;
contacting the labelled control peptides originating from healthy subjects, with at least one antibody or its binding fragment immobilized on a carrier in form of a microarray, whereby the antibody binds a peptide or peptide fragment specific for SIRS;
quantitative detection of the label signals of the sample peptides and the control peptides;
comparing the quantitative data of the label signals in order determine whether the genes or gene fragments specific for SIRS are more expressed in the sample than in the control, or less.

31. A method for in vitro detection of sepsis and/or sepsis-like conditions, comprising:
isolating sample peptides from a sample of a mammal;
labelling of the sample peptides with a detectable label;
contacting the labelled sample peptides with at least one antibody or its binding fragment, whereby the antibody binds a peptide or peptide fragment specific for sepsis and/or sepsis-like conditions;
contacting the labelled control peptides stemming from healthy subjects, with at least one antibody or its binding fragment immobilized on a carrier in form of a microarray, whereby the antibody binds a peptide or peptide fragment specific for sepsis and/or sepsis-like conditions;
quantitative detection of the label signals of the sample peptides and the control peptides; and
comparing the quantitative data of the label signals in order to be able to determine whether the genes or gene fragments specific for sepsis and/or sepsis-like conditions are more expressed in the sample than in the control, or less.

32. A method for in vitro detection of severe sepsis, comprising:
isolating sample peptides from a sample of a mammal;
labelling of the sample peptides with a detectable label;
contacting the labelled sample peptides with at least one antibody or its binding fragment, whereby the antibody binds a peptide or peptide fragment specific for severe sepsis;
contacting the labelled control peptides originating from healthy subjects, with at least one antibody or its binding fragment immobilized on a carrier in form of a microarray, whereby the antibody binds a peptide or peptide fragment specific for severe sepsis;
quantitative detection of the label signals of the sample peptides and the control peptides; and
comparing the quantitative data of the label signals in order to determine whether the genes or gene fragments specific for severe sepsis are more expressed in the sample than in the control, or less.

33. The method of claim 30, characterized in that the antibody is immobilized on an array in form of a microarray.

34. The method of claim 30, characterized in that it is formed as immunoassay.

35. The method of claim 30, characterized in that the method is used for early detection by means of differential diagnostics, for control of the clinic and therapeutic progress, for risk evaluation for patients as well as for post mortem diagnosis of SIRS and/or sepsis and/or severe sepsis and/or systemic infections and/or septic conditions and/or infections.

36. The method of claim 30, characterized in that the sample is selected from the following group: body fluids, in particular blood, liquor, urine, ascitic fluid, seminal fluid, saliva, puncture fluid, cell content, or a mixture thereof.

37. The method of claim 30, characterized in that cell samples are subjected a lytic treatment, if necessary, in order to free their cell contents.

38. The method of claim 30, characterized in that the mammal is a human.

39. The method of claim 30, characterized in that the peptide specific for SIRS is an expression product of a gene or gene fragment selected from the group consisting of SEQUENCE ID No. III.1 to SEQUENCE ID No. III.4168, as well as gene fragments thereof with 5-2000 nucleotides or more, preferably 20-200, more preferable 20-80 nucleotides.

40. The method of claim 31, characterized in that the peptide specific for sepsis and/or sepsis-like conditions is an expression product of a gene or gene fragment selected from the group consisting of SEQUENCE ID No. I.1 to SEQUENCE ID No. I.6242, as well as gene fragments thereof with 5-2000 nucleotides or more, preferably 20-200, more preferable 20-80 nucleotides.

41. The method according to one of claim 32, characterized in that the peptide specific for severe sepsis is an expression product of a gene or gene fragment selected from the group consisting of SEQUENCE ID No. II.1 to SEQUENCE ID No. II.130, as well as gene fragments thereof with 5-2000 or more, preferably 20-200, more preferably 20-80 nucleotides.

42. The method of claim 30, characterized in that at least 2 to 100 different peptides are used.

43. The method of claim 30, characterized in that at least 200 different peptides are used.

44. The method of claim 30, characterized in that at least 200 to 500 different peptides are used.

45. The method of claim 30, characterized in that at least 500 to 1000 different peptides are used.

46. The method of claim 30, characterized in that at least 1000 to 2000 different peptides are used.

47. The method of claim 30, characterized in that a radioactive label, in particular ³²P, ¹⁴C, ¹²⁵I, ¹⁵⁵Eu, ³³P or ³H is used as detectable label.

48. The method of claim 30, characterized in that a non-radioactive label is used as detectable label, in particular a color- or fluorescence label, an enzyme label or immune label, and/or quantum dots or an electrically measurable signal, in particular the change in potential, and/or conductivity and/or capacity by hybridizations.

49. The method of claim 30, characterized in that the sample peptides and control peptides bear the same label.

50. The method of claim 30, characterized in that the sample peptides and control peptides bear different labels.

51. The method of claim 30, characterized in that the probes used are peptides to which labelled antibodies are bound, which cause a change of signal of the labelled antibodies by change of conformation when binding to the sample peptides.

52. The method of claim 30, characterized in that the peptide probes are immobilized on glass or plastics.

53. The method of claim 30, characterized in that the individual peptide molecules are immobilized onto the carrier material by means of a covalent binding.

54. The method of claim 30, characterized in that the individual peptide molecules are immobilized on the carrier material by means of adsorption, in particular by means of electrostatic and/or dipole-dipole and/or hydrophobic interactions and/or hydrogen bridges.

55. The method of claim 30, characterized in that the individual peptide molecules are detected by means of monoclonal antibodies or their binding fragments.

56. The method of claim 30, characterized in that the determination of individual peptides by means of immunoassay or precipitation assay is carried out using monoclonal antibodies.

57. (canceled)

58. (canceled)

59. (canceled)

The application's sequence listing, which the Patent Office published only in electronic form, follows.

SEQUENCE LISTING (10540 sequences)

SEQ ID NO: 1 - DNA, 196 bp, Homo sapiens
  I.1 (AI446358)
tcttgtttgcaaggttgtttattgacttccataatttatcaatttccataatagatataggcctattcagatcatctcttttccctgtgtgagttttggttgtttgtgtctttcaagaaattgatctgtttcacctaagctgtcaaatctgtgggtacagagttgctcataatattcttttgttatctttttaatg

SEQ ID NO: 2 - DNA, 459 bp, Homo sapiens
  I.2 (AI937053)
gcttttcaatgaccctatttttattcacgagaacagcacatacatgtgtttgaaaattatgtgaggtgctcactctgcagacagtactcacattcctatagattccacccctgcccaccttgcagcccctggagtctatagcagatgggagtggggcactccgagagtggcaggcctggagatcacatcttccattgttccttcaatcaacactaactcccatttgggccttaggtgccttgctaagcaccacaaaacagcaactaactgaaagagatctggagtgccagcccgctcctactgagggcctcctctctgtcaggcaccttgcaaagcattttgtgtgaagtgactcatttaacctcaccacaacgccacaacgcagggattatgcaggtaacctatttcccagatgaggaagataaggcccaaggaggtgaaatgcctttcccagagtta

SEQ ID NO: 3 - DNA, 289 bp, Homo sapiens
  I.3 (AI936300)
agcaaaaacagcttttttattgtggtagtttgtggtatgtgctcctggatcatgcagaaaaaaggctgggccctcagttagctccgggagccattcttaggaccctccggctgcacacagagaggggctgggtagctggctgggctggggcacgcattcactgggctggcacaggctgaggggtctctcgcccactatcattaggcccctccagcccgttatgttcagcccccggctcaggatgctccagggcgtgccgggtatcagcctgccagagctgcaccaggtc

SEQ ID NO: 4 - DNA, 218 bp, Homo sapiens
  I.4 (AI933504)
tacacaatataaatgctttattgctagcacagaggtttctttttaagtaaattaaaagaaataaatcttcattttcacattttttgttgcagtccaaaggtaactagttggttagtggctatgtccacttggacacatgctacaggagggcagcattcacatggaagcactcagaaatacggcatctgtcagggctcacggcactgggctgctgaatg

SEQ ID NO: 5 - DNA, 321 bp, Homo sapiens
  I.5 (AI932616)
ggacaaaggtttctgtgggagagcaagcaaaaagcaagggctgccccagttgcatcatgggcatccattcagagctgggaccccgcagccacctgcctgtgctccggaagtgagaagcacatgtaagcacgcgtcagtgagagcgtcgcagttgaactcagcccagtgcaacgcagcctgagtgacatccctacattaatacttgatagggaacagcagataaacagttccaaaaccaaatggtattgccatagatatgaatgtaactgagttcagttatgctgtttaccagaatggttcactgacctatgggggaaaaag

SEQ ID NO: 6 - DNA, 248 bp, Homo sapiens
  I.6 (AI932587)
  misc_feature (154)..(154): n is a, c, g, or t
ttaacattttaaagttctatatttatttaaatttggctttttaaaataggtaagcttttcatttcaattattgtttaatactttaaagctagtttaaacaaagataaaaccaaggagaactagtaaagcattccttactttacatacagtgctncaagtgccacatacataataacatatcacaaagaatgtttatggtttagcagattacagagcaaactaaaaagtttatacaaagctaaacactg

SEQ ID NO: 7 - DNA, 463 bp, Homo sapiens
  I.7 (AI926718)
agcggccgcccttttttgtttttttttttttcaatttatagcaagaaaaaagctgggtttaccccaagaatactgacttactttcaccaaaaagaaattgggggacaagagaggaaggagaagactgaaaaaaacaagtatgactctactattttatggtctctgaaatcaagagacaagaggttgcatgaacataaaataattagatggaagggaagaactacagctctgctaaaccaaaacctaccacttgtagatgcaaaaactgatccctgataattagtgaattgctcaagcttactacagaattagaaccagactgcaggttttgtaaccttagccccctattaatttagagttttatctattttccttatactgaatataaactaaaggccaggagatgaaatctactctttaacattaatgtactacttagatcttagatattttattgttagtt

SEQ ID NO: 8 - DNA, 282 bp, Homo sapiens
  I.8 (AI926121)
ttgtacttaaacaaaaggcctttatcattgcacaagccagttaacaggcagttcctggtaagtggtggaagctaaaaaatgcttcatcacaagcatcgcctgagatcaacaatgtcctcaaaaaaggcaatcctctggaagctgccagcagaactcagaatcaggtcctggggccaacactgggggtagttatatgcacctatgtagccacaggaggaaatgagaaacccccctaagagcttaactacctcgtgctttcctccaactaatggaagaactctg

SEQ ID NO: 9 - DNA, 482 bp, Homo sapiens
  I.9 (AI925599)
tttttcgttttataatgtttgttttatactgaggcatgttttcggttccagttgttcacatgcagtctgctgtgagactccaagatcaagggtgctgggaggccttaggcaagtcaccttacttatctaagactgtttccccacctggaagatgccctacaagcctcctgtggctgtgtttagaaagcatgcccggcctttcttgacagccagccaccccagatgatggcagggcaaggaagactgttaggagtcagagtgctcccctcaggtggaaggaaactgggccaactctactttgtaagccataaggtgccaggtagcccggccaccctgagcctgtgcctccactgcccccgcgtggccagtcaggtgcagctgctcccagagatggagggtgaggaacagacgtgggagcaccagagggacagagctgatggcctgacgctctcttcaggagggcacccccaaggggcctctgc

SEQ ID NO: 10 - DNA, 710 bp, Homo sapiens
  I.10 (AI925675)
  misc_feature (515)..(515): n is a, c, g, or t
  misc_feature (581)..(581): n is a, c, g, or t
  misc_feature (638)..(638): n is a, c, g, or t
  misc_feature (672)..(672): n is a, c, g, or t
  misc_feature (706)..(706): n is a, c, g, or t
ttttttttttgaacccagttacaagaaacaggtctgactttcttgcaaagattctgcttcctcctcaaagttcaatctctctgctgatcaccgccatctgctgttcttctatggtgcctaagaactttccaaactaccaagcccctaagactgtggtttggattccagaaagcccaggtgcctgcctggcaacacacaggccttcgtcctctatttccttgttggacatcataaggatcattttgttgcatcccctcagagcctcccttaggagcgaatatgcagaattctcttgaatgtcttcttgaagttctcattgcacaaggggtagatgagggggttcagtgtggagttgatgtagcccagccagatggtgaacatgtgcaaatgttcattgcaacagttcttgcagaaggcaatgaccatgaagaagatgaaataagggatccagcagaggatgaaggctgccatgataaaacccaactgtttggcggccttcctttcgggttcatgtngcacccagatacatactgtcttgaatgcgagcggagcctctttcaagtaaacttgatgtaatccangcctgtgtagacccactcctcaatttgcctttggctggtgcttgtctcttgtgtgtnatctgagtcgttcgaggagaaggatggctatcancctaaccatctgatcctctgatatctcgcttggncccc

SEQ ID NO: 11 - DNA, 491 bp, Homo sapiens
  I.11 (AI925563)
tttttttttttttttttgcattattttaagatctttattattaagtaactcactggggttgtcaaagtatgttataaaattacacagataattagagatatatgttacatagaaatgctgattttacactctcttctgagtacaagcatttgattacagaggctcatagcacaacaaaatgtatttcacgggacactgatgcccctattctgatattgacaaggcaaacatcagcggtagcagagtcaacaaagcaaagcaagatgaaatgaaactagatgtaggtaaaacaagctaaaaatatttttaagtgtttttgtttattgtcatggtggctgttttctacttacaagattgcagtactctaatttagccaagtaattgctgctgtaaaatccaaatctacagagcgcacaattttttaaatggagtgtgcattcctcaagcaagactaaaaacaatcttacttgggtctctaatattaagcttca

SEQ ID NO: 12 - DNA, 480 bp, Homo sapiens
  I.12 (AI925556)
tgagacagagtctcaccctgtcacccaggctggatggagtgcagtggtgtgatctcggctcactgcaagctccgcctcctgggttcacacttctcctgcctcagcctcctgagtagctgggactacaggcgcccgccaccacgcccagctaattttttttgtagttttagtagagtcggggtttcaccgtgttaaccaggatggtctcgatctcctgcccttgtgatccgcccgcctcggcctcccaaagtgctgggattacaggcgtgagctaccacgcccggccgtcttgtgtcttctttactgtgactgggtcgtttttaagaaaggttatcagctttgtgtttggtttcccacagttgataaaaatctatcaaaaacattataatttgcaaggaaaaaggtttttcaatggctgcaggaaccagaaagaaatagcatttcttatctgtataaacacaaacatttaaagctagtcac

SEQ ID NO: 13 - DNA, 534 bp, Homo sapiens
  I.13 (AI925451)
cttcctctcactttcagatttaagattgtgttctggaacattatagttgcgcctcaattacagaaaagtaagaacctctgctgaaaatacctggtcttagtccctaaaaaagtaaaattattagacagctttttgggatttgaggtttcaaaagacaggaacctgctaagaaggctcagtcagactcaattagcccaaaagctgagcccagtaggcattgtcatatgcttttctttcataattgggggtgggaagcgaggggagggaggatttatagtttaatgccacaactttttaaaacagtgatttttgccatactatttgactaggaaaatgatcgttgctcactctataaatacttgaaatcttttctaggacttagaagtttgtagttaattgcaaaggagcaaaacaaacggaatattacacaagaatttaaaaggagaactctgcagaacatgtcttatttttattcgcccaagtcaaccaccaggaaacttggaccaggcacacggatacccatcatttcacacc

SEQ ID NO: 14 - DNA, 425 bp, Homo sapiens
  I.14 (AI925267)
tttttttttttagaacacaacactgactttaatggggcagccctgagccgtaaccttcaaaccttccgcctcagtaccccgtgcgcgaggagggaggggcgactgctacgggcacatcgtcgatgtcctccctactcctggcgatcccacgcctcaccccttcctctccagctgctgcggtctccgtcgccgaggtgggtcccaggtaagctcccaggaggggcaggggagcccctcagcggcccgggacagattcccccatggctgagggcatggggaactagcctggatggagacgccgccgtcctcggagctgggcggggacctgattctggggtgtggacagagccaagggaccgccccccaaggcccagcgccgggagatgcaaggccgggcccaaggtgttggacactgctttggggga

SEQ ID NO: 15 - DNA, 330 bp, Homo sapiens
  I.15 (AI925035)
ttttgtgagaaagctctttactgggggtacagcgaggaggagcaaggccatctccccctacctgcccccaccccctcctagggtcctggggtgagggggggtcttccctccaccggaccaccactgtctttggtacaataaatagaaaaaaagggggagaggggcccaagggtccagtccttagtggggagggagcggccaaaaccctctccttgacccccctgccccaggccccaatcagtgcaggcctcacccaccccagctgggtagcagcaattccagtcaaggagagagatgaggatgggagcccagggcccccagatgggggag

SEQ ID NO: 16 - DNA, 506 bp, Homo sapiens
  I.16 (AI924993)
  misc_feature (444)..(444): n is a, c, g, or t
ctcaatcataaaaattttttaatttttaaaaagatttaacaagttaacataaaattaaagtgtgtctcaaaaccagacagccatcttgtctgccatcactgagcaaattacagatggactcaatacaaatttgcccacggggcttgcttgcaatactatttcacaaagctgactgtattcttcatcttcataaatggccagtctgatgcatagcatgtttagctacaaatgcctctgctgactctccctgcaacattttcatcgctcgccagtagatctgtccacagttctcaggtctaccaagggggtggttcaattcttctttcatataatccatccaaagatcagaatctgcggatccaaactctctcaaagctctctcataatattctcttatgttcgccatattgcaggattcttgctccttttcaaactgaatcattntcctgaaaaagtcaactgaaaatggtcggctctcctgtaaacttttaaacacagctctggcc

SEQ ID NO: 17 - DNA, 478 bp, Homo sapiens
  I.17 (AI924966)
atagtaacaggaaatatttaattttccaatctccactttccatttttataaactgaaagaaaaaaatttaatatattacaaaatatctgtacatagacaagatacacccaatgggggtcaaaaacgagagagaaaggaatcagtgtcaggaacctaaatcagggagaatgaggtggcaactgacacttttctgatgcagcattctctctcaaaacctgctggtaaccattttagcacggtaactatatatgcatattatatatacacacacacatacaagtggttgggtgatgtctatggcataagctaatagaagttctacttgcaaatttgtgctaactgccctgctttaaacgtatagatttgatgttgctttcaaatacttatcgttcctatggacagttgaagaaaaaactaaggaaactgggtcaagtatatttgttttcaaaaccacaaaaatgatcacggtcaaaccagt

SEQ ID NO: 18 - DNA, 249 bp, Homo sapiens
  I.18 (AI924936)
  misc_feature (106)..(106): n is a, c, g, or t
  misc_feature (111)..(111): n is a, c, g, or t
tttttttttttagactgttataaatcctctttaatagtcttagaatcttgagtgtgttttacagaatggtgcacacaaagccccctcccctttccccctacaaggnacagncttacccaccccactccccaggggccagaggaccgcttgccaagaaaggccagcccaccttctcccaggagaagccatcctcctcttaattttctttctttgttcaggttcatgttcatcactcagcctcttcaatgg

SEQ ID NO: 19 - DNA, 607 bp, Homo sapiens
  I.19 (AI924869)
tttttttttttttttttttttaagaggagaaagtaagtttatttttctttgcattacatcactgagttcccataggtatgcagaggccacctaacaaaactccatctccctgcccaaagaatgcccagtgggcagcgataactgtgtaagtaaatggtttcattgtaaataaaagaacctgagaggcggacttgtgctgtggagagtacaatggcctggaggccaggagacagatgctagacccaggcctgctgtgtgacctggatatatcactggcttctctgggccacacactccccagatataccaacaacagggcaggatcagagggaaggatctgtctgaggtcccaggagctcacccttcagctgcaggcggatctccctccccagctgtttgatctcatcgcgcaggttctgcagctcctgcttcatgcctgaataagagaaggccaagactcccaaacagcagcccccacctcaacaaaccactctggccaccacctgcgtggactacaacccccacaatcccttgggcggagcatgcgccctgcagcccgggttcactcactcttcttcggaaagggcgtggccaggatggtgacctg

SEQ ID NO: 20 - DNA, 339 bp, Homo sapiens
  I.20 (AI924740)
tatgttaaaaatatatatttatttcaatttttagatgcttcaactgttacaggccatcatgatttaaataaaagaaaaaacatttgagaaagaacaagaaccttttgtttagagaatgaaatataaattgttaataaacaaagtccacaacaatctcttaaaaaaaaagttactacagttatttctcttgtgaatatggcctggaagaatcacttttcccccaacttaagggaggtggagatttatctctatccaagctttcagtataagcagattagaagtaattctcattttcttgagactgacttgatgaaagggcatatggtgtccccaaaaatg

SEQ ID NO: 21 - DNA, 406 bp, Homo sapiens
  I.21 (AI924126)
aatgccaactcattaaatacaaatgttttattacgcaaaccacatgtaggtcccaggctcaggggcttaccctacagcccccactggtccctggctccaagcctgctccttgcccttgcccaccctggaaagccaggatctcctatggagtgtgtaggtgtccacgagtgtaccggtgtgcgggcctcctgggctgcaggcactcaggcatggtggcagcattgagggaaagacaggtgttggggagcggggtccccacctgcccaggctcaggagtcacaggggtctgcacagtcctttctgctgtggaacacgtgatagatgctggtcggggggaacatagcaacagcgccgagcagagagcccacctggatggccacgccggctgccagcaatgccggccggc

SEQ ID NO: 22 - DNA, 520 bp, Homo sapiens
  I.22 (AI923784)
ataaaacatgtcacatcttgatgcagttgatgtcaagtgtgcttaagtcattatgaatcaagagactaacaatagtggctgcagaaacaggtttgttgtctgtacaaagacttcaggtaaattatagtacttccatgttagctgtgcatgtccaccacgctttgtctgtaactcgagtagaaaaaagatgttgggttttaattaatcattccttacaattcaagatgaactccacatatttaagaattcttggctgaaagaaaagtcttcaagatactggatgcctctcaccactttgacaataaacacacaagaaaaccattgtgtaaggcactcaaaaggttcttatcaatcacgagagatcagtcacactgacattcattcccatgccaggactcacgtaagggacagcatgcactgctttgggaaattctggagtcataacacgtccattttctccagtacttcctgtaattgacagccttgccttgttcctcatggcatcattcaaggtcatctt

SEQ ID NO: 23 - DNA, 587 bp, Homo sapiens
  I.23 (AI922915)
cagatatcatttttttctactttgggagaaaaagtgaggagatagatagagataaaaatacaaagaaaaactagcgtaatcccccaacccatacttcatttttaaacaaacaggccaggtcctgccaggccttcttccccattaaatcccaaggccagctccagtcccaaccccaacccctgcatggcgcccaaaggaagcttcaggcttcgggcaagagctccagcccaggcaggcaggtcgtggccctactgccagagcacaaccttcctgccctggtccacgctcaccatgtggctcccggagtagcaccaggccacggcgttgacggcagcgcaatggggtccctgtagtctgctctccagtttcccggtgtccacatcccagatgtaaagggccccatcacaggagcctgccagtgcatagcttctgtccgggctgaacacagctttggtccagtcagaaccacacttgaagccatcggccctgaacacctggcggatgttgctgacacgcaggtcgatgaccttgagtgtgttgtctcgggaacagctgagcaggtgcagttggtcgtggctgaggctcaa

SEQ ID NO: 24 - DNA, 497 bp, Homo sapiens
  I.24 (AI922859)
  misc_feature (181)..(181): n is a, c, g, or t
  misc_feature (429)..(429): n is a, c, g, or t
ttttttttggaaaggaattaatggtgtatttccattagggaaagtgctgacaagccgcaagggatcccttgatggttctgggcatgggcgcccagcctgggctctggctttgggagcagcgaggggaatgtgtctctcacccctaggcctcctggtctggctcctgctcaggccacacggngcacccacccccagcgcgcctcagtccaggtcactgggcagggtgtttactgctgcgctccaacccaagcatgtagatttcagaaggggactaggacccccggcaggtgtttgagaccaccggctcccaagtgcgtcgccttgggggtttgcatcggctcctcagcctccccaggcaatctctgtgtagggtcgggagcgggaggtctgagttgagccgggtgcctgagatctccggtgcaggtcggnggaggggagcccccctcgggctgtggttagagcgggagaggaacttcccagactagctggcacagagc

SEQ ID NO: 25 - DNA, 483 bp, Homo sapiens
  I.25 (AI922323)
ctgttcaaaaaaggttttatccaaaaaagttaatcaagacaagcaacagatactgcaaagcattatatacagcaccatagtccaggggccaaagaaatcaggaggggctgggcagtagaggaattccatatattaatgaatgtgagattaagtatagagtgaagacattaacacacaattctaatttctgttaggcagaatgctcccctaccctgatgccacagcctttcacgtttcctaaaccctagtaacctctgatctccatctgcctcatcaacacgtcaccaccctttgctcttcttccaattagtcacatgttggctgaatttatttcactccagtactttaggaccttgacagacaaatcgattacaaggtcaattcccaggatttcttcagggtgtgttcaggagtgcagatgttctttggatgacctttctactaaattagacctctgaaggagaaagctacttgccagaggct

SEQ ID NO: 26 - DNA, 399 bp, Homo sapiens
  I.26 (AI921695)
tttttttttttttttttttggggagagaccgggtcttgctttgttgcccagcctagtctgaaacttctgggctcaagtgatccttctgcctcagcctcccaaagtgccggaattacggagtgagccacccttttaaatccaaacactttggtgatcatgaaaatttaggctttcagagttgaccatcaccaagatgataattcaacatttcttttttctggaggacccaagcaggacagggaacagagcttatgaattccacctgtggtcaacgagttgtagactggaaagacacctgcttgagaagtgaggtggaccacacaggatgtctgagtgccgatcacctttatgtttctctctatctctctctctggctctctctctctctctctctctctc

SEQ ID NO: 27 - DNA, 359 bp, Homo sapiens
  I.27 (AI921468)
cttggaggcataatttagtcatctcacctaaagcacttttcactttatctctggcaaccaagggttacagaaaactcagcaccaaaggatgaaaggggaacttgtccccttcggtccccagccctgccctcccctgcagcctaaaataccctttctatgatcacagaacaaagttcacactcaccacacagccattctcacacacactcgcacaaaaagaaaaccaaagcccactaaagcacatggggaaaaaaagattacaaaacatcttcctccccatccggccttgagaccagactccctggctggagaggtcgtgacttccgccgtgcccagcaggggctcacccagcctttgtc

SEQ ID NO: 28 - DNA, 475 bp, Homo sapiens
  I.28 (AI921327)
  misc_feature (406)..(406): n is a, c, g, or t
atacaaatacctttattttgcttttaaacatatctaccagtaaacatgtgagtgtgtaggttgctcaagtccgggagaggaaaggttacagaagacatataacaaatattcacaagaaatcatgatgggaataatatcttttcttctttttttgagacaaagtctcgctctgtcgcccaagctggagtgcaacagcatgataatcagctcagggcaacctccacctcccgggttcaagcaagtctcctgtctcagcctcccgagtagctgggactatgggcgcccgccaccacgcccggctaatttttgtatttttagtagagacggggtttcaccatattggtcaggctggtcttgaacttctgacctcaagtgatccacccgccatggcctcccaaagtgctgngattacaggcgtgagccaccacatccggcctaatatcctttcaaaaaataagcgcattccatacaaata

SEQ ID NO: 29 - DNA, 238 bp, Homo sapiens
  I.29 (AI915031)
tttcacagtcagctccattttattatattcataaaatgaccccacacctcctactgctccagtcaccccccgaaaggtggctaaaactgtgacccccaaagttaaaagattgatgtacccaatgagaagtggacatctgaaaacggtgcctgtgtggctggccggtgaccccagggcctccggcctcctaaccctgctgccctagtttccaaagagctgctctggccccctccagcca

SEQ ID NO: 30 - DNA, 466 bp, Homo sapiens
  I.30 (AI913322)
agagaccgaaggctgggggcgcaggcggcgcgtaatgcaggccgggcccgggcgcgccgaaaccagggccaccgaaaggcggcgggaaggaggcgcgcggaccgggcgcgggcaggcgcgcggggccgtcggggctgagcggcggtgtgtcgggcggcggcggggggcggcccccgggacctcgcatgcacgaagccgccgggcccggggcgccctcgcgcttgaggccgcgcggtccacgggtcagcccgggggcgcagccgtagccgccgccgccgtccgcttcagggggctcggccttgaccaggcggccgggcggcgccagcagaaagcggccgtgcagtgcgggccccggcggcgcatccagctcgggtcgcagcagctcagacaccaggccacccgcgggggcgctgtatggcgtgggcgcgccgggttcggtgtaatagaacgcaggcggcggcgcgtg

SEQ ID NO: 31 - DNA, 591 bp, Homo sapiens
  I.31 (AI913146)
tttttttttttttttttttacttgtaaataaacaattttattgttcatcttcacatatgtgaaagacatcactacagcatccattactctcaagttacaaagttataaaacaagattttaaaacttaatatcttgataaggtgcttaacttctaaacaaggaaaaattaacattgtttttaaaacttactgagttattatgcatctaatgcaagttttatccaaaagtaaatataacatgacatatccctaatacaattaaataatctataattaataagctgagaattggggttcaagaccacagtttgaatttttaaaaaatataaataagtccattagcacagtaagttttgactacaggcctgttatcaatctatgtcatgagtgacattactttaactcattaggaaacagaggttagtaacaatcaatacctctcctttaggtctattgctgataccaattgagatgtaattaagagctttataactcggctttttaactatgaagcgaggctaacacataggataaaaataagtgtttgttcacaaaacattttcacattgaaatcaacctgaatgacaagtag

SEQ ID NO: 32 - DNA, 410 bp, Homo sapiens
  I.32 (AI912449)
tttttttctcagcaatctgaatttttttattttttttgagacagtgtctcggtctgtcatcaggctggagtgtagcggcacgctctgctcactgcagcctcaacctcctgggctcaagtgagcctcctcttatcagagcagctgggaccgcaggcacatgctaccatgcccggttcattttattactatttgtagagaaggggtctccctactttgcccaggctggtcttgaacttctaggctcaattgatcctcctacagtggcctcccaaggtgatgagcttacagtcggattacaggtgtgagccactgtgcctggccagtctgcatttttttgagacagggttttgctctgtcatccaggctggaatgcagtggtgcaatctcagctcactgcaacctccacctcc

SEQ ID NO: 33 - DNA, 303 bp, Homo sapiens
  I.33 (AI912390)
ataggaaagaattcttttgtccttgtttacactgtgtacatagtacaaatataattttaaagctacatcctataacatttaagaaataacagtagtttcaaaatgcttaagatgaggagaaaaatgccttagaagactaggtttctaaaagtcagaaataaaagtacaagttatttttcttctatccagcaactttataaagcaacttgagtcctgaagaaaagaccgttgttcttttaagaaatgggtcttctcgaattataaactttaacaccattttgcatcgaagaatgagaatattta

SEQ ID NO: 34 - DNA, 480 bp, Homo sapiens
  I.34 (AI912332)
ttttttttttttttggggggtagctaatatggtatatttatttcacagtttcacatctttatcattgtttttatataaaaacaatgcttaagtggggtttcagaacagatatttccttttaaactttttttaaaaaatcacaaatatgattggctcatacaaccacatttcacctcttttcaccagcactcccacccattcccgttagaaatattttgttaaaaaaatcaggtgatcaaactcatagaaactgaattgtgagaagtataatgggaaaaggaatgagaacctgtggctctagggagttacagaagggaaatcatcttttagagccttggtttatttctgacaggaaaggtaaagccgtgcatttattagaacaggaagctaagaaattaaagatggcgagattgtctaaaataactgaggctgaactggaagcctttaccctggcacactcaaaaatcacttttggtactg

SEQ ID NO: 35 - DNA, 437 bp, Homo sapiens
  I.35 (AI912316)
gtaaaaccaaaagctttattctctagttattattcagctccaattctaactgatttgaaaataaataatttaaaaaattttcttcctagaaagtaaaatatggcaccataatccaattgggcctcatattttaaatcctgcagaaagcaaacgtggacggcagatagatgataataataggccattactctcaacgcagagaaggtggttggtgtttcttttctccacgttcattcctggaccatttttggtctccttcctatcaaatgttgtctatacgatgtgaaggactttgaaagcagccacagcctgtttttccctttcgtgtctgttctgcagtatttccagcagtgagatttcaggtaaactttcttctttcccagcataggttggatttttttgttcctttgatgcttgatgagtcagatttgatggtt

SEQ ID NO: 36 - DNA, 279 bp, Homo sapiens
  I.36 (AI910804)
ggctcttgacgcgctggcgggagaccgaggtggggccgctgtaagagcccagtcgatcccgcctcgtgccctcagccgaggccccgaccgcgggcaccgacgcgctgctcgcccggcgccgcagtggctcctgccgccgcccttcggggtccccggccgcctgctccccagccgacgagacggaggtggcggaagccctgccgtggcgctccatgggcgcgccgagccggcccgctcccatccgcagcagcagtcgctgccgcccgagcaagcccccca

SEQ ID NO: 37 - DNA, 386 bp, Homo sapiens
  I.37 (AI910456)
gcggccgcttgggccgcgggagcctgtcgtctccgcccgccgcagccaatccccgcgccgctcggcccgcgccgctgccgcctcccgccagcggccggggcgctgcctgaggcggcgagggcgccccaccccgccccggccccgccccgcagtagcctcgggggctccctcagcctgggtcagaggaagcgagaagaaagtctaaaaatccgaaggtttagtcgcacgcacgtttataataatagcaaaaggcgggcgtccccgcgccgcaggttgcttaggaggaggactgggtttcctgggcgttcctgggcgccggggcgctgagaagatgctacccgcggcgggcgggtgcggagagcacgaaaacgactccagtcggcccg

SEQ ID NO: 38 - DNA, 401 bp, Homo sapiens
  I.38 (AI890974)
ttttttttttgaaaacaaaggcatctgctttatttgttttcagacagtagcgcatactttgtttcctaaacacgtggcagccccaggctcaggggcatatgcaggggcccagcaggaaacggcagggcacagtggctgtggtcccatgattggtcccttcttcagggctccaagtcactgccagggcagggaatgatgtctgctcctcagcccttgtgggcggcgctcacgcagcgctggtatgccttgaccaggtccgagcacagcagcacctcatgcgggcgatctcggtagcagtggagaatctgggcctgcaaccctgagcagacgggctccaccctgcggggcctggggcaaggcgctggctttgtcactttccactgtgtggtcggtgcatcagg

SEQ ID NO: 39 - DNA, 450 bp, Homo sapiens
  I.39 (AI890968)
agcggccgcccttttttttttttttttttactctctagaaaatatttattgacacattttaattttctttccatattctgagaaataaacaaaatacacaaaatacagtaaaatgcacttttcccatttcaaataaatatactatactcttgtaaaaaaatttaataatctgtgtaatttgccacagtatattaatcagtgaaataaaacaaagaatctctaaattgtcacatgttttaatgattctcacaagcatttttctggagaaaaagaacactattttctgtagaatttatattgacttggagactattgcttcttgtttggagaaggcaaagataagctttttaaaaagtgtttagtgtcaaaaagagtcttcatttgggagaaaaacagcatacaagtcctttctgaatcaactaagttatgtgcaaattttcttattaatac

SEQ ID NO: 40 - DNA, 561 bp, Homo sapiens
  I.40 (AI890771)
  misc_feature (402)..(402): n is a, c, g, or t
ctataaacaagattttaatatctgtataaatagaccacagaattaccaaaactgcaaagacagagtgtggaaaacaggtttgaaacccgtgcatagagccctctgctgggctgccgcctctcccctggccggcagtgctgtggggaatgctggaaaggaaggaaagttcctctagggggcgtctgcagcgtgaggacctgagcacagaagactcggctccccatgcctgctgttgacctcttcatctagtataaaaataacgtcagtgggtggtggctggagtcgtggctactccgggaggggggtgacaggaggtgccctccattgtataggccctagcagccagcagcacccctgccagccagggtgcagtgtaggctggtggagaggggtagtgggcanaacagcactgccctatctttgcatatgccggacaaacgcctgcaccaactggatcagaggctcctgactctcagggctggctctggagagagaggtggacttgccctgcggcgaggggaggacaccattggcaggtgagcttggggcttcccggcagaa

SEQ ID NO: 41 - DNA, 426 bp, Homo sapiens
  I.41 (AI890622)
tttttttttttaatactgaatctctggaataatggtaaggtcaaaatatattgtattgagagtttaaaaattaagagcaatttttaaaaatgtaacaaacatctaaatatctgacaataaaatctgaaatgctgtaacttcaacattaactgcaccatccaaattcttgtgacttacgcatttttgcccaatttaacccttcttatggttcccctgcccccagacaccataaatgcattgtaattttgaaaatatctgccaactacacactgaaaattttaacctgatcaattgacataatataaaatctgtcccaaagcactgaaacaagaaaatctataccatcatgctacagacgtacttagaaaacttaaaaggaagagtaaatatcagctcagtgatttataatgaagctaataaaattca

SEQ ID NO: 42 - DNA, 402 bp, Homo sapiens
  I.42 (AI890612)
  misc_feature (172)..(172): n is a, c, g, or t
  misc_feature (173)..(173): n is a, c, g, or t
  misc_feature (174)..(174): n is a, c, g, or t
  misc_feature (175)..(175): n is a, c, g, or t
  misc_feature (176)..(176): n is a, c, g, or t
  misc_feature (177)..(177): n is a, c, g, or t
  misc_feature (179)..(179): n is a, c, g, or t
  misc_feature (180)..(180): n is a, c, g, or t
  misc_feature (181)..(181): n is a, c, g, or t
  misc_feature (182)..(182): n is a, c, g, or t
  misc_feature (183)..(183): n is a, c, g, or t
  misc_feature (184)..(184): n is a, c, g, or t
  misc_feature (185)..(185): n is a, c, g, or t
  misc_feature (186)..(186): n is a, c, g, or t
  misc_feature (187)..(187): n is a, c, g, or t
  misc_feature (188)..(188): n is a, c, g, or t
  misc_feature (189)..(189): n is a, c, g, or t
  misc_feature (190)..(190): n is a, c, g, or t
  misc_feature (191)..(191): n is a, c, g, or t
  misc_feature (192)..(192): n is a, c, g, or t
  misc_feature (193)..(193): n is a, c, g, or t
  misc_feature (196)..(196): n is a, c, g, or t
  misc_feature (197)..(197): n is a, c, g, or t
  misc_feature (198)..(198): n is a, c, g, or t
  misc_feature (199)..(199): n is a, c, g, or t
  misc_feature (200)..(200): n is a, c, g, or t
  misc_feature (201)..(201): n is a, c, g, or t
  misc_feature (202)..(202): n is a, c, g, or t
  misc_feature (203)..(203): n is a, c, g, or t
  misc_feature (204)..(204): n is a, c, g, or t
  misc_feature (205)..(205): n is a, c, g, or t
  misc_feature (206)..(206): n is a, c, g, or t
  misc_feature (207)..(207): n is a, c, g, or t
  misc_feature (208)..(208): n is a, c, g, or t
  misc_feature (209)..(209): n is a, c, g, or t
  misc_feature (211)..(211): n is a, c, g, or t
  misc_feature (212)..(212): n is a, c, g, or t
  misc_feature (214)..(214): n is a, c, g, or t
  misc_feature (215)..(215): n is a, c, g, or t
  misc_feature (216)..(216): n is a, c, g, or t
  misc_feature (218)..(218): n is a, c, g, or t
  misc_feature (219)..(219): n is a, c, g, or t
  misc_feature (220)..(220): n is a, c, g, or t
  misc_feature (247)..(247): n is a, c, g, or t
  misc_feature (248)..(248): n is a, c, g, or t
  misc_feature (256)..(256): n is a, c, g, or t
  misc_feature (257)..(257): n is a, c, g, or t
  misc_feature (258)..(258): n is a, c, g, or t
  misc_feature (264)..(264): n is a, c, g, or t
  misc_feature (276)..(276): n is a, c, g, or t
  misc_feature (277)..(277): n is a, c, g, or t
  misc_feature (284)..(284): n is a, c, g, or t
  misc_feature (308)..(308): n is a, c, g, or t
  misc_feature (310)..(310): n is a, c, g, or t
  misc_feature (311)..(311): n is a, c, g, or t
  misc_feature (314)..(314): n is a, c, g, or t
  misc_feature (315)..(315): n is a, c, g, or t
  misc_feature (325)..(325): n is a, c, g, or t
  misc_feature (328)..(328): n is a, c, g, or t
  misc_feature (343)..(343): n is a, c, g, or t
  misc_feature (371)..(371): n is a, c, g, or t
  misc_feature (373)..(373): n is a, c, g, or t
  misc_feature (374)..(374): n is a, c, g, or t
  misc_feature (375)..(375): n is a, c, g, or t
  misc_feature (376)..(376): n is a, c, g, or t
ctctctctctctctctctcccccgtctccctcccaaattctccggctctcgcggccggcggggccgggcggcaaacaaacaaacaaacaaacaaacgggcacgcgggccccgcccgcgcacgcgccgcgtcgcggtgggggggtgggtgtgcggagggaaacgcgcggaagnnnnnnannnnnnnnnnnnnnnaannnnnnnnnnnnnnannannnannnaaaaaaagaagaaaaaagaaaaagaanngaaaaaannnaaaagnaaagaaaaaaannaaaaaanaaaaaaagaaaaaaaaaaaagaanannaannaaaaaaaaanaangaaaaaaaaaagganaaaaaaaaaaaaagaaaaaaaaaaaaanannnnaaagaaaaaagaagaaagaaaaaaaa

SEQ ID NO: 43 - DNA, 190 bp, Homo sapiens
  I.43 (AI890314)
  misc_feature (183)..(183): n is a, c, g, or t
tctctaggccctactccagttaaatcaaacattggttgaacacatcagcctctgaaaaggtagctctgactcttgtctttccatggccagagtgggtcgtcaacctcgtgtggagctgagaccaaggtctgtgggctctaggcagcccggcagcagcccccagaggaactgctcccacctctncttctct

SEQ ID NO: 44 - DNA, 459 bp, Homo sapiens
  I.44 (AI890112)
tctttctcctaagattgtgattttattattccaagatcttatgcttgaattacttagcaagaaggcatgattatgcagaagacagggaaatgaagagaaaagagcgggaatatacgaaaatgaagcttccttaacagagttcatggtggagatggtagacactggtggagtttttatccaagacttaaaacttaggaaacgcctatgatgccactttaactggaagtaatggagacatctgattccaaattcacattttaaatgcctatttgcaatcagcaaagagccaggtatgctgcatgctgcttgctgtaagttacgatttggcttcactggctcaaattttttcactccaccaaaagataaggcacaggcccgtttgtccaatcaagtttgctgaaaatactgcagcctgagtgtagacaaacttcccctgaatttgctagaagttttcttgtg

SEQ ID NO: 45 - DNA, 480 bp, Homo sapiens
  I.45 (AI889648)
ggagacagagtttcgctcttcttgcccaggctggagtacaatggcgcaatctcagctcaccgcaacctctgtctcctgggttttcaagcgattctcctgcctcagcctcctgagtagccaggattacaggcatgcgccaccacacctggctaattttgtatttttagtagagacggggtttctccatgttggtcaagctggtctcaaactcccgaactctggtaatccacccgccttggcctcccaaagtgctgggattacaggcatgagccactgcacccagcctaataactgatataatttttttaagtgaaatgaaatgttcctttatttacatatgaattaaatagaaaattcaaagtaattcttttaataaaaacccatatactaatatattctaaggttggatactaacagcattttcacaagatccaaagtgtggatgacgaactaggcaataaggacatgtgtgccacataa

SEQ ID NO: 46 - DNA, 463 bp, Homo sapiens
  I.46 (AI889612)
gagatggagtctcgcactgtcacccaagctggagtgcagtggcatgatcttggctcactgcaacctccgcctcctgggttcaagtgattctcctgtctcagcctcccaagtagctgggattacaggcgcctgccaccacgcccagctaattttttgtatttttattagagatggggtttcactatgttgccaggctggtctcaaactcctgacctcgtgatccacccgcctcggcctcccaaagtgctgggattacaggcatgtgccaccgcgcctggccagatgtggactctttaaagacatgctctgagtcagaggttcccagccagtgttaggatctctgagagcttacttccttcaatgccccccaggccatggcgtatataatagttacaggagaacagggctggcattcagcaacagggttcaggtacgagctaatgtggacatcagaagtcagcct

SEQ ID NO: 47 - DNA, 461 bp, Homo sapiens
  I.47 (AI889598)
agcggccgcccgggccccggctggcgagcgggcaggcggccggcgccctggagcgggccatggacgagctgctgcgccgcgcggtgccgccgacgccggcctacgagctgcgcgagaagacaccggcgcccgccgagggtcagtgcgcggacttcgtgagcttctacggtgggctggccgagacggcccaacgggccgaactgctgggccgcctggcgcggggcttcggcgtggaccacggccaggtggcggagcagagcgccggcgtgctccatctgcgccagcagcagcgggaggcggcggtgctgctgcaggccgaggaccggctgcgctacgcgctggtgccgcgctatcgcggcctcttccaccacatcagcaagctggacggcggcgtgcgcttcctggtgcagctgcgggccgacctgctggaggcgcaggccctcaagctggtggatgggccg

SEQ ID NO: 48 - DNA, 400 bp, Homo sapiens
  I.48 (AI889554)
cagtggtttaaaaatcttttattgtttctccaaatgacaatacaagtaccaaaaaccaacatgacacacaggaaaaaataaaagtgcaattttaatatagtgaatgtgatacatgtataattcctcataacaaaatggtcaaaacctttaaaagatccacaatagatatctgaaaatcttagcaatgctgtatatattttgaggactaaatgatgaatttatattcaaattgttcaaatatattttcaaaactttcagagcacagatcattgttaattttgcttttatttaaaaaaccaagagaatacatttctatgtaaattagcaatcaggaatttatctgtttttgggcttcttcatctatctaaagtgtatatttagtgaccagaattatagtcat

SEQ ID NO: 49 - DNA, 511 bp, Homo sapiens
  I.49 (AI889526)
agaagctcaagtccatgacgtcccgggacaactataaggcgggcagccgggaggccgccgccgctgccgcagccgccgtagccgccgcagccgcagccgccgctgccgccgaaccttaccctgtgtccggggccaagcgcaagtatcaggaggactcggaccccgagcgcagcgactatgaggagcagcagctgcagaaggaggaggaggcgcgcaaggtgaagagcggcatccgccagatgcgcctcttcagccaggacgagtgcgccaagatcgaggcccgcattgacgaggtggtgtcccgcgctgagaagggcctgtacaacgagcacacggtggaccgggccccactgcgcaacaagtacttcttcggcgaaggctacacttacggcgcccagctgcagaagcgcgggcccggccaggagcgcctctacccgccgggcgacgtggacgagatccccgagtgggtgcaccagctggtgatccaaaagctggtggagcaccgcgtcat

SEQ ID NO: 50 - DNA, 465 bp, Homo sapiens
  I.50 (AI888960)
  misc_feature (332)..(332): n is a, c, g, or t
  misc_feature (409)..(409): n is a, c, g, or t
ttttttgtgatataaatagtttatttacattacagaaaaaacatcaagacaatgtatactatttcaaatatatccatacataatcaaatatagctgtagtacatgttttcattggtgtagattaccacaaatgcaaggcaacatgtgtagatctcttgtcttattcttttgtctataatactgtattgtgtagtccaagctctcggtagtccagccactgtgaaacatgctccctttagattaacctcgtggacgctcttgttgtattgtctgaactgtagtgccctgtattttgcttctgtctgtgaattctgttgcttctggggcatttncttggatgcagaggaccaccacacagatgacagcaatctgaattgttccaatcacagctgcgattaagacatactgnaatcgtacaggaccgggaaacaagtatagaaacactgagtccttttttttacagtg

SEQ ID NO: 51 - DNA, 453 bp, Homo sapiens
  I.51 (AI888660)
ttataaataaatcacattttaatcatctggctttgtttaatctacaaaatcaaattcacagctttttctagtctggtctgttttttctaaccagatggcctagtatattttctaaaaccttccatcttttaaggaaaacatgttccaccttttttttttttttgcaatcccagagccaacttcccctaatgcaatcacctcaaagaaacactgatgggctggtggtgaaccacagactcaaagtctttcagaacagtaaaagaaaaaaaaaaaaaaaaaggaacaaaaggtcactaagcaatgtccagtgttccctggaaagcctcttcctgaatgctccagtcactgagctgtcccctccccgtggtcactcctgctggcccctgtagcattccattccttctgccatctgtttcaggttctgcagtgcttataaggtagtgtctggagggg

SEQ ID NO: 52 - DNA, 175 bp, Homo sapiens
  I.52 (AI888496)
gaattgctgaatttttaatctgtaacacaaaggttgccaaacattcccccaaaggagcagctctcagtggggtggcggtggatgcgaaacagctgaagacgcggggcagttggcctggcttccgttgcacgggctggcttgccgcgggagcggtggtgggtggggaggggtgggg

SEQ ID NO: 53 - DNA, 232 bp, Homo sapiens
  I.53 (AI886302)
tttattttcttaacattttctcaagtttattgtaagaacatagcatataatatacagaccatacaaaacgtgttaatcaactgtgatgggtaaggcttcccatgaatagtaggctattagtgcttaagttttgaaggagtcagaagttttatgtggattttcgactgccagcagtggggggtcagtgtccctaacccccccactgttcaagggttagctgtactatatgatg

SEQ ID NO: 54 - DNA, 244 bp, Homo sapiens
  I.54 (AI886145)
aaagtttttattattttatattacgccatgacttgcatggaatgaccacaaagtggcataaccttcctggtcatgtaacttaactcatcaggcctggctagaaagtgagaactcccagatacacaatttagtccaccagaaacatgggagggagcaaaggaaagagaaagagacagaggaaggcacaatgataaataattatctgcctcttctttataggttagtggctcgttctaaaatgatg

SEQ ID NO: 55 - DNA, 566 bp, Homo sapiens
  I.55 (AI885451)
  misc_feature (455)..(455): n is a, c, g, or t
  misc_feature (513)..(513): n is a, c, g, or t
  misc_feature (531)..(531): n is a, c, g, or t
  misc_feature (543)..(543): n is a, c, g, or t
tttggaagaattctttttaattaaataaattaatattatttttatcagaataaattgttaaatattgctgtgatgaggcccaggggtccagagttcctgctgcagaaggcttcgctccagccgcggagggacctgggctgtgtctgggggagggtggagcaacatttggtgtggaacagaatagttgagggctctgagagattttttttcccccacggatgcctgcaggaaacccaggaaaagtaccctcctcagcagaaaagacaagctcagcatcctgccagggagcccgcagcttggaaacggtccagtcctcccagcaatctgacttgcagcgggagggtggtgtgcacacggggctcacttgcacgtgtacatctccgtgcgctcgctgcacgtgttgcacttgacatagcagcaccagtggaacttacagttgcactgccacacgcggncgtactggtggtgttgtagccacgcccacagcacatgaggtcacagccgctggcctgnggagccgtcttgttgcangcgcggccctgngtgcccacacttgccgtcaccgg

SEQ ID NO: 56 - DNA, 386 bp, Homo sapiens
  I.56 (AI866703)
tttttttttttttttttttccacagtatcaaacaattgaaacaaatataaatgggaacaaaatttctaaacagcagttcaaaaaccttggcaaagccagttatcaaataacatctagcttcatttatcaactaaaagactcactaaaaagaatgatttctgtacgtgtaaactgagtgtaacacttcaatatttcaatggaaattgctcttttgtcacacattattaaagtctgttctctgaataatttgaagaaatgtcagttataaggcaaattaagacttaaaaaaatagaaacagtgcatcttaaagtttttcagagacctacatataatttacaaacacataatttattatatggttatagttgggaacaaattttccctg

SEQ ID NO: 57 - DNA, 357 bp, Homo sapiens
  I.57 (AI865358)
  misc_feature (204)..(204): n is a, c, g, or t
  misc_feature (297)..(297): n is a, c, g, or t
  misc_feature (299)..(299): n is a, c, g, or t
  misc_feature (301)..(301): n is a, c, g, or t
tcaggaaaaaaaagagtttaatcatgaaaccaaggaagtttctaccattaagctcccaacagtaacctagagaaatatatctaacataaagagtttccacagttagaggacaaaaagctgtatcggcaactgaaaaatacagtcatcctaaagagatctgacacatcatctattctgacaaaagatttttaaagtggcactgtncgagtcgaaatggttaattacctagcagaaattgatttctctatctccgtagcactcaaagcagctggcaggctcttgaatagtaattcgttntncngtggtgacagaaattgggtgcgccttcctcatagtgtgggagttggaagcaatggt

SEQ ID NO: 58 - DNA, 399 bp, Homo sapiens
  I.58 (AI864919)
agcggccgccctttttttttttttttttttttttttcctgtcatcagagggctgtttccctttataaaaggggaaaacaattgctttttaaatttcttttcttcttggagtctaagattttaaaagttgcagcccacatgtgaatccaaatttcctttgaaccatcaaatttgaatccctctaattcggatttcccattcaaatcatgtcagggcagttacttgttgaactttgtcctgaaatcctgtggttctgtggttccggctactcaggaggctgaggtgggagaactgctcgagcctgggacatggaggctgtagcgagccacgatcgtgtcacggtattccagcctgggtgactgacagagcatgatcttgcctcaaaaaataaacacataaa

SEQ ID NO: 59 - DNA, 493 bp, Homo sapiens
  I.59 (AI863022)
ttttttttttttttaacagaaagaattatttattcagatttaatttctcttacattcacgaagccaaggaaatccaggtatgcatatatattttttaaattttacagaatagactgaggcataaggcgggaattaagtatcttttaatttatctcacctatttcacggtgaattcacacttctaaatacttactccactgctgttattatgtcccaaattcacaaaatagaacggatttcccaatctgaataaaaaacaagactcttactcctaaactatattaacagcaatatacgttaactacgattcataaacttggatgctgaagttaattcaaccatccattaaaaggaacatttcaacaattgtaaaaggaaacagagataaatctccaagtcatccaacaaaatagaaacccactactaagaacactgactattttcttcaaacagagtgaagaatgggcctcatgttacacgaggcaagggaagc

SEQ ID NO: 60 - DNA, 202 bp, Homo sapiens
  I.60 (AI862711)
tagttgatatttgactttattgatttccaagatcacgatgagttcacattgtaaggaaaaaacatctcaaaatatagaaaccacattttatatccttatagcaatgtagatgcaagagcaaatgaagaaattcatatattttttgttaaaaaatcatcagaaatgttttacatgtagaagatacatgtgataaagaagtttg

SEQ ID NO: 61 - DNA, 404 bp, Homo sapiens
  I.61 (AI862176)
ttttttttttatttggaacatttttattttgaacactagcagtgactgtacattaataaatatgcatctgatccaaatataaatacatagtctcaaaaggtacaaaatgcaaaatctacgaaataaaactagaaccaaaactctgtataagggagttctctacaaacacaggggaccatttaaaaaatgtgagaagagaaaaaccccagcaggaagcccattttgcgggatagggcaccaggaggtgaagaatgtacacatgtacagttgaggattagatgaatctgagcttgaaaaaggtaataccatgcacaggggaattttctaaaccaaaccacagagatcagtcaattccaatgttttctttctagactgaatgttccagaaatcatctctaattaagg

SEQ ID NO: 62 - DNA, 531 bp, Homo sapiens
  I.62 (AI859772)
ttttttttttttttttagagaaaaaaacaaaattttaatacaagaagaaataaaaattattcacttacaaaccacctacacattgttttcccaacagacacactttaaaagcacaaatagaatataaggcaaacagtacaaagctgtgaaaagggtagcagagaactgaggcattcatttataaacaacatcacagaatataaacgaagatcatattttgtggatgtttgcattcacactgagctttactctttttttcctattaagggctttcatttacaggtaatgatcaacaagacaaaaatatgtaaatgactaattataaatatgaaaaaattcagtgacattttctataactatttccccatgtcactgactgctaagttttcacttccttactaggctgagtttcaaatgaggtatccgtactcatctaagcttttcactactgcaaaacaagcttgactattgggaacattaacatttatcttcccaagaatcactcatcattctttggagaagaatctactt

SEQ ID NO: 63 - DNA, 474 bp, Homo sapiens
  I.63 (AI859760)
  misc_feature (210)..(210): n is a, c, g, or t
tttggcgagatggcgtggggggatcggagttagaggcagggaggagaaggggggaaagttctcgggggaggcaaaaaaaaaaaaaaagttttttctcctctgcaaaaggcgggcagggcgccctaagtccaaggacaatccatggaagtgttcgcttcttcacaagttgtgcaaaccgatttgttagttcatgagcctaattagtgcggngatcacataaacagcttcctccgaagcctggtaaatggcttgatgattggtcgctattactcgccctgaggtggaaggggggagactctttaaagtgcgtcagagggaggtgagcgcctgggaacccggaggcctggatccgggccgagagtggaacggagtcggcgccgccgcctcggctgagccttctgccgcccaccgggcggccgggcttctccgcgccttcgcccctcgctcccagctcactcgctcctgcggcgcccg

SEQ ID NO: 64 - DNA, 459 bp, Homo sapiens
  I.64 (AI859370)
aagttcagaaagaatagtttttaaaaatgcatgtaatttgcatatacaataatcagctatttcttctagctcaagaaaacatttaaaacaaggctggtgctgctagtagcattcagaagaacacaaatttcttgccccttacattacaatgggagctctaagtttttacaatttccttttgactctggggagtgaggggctccttaaagcagctaagaaagaactcagccactaattcatagataatggaaatgcaaatattcactttgtctagtatagtcttatactatccgcccatagtttttaggcacaattattaagttttctcctaggggcaaaataaatcattcagtgcaatgaaaaagattcttgatagaattaagtttcagtaacaacagcaaaattatgcatacataatacatactttaaacatgaataaaacctaaatttttaacatgc

SEQ ID NO: 65 - DNA, 257 bp, Homo sapiens
  I.65 (AI832179)
cccccctgcgcgcgcgcgcgtgcagtccggcggggcgctcccctgccagtgggcggggaggaaactgtcaagccagcgcccgccggggaacccacgactgtgtcacctgccccctgagcgttctggagcgccaagcttcgcgatctttgccttccggactcgcagaccggctcaaagcctcccctcagcctctggctccgtgattggcaggcagctgacagaagaaaagttaaaaggttatttctgaagaagagttt

SEQ ID NO: 66 - DNA, 511 bp, Homo sapiens
  I.66 (AI832086)
  misc_feature (473)..(473): n is a, c, g, or t
gcccctggccacgtgtgacccggctccggtggtttcgggagaacatgctgtcggccctgcgactttgcctgctcagtgcgctccccgcgccgcccggcttagcctcctctcctcggcttctgtctctcgacgctcgtccgccagtccggccgggaatctcccgctgcggggctccaaaccccgcccccggagacgacacctgggccgggcagggcgcggcaacctcctcttccacccccgccaaaggcccagcccgtccgggcagtccctgggcgccaagccgacctggcccgacggccccggagcccccaggggcgcactgcacctcgcgagcactgtgggagcgcgttctccctgcccgcgcgggtcgcgagcgcctacctggacttgggacggaccgagaagccctgccccgccagccgccccaacctggcaagcctggcttcccgggcgctgaaaaccccgtggctcanggatcgccgcgtagcacgctctggctctactcgggccc

SEQ ID NO: 67 - DNA, 518 bp, Homo sapiens
  I.67 (AI832016)
  misc_feature (486)..(486): n is a, c, g, or t
tttttttttgagatggagtctcgctctgtcacccaggctggagtgcagtggcgatatcccggctcactgcaagctccacctcccaggttcacgccattctcctgcctcagccgcccagttagctggaactacaggcgcccgccaccatgcccggctaattttttgtatttttagtagagacggggtttcaccgtgctagccaggatggtcttgatctcctgacctcgtgatcccgcccggctttgggcctcccaaagtgctcggattacaggcatgagccactacacccggccccccaatatattctttagtctaaagtaaactgcttcttcccattccccacactctccagttcccatttttcccttattgcaggctccaatgttcctgccttctccttgctgcactgccatctgcattaacccctcccctgctgtgctcagctatggaaatgccaaagtccctaacactcagttccataaactntacctcaccctctttatccccctaataaaatg

SEQ ID NO: 68 - DNA, 488 bp, Homo sapiens
  I.68 (AI830281)
  misc_feature (250)..(250): n is a, c, g, or t
  misc_feature (481)..(481): n is a, c, g, or t
tattctttcaatttttatttctcttacatgctcaaagaagccaagcaaatccaggtatacatgtatatattttaattttacaggagagagaaagaggtataaggcaagaattaactacattttcatttcactatttctttatgagctctattttgctgctaagttcaagtttcaaaaaaattattaattcctctgctatgttatcttgtcccaattcacaaaataacaggggatttcccatgtgactcanaagcaagaatcttactcctaaataacataaacagcaatatgtgtgactactgtcattcattaacttcgatggtgaagttcattaaactgaccattaaaagaacatttgaacaattccaaaagggagcaaggataaatctccaaatcacccaatagacaaggaacccagagatgacatacagtgtgctcacttccacccactgccactgagaacactgattgctctcttcanacacaga

SEQ ID NO: 69 - DNA, 536 bp, Homo sapiens
  I.69 (AI825924)
  misc_feature (495)..(495): n is a, c, g, or t
cacttttttcatttttttttattaatcaaatgatacaaaacaaccatcattctgtcaatgcccaagcacccagctggtcctctccccacatgtcacactctcctcagcctctcccccaaccctgctctccctcctcccctgccctagcccagggacagagtctaggaggagcctggggcagagctggaggcaggaagagagcactggacagacagctatggtttggattggggaagagattaggaagtaggttcttaaagacccttttttagtaccagatatccagccatattcccagctccattattcaaatcatttcccatagcccagctcctctctgttctccccctactaccaattctttggctcttacacaatttttatccctcaaatattcatccctggcccaaccagtcccctgagcctccctctggtggagactcctccacccatgagctccccagagcatccaagacagagtgcacagagacctgnggaaggaagctgaactttgcagagatgaggacaggtgcagg

SEQ ID NO: 70 - DNA, 602 bp, Homo sapiens
  I.70 (AI825885)
  misc_feature (261)..(261): n is a, c, g, or t
ccggatcagtccttgcctccgtgcccccacgcacaggcagctccaggagcagcggccagcaacccttctggggacaccttactgtagtccggcaggacagccgatcagagccgctctagggggtggtcggagtgcccatttcggctggaatcccaactcggctccttgctctgtgaccttggggtagttagttgacttctctgaacctcgggttcctcatcggtgtaatgagcaaaacataaacaatctttttctcacagntgaggttatccacaggaagcatttaggagaactggctcaggtagacatcagtaactattagctggaattcggttaccactattgcattccttcctagcactgccaggggcctgggaattccctctcccaggtatttccatatcctgtcaggtattcccccacctattggaatagctctgcctacatggttctaataggaccaagagattggcgtcaagtccaaggggcaccattattatctgcattacttagattgcagatgatgacagtaagatcagggaacagtgttacccttagacccacccacagtattaccagtgcctatgttgctatggctaact

SEQ ID NO: 71 - DNA, 403 bp, Homo sapiens
  I.71 (AI825491)
  misc_feature (374)..(374): n is a, c, g, or t
  misc_feature (396)..(396): n is a, c, g, or t
ttttttggaagactgttactgatttgtttaataaatatgatacatacatccaactccttctgtcacacgatttgcttttttctttttccaaatgttacaagtaaaataattaactttatgagtgtttactatgacacaaatttatgacattatacgagattgaaaagtgaataaaattgtacttaccataaaggattgccaggagagacaggggcatgacaagtagtcccactagcatatcagcaatggctagggacattaagaagtaattggtggcattgtgcagtttcttttccatgcttactgccatgatccaagggatgttgccacctattgtcatgattattatgatgacgatggaaagtgtggccagntttgacccccgttgggaattgnaagcgtc

SEQ ID NO: 72 - DNA, 173 bp, Homo sapiens
  I.72 (AI824470)
tttttccctcccagaaatacttttattaaaataaactgagcaaggccaggcggctcaaaatgatccacacaagggggttcaaagataatccaacgatggagacaggagacagggtgggagggaagcgggtcacgaatgcacaggaaacagcgggactgtgggaggacaccctg

SEQ ID NO: 73 - DNA, 458 bp, Homo sapiens
  I.73 (AI822009)
gtgtttctattttagacttttattctcaaagggatgatgaggatgagacacggcttaagaagttttgagctgagaaatgaaaagaagtcacttttctttgctgccacagaactaagtagggggaaaattaagcccaggggttcatttaacctgttacaacaaaacacagaaaccagacggcaaagtgtcatttgcaaggtgatgtgtctttgtcggagctgaaggctgtcgccggtcggctgtctccatggagtccccatctggccctgcactccccacagggatgatttcatcaggagcgtctgcatctgctgcgtttctgtcggggatcagctgctgactgtcggcatagctcatgacggcagcagttctcctgtcttcatttccctgagcacttgcttttcaatttttcccatgtttcttcaccaaatttctctatcacaagagattgcagacag

SEQ ID NO: 74 - DNA, 455 bp, Homo sapiens
  I.74 (AI821674)
aggagcctagaaacaggagctttattctctaatgtgcgtccagcaagttccttacacaatcaaggaaatggtttctctttcaggcatcgactcttttatcaaaagaaaatccatcctgctcagtcccacccaccctgggcagaagctggcgttgagggcagtgtggaggctggcgttgaggctggcgccgaggcctgacaggctgacaagggatgaagtcctttttgtgtgatagtcgtccaagtaatgcccatagtagtacttccagaagactgtggacacacacccacaggcctcagccctctccagcgtgtggcagggggaggccctggagggaggggatctcagggagaaagggctccagggggaaggtgaggggaccctgccgacgtgcccatgcacccacactcctgcccactgtccctgtcccatctctgacaccccatcacagtcgg

SEQ ID NO: 75 - DNA, 549 bp, Homo sapiens
  I.75 (AI821569)
ttttttttttttttttttttttgggaaagaaaaaaaaactttatttcattggggggagcggggcggagggttccccggggctttgcattggagggccactgtttttcccacaaataccacacggtcttccaaggggaccaccaaggatggggtctttaggacagtcaggggggcattagctgaaataaaaccggctgagttctgagcagtacagctgtaaacccctgcgtcatctattttcacatcagggatgaaaaacacgtcgtcatccggcatgacatgcatgcgtcgctcacgggcagcggggaaatccgtgcctccatccttctgccaggcaatctgagggtttgggtgacctgtggcagcacattcaaggcgggccacggtggtggtccggatggttatgtcgtggggcgttttggtgaatgatggcaacacattcacggggagcctggccttatgtgaataggtggagccaaagtggttggtgatgacacattggtagcggccctcgtgcccgaaagtgacctgaccgaggtgcaagatggt

SEQ ID NO: 76 - DNA, 500 bp, Homo sapiens
  I.76 (AI821557)
ttaacattcagcaaatatttattaagcacttataattggcacgactttttttttaaaaaaagaccatcatgttcttacatgaggctcacaaactaatgtgttgacacttcagtaaagtctatagtcacaaaaattttggattgactattatgggatactaaaatatgcataagtatgaatggctactttagtgtttagccatcattagttcttatttttagtgttacacactgtaggagttactgcaaaatgagacattggaggattaaataatatcagatactcacattttaaacagtcctacatagcaatagtgaaacaactcttaccaatagctagaaatacaattttacttaaggatttacaatacttttttttggggggggggaagaatagataatttaatttcaaaagcttaaaattatgcaaataaaaatttactttttgttcatattgtcaagtaccctcaagtgaagtaataaactactaagcatgaacag

SEQ ID NO: 77 - DNA, 559 bp, Homo sapiens
  I.77 (AI821473)
tatggagaagcatgttaagaagtttattttatagaccacagcagaaattccagccaagtttctttagaggaaatcacctgggtgtggcaaacagacagggcttccattattctacctttaggatttcaatagtataaaaccggttgtttttgatggggattacagcagcatcatcagggcagatgcctaattcccgaataacatcaacgacggctgcaatttgcacagttctgttggtgtaaaagtcccagtagaaggtttttggattgtcgtcacataggcaggcagtatacttatagttaaatgcaccttgtagagggatgctgctaatgaggtaagttttaaccaccatgcattctttcaattctgtttgaactgcaagcactgcagtgacttcgtcatttggacgtactgacttgggaatgtcaaaattctttattatgatcttccgagtgttgtcctgagctttgttggcccccaactgcaggcagagaaccaggagcagggtggcagggctggcccctgacaggagctggagcaagcgcatgctggagaaaac

SEQ ID NO: 78 - DNA, 461 bp, Homo sapiens
  I.78 (AI820923)
  misc_feature (398)..(398): n is a, c, g, or t
ccaggtgggaccagccgtgggggcagaggcactgggccgactgtgatggggtgtcagagatgggacagggacagtgggcaggagtgtgggtgcatgggcacgtcggcagggtcccctcaccttccccctggagccctttctccctgagatcccctccctccagggcctccccctgccacacgctggagagggctgaggcctgtgggtgtgtgtccacagtcttctggaagtactactatgggcattacttggacgactatcacacaaaaaggacttcatcccttgtcagcctgtcaggcctcggcgccagcctcaacgccagcctccacactgccctcaacgccagcttctgcccagggtgggtgggactgagcaggatggattttcttttgataaangagtcgatgcctgaaagagaaaccatttccttgatgtgtaaggaacttgctggacgcacatta

SEQ ID NO: 79 - DNA, 500 bp, Homo sapiens
  I.79 (AI820838)
tcagcagatttggaagcattgtggtaaagtctaaggttttcatatccatagtgctgtttggtgagtaccggcagtacagttgaggggagcagggaacagcattgccccgtattgaaggtggagatggttacattcttcactgctttttgcattttgagttgtgtgcctataaaatttggccaaaccattttattattttgttcaaacttgactaagctgagtgatctaaaattatacagaacctaaatcaaagaagagaatgtaaagtcctttagttacttctaagaatttgaagtcaagcacgaatctaagacatagattatttttatatagctaatgaagagtatgttacgaaattgttgggtttttggggtattgagggtggcaaattttgtgaatcatgcatgcttcacagaaacaaccaggtttttccagaattagtctggatcagtgcctaacaaagctgttattaattctccacacatgagtctggctaactg

SEQ ID NO: 80 - DNA, 519 bp, Homo sapiens
  I.80 (AI819336)
gactcgctgtttgtggcccaggtgcaggaagcttacgcggtggcagccgctcgctgaggtagtctctcgcggcgccggggatccctgaacacagacagcgcgggactgagaaggaaagcttctttctgggcagccagagccgcaaaggtggagccgcgttggcgccctccgcgggaccagcgcctcggatgcgggcggagcgcggggggccgcggctgcgggagcgcgaagcggggggccaggggcgcctcatgtgagagccgcgggaccctgagcccgccgccgtcccggagcacggggtggtgtgtgggggaagccgcccccggcagcaggatgaaacgaggaggaagagatagtgaccgtaattcatcagaagaaggaactgcagagaaatccaagaaactgaggactacaaatgagcattctcagacttgtgattggggtaatctccttcaggacattattctccaagtatttaaatatttgcctcttcttgaccgggctcatgcttcacaagtt

SEQ ID NO: 81 - DNA, 385 bp, Homo sapiens
  I.81 (AI811503)
tttttttttttttttttttccagccgggttggagtttatttctgccaaagcctggaggctgggagggtaaaggacactcctttagtcccagagggaagctccgaaccctcagagcaaccagaagggagggcagagcatgggcagcagcaggagtgagaggggtccccttgtcctgcccctttgcaagggttcaaggctggtggaggcctggggcttctgtcgctcaggagttcaggggtggacgcaaaaatgggggaaggagagtggctacgtaaagagtgagagcgagattcctaaaaagatgcacagagagaccctcagagaggccaaaaaagatggtgagagggtagggaaggagagggagggagagagagagagagagaga

SEQ ID NO: 82 - DNA, 448 bp, Homo sapiens
  I.82 (AI811485)
tttcaaggcaataaaaaaaatcattttaatttttgatacatattaaaacatcttagtcagttcctcctgacagcattaacacagacaaatacacaagacttcaaacatgctttaaaatgacattcagcaaagtacttaaaatttaataaatagcaaatcacacacagatacatttttcataatcattaaactactaaaacagacagttaaagaataaataaaccgcaactgacagtaaaaaaaatatgttgggttttgcaattcacactacttaaaaaggggggatgatctgaatgatttcttaattttcttttgagagtgtagcatgatcccccccaggaataaaatatattgaaaaaatcactcttacaacaatgtattttttaaatacaacaaataaatatgaaaccagcaaagcaatttcaagttgtaataaaaatgtcccccg

SEQ ID NO: 83 - DNA, 470 bp, Homo sapiens
  I.83 (AI811484)
  misc_feature (438)..(438): n is a, c, g, or t
agaaaagaacttggcattatttattcaagtttatgatacatattacactcccaggtatatgttatacagaaactgacgtagatgtgatggaatacatatatgaagaatgttcacattagcatttataacaatcctaaactggaaacaacccagatgtccatcagcaatagaatggctaaacatattgtcacatattgttataatgggacactgtaatatgcagcaatgaaaatgcacaaattacagctataggaacaacctgaacaacatatgaattaaaaacaatgttgagcaaaagcagcaagaacaacagattacatattatattgttccagttacataaagttcaaaagaaagagtgagactaaacaatatattgtttagggatgcatgcttgcgacaaagcgacaaagaaaagcagggaaatgattatcacanatgttagaataatgactacacttaggagggag

SEQ ID NO: 84 - DNA, 518 bp, Homo sapiens
  I.84 (AI809484)
tttttttttttttaaattatttcaatgtgtattttatttttggggggtgattctaatattctgtaatatcctttggtttgttatatatcattcaaacatcattcattccattcacttaaagcatcatcttcaccaggcatttctgttggtaattggtcaagagaagttgaatctttgtatctcacagaactctgctcggattgtacctcaggtgtagaggcttttgccccccagaaagccttgactgctgcccgtgtaaaattgtaaaagttgcatttaaaagctctctcatagttggagaagcaagtcatgagattgttttaaaaagcatctacataaagagacggggcagcctgaactagggcagtcacaggagtaatgaaaggcgatggacagtttcaaggcaacatgtaggagacatcacggacagggctttgcaattcacactgctcgtatagactgtgaatttaatagttgctactatttcattattatccagtgtgtcacactcgaaagcc

SEQ ID NO: 85 - DNA, 465 bp, Homo sapiens
  I.85 (AI808703)
  misc_feature (20)..(20): n is a, c, g, or t
tttacctattaatttacaangcctttttttattaaaatggggaggaatacaaatagtttatatcagtaaaatacagtagcattcaggctctaatatgaacattacatcaaagcctatggatagataaggtaagagatttaggaaattgggggaggaaggaaacatcacttatcttattactccagattacagacagctgccacagacaataaaataaaatcgcaattaagttgattgcagtacttgaaagaaaacttattaaaaataaagatttttaataaaatcttacattcttgacagatataccatcacctacctttctaaaagcagtagtagtaaacacaattgtagaatatgtatgttaattagtctttgagtggtacaatactataggttttaaaaccctgacaacactcctactttctgctgcttcaatatcagattatggcatggaattcatgtaag

SEQ ID NO: 86 - DNA, 526 bp, Homo sapiens
  I.86 (AI808054)
  misc_feature (26)..(26): n is a, c, g, or t
tcgccttggggacgggcagggccgtntgtttttggtggtttggcgaaacctgcaaacatcaccttcttatccatcaacatgaagaatgtcctacaatggactccaccagagggtcttcaaggagttaaagttacttacactgtgcagtatttcatatatgggcaaaagaaatggctgaataaatcagaatgcagaaatatcaatagaacctactgtgatctttctgctgaaacttctgactacgaacaccagtattatgccaaagttaaggccatttggggaacaaagtgttccaaatgggctgaaagtggacgggtctatccttttttagaaacacaaattggcccaccagaggtggcactgactacagatgagaagtccatttctgttgtcctgacagctccagagaagtggaagagaaatccagaagaccttcctgtttccatgcaacaaatatactccaatctgaagtataacgtgtctgtgttgaatactaaatcaaacagaacgtggtcccagtgtgtga

SEQ ID NO: 87 - DNA, 356 bp, Homo sapiens
  I.87 (AI807480)
tttaacagaaatatctagtagtgggtttaagacaggcgggcgggaagtctgccagttggcagtctctgacgtaaaagatagcagatactgccacttctgcttctccaagcccctctgcagggaaacacctctgcgcaagccaggctttcttcattccagacaaggatcaccacaaaacccagtcaacgccggcactcatttggaggtgggggtgaagatgaaatgacgtgacgaatatgagtgtggtttgtaagtacacagtagcattcagtggtatggttgtttcttagagatgacggcagagcacacagcggcccagaccctgttcctccttccctttcagcctcacatacacc

SEQ ID NO: 88 - DNA, 273 bp, Homo sapiens
  I.88 (AI805083)
tctcttcctgtacagtatttattgttcctggcactttatttaaagatatttgaccctcactgagtgtctgtgtgtctgtcctgcatccctgggttggtgtcttgagatgtggagggaatgcgaggagctgaggtcaggccaagccgttgagaagccttttccagagtctgagaacagaggttaagacctctccctaggtctgaaggcggagacaggccggcttccaagagactagtccgagggcggagggcggaggcagggacccagtctggg

SEQ ID NO: 89 - DNA, 569 bp, Homo sapiens
  I.89 (AI804573)
ttttttttttttgtggtctgaggtaagactttattgtatacttgggtggggtagcccaaatggatgcaaggttgcaggcatgggaagcagccctcttgggtgtcactctgaaaatgaagtagggtggtggccgcacctcgccagtgaattagtcccctaccaaggtcttacagacccacccttcctctcaccctccagttcccactgtcctccaaggagaagagccttgggtaagtgtccctccctccttcagagagtgggactgtctgcctcttgaaagcgaggattgatggtggtcgtgatggcacttttgtagagaggattactgtcctgcttccagttgagttgttgctgctccttctcaaagcgactgtattcccggcggtcatagatttccaccgagagccggtaagccaggaccagccccagccccactgccacgatgccccctacgcagcccagcacaatggcctgcgtgggtctgctcccttttcttgggtctcactctgagcacgaccgtgcctctggcgtcatccttcaccaagaagaagaacagctggttgtccagg

SEQ ID NO: 90 - DNA, 220 bp, Homo sapiens
  I.90 (AI801722)
aactgacatttggttttattgtgccaaggacattacagatggcggatcttgtcaacacctgcagggcacgggtgccccatctgccaaggctgctcccacactccctacactcaaatcccgggtggcagccataatccccaaagatgacccccaccccaagattccaaagaagctagtggtggtggaagcaaaaggaatgcagcaaggtcagggtttcatt

SEQ ID NO: 91 - DNA, 537 bp, Homo sapiens
  I.91 (AI799864)
ttttttggatacatcttaggtttttattagcataggaacaacacacggtgtgcatctgtgtgttccccaaatgcacacaaaccctgtctctctcaagaatcactgatgtatttcatcgtagagttgagaatttctaggccatgaagctttctcagttgagcagcaaatctgggctcagctgtgcacagcttccccagagcaatgcctgcgttcacctgcacggccgtcttctgtgtgtcactgcctgcaagctttaacaagacctgcaaaaggtccgtctttagcagggaagacgcaacgttgggcacctccatgcagttaccaaggcagagggcagcgttgcccaccagaacctcatcctccgagctgagcagcttcatcataacgctcaactttttatccagtcttattacttcttcccgagcttcatgataactattcgtgcagatagctagtatctttatagcataacgtgatgcagtctcacctcctgtcttcaggaatttcatcattttctttaccactcctgctcgcaag

SEQ ID NO: 92 - DNA, 477 bp, Homo sapiens
  I.92 (AI799683)
ttttttaacttgagacccagtttcgctcttcttgcccaggctggagtgcactggcgcgatctcgactcactgcaacctccgccgctgaggttcaagtgattctcctacctcaagtctcctcagtagctgggattatgggcatgcgccaccacgcccggctaattctgtacttttagtagagacagggtctctccatgttagtcagggtggtctcatactccccacctcaggtgatccgcccgcctcggcctcccaaagtgctgggattacaggcgtgagccactgcgcccggcctccttccttgttttcttaagacaaagtgctgtatttcctgacaaatgcatcggctagagctcaaggtttaaagagaaaacacaactgtcttcctcctccctcattcccggtgtcttatgccccacaactttctttgcagaagaaattttgaattcaatgctgtgatctaattaaagatgctat

SEQ ID NO: 93 - DNA, 503 bp, Homo sapiens
  I.93 (AI799137)
ttttaatttatggaactagtgggatacatttatctcgcccgcactaattaactatccttaaatcacaatcttcgaaaggagtatctgccacatgcagtctggtaaactgcttttcataccttactcagtcctaagtatgtcaccatggacataactggtgctgccaatgcaaagaccagcaagtgctttctgattcgattccgctctaagccagcatgcatcaagaaggaaaccagtccaaaagcagctggtgccttatgtagcatgattgccacaaacacaattaactggacactggtctgtgaagtagatgctgctgctcccaaagcaacaccatcagctgcagcatggacaaccagacccagcgtggtggtgattttggaatagctagaccttgctgcttctggatcgtcagtagaatgcacatgggagataccaatctggttcaccagcaacatgaaaacgaagcccagaacgagggaaacaccaaaataggcatgcag

SEQ ID NO: 94 - DNA, 472 bp, Homo sapiens
  I.94 (AI798870)
ttttaaaacaacacatttattaactcacagtttctgtgggttggtagtttctgtgggctgcaatcaagatgatgactggagctgcagtctcacctgaggcccagcagaagggaaggatctgcttccaagctcacatcattgttccagcattccgttcctcattgactatcggattgagaacctcagtgttttgctgactgttttctggaggctgctctcagatatgactagttccttgccatatcctatgggttagaagcaagtcacaggtttctctcacactgtttgttgagggcctatgatgtgcgcaacactgataggtgctagaaagaggtggaatcctggtgcgtggtccattgcctgaagttgataatcttgtggtaggtggtttacacaggggacactctgagtgttccatagacactctaggtcaatggagaggaaggtgcagaaaagctgaggaaacacttgg

SEQ ID NO: 95 - DNA, 324 bp, Homo sapiens
  I.95 (AI798388)
gttccattcactccgagccttagctaactcagccctgatgaccacagggacttcttcgttctttaactcaagttccttctgaagagaatgaatcttctcttccaattcctttccaggaagtatatttttcctcatattttcaagctcactcttccatttctctttagcttcagaaacagcaaatgatatccttttgttcacagagacctcatgctgttcttcccactttttctgttctgccttcacaagtgcttgatactctgccagctctggtagttctcccagccatcgctgatgagcattttgcacagctatttctacctg

SEQ ID NO: 96 - DNA, 518 bp, Homo sapiens
  I.96 (AI793293)
tttataacattttatataactcataaaacagtgtttgtataaaaattcacacaaagttgctagagagcatacaatttccaaaaatgtcctgggtttttgttacattcagtttcctaaggatgcactccaatctatggtaaaatgcagacatgatgcgagatttcattatctttggtaaaactattctcattattttgtctcctcacagtattaagtctgatatccactttgtgcagggtctgctattactaggatgtcagaaaaacattaaggctggatctacgagaggcaagtatttcccaacagcagtaatagccccttggccctcacccccacttcatgtatctatacagtcgatctacacagccaggcggggtgcaagctcacgacctccactcgggagtctcgagatcccctcttgactgggaaagaagcaaacatttgtggggaacgttggaaacggaggccatctctaaatgaacccagtggtcatgctgtggtgtggtcagaccagcaac

SEQ ID NO: 97 - DNA, 517 bp, Homo sapiens
  I.97 (AI793291)
  misc_feature (509)..(509): n is a, c, g, or t
tgggattaaatctgtgagtttgttgagaaaggctagatgttcctttgctgcctaagtgaaatccaagatgtggtgctgaatttgaagcaccagaggaactggacattccaaaaacattaaagccttgaggaacttgagctggtgctgtctgtggctcctgctgaaatagttcactattggactggccaccttgaagttgtccatcactaatgctgtgcgttagagtcctacttccattcatcctacttccttctcttccatggtggtaaatgttctgtgattgcaagtccaagttgagagaagtcatgtgattgcgtagaccagaaattccagaatcatctgaaaaattcaagtctccttcaccataaagatatcttgtactctcctgagagagaacagcacagcaggcatccaggttattattattctgtaacatgcacctggatacaacaacttcaggtacttcagggaatttttgtcgcaggtcatgtaaaacctgaaaatcaatntggtggct

SEQ ID NO: 98 - DNA, 530 bp, Homo sapiens
  I.98 (AI793191)
  misc_feature (8)..(8): n is a, c, g, or t
tttagtanatttaatttaattattcaatgtatagaaagttttttagtgtagtgcttttcagacgtaactattgggagtgtattttgaaatacatatcacatatagcaaaaagaaaaggaaaacaatcctattttttaaattacattgcaatatatacagatataaatataaatacatatattcactatgatagcatccaaaatggcccccatgaagccccacctcctgatattctcaactctgtttgattctgtccacgttgtgccattgttggtccatgtgaccaacatcatgtggaagaagagatgtcacttctgtgattaggttttcaaagactgtggcttacatccaagttccctcgctctttctctcatgtgctttctctctcagtatcattgctctaggagaagccagatgacattttatgaaagtttttctagcatcctaaagaatggaggcctggcaaccgccgtgagtgagctgagaagcagattttctccagccccacccgagccttgagatgatggcag

SEQ ID NO: 99 - DNA, 668 bp, Homo sapiens
  I.99 (AI793160)
  misc_feature (255)..(255): n is a, c, g, or t
  misc_feature (547)..(547): n is a, c, g, or t
  misc_feature (548)..(548): n is a, c, g, or t
  misc_feature (576)..(576): n is a, c, g, or t
  misc_feature (611)..(611): n is a, c, g, or t
  misc_feature (660)..(660): n is a, c, g, or t
ccaacatctataagatcaaaaaagattattatgatatgtatgagccagaaggagtgaaaattttcagatgtccatctcctatctactttgcaaacattggtttctttaggcggaaacttatcgatgctgttggctttagtccacttcgaattctacgcaagcgcaacaaagctttgaggaaaatccgaaaactgcagaagcaaggcttgctacaagtgacaccaaaaggatttatatgtactgttgacaccatanaagattctgacgaagagctggacaacaatcagatagaagtactggaccagccaatcaataccacagacctgcctttccacattgactggaatgatgatcttcctctcaacattgaggtccccaaaatcagcctccacagcctcattctcgacttttcagcagtgtcctttcttgatgtttcttcagtgaggggccttaaatcgattttgcaagaatttatcaggatcaaggtagatgtgtatatcgttggaactgatgatgacttcattgagaagcttaaccggtatgaatnntttgatggtgaagtgaaaagctcaatanttttcttaacaatccatgatgctgttttgcatatnttgatgaagaaagattaccagtacttcaagtttaattccagtcaggaanaagatgga

SEQ ID NO: 100 - DNA, 586 bp, Homo sapiens
  I.100 (AI793023)
  misc_feature (34)..(34): n is a, c, g, or t
  misc_feature (229)..(229): n is a, c, g, or t
  misc_feature (533)..(533): n is a, c, g, or t
  misc_feature (539)..(539): n is a, c, g, or t
ccaagaattcggcacgaggaagaaatatttgtgnaaaatcccttgttcttttgggtgacattaactgacatttgctttttttcaagacctaatagaaaataagaaagcccataatgtatttagaaacaggaatcctcagagcaattctctgtattctcatataatttcaatgtaaaacagaaaacatattgatgtgttggtgataggcttgaattattaaaaacttcanaaacatcctaagtgtttcttttttgctcaacgttgtcaactatagtaggtctcccttgtggtgtaatgaattgcccccaaactattatcttaaaacaacaaacatttattatcttatagcatttctgagggtcaggatctgggactggcttagtggagttgttctggatcagggcctttggaaagttgtagttaacttgtccccagggctgccatcatctcaaggctcgggtggggctggagaaaatctgcttctcagctcactcacggcggttgccaggcctccattctttaggatgctaganaaactntcataaaatgtcatctggcttctcctagagcaatgatactgagagag

SEQ ID NO: 101 - DNA, 692 bp, Homo sapiens
  I.101 (AI792928)
  misc_feature (543)..(543): n is a, c, g, or t
  misc_feature (611)..(611): n is a, c, g, or t
  misc_feature (622)..(622): n is a, c, g, or t
  misc_feature (623)..(623): n is a, c, g, or t
  misc_feature (641)..(641): n is a, c, g, or t
  misc_feature (682)..(682): n is a, c, g, or t
cctgggcatagagtgaggagcacccaagtggggccagaggaacgttgtgtgtggcagcaaggagcccgcagaggaacatggcgctgctctgggggctcctggtgctcagctggtcctgcctgcaaggcccctgctccgtgttctcccctgtgagcgccatggagcccttgggccggcagctaactagcgggccgaaccaggagcaggtgtccccacttaccctcctcaagttgggcaaccaggagcctggtggccagactgccctgaagagtcccccaggagtctgcagcagagaccccaccccagagcagacccacaggctggcccgggccatgatggccttcactgccgacctgttctccctggtggctcaaacgtccacctgccccaacctcatcctgtcacccctgagtgtggccctggcgctgtctcacctggcactaggtgctcagaaccacacgttgcagaggctgcaacaggtgctgcacgcaggctcagggccctgcctcccccatctgctgagccgcctctgccaggacctgngccccggcgcgttccgactggctgccaggatgtacctgcagaaaggatttcccatcaaagaagatttnctggaacaatnncgacagctatttgggcanagcccgtgagcctgactggaaagcaggaagatgacctgcanacatcaacca

SEQ ID NO: 102 - DNA, 376 bp, Homo sapiens
  I.102 (AI792818)
ggccgaataggaacagctccggtctacagctcccagcgtgagcgacgcagaagacgggtgatttctgcatttccatctgagtatggatttatcaacacctgtctgcaatctcttgtgatagagaaatttggtgaagaaacatgggaaaaattgaaaagcaagtgctcagggaaatgaagacaggagaactgctgccgtcatgagctatgccgacagtcagcagctgatccccgacagaaacgcagcagatgcagacgctcctgatgaaatcatccctgtggggagtgcagggccagatggggactccatggagacagccgaccggcgacagccttcagctccgacaaagacacatcaccttgcaaatgacactttg

SEQ ID NO: 103 - DNA, 535 bp, Homo sapiens
  I.103 (AI792675)
tataagaaattttaattttctttatactttaatgtgctttctagattttatgctataagcataactgcttttatagtcagaaaaaaagcaaaataagatacaacctattcggggtaatttaaagacccttttcacacatttcaaaatgcagaattacaaagtcaataacttttattaacataatgatataaaaattttagtgtgatatacagaattcccagagtaattctaaaacattttaatgcacttcttaaaatcttaatttacaagacaccttgtcttaccaccactgacctttcaatacaaaaagctgacaatttttgtttgctataaaactacaacattaagattggagttaggtagtttttttttttttctttcccttcccagccattctattgtaaggaatgtccattagactacttcccaaacctctgtatgtcaacaataagttacatagattctgtacatacttacaacaggattattagaattccagtatgtcacaacatactttaccacagtccaacaccat

SEQ ID NO: 104 - DNA, 244 bp, Homo sapiens
  I.104 (AI792430)
agttttctcatgttattatcaagaggattttcgagcatagcacctgtcattgtacccactgtcagcggatttcttcttagtcaggaccctgagtttgggtggaggaatgtcttcttcttgctgtttgccgttaacctgttaggactactcttctacctcatatttggagaagcagatgtccaagaatgggctaaagagagaaaactcactcgtttatgaagttatcccaccttggatggaaaag

SEQ ID NO: 105 - DNA, 389 bp, Homo sapiens
  I.105 (AI792189)
gccctgacattttcacacctgagcctcagattccaatagctcactccctagagcctgacgccggggcccctgacccctgagcctcagattccaatacctcactccccagagcctgatgccggggcccctgacccctgatctacggaggcctgctcccggaccgtgcgggcaccagtgcagtgctgccttggttcctggacccctgggcccatcctgggaccccagatggggtaaggagaggccccagaaccccaaagcagacagcgagacccccagcggcagaggcctccctcggcactccaggcttataatttcgaactcttctggaaggtcactcaggaacaccctccctgcctgtgcaaagagaaaacaagcgccttgtttccttc

SEQ ID NO: 106 - DNA, 552 bp, Homo sapiens
  I.106 (AI791618)
gttttctccagcatgcgcttgctccagctcctgttcagggccagccctgccaccctgctcctggttctctgcctgcagttgggggccaacaaagctcaggacaacactcggaagatcataataaagaattttgacattcccaagtcagtacgtccaaatgacgaagtcactgcagtgcttgcagttcaaacagaattgaaagaatgcatggtggttaaaacttacctcattagcagcatccctctacaaggtgcatttaactataagtatactgcctgcctatgtgacgacaatccaaaaaccttctactgggacttttacaccaacagaactgtgcaaattgcagccgtcgttgatgttattcgggaattaggcatctgccctgatgatgctgctgtaatccccatcaaaaacaaccggttttatactattgaaatcctaaaggtagaataatggaagccctgtctgtttgccacacccaggtgatttcctctaaagaaacttggctggaatttctgctgtggtctataaaataaacttcttaacatgctt

SEQ ID NO: 107 - DNA, 454 bp, Homo sapiens
  I.107 (AI768212)
agtgtgagctgggtgagttgcctagtctgaaatgacagaatattcattggtcgtctctctgagatagggaccacactgtcctcaccaggactggcaggggaagccccagggctttgtgaccctgtccctatggggcaccctggcgtccagtgggcactccccagggcagcagcctggtttaaatgcctgttccccagaccccacagtcagacggtagagaggagcctcagggacatagcccagttcttcaggaccggggggcaacatgggctggttggacctctgaccaccaaggagggaggttctcaaggactggccaggttctgtgctgacaacttcgtgcttttcatcgacaaagcgagtcatgctgtcccttccccagctgagctggctgccaacaggcccagtggagagcagatttgaggtgggggtgaggtctgttccccaagcgcag

SEQ ID NO: 108 - DNA, 492 bp, Homo sapiens
  I.108 (AI762831)
gcgcgcccagccgcccgacttcgccgccgcctggagccggctggccgcgacctcagccgcccgccgcccgccggggagtcctgtgtatggaaactcacatgagtcagctcagtctagaagggtagtaatttctcataatatggataaagctctgaaagaagtgttcgactacagttatagagattacattctgtcctggtatggaaacctcagcagagatgagggacaactttaccatctgctcttggaagactttgggaaattgccagacagctgcaccacagactgagtcacgtggatgtggttaaagttgtctgcaatgatgttgtgaggactttactcactcatttctgtgacctgaaagctgccaatgccagacatgaagaacagccaagaccttttgtgttgcacgcatgcttgaggaactcagatgatgaagtaagatctctacaaacgtgttctcgggttctggtgttttgtctcctcccctca

SEQ ID NO: 109 - DNA, 572 bp, Homo sapiens
  I.109 (AI749464)
actgatttattgcttttaatgtgatgaaacaccaagtgggacatttaaagaagcagggggatacaagtatgtttttatctttaatcatttttgtagaataggacatgtacatatccatataaaaagagactgtagcagatgcctcccagaatcaaccagttcttgtaaacattgcatttgtgcagattttcatacttgattccaaaattgagaacaataagattaaaagcaaatttagtagccaccaaaaagtccagtttgactttctgcaacatatggtaccactcttctcttcagaacaaaacaaaacaaaaaacctagcagcacattaaaaaaaatttacaaaacatttcagtactctttccctcccatcaaaaaccgaacaaaaataaagtgcagcacccataaaagtgtcaagaaaatagccaagttcttcctttcttgtaacaaaatagcacttggcctcagcagtcttaaccaaattatacagtgtccatcattttgggttcatcatcttctttatgtaccaccgagtttaagctgcagagagctgtactgatagaatactgaag

SEQ ID NO: 110 - DNA, 672 bp, Homo sapiens
  I.110 (AI744347)
  misc_feature (525)..(525): n is a, c, g, or t
  misc_feature (532)..(532): n is a, c, g, or t
  misc_feature (533)..(533): n is a, c, g, or t
  misc_feature (550)..(550): n is a, c, g, or t
  misc_feature (586)..(586): n is a, c, g, or t
  misc_feature (599)..(599): n is a, c, g, or t
  misc_feature (608)..(608): n is a, c, g, or t
  misc_feature (617)..(617): n is a, c, g, or t
  misc_feature (627)..(627): n is a, c, g, or t
  misc_feature (632)..(632): n is a, c, g, or t
  misc_feature (637)..(637): n is a, c, g, or t
  misc_feature (639)..(639): n is a, c, g, or t
  misc_feature (648)..(648): n is a, c, g, or t
tcattccataagtatttattgagtagtatgaatcaggcactgtattaggcacaggagagtcaacaggtagccagagggacaagatctctacctttgtggaacttgtattctgaacacagttctctgctattcatctttagtggaatttcttttcaggataatacaaactggtggtccgggggggcccacttctcctttggcgcccttgggtcctggagggccctgattccctggcaatcctggaggcccggggcggctggactcagcaaacacattgctgtcgtaaacaggagtccctggagggcctgggggccctggaggtcctggggggccgggcattcccctcatgccaaatccaaggctggcatctcccggctcccctttctctcctttcaatccgttcatcccggggcgacccggccgtccaggaaagccaatctctcccttgtaccccggccgtccgtatggaacccggggtcctcggaagcccggctctcccttggctcctttctgggcagggcccanggcaccnngcgtcgggctgaagatngctgcccggtcacccttctcaccccttggtcccggngaagcctcgtcgnccttagagncccagttgncccttggtcnctgangtccngnaaagcctgnaaaaccgggcggggccttagtccc

SEQ ID NO: 111 - DNA, 178 bp, Homo sapiens
  I.111 (AI744042)
gctttttacaataaactctatattgtgcacatggagacctggagatgtgccgacttcctgttcccaaagccaatcttccccgccaaggagactgaggatttcagggctcagagttaccgcaggaatcgagttgacaccagggagagaggggggaggaggggaatcggaggggatgggt

SEQ ID NO: 112 - DNA, 608 bp, Homo sapiens
  I.112 (AI743803)
tttgcctatgtttttgtaaatatttcaaatcttaccatccaggaaaaaaaaaaaatctccaaattgcactgtaaccagggagatataagaatctggtcttaggtgtggggagtactcttccattaataaacaaaaggcctactgtattattaactaagagaaagtataatgtgaatcatgttaacattctaaaataacagaaagttaggaccatactagcaatgtgaactgtgcctgtttgaaaagaaaattttaaatactcaggcactaagcattagcctacctgaaactctaggatgaagtctagtgctgtattctttcttagaaaatagcaacacagagtaatagtaaataaacccaggtattcaccagttaaaactgtgaattgaagtgtctcagtagtagatatttatcatgaagaggttgatgccaagtgacaagaatagtttatcataagattgatgctcaaaatatggcagcctcatcagaaagactattattattctctaagtttaatagttgtgatcagtttaggaagcaaaattatccccacaaaatgtgaggatgccaggaagcagaacaatagagtatcatgtcaacattatctc

SEQ ID NO: 113 - DNA, 660 bp, Homo sapiens
  I.113 (AI740827)
  misc_feature (526)..(526): n is a, c, g, or t
  misc_feature (612)..(612): n is a, c, g, or t
  misc_feature (641)..(641): n is a, c, g, or t
tttattttttatcttctttaattattatttagtagtcaactgtcccaacatttgtctatatacctttttcaatttgatgactccctcttgtgtatcctcatctgtgacgatgtcaaacaaatttcccccatctcctggaacaatattgtattcaatttctgcattttgtccaaaatcaggatccacagctcttattcttccaatagctgaaccaataggggaagactcaggaactttcaagtggaagatgcttttggggaatcgaggtggattgtcattgacatcggtgagagtgatgttgactattgttgttccggctaatcctccaagctgtcctcccatatccttggcttggatgagtacttgatattgttctttgacttctctgtccatgtttggcaaagctgttctaataacacctgtcttgggatcaatagagaaataaggttgtccctgaagaatgctgtaaacgactctggcactgtttccataggtcgggtcatctgcatctgtggccttgacctgnagtacatatgcacccacaggagacatttctggaacagtagcaacataaggtccatccaaaaactttggctcattatcattaatatnctgcactttgatgatgaattctgattcangctccaggggctttctggt

SEQ ID NO: 114 - DNA, 321 bp, Homo sapiens
  I.114 (AI740697)
ctgcaggtagcggccagcagagcgagcggtgacggctgagtgtcctgggccgccgctgccgccgccaccgcaccgtttccgtgctgttgctgctgctgcagatactcgccgtggccgccgccgccgccaccgccgccgccgctatccacgtccaaggcagccatttcctcttgtttcacgggcttttcgggagcggtcatagtgtgtttagggcacctcaggcggggctccccgccgccttacacatggtgaggagcgaaggcggcggcggcgggagaggatgcgggaagcggcggcggacacggccggagcggtccgggg

SEQ ID NO: 115 - DNA, 257 bp, Homo sapiens
  I.115 (AI739201)
agagatagggtcttgcaacgttgtccaggcggctggacttaaactccaaggctcaagcaatcctgccccagcctcctgaatggctggtgttacaggcatgtgccactacactggctattgcagatatttgatcttaaaatgctggcacccgaaatcccgtaagtcacacagatcccgtgaatagcttggatttgtgctgcgggcctccatttgcagttcccaatttgggcattccaaacctggggagactggatgct

SEQ ID NO: 116 - DNA, 641 bp, Homo sapiens
  I.116 (AI734941)
  misc_feature (554)..(554): n is a, c, g, or t
  misc_feature (614)..(614): n is a, c, g, or t
aagcatgaaggtgttcaatatattaatcctgtaatctaaaatattatttgggcaatattcttaatctcttaaatattgattaaatggattttacaggaacaaggtaataaaatcatttttgagcagcgatttcatagttgtgaatgaaaatatgatgcattataaagtgcaagtgactccagcatcttcagaatgtgaacaggctcttgtcccccattgccgaattttacattcttcaatagatgattctctcccaaaacaaaacacttcattcagccatattggaccagtaccttgtccaaagtgagctgccttgtgcacggcttgaacacctgggtatcccaagctcctacagacgacctgtccaacgcgcacttcccagcgatcgtcacaaattgtaccccactggccgctgtggagtatctccactctcccctcgtgagggccgctcccaccgaccagtcgaactttcgtaaatggagttaatgtgtttccactccccttttcccctttctggccttttggtccagaatttcctggccttccggcatatncctggagtcctcgacttccaggaaagccaattgcttcccgatcacctttaggaccccgangacctattggacctggaaatctcgtgg

SEQ ID NO: 117 - DNA, 518 bp, Homo sapiens
  I.117 (AI734225)
agtgcctaccagtcagtggtatggaagatagatcggcttccagacaaaaattcaagtctagatcatccccattgtctgtcatacaaattagagcttggatcagaccaagaaattccctctgattggtatccatttgctactgttcagttttccgtgcctgacacctgtgcctcaaggacagaggtcaggtctctgggagtggagagtgatgtccagccacagaaacatgttcagcagcgagcttgctacaacatccaggttgaaatagaaaaaaagtggattaaaatcgatggagaagacccagataaaattggtgactgcataactcagtaggagtagcaagagtttatgatgacagcccacttgtcaaatatgtaattcaccgaaaccacaccaagtcctgctactgtagagtggaaatgacttctgaatagcggttttaggacaggtctgatggctgtgtttagagaagtttagacctaaaaccgaacaatctgtattttttgcttttcatgtgt

SEQ ID NO: 118 - DNA, 688 bp, Homo sapiens
  I.118 (AI733721)
  misc_feature (11)..(11): n is a, c, g, or t
  misc_feature (12)..(12): n is a, c, g, or t
  misc_feature (31)..(31): n is a, c, g, or t
  misc_feature (32)..(32): n is a, c, g, or t
  misc_feature (39)..(39): n is a, c, g, or t
  misc_feature (40)..(40): n is a, c, g, or t
  misc_feature (47)..(47): n is a, c, g, or t
  misc_feature (48)..(48): n is a, c, g, or t
  misc_feature (57)..(57): n is a, c, g, or t
  misc_feature (58)..(58): n is a, c, g, or t
  misc_feature (66)..(66): n is a, c, g, or t
  misc_feature (67)..(67): n is a, c, g, or t
  misc_feature (68)..(68): n is a, c, g, or t
  misc_feature (75)..(75): n is a, c, g, or t
  misc_feature (76)..(76): n is a, c, g, or t
  misc_feature (83)..(83): n is a, c, g, or t
  misc_feature (85)..(85): n is a, c, g, or t
  misc_feature (86)..(86): n is a, c, g, or t
  misc_feature (93)..(93): n is a, c, g, or t
  misc_feature (95)..(95): n is a, c, g, or t
  misc_feature (96)..(96): n is a, c, g, or t
  misc_feature (103)..(103): n is a, c, g, or t
  misc_feature (105)..(105): n is a, c, g, or t
  misc_feature (106)..(106): n is a, c, g, or t
  misc_feature (112)..(112): n is a, c, g, or t
  misc_feature (113)..(113): n is a, c, g, or t
  misc_feature (123)..(123): n is a, c, g, or t
  misc_feature (127)..(127): n is a, c, g, or t
  misc_feature (128)..(128): n is a, c, g, or t
  misc_feature (129)..(129): n is a, c, g, or t
  misc_feature (145)..(145): n is a, c, g, or t
  misc_feature (147)..(147): n is a, c, g, or t
  misc_feature (156)..(156): n is a, c, g, or t
  misc_feature (158)..(158): n is a, c, g, or t
  misc_feature (159)..(159): n is a, c, g, or t
  misc_feature (173)..(173): n is a, c, g, or t
  misc_feature (175)..(175): n is a, c, g, or t
  misc_feature (176)..(176): n is a, c, g, or t
  misc_feature (190)..(190): n is a, c, g, or t
  misc_feature (191)..(191): n is a, c, g, or t
  misc_feature (198)..(198): n is a, c, g, or t
  misc_feature (201)..(201): n is a, c, g, or t
  misc_feature (203)..(203): n is a, c, g, or t
  misc_feature (204)..(204): n is a, c, g, or t
  misc_feature (213)..(213): n is a, c, g, or t
  misc_feature (214)..(214): n is a, c, g, or t
  misc_feature (215)..(215): n is a, c, g, or t
  misc_feature (229)..(229): n is a, c, g, or t
  misc_feature (231)..(231): n is a, c, g, or t
  misc_feature (232)..(232): n is a, c, g, or t
  misc_feature (242)..(242): n is a, c, g, or t
  misc_feature (244)..(244): n is a, c, g, or t
  misc_feature (245)..(245): n is a, c, g, or t
  misc_feature (254)..(254): n is a, c, g, or t
  misc_feature (255)..(255): n is a, c, g, or t
  misc_feature (263)..(263): n is a, c, g, or t
  misc_feature (264)..(264): n is a, c, g, or t
  misc_feature (297)..(297): n is a, c, g, or t
  misc_feature (298)..(298): n is a, c, g, or t
  misc_feature (313)..(313): n is a, c, g, or t
  misc_feature (314)..(314): n is a, c, g, or t
  misc_feature (344)..(344): n is a, c, g, or t
  misc_feature (345)..(345): n is a, c, g, or t
  misc_feature (389)..(389): n is a, c, g, or t
  misc_feature (407)..(407): n is a, c, g, or t
  misc_feature (417)..(417): n is a, c, g, or t
  misc_feature (427)..(427): n is a, c, g, or t
  misc_feature (428)..(428): n is a, c, g, or t
  misc_feature (590)..(590): n is a, c, g, or t
  misc_feature (628)..(628): n is a, c, g, or t
  misc_feature (640)..(640): n is a, c, g, or t
ttgcaggaatnntcggcacgaggggaactanncagggcnncggcgtnnggtgacccnncagggatnnncaccgannggaccangnnctgtggnanngggccananngtatgnntgtatgaacntccnnngccttccatttccggnanccacagggngnnagaaggggtggtcncnntgattggggccgcnnatgtcangcncnncaggtgccnnncatgaacaatgacncnnatcactggcntnngcatgctcnnacattctnnacaggaagaaaccccaaccgtggtgggttctgnngcagtgggtggaatnncagtcctttcaatggccattggttaactannctccaaccgcaggtggtgacacttcccatcacttgtgaggcagnctggggaccagcctatgntgagtgccanccactggagnnctgtggccacggccctgggactcaaatccctcaccaagcacctgccccccttggtcggcagatttgtgccctttgcagcagtggcagctgccaactgcatcaacatccccctgatgaggcagagagagctgcaggtgggcatcccggtggctgatgaggcangtcagaggcttggctactcggtgactgcagccaagcanggaatcttccangtggtgatttcaagaatctgcatggcgattcctgccatggccatccca

SEQ ID NO: 119 - DNA, 211 bp, Homo sapiens
  I.119 (AI733707)
ttttccatccaaggtgggataacttcataaacgagtgagttttctctctttagcccattcttggacatctgcttctccaaatatgaggtagaagagtagtcctaacaggttaacggcaaacagcaagaagaagacattcctccacccaaactcagggtcctgactaagaagaaatccgctgacagtgggtacaatgacaggtgctatgctc

SEQ ID NO: 120 - DNA, 356 bp, Homo sapiens
  I.120 (AI733599)
gattgtaacaaggcgcttgttttctctttgcacaggcagggagggtgttcctgagtgaccttccagaagagttcgaaattataagcctggagtgccgagggaggcctctgccgctgggggtctcgctgtctgctttggggttctggggcctctccttaccccatctggggtcccaggatgggcccaggggtccaggaaccaaggcagcactgcactggtgcccgcacggtccgggagcaggcctccgtagatcaggggtcaggggccccggcatcaggctctggggagtgaggtattggaatctgaggctcaggggtcaggggccccggcgtcaggctctagggagtgagctattg

SEQ ID NO: 121 - DNA, 489 bp, Homo sapiens
  I.121 (AI733269)
  misc_feature (463)..(463): n is a, c, g, or t
tggccttgtatcccaaggactaaaagattagcacagacacgttttgatgttgaatgaactagtaagtcacagtaggtggtagtcttcattgatttctctgtaagtttttaaagaatgtatgaagatagtcacgaatgtactgagtgttcgcatcccccttcagttcaccttggctgtgtctacaggacaacaaatgtttgacagggaataaagtcgtgtctggtgtcatttgcgctagcgtgcccctcccctttcggtgttggctccaaaccttcctttccttttatgtttgtggggagtggggaaccacatcagcagcaatcatcaaccaaccaaccaatgggatctacttagtggtgaatagattggctatttaattggtaaaagttgctggtctgaccacaccacagcatgaccactgggttcatttagagatggcctccgtttccaacgttccccacanatgtttgcttctttcccagtcaagag

SEQ ID NO: 122 - DNA, 514 bp, Homo sapiens
  I.122 (AI733267)
ccagaaaatgcttggacagaagagatgagtactatttccactaaggcctagaattgcctactgtacaaatagtcctgatcaggcaatatacgaatggcccaaggaagccaccaaattgattttcaggttttacatgacctgcgacaaaaattccctgaagtacctgaagttgttgtatccaggtgcatgttacagaataataataacctggatgcctgctgtgctgttctctctcaggagagtacaagatatctttatggtgaaggagacttgaatttttcagatgattctggaatttctggtctacgcaatcacatgacttctctcaacttggacttgcaatcacagaacatttaccaccatggaagagaaggaagtaggatgaatggaagtaggactctaacgcacagcattagtgatggacaacttcaaggtggccagtccaatagtgaactatttcagcaggagccacagacagcaccagctcaagttcctcaaggctttaatgtttttg

SEQ ID NO: 123 - DNA, 759 bp, Homo sapiens
  I.123 (AI732397)
  misc_feature (640)..(640): n is a, c, g, or t
  misc_feature (702)..(702): n is a, c, g, or t
acactttctaagaatgtatttattgggtgcctccttgtttattggtttctgcatcagactataaacttcatgaggacaggggccataaccattgtgttcagtgccatctcctcagccctaaaacatgcctggtgcatggcactcaatacatttgtgaataaatgattctgtgaatgagccagagcttgttcctgtgctttgctttcgtgtcctgttcatgtctgtgtgtgcgtgttcacccgtgtgtacctctcagtatggaggcactagggggtaaaagaatgagcatgagatcaagcatgactatgacagtccccttctgtgtgtcagaagccactggagtaacactgatgaagttggtttccttcctttgtcctctcctcctgcccctgcagagttccttcaccccagcccagttcattcttgctgaatgaacgaaggtggaggaggcggtgcaggggtcaggagaagggctggcaagtcttagagaatcaggcgaggcttcaggaagtctttcttctccagagtgtccatgatcagtggtgggatggccatggcaggaatcgccatgcagattcttgaaatcaccacctggaagattccctgcttggctgcagtcaccgagtagccaagcctctgnacctgctcatcagccaccgggatgcccacctgcagctctctctgcctcatcagggggatgtngatgcagttggcagctggcactgctgcaaaggcacaaatctgccgaccaaggggggc

SEQ ID NO: 124 - DNA, 538 bp, Homo sapiens
  I.124 (AI732138)
gcctactactactaaattcgcggccgcgtcgacttttttttttttttttaatgtttttgtttattatactggccatgaacactccaccacagtaactctccttcttatttgcttcctaagtcagaaattctggaatctagacaggaatctatatttaactccacttgtaaccttcagtaagttgtttaaccacaccaaacctcagctttgtcaattataaaagtgaaagaggttagttaccatgaattatatgacataatttactttgaatttattcacatctggaactgtgaacactaccttgtcactgagaaggccccccctcacttccatcctcttcacttctttccacactgctctctacaatactattcttcataggtcatttttcatcaaaaaccttcaatggctctccaccaccttggtagcaatcaaaaacttttcacaacattcccgcattttgtttaagaaagttttcacatttggccaggtgcagtggctcacaagtataatctcagcagtttgggaggctgaggcg

SEQ ID NO: 125 - DNA, 475 bp, Homo sapiens
  I.125 (AI702056)
tatgagatgggggtcttactatgttgcccaggatggatttgaaatcctgggcttaagggatcctcctgctcaggctctggactagctgggattacaggtgtgtgccaccacaccttgctttcccactaattctgttcctgctagtttcttcccttacaagtaaggtgggtcatatttacctgtgagaaactcagaaatactcacttttccaggacagctggggtgaagagaatatgtagtggccactgtactttgtaggaaagacctagggctgcccagccagatgcaggggcttcccggggagaagtttcccgagaaggcccttctcttgcctgagtagcatctttgtgctcctttccgtgatactcgattgtcaagtgcaacagagggagaaggttgtcatcatctagcaataccttgtgtgctgactgttgaaaggccacattcacatcatgctcagttactgcagtgggtg

SEQ ID NO: 126 - DNA, 393 bp, Homo sapiens
  I.126 (AI702008)
tttttttttttttttttttttttaacaacatggagattttgttattataaatttcaaaacaaaatgaaggaatttccacatatttataaccttcaaagtacaatattaatacatgtctgtcagttagaaagaacagcagtttgttaggctacaaggtttaacataaaaccaatttacaaatgtgaaaagcagtagtggtccaatattcaccattacacatgaatctgtttcttccagaattttttaaaattaaaattttagtatcgggaaatattaaaataacaccccaaacatgccacaatcactattcacaaataaagttaaaatgaaatatacaaaaatccacttaatactgttaaataacaacaataaactacaagatttcctgaacag

SEQ ID NO: 127 - DNA, 262 bp, Homo sapiens
  I.127 (AI699726)
ttttttttttttttaaaagtgatcatgttttaattatgggctaaaaatgactaatacagtaagcttgaatttaaaaaattaagtctaaataaattgctagggaattccacaatgggagtcaatgaaaatttttctctacatacaatatgatcattaacagactagttcttatttggaatgataaggcaaaaatagtaaaaccacacttttcctataaaagttacacattatcttctgtagggatagctatcgtacatgaaga

SEQ ID NO: 128 - DNA, 195 bp, Homo sapiens
  I.128 (AI698289)
acttgtcacaagcaaggagagcgctgggaatactctccaaagcggtgtctctgaaggaaagtgacaggagggttttatggggtgatggagaggggagaagagtgcattggtgcatgtaggaaaggggtcccagtggcgcagccgcagtgagtcgtcctgccagcacacaggtcacatgttacggtcatgaagcta

SEQ ID NO: 129 - DNA, 401 bp, Homo sapiens
  I.129 (AI697365)
tttttttttttgaagttaaaggacactttatttactgacagattgaaaactgtaactccaggtagtgcaaaatgcaccacaacccaattacaaagaacaggtgttaacacacaatgtttaaacaatgctacactcatttttggcaaagtgctgtattgttcagtctgtgtacaaaactgaccatctatgaaccaatcagtataaaaaatttctataaaaacaaaatttagacagtggctcaagaaaacaagctgccatttatgcatagattgatgtacagtaacctaaccaaatgtcccttttgaattttcaagttactgaaaaaaaatgtgtcgagaaacacattaagaaggcacatgtacagtctacaatactcttcagtctccctaactcatgccctg

SEQ ID NO: 130 - DNA, 445 bp, Homo sapiens
  I.130 (AI696866)
tttttttttttttttttttaagcaaaccaaagaactttatttggagtaatagctaaaaaaacagctttttatggaaactgaaaaagagagcagaggaagtataagagctaccccttaagaaataactttaatagttaaaaaactttcgtagaatcttactaaaaaggaggcaacattagtttaaaaaataactgaacaagaatctggcctaataaccagacctcggattagcatactttctagttatagatgtaaatcttcaaagtacatatattcagtacaagtcaaaaaaaaaataaaataaaatagggccagaccatcctttactttttcatgtccttgaaatgagaagagtaatgtacttaagtaattccttcttaagaatgtcccttaaactataacaacttcatagcatcttgacttagaatataccacattttccaag

SEQ ID NO: 131 - DNA, 227 bp, Homo sapiens
  I.131 (AI696291)
ttttttttttttttccaaatcactctaagttttgttttgggtcctctgacaattgagtttccataatctggtcggctcagagacaccatcatgtgtggtatattcacaaatgcagacaaagaaaattctagaaagccaggggtgaaaaagctctcctttctcagacgattctgtgaagtctatgtgggctaaggagagaagaacaaaagtttctctgggccttggcc

SEQ ID NO: 132 - DNA, 463 bp, Homo sapiens
  I.132 (AI690721)
  misc_feature (442)..(442): n is a, c, g, or t
tttgatggctagttgtctttttattagctatcaagttcatttaacagacaaaaaattcagttcaatgtcattcattaaaataggaagaattaacaatagttcattaatcaatctttcagctgttcctattttatcacaataacttttcctataattgagagattcatgaggaagtcttgaaaagaacgtatgtttctttcaattccataaaacattcagtcaaaaataataaaagaggcgctattactttgttttgggtgaatgatatgcaggctaggctttgctgtagtactttgagctcataagctggtataaaatatcaaacattttgactgtttaaacaactcaagatatgttttgcaaaattacaaaacattatacaggtgacttaattaatatctactccaattatacacaacacatcatgctgaagatttagatntatttgaaaacacttagtcta

SEQ ID NO: 133 - DNA, 386 bp, Homo sapiens
  I.133 (AI690425)
ttttttttttttttttcacaacaccagttcagctttattgttaagttcttacattctccaagaaaatacctattgcaaatcacagcaagatggaagatttcccaaaatgttttacaaaatggcaaacacttgcacttgaaatggataagcaaaacaacatgtgtggtcagtatcatccatacacttagatgttgaagctaactaaaacttttattacaggaacaatatttgaaaattaccaaggggaaacaaaaagaaatctccaagtcacccgatggaagagaaacctaaaggcagtatacaatgtgttcccttccattcactgtgccttctactactgagaacactgacttctctcatcaaacacagagggaagaatgggcctg

SEQ ID NO: 134 - DNA, 457 bp, Homo sapiens
  I.134 (AI690321)
agcggccgccagcgactgctggtccagaagcggggcgctctccggaggaagttcggcttctcggccgaggactaccgcgagctggagcgcctggcgctccaggctgagccccaccgcgccggccgccagtggaagttccccggctccttctacttcgccatcaccgtcatcactaccatcgggtacggccacgccgcgccgggtacggactccggcaaggtcttctgcatgttctacgcgctcctgggcatcccgctgacgctggtcactttccagagcctgggcgaacggctgaacgcggtggtgcggcgcctcctgttggcggccaagtgctgcctgggcctgcggtggacgtgcgtgtccacggagaaacctgtggtggccgggctggctgcgtgtgccgccaccctggccctcggggccgtcgccttctcgcacttcgagggctggaccttct

SEQ ID NO: 135 - DNA, 441 bp, Homo sapiens
  I.135 (AI689696)
tgtccttatatcagttttattggtgggtttgtagctccctgggccgggcctggctgcttaggccagtctcttgctcacgcgctcataggtcacgcctccgatggtggagacctccaccagcttgtcacccacgatctctgaggtctggtgatagttggggaaattcaccaccagcttcccgccctccatctgcacagtggccttgaacgtcttgccccccattgtctgtatgttgctttccttgccaacagtgaacttgttggtcatggtgtggccccccggagtagtgctgggaccaagtgaagtcctgcccatcctgctgcacctccgggacattcttgagttgcgggccttttcgattacatcgcttggaatcccaaggagcttcatggactcattcatattcttctcactctccatctcgaactttgcggtgaaagc

SEQ ID NO: 136 - DNA, 496 bp, Homo sapiens
  I.136 (AI689318)
tgatgttttaacttttttattttttaaatccaggtgaacaaggactttgggtctattttttctactcttttgcctggtgctaatgctatgcttgcaccaccagagggtcaaactgttttggatggtctggagttcaaggttgccttaggaaatacctggaaagaaaacctaactgaacttagtggtggtcagaggtgaggaatcactttgctatattataaatattataattttcattcctctttattataattcatctccttaccttaaaactgtatttgtgttttaactacctttgcatgtagaatttaaggagcctaatatataagactaaacaatttggttaaaacatttgattaaaataggtgacaaaggaggaataagcaaatagaaaattagacaaaacatgtttttaaaaaatctattttcaaatattagaaaatgaatagtccaggacaagatgaaacagaaatgctgagccctatgttcaccctgg

SEQ ID NO: 137 - DNA, 475 bp, Homo sapiens
  I.137 (AI688916)
acaagattacaagaacatatttcctattataccattgttagtactagggattacttgttatttcacctcttagggaccttatttcaaattctaactcgaagcactaggtgaaaataacttattgtcaccctgactctcaaactctcatctccaccaacaatgtcttactgtttgtaatcaccaaaattatctgttttttccggggttgaaattgtagaaagcactcaaaattaggatcatatttcaatgtgtgtaggtgaactaactgccccaaagacctacttaattaaactacatgcccttgttttttaacaaagcatctttaagtctcctggttgggttaagtgaatttgataaccttaaaaaagtcctgtggattgtgtaatttttttctccactgtagaagggttatttcactttcacagatgtactagatgtatcatgttacgctataataaacaatagaaacagatct

SEQ ID NO: 138 - DNA, 410 bp, Homo sapiens
  I.138 (AI687656)
ttagattacatttcccagtgtttattatagttggttaagactgtaacactaagttctggccagtggtatatgggcagaagtgattatgtcatttctaggcctgttccataaaacctcaacactattttccacagcttcttccttcatctgccagcagatgcagaagatccagtggaggaacctgaggccctcttctaggtgaaaatgagctctccttccacctctacccaacctccattggactaggacctaaagatgttgggatgggagagtctattcatgagctgtacttctttcagcatgtttgcccggttactgctcaatgtgttcatcttaagagccatcacctgaccagaagctcggtgtcgtaccttgaacacttcagaaaagaagccagaccctattttttc

SEQ ID NO: 139 - DNA, 174 bp, Homo sapiens
  I.139 (AI687503)
ccagagatgtgaaaaatgtttaatttacttcaaaaatatcttgcataagtatctcatccctaagctcaaacaaacaagaaaattaaaggcagaaagaatacataaaattgagagctcctcctataatacatatacacacactctcgatataggttctacgcagtaaaaggagtt

SEQ ID NO: 140 - DNA, 417 bp, Homo sapiens
  I.140 (AI687278)
tttttttttccttaattcttctttattatagaatgtaaacagttagaaagacaaaagttaattagaagcattaaataaggatttctcaaagtgtgattattaactggttagtataagagaaacctgcatcaagagcaaatgaactgcccggggctctcagagccccaacacaggccctgtcaccagcacgtccccgaggctggcccagctctcagcagtggagatcagggcgcccttacctggcagcagggggtcctcaatgcacagcatcgacggtctgtacccgctggtcatggctttcatgatctcctctttggcgatataggcacctccttctttgattctaataccggttttcaagtaattaaaatttctcccatagagttcaaaaaattctacaagaagcattccaagttt

SEQ ID NO: 141 - DNA, 403 bp, Homo sapiens
  I.141 (AI687110)
  misc_feature (232)..(232): n is a, c, g, or t
acaggaataacatatatgtaatttgtgtaacagataaagatttaacatctgaatatacaaagccactataattcaaagagtatgacaaacatttcataaaagacataaaacttcttaagtaatcaggaaaatgcacattaaaacaatttcatttttcacccagattaataaagttaaaattttgatttccacaaaatatgaaacatattttcatcaccggggctagaattgnaagtagcaaaaactttttgaagggcagttagtgagcagctgcccagatattagaggtacacatcctctacttattctctggcctggagaaatgctcccagaggtacacaagaataaacaagtgttcaccagagcattatttaaaatatcaaaaaccaaaatagaacccagc

SEQ ID NO: 142 - DNA, 644 bp, Homo sapiens
  I.142 (AI686838)
  misc_feature (516)..(516): n is a, c, g, or t
  misc_feature (561)..(561): n is a, c, g, or t
  misc_feature (616)..(616): n is a, c, g, or t
  misc_feature (617)..(617): n is a, c, g, or t
ttgttttcacgtggggcttatcaagtatttactaagcaccttctagaagcttggaaagggctacaagccatggtccctgagcccaagacacttacaggtttgctttctgggaggattggggtggattagagactgccttccagtcagtgaccacaggatgggccatcttggtctctgtccgtatctggtttgggggttttcgcaggactaggcctaggctaaggacagggagggcacaagttctggcttggtccagggtcctgggacccagggccatttgggacctgtgagaatggatggacagcatgggatggggcatgtggtctgagccctcagtagattcccttcaccctcttgttgttggggtcgaagggcgacttcaggtgagcctgggcaccataggtcacccccattctctccagggcatagtccccgctcttcacaaagtccagcgagaccggcccaccgctgggtcaatgatgtaaccgtaggcgatggtcttgtcgatggcgaacnccaagtcagcccttccgacatggcccaccacttttgccgttcctncagatggccttcaggccccaacatgggtacttgtccttcatgggaagcacaccanngcgccggcggagcttgcggccgtgctg

SEQ ID NO: 143 - DNA, 342 bp, Homo sapiens
  I.143 (AI686453)
aagcacagcaagaactttaggttactatttatatctggaccttcctatatttataagaacatgcaccgtcattgttgcaagaggaaaaaaaattaaaaacattaaggaaaaaccaaaaaacagtttgcttactaaaatcataccaaatcctcagcaaaatcaaggaaagcaattatggagtgttttctatccctggccttgtaaattgacatatacattttagagaaaagaacagtaattgtctagcacaaaatgcagttatagatattgatatgcttagttctatcccattaaagcaccttgtactacaaggtaaaggaaggcttaataaaatcaatggag

SEQ ID NO: 144 - DNA, 451 bp, Homo sapiens
  I.144 (AI683132)
tttggctttagagaggcattaagaagtagggcatgaaggcacaaaaagggaacctgaaatccaattgcaataattactcatgcaattggcctctttctatgtggcattatagaaacctcctgagtaacagagtttatggttttacaaaagagaactcctacatcattgcatggcatggctaccgcttccttagaccattcagagaatgatccccaagtatttttcataaaccccatagggtttcctacattaaaataaagtgacagagatcacgccttgaataatttcacaattccagcaatgagttgtactacttccaaatgacgaattttctgctccaaataatgggacaaagggcatcatcacatggacacagtcaatttcacagtgatggactcacacaggtggatgatctgaggcacaagctgtgattggtcttaagaaaatgaaa

SEQ ID NO: 145 - DNA, 495 bp, Homo sapiens
  I.145 (AI683011)
tttttttttttttccaaacagactttttattacaagacatacttttagaatgaactaaaataaaaatcattacatttttagtatcaagaaatacaggaaacattttttttagctgaccttaaagaaaagattttaattatgagctgggtttagttacctaaatgtaaattccacagcctaatgtaggctacataacagaaacaaatttaaatttggaatggacttatgaccatcattgcatagcagtgaatgctgatgataaaccaataaaaccgggaaattaaaaaaaaatcatctgatctatcatgatctggaaatcctaatttaataaaatatggatgctacctggaagaaattccccacttccgtaatagcctcattcaagaagctctaatagggtctgatgagattatctgccttgaacaaagattttattatttagaataactggaatatttgacattgggacattaggagatctgttttgaaacactg

SEQ ID NO: 146 - DNA, 392 bp, Homo sapiens
  I.146 (AI682701)
  misc_feature (336)..(336): n is a, c, g, or t
ttagttttttaaataaaatctacattaacagataatttattaagtttatattatctggtgtgtgtgtgtttgtctaaataaagagaaactagtaattcacttatactagaggataatattaacccggaccaatctttcttttctcatccatcattttttaaattatcccaaataaaaaagagaaaaagtcaatattctaccaacttaatgagcatacaataggtgctataactattagcattattattcttgcttgtgctgtgaggcctgatgaagcatttgatgcccagtccttctcatacaacctcccaaacagagttactgttaagacaggtnccgatgttggcttcagactaaacaagcgtccgcagttgacacctgaaattctccag

SEQ ID NO: 147 - DNA, 456 bp, Homo sapiens
  I.147 (AI680626)
cacagtgtgctgaatgtctttatttacaagatatcattctatagtgaatatgaacaaaacgaatgtgctggttgaaataactgcttgattaaaaatgtgctgtgaagatgaatcactaatctttctaatgcactctgataacacaataaacatggaaaaatactaatcccttaatagatcaaaatatagaatatagacacctaaatatttcaggggaatgaattttcattctgagttttctaaaaaagaaaaaagaaaaatgatttctccagcaaatgtttagcaaatattgggaaatgccaattcaaatgaaaaaacgaattgtgttcaaaccaaagtccattatgttgggatggaaactctcgggagatctcacataaagtgaattctgtggatcatctgatgatgtaaacattttcaaaaagatacaaaatcctttggaaaataacggatatt

SEQ ID NO: 148 - DNA, 444 bp, Homo sapiens
  I.148 (AI679115)
tactatcaatatatttatttattagttcaaatatttcaaagccagttatttgagtaggcatttcaatgcaaaataataattcttcttttacatcacgacaatcataatcaatgaaacgaatatagcacaaaagaagtgtgatatttgagatttctgatgactcatctatctgaagggcaaaccactttgactctctgaccttttgaatcagctggtcttcaatgtctgcagatagttcatcaatcctgtgttgaattgtaacattagaaagtggaatagttttcattttgtctccagcacttgaacccaaaacttctgaacacatttctactaaatatggtttaattaattcttcagcaatggagaatggcttcttgcttgcagcagtttggaaagcaattaaataagaagctttcacaagtgacttttcaactagtaaacact

SEQ ID NO: 149 - DNA, 649 bp, Homo sapiens
  I.149 (AI678749)
  misc_feature (568)..(568): n is a, c, g, or t
gcccctagcccgccgggagcgccaggccggccaggcctgcgccgccgccgccgccgccgtcgccgccgcgccgaccatgtcggcagccaaggagaacccgtgcaggaaattccaggccaacatcttcaacaagagcaagtgtcagaactgcttcaagccccgcgagtcgcatctgctcaacgacgaggacctgacgcaggcaaaacccatttatggcggttggctgctcctggctccagatgggaccgactttgacaacccagtgcaccggtctcggaaatggcagcgacggttcttcatcctttacgagcacggcctcttgcgctacgccctggatgagatgcccacgacccttcctcagggcaccatcaacatgaaccagtgcacagatgtggtggatggggagggccgcacgggccagaagttctccctgtgtattctgacgcctgagaaggagcatttcatccgggcggagaccaatgagatcgtcagtgggtggctggagatgctcatggtctatcccctgaccaacaagcagaatcagaagaagaaacggaaagtggagccncccacaccacaagagcctgggcctgccaaggtggctgtccagcagcagcacagcagcagcagcagcagcagcattccagtg

SEQ ID NO: 150 - DNA, 399 bp, Homo sapiens
  I.150 (AI678742)
  misc_feature (354)..(354): n is a, c, g, or t
ccgccacacgcccgggcgtgccgagcaccacggcggccccttcccgcctcgccggttcacagagcgcggcccggcgccgcggcggcacgccctcccagaccgcgcgcccggcggcccggcgctggctgtctacgcaagtccatccctgtcgcctcgtctggggcccgcagcagctgagctctcccgaggccccgggccccgcgcatcggacgcccctgcacgagtctccctgccaccgggccaactcagaaggtccccgcggcgctgcggcaaccggcccgggccccggctcctgccatttttgtcaaccgccaacttccgagcgagcgggcagaaactgaaaggaagggcggnggccgaaaggcagaggggaaaacacccgcttcctctccgcgcgcg

SEQ ID NO: 151 - DNA, 446 bp, Homo sapiens
  I.151 (AI676097)
acaatgttttatatttattttattgaaattgaacatctcttttacaaatgctaataaatgaatctattcattctctcatttattcaaccaatgttaattgagcacttactattacatgccacttaactagtttcactcagtttaatgaagcatttctataaatccttgagcacagacgtttctatgtatattgcaagctgtgtttgacaattgagtagcaattgctgatgctggaaaaaaactaatgttgcaaatatttcttgagtaattatatcagttgtttttggggtttggcttaggatgtgggttcagaagtctgaagcctttcctggttctcttaatcttcaagagaaatgtgacctgctgctgagttgagataaataatcctgtgtccacagcaaacagaatcaccaccaacaatgggataaaaaattgtagccagtact

SEQ ID NO: 152 - DNA, 484 bp, Homo sapiens
  I.152 (AI674926)
  misc_feature (468)..(468): n is a, c, g, or t
ttaagtgtgctcaaaagccccatgcttccgaggggcaaaaaagcaagaattgaaggccacgttggaagcacaaaattttccagggcctcccttctggtgtacggggcctcagagggcaacattaccatgaactgtcctgcacacaccagctggggaaagcctcaagtgaacaaagatgaaaacacggtgggaaaagcaaaagcaaagccgagcagcaggcagccatctgtatctgcttccaggggcagagtacaattcaacaacagacctttacatgtatttttgaagaaatccaattttgccaaggcctcctaacataagaagggcgctttcacaaccacgccttccgggccagctcctctccagatctgcactggcaggaactgctacacatggcttcacccttcgcctgaacccacttctcagccagctgtcctagcttcagagcacagcttctgcctggcctgngtgcgaggctgacccc

SEQ ID NO: 153 - DNA, 511 bp, Homo sapiens
  I.153 (AI672318)
ggctggagagaggcgcaggcgcgaagtgtacatgaagtccaatagaggggcgaagcctctcgcttcgggacccccgggcagagagagcacgtccaccccgactcccgcacggccccggaaaattgaatagaagaagccactgcaggcgatgagaactgccttgtgtgctctgaggggttgcccgccaaccagcagcgtgacgtcagtgaggatcccgcgcaggcgcagctcgttgaggttgcccagcacgtcggaggagtggcgagtgaactcggacgtagcccagcgctccctccggggcggcgggggaacccatagcgacacaggcctgtagaggccgtggaaagtgctctggatccaggcagtcctaagacgccttccctcctctgtttgccttttccttccgaggtgcaactagagccaggacttccagcccctagccccggcacacgcagcctccctcctaattcttcttgttcattctgccctctacgacaccctcgctcccttg

SEQ ID NO: 154 - DNA, 517 bp, Homo sapiens
  I.154 (AI671360)
ttaattttgaatcatttatttggaggaccataggatttacattctttttaaaatcattatgaaaacaggatgtatgtcaacatctatgatttgagtgaactagggaaccaaatctgggcattcaaacattttatatcagaaagactgtgtttgattgtattaaagtgtaagctattccactaggccaggtgagtgaccccaaaatggtcaaatgctcaattttccaaatatcagcattcactctgtcacttctaaatactactaggactgatagattgcactgaatatcttagtaatatcctactcttgaaagagagagctataaaaatcaaatgtgtattcagaagatttctttatctgtgctgccatccatcaaacttacttggtttagatcttgagggcggaaatcttgtatttcattctaaaatatatatgcatattttccaaatggtcttgtactataattgatcctcatcccccataagaaggagaaataaaaattggagcacactaccct

SEQ ID NO: 155 - DNA, 776 bp, Homo sapiens
  I.155 (AI670798)
  misc_feature (505)..(505): n is a, c, g, or t
  misc_feature (512)..(512): n is a, c, g, or t
  misc_feature (552)..(552): n is a, c, g, or t
  misc_feature (566)..(566): n is a, c, g, or t
  misc_feature (584)..(584): n is a, c, g, or t
  misc_feature (642)..(642): n is a, c, g, or t
ggtatgtctttcttttatttttccattaggttttaagcacaatcatctgcaagtgggactttcctttctggtttcaaatcttgaagcaacagaaactgatcacccctatacagtgccaaaaagattatggaaaccctgtcttgaaatagcttgcactgcaataattgctataaacagcacattcactactaataactactttattagaagcctcacaatcaaatctgtttacttgccctctgaaatgtttcttgtttgaaacatggtctcactctgtcaccctggctggaatgcagcagtgcaatctcgactcactgcaacttccaccttccaggcttaagtgattctcccacctcaggctatcgagtagctgggactacaggcacgtgtaacagtgtgtccagattaagttctgcattttttgtagagatgggatttcaccatcttggccaagctggacttaaaactcctgggctcaagcgatccacctgcctcggcctcccanagtgctnggagtacaggcgcaagacaccacactggcctgaaatgctntaagactctagganttatctgagtagtcttangcatgaaagaccaaagcagtagatggtgagggctaatgggcctagtagtttggcacangactccattaccaaacccctttacaccagatcattcagacagaccacttaaaacctggccttgaagtttactgacggaaaaaaaagatctggccgaacccatccctttggctactgcctggggccttttatttt

SEQ ID NO: 156 - DNA, 427 bp, Homo sapiens
  I.156 (AI669454)
agtgagggaaaagtgtatttcacagtcattacaaaagtacatatatctaataatggtgacataaatatagtccttacttatgaccaaatcatacaattaaaatggacatttcctcctagacttcacacaatgacagtccagtcaatttctgtcagtaactacagggtgactgggatcacaggcacagactgaggaagacagtcacggtcgaacagacaacatgcttcggacttaccaaagggagagtcgagctttccatataaatataataaaataataaagaatctaacatttctcctttcactcggtttcatagatttgtcaggtgctcacacacacacacacacaaatacagctgatcccctttcatcactccccctcacctctcactgggtttagaataaacctgagttcagagtccaggtcg

SEQ ID NO: 157 - DNA, 673 bp, Homo sapiens
  I.157 (AI669342)
  misc_feature (466)..(466): n is a, c, g, or t
  misc_feature (588)..(588): n is a, c, g, or t
tgcaagtttaataaatcatcatggtttatttaacaaggttatactacattagagttttatatatatacatgtatatgtgatatgaagagactgatgtacaatcaataagtcttaaatctctcttccatggatttcccccatctccccacttagcagtaaaaggcatttttaggtttatataaacacattctttacaactgccttcttaacagaaaattactgtagtatataaatagcactgagcatttagtaaataagttacaggccaataagttcaattgtgcagttgtgaaatctaatgtcaaagagtttttgaaaccttaagactgggtgatctgcaatgtttccaacatgtcttcgacagccttaagagaatatttggtttccttcttacttcgacctgcaaactgataagctctgtttatttgactagctgcccaactagcatatttcatgttgtcctttntcgtttttgcacttgcttttggattagaagcaatatgacttgccgaccataaaagtccaaacaaagctctcataatttctgttgtcagtttcaatgcctgtgcaaaatactttttttgaagnttcgagttttcaagtcacccttggtatacctaacttcagcatacctgctggacagaaataaaaggggggtgggggatagcatcat

SEQ ID NO: 158 - DNA, 532 bp, Homo sapiens
  I.158 (AI668673)
tttaccaaatatagccaattattatttaccaacggtaagaggacaggtaaataagtaattcaaaagcacagatacttccagatctacattttagcctgtggtttcaacatcattctacacctagccacatttcagaggcaagaaagagggaaaattaactattttggtttatgtctcctttgattcccttaccctctagtacagacactaagcagcaagaagagatgggaagaaatgaagacggcacctcagtaatccagagagcaaaacagtcagccactgagtaatcaaaaatcatactggctgcggggtcacacaacgagtaacagtgcctttgagtttcaataggaagcaaaacatcacacgaattatagaaacattttagatcgaacccctaggacaaaaacacatgaaaagcaaaaaatacagattgttcggttttaggtctaaacttctctaaacacagccatcagacctgtcctaaaaccgctattcagaagtcatttccactctacagtagcaggacttggtg

SEQ ID NO: 159 - DNA, 458 bp, Homo sapiens
  I.159 (AI668662)
agagggagcctagctttgtcacccaggctggagtgcagtagcgtgatctcggctcactgctacctccacctcccaggttcaagtgattctcaagaactagccagattttgccaggcaatacagtacttaacttggattctactgacatgtttataagttacccacatacctccaaaaacgtattaacagcaagatacaggactatctctgactttaataaggtacaaggtaagattgtgggagttgttgagctttctctttgccatatttttcagagaatatttatactaacaagcagcaaccaactaaataattaaaacagagtaacctagtggtaaccgtgtgatgaaattacatgtgcttgattttcttctctacatttgtctatattttccaactttttcaaggaatagagttgtttttaggaagaaaaaactttaagaatatatcatgtaaga

SEQ ID NO: 160 - DNA, 247 bp, Homo sapiens
  I.160 (AI659563)
gtttgcttgtttttgttttgatttccccagataatcttagctctctaaacttcccgtggcataagataagtaaacgtttgtgtggctggcacagagtagtgctgtaaacaagcacaacttgacactgggccatatgaggatcatcacagatttaaaggcatacaacaccattcaaaacacagataggagccacaatgggaagcaaagtctgaaggtgccatgggagggttagatagggagggaagaa

SEQ ID NO: 161 - DNA, 556 bp, Homo sapiens
  I.161 (AI657100)
  misc_feature (521)..(521): n is a, c, g, or t
tttttttaaggagatactgatctatattttttgcaggattctcactggtttcacaaattgcccaatttcagatgtaagtggagtaaaaatggacatgtatactactgccaacaggaagaagcagccctatgtaaacatatctcagacttgtaaaatctgcaattcagttttcaactataaatattaaaaatggacccttatatacacaacttcatgcttgaaaggttagattcatcacttttgccaacagccaggcatgggtaagccatctggccccttttcgcccttttctcctagatcacccttctcaccccgtggaccagggatctaaggaaaagttcatctgtaggtataggcattttaacactcagtgctgaagtggacagcagccagctggaacaggttggcagcgctgaaggtcaggggcagggcaaacccagctctctctcttttttcaatgcaataggaaatttatctgaagtttcattgatggtggcattacctcaactgtagagcagcangaatagtccaagccctcaaaattcttagaaatgta

SEQ ID NO: 162 - DNA, 443 bp, Homo sapiens
  I.162 (AI656990)
ttatgtttaagctgtatatttactcatcgaaacactcggtgaaatcagggtaaaatcaactaaaggaaaaatatttgtttcattcatttgaacttaaaccaactaaagtagtactcatgtcattacgatgcagcaaatacaagacctctttctacaaagattagcacaaccaacaaattaggggatatagcaaaacagagccaaaaacggtaagaaatcaattaagtatgttacagcttaaccctttacctcaatagtttttaaaaaataagcaaagcctcccaatcccaaacaatacgaatacatcttcatcaccaattcgtacttgtatttcttattcttgaggttagattctaaaccctaaagatatccaaactagtattagatctacttatctatagccagagacggcttctatcaatgttgtccttagcagccaaggt

SEQ ID NO: 163 - DNA, 529 bp, Homo sapiens
  I.163 (AI656210)
ttttaacaataaccattaattttttattaaatttgtagtcaaatatgacaatattttttctttcataaaaacaagcaacataaatatttataacattatcagtttgggaaaagacaaagaaaggaaaaatgaataaaagcgatcaaaagacaaattcgaacatagaataaatataccctgttaacatgcatgcttagccctgtggctgctgctagagtaccaggccctgagcctcacaatcacagttcaaaatctcctccagcttcaacatatccaaggcagggattttggcgacttcaaagaagaccgggtgagaatacttgtaatacacagccttgagactatcgtaagaactgaaagtcagcagtttgttcagctgtctgaccaaggggtgaagctcagagatactgtagccactgtaatgctccaggaagggaacccagtatccgagcttcttcatgtagagggcccagagtaaggaggcagcagctagctttggagccctctcctggacatagtgtattccctg

SEQ ID NO: 164 - DNA, 449 bp, Homo sapiens
  I.164 (AI655693)
aagagtgaaagcttttagtttcctagttaagacttttcttgagaatggattcactggtgcagacataattttgtagtacaatgagatttttgttacagagctcaagttgttagaacttctatctactagtggtgtctgatataacctgggctctccagtgttacagtgggcttcccaatctcatcacaatcatggggttgaggagctgccatgactataactaaagactttcccttatatcatacacacaaaacatttctccatcaggtatgttatccctgaaaacttcaaacaactgctacaatgacaacactgtttaagtcaaaattctgttccaaggcaagaaaacctaattcaggtgtgccaaagccaaaaccaaccaaacaaaaatggaatttattggctgctgcaattcaaaaacccgtatatatttttagcttcaggcatgg

SEQ ID NO: 165 - DNA, 455 bp, Homo sapiens
  I.165 (AI655261)
tttttagggtttttaccacatttaatagtaacacaataaatgagttttaatggcgattagaatgcaattcaagacataaaacagaacgtatttgtcctgtttgataaggcacaaggaagagggctttctgggataaaggggttcccacagcagatgaacacatatctgatttgtctctggtcagaggtgaacacagcaaaagataggcctgagaggaggtgagaaggagcaattagggatggtgtgtataggggagctttgattaacatcaacgaagctcacagttctagcttcacaatccaggaataatcctacatggttggtaggtcttgggacatactgcagtgtaagtggggaggtggtaaagaggctgcactgaatgtcattcttaacacacccaagactaaagagtccctcctctccatgtatattgccattctgattcgtccctttcc

SEQ ID NO: 166 - DNA, 1055 bp, Homo sapiens
  I.166 (AI654867)
ttttttttttttttgggagggtggggagagataacgctgtaaacttttatttttcaggaaatctggaaacctacagtctccatgcctgctcagccaagaaggagctcactgtgggcaccagagacagggacccaatgtggaaaggatgatttttggccatttttcctgttcttcaagaaaacaggagataactagaaggactagagaatggggctgccagaactagtgggaagctccctagaaatggtgacatcgcccaccaaacagaccccgccaaggctgcacctggccttatgtctccttcacctttctggccccacgcagccaccagacagccatgcccagcagcttcccacaaagccatagagtccccagagtgagccccagcagaaacacaaaaacgtcgagcaggtactgctcatgccagggctgctgaaagacatagggcttgaggtgcgtcgcgccccctgtctggaggacgggtcaatccagcccaccagccgctgtgtggggctgagcgggtgggagcgcaggatgacactggcagccactgccgcggactttatctcttgtctccatgattgtttatcttagagccatgttctgcctgagctctttactgatagaacaccaacttttggctctactcgagacagatcacacatagcccttgctgtggcaacaaggaagacaagagacttgaaagaatctgctagcagccaggactagtaggatgattgagcaaaatagcaagtggcttgggcgattcttgcctgagggcaaatcccttattgagcgaaaaaatcgatcattctactggtcctggtgaatgtatcgttacatccaaaaatacacccgaagcaaaggaaggctggtgcctagatactaatatttatgggtgctcctgccgttctgggaaactggccgctataaaaaagaacccgggggagggtggattgggcttcctccttcctacttcccgggtgggggggggggattcaaaaggaagttacaaaaggaaatcgaaaaagtaaaagcaaaacccacaaaaccgc

SEQ ID NO: 167 - DNA, 405 bp, Homo sapiens
  I.167 (AI654739)
aagtggcaatgtgacttgtcgtttatttcaatgaaaatttaaatgattcttacaaatcctctgaaaagtaaaactgatacttttataaacagaagtatatgcaaacagtcacaatacgcattaggacgactgacgatatttcttacatgccaggtagttcttccatcccagcaaacacctcttatctgaaagtgttttttctcctataaatttgcatctaaggtatttttaaaaagtcaaaaacagtgcagagtaactttgaattgatcaacaagaatattatacaattgtattatagttccactccgaatacgatagctaaaaaccaaatcaaccttctctttacagaacacaggctccaaacataatttcttaaatcatggtctgccactgaatctggctata

SEQ ID NO: 168 - DNA, 346 bp, Homo sapiens
  I.168 (AI654100)
tgaggggataatcagcctttattgtctctcgtgcactgtgcccagcgctccctctagcggctacaagcgctcactgcccacactctctactaggctctccggaggcctcggtttcgctggagagaaagagattgcgcaggcgcggagcagccgacgtggccgcaggggaccgtgcctggggggggtctgcgcggggccgctgactcgcgaggttctctgtcgcctgccgccctcgctccttttctccccttctagagtgttacggtgactcttgggtccgaaggggacggacgtcctcccacgtaccatttagaaggtcagagtgggcagaacctagtctgagcag

SEQ ID NO: 169 - DNA, 403 bp, Homo sapiens
  I.169 (AI653893)
gttggaaggcactgagagggggcaggggcagctgacacagggggcgctggggtcgtccctgctgctcatgaagccagcctggcagcgctcacagtgggccccttcggtgttgtgctggcagtccacacagacgccagagccagggaggcagcggtctgagtgtccatggcactgacaagggacacatcggcccaggaagagacctttgacgtcccgatagaagccgggggcacattcctggcatgagtccccccggtagctggcggggcacaggcacagctccacattgctggccagggccccctggcctgctgggctggccacctccagtgccaccctgcgcagggagacagccgaggagatctgtgagaagagggcacggatctgcagctgctccaggctg

SEQ ID NO: 170 - DNA, 601 bp, Homo sapiens
  I.170 (AI652564)
  misc_feature (450)..(450): n is a, c, g, or t
  misc_feature (486)..(486): n is a, c, g, or t
  misc_feature (566)..(566): n is a, c, g, or t
  misc_feature (571)..(571): n is a, c, g, or t
  misc_feature (578)..(578): n is a, c, g, or t
ttggctgggtaaaatatttattaattatccaaaaaggctcataccgcaagtcctgggagtggggggtgggtggctgggacagggcctcctttgaggccacccacacccaaggggcacagcagccctgagacgtccgttcacaaagggcagacgtgaaggcccctggtgggcggccaccacatgcccgagccctggcctgtgcagccttaagtagcccgtcagggcggtggggggatgtgggcgcccaacaggtcgtaggcgaagacgttccagaagacggcgaatagcaggaaggtgccgtaggccagcagcaccacccaccagccgcactggtcccgcaggcgctcctcgtagctccgcaggatggtcaggcccatgctcacccccaccaccgcgcctgccaggtgcgccatgaagctgtgctgtgggcccgaggcgggcagcggcggngagaagcgcagccacacagcgctggcccacctctgnagctcatgcacaccaaggccagcaccatcctcagcaacttgtagggacatctcatcccagcccagttcatgacaacgttngccangtgtgangagcacagggctgagaccccgct

SEQ ID NO: 171 - DNA, 807 bp, Homo sapiens
  I.171 (AI651629)
  misc_feature (727)..(727): n is a, c, g, or t
  misc_feature (741)..(741): n is a, c, g, or t
  misc_feature (800)..(800): n is a, c, g, or t
tgagtttgcactggtgattttttaaagaagatattgcactctctagagaaccaaacttgggtagatttcaacatgacctgcactgccacgtatcttacccgaatctcagtcttcactttcagcactgtcagtttttatgggctctgttgtttcttgttgcagcccaagtgtagatgtactcggggcatcatctgcttcctgtgccttcgaatccccgtcctggtttactgaagtgcagaagtgacataagtgcttgtgaatcagcagggagctcttggctttgactccctgtgcagatgagcccagggcgccatctccttgctggagaaatcctttgtccatttgcacgtatggatctttcctcactgcttgatgttttgaactctcttctttgcgggtattaatgagatactcaaaggtggtcatcttcttggccttcaggtagatgtggaagatgagcagctggcccaggtgcaccaagccaagaaagtccagcaggagcacgagcatcccgatgatcacgactatcagggtctgcacctgcaccgggaacagggggaggaacagcagccacgtgttcatattcttgacatcttcatacctggggtccgtgcggagcaccccggggttcacgaggtactggacgtagacatacagcatgatggcgatcaggcagagcatgccagctgtggccgaggccacagtgctgaagaagaccaatactccngccttccacgcagntgtgatccatctgcagtggtgtccgaagccggacacacacttattgcaggaaaagcagnggttggt

SEQ ID NO: 172 - DNA, 541 bp, Homo sapiens
  I.172 (AI651536)
aagcttttaattctcatttagacttaacgcatagggcaaaagtagagtttacgccgatatccgcatcagaagcgccctctagaggaaaatgagagtccagaggcgcagattcagaaacaggtaccttttgttccctttctctgaacaccggcgggttgtcgttaatgtccttcacctccacgtccacatggaaaacctgcagcggcctgtccacgatcacctccaggtggatactgcactccgcgctccgcccgcacagcttctcgcggtcgatccgagaattcacaaacaaaatgccattctgcagatttacctccagaaggtccccgtgtcttttggacgccacccggaacaggcgcggcaccagctccgccagctccagccccaggtcctgagcgatgcggcccacgaaggtgccgtgtttggcctcctcgtagacggagtagtggagctggccgctccccacctcccaggctgcaaggagcagaagcgagagcagcagacgctgggatcccgggcctcttggtccgataatcaccat

SEQ ID NO: 173 - DNA, 563 bp, Homo sapiens
  I.173 (AI651337)
aattcaataaaacttttaatctcaaagatttttatcagactccagaagttcatggcaacagatgcatgacctgcatttcttaagaagattgggtttgagatcctgctggtgacaggagactccctctcatcccccagtacctgcagccagtcgagcatcctggcaatgctgtgtcccaccaccctggtattattgaccgcatccgtgtaaagctggtgggccagggggagccagtcaaccacaactacattggcgtctttctctcttgtgtgcagggctgacacgagtttgtgcagccagttttcaaagataccgctcatcgtccatccgtgaatgatgaaaaaggttttagctgtcatgttgaaactgcagtcttctaagggctggctgtggccgacggagaggtagcatccttcatgctctgggtccttggaggtgcggaggttaaacctcacagatggtttgacctcagtctgtgtagctttgggtttgtggagcttatcttccagccgtccctctggaccaaaaggtacggggctccccgcagcaaagcaatagcagag

SEQ ID NO: 174 - DNA, 743 bp, Homo sapiens
  I.174 (AI650349)
  misc_feature (550)..(550): n is a, c, g, or t
  misc_feature (710)..(710): n is a, c, g, or t
cttcaatagatatcccaaatatacacacaatcctatttatttgggtctaggatgtaaatataatttaactgtgtgctaagtgctttaggtaacacaagcatttatctattgtaaaatgaaaattcaattgccatcaaatcagaattttgatttcagtcagaaatgcaataaattatgccataaggaatatatttgtatacattttgtctcagatattttctcatgtggtattgtgaagggtaacaagtataatattatctgtaaagaatttaaaaaaatatttttaaatataactaatagtatatactgattttgacagttttctttccagaactcaaaacgaaagctatttttaaaaattaggtgattttgataactattaaactttaatcaatgcattaagaaacaggcagctggcgatctaacgcataagttgctctttccttactgtatttttcagaccacttgcgagtcagttctaggtaaagacctggtttatgaggacggtaatctaggtacactgtattactggttcttttgggaacagctntttcaatctgagttccttcatgccactcattaaaagaggtgatagaaattaagcttgggcgtgtctgaagtgcggcactcagaccaatttcataatacttcccattgattcggttccgagtgttttgcgtgtccatggacggatgctggtatcatgtatnctgggccacacttgggataaatattagtggatt

SEQ ID NO: 175 - DNA, 424 bp, Homo sapiens
  I.175 (AI636632)
tttcaccagtggctcaaagtagcgctcctgcatctcagcctcggcctctttcaggatgcctgtgtgttttgattttgcttttaggattttctgaaattcctcagattccagataggcaagttgttctctcctttttttcctggcaggctccaattcatcctcagcttgagaagaaaacatggtgtttttttctacacgttccttcacctccaggatgtcctgagggtccttttgtttcttcttaatgctgtttgggtttgtttttgtaagaacctggccttttgcccttaatttggtgatagcagctaactttttggcttctgctaaagcactcagttttggtcttggtggtggtgactcatcataaaagagaacatcatctccttccaagacacctcgccccagcttgggcgtcattgtggcc

SEQ ID NO: 176 - DNA, 450 bp, Homo sapiens
  I.176 (AI635793)
acttaaaagataaaacaactttattatgacatcaccattatatacagctgtgcttttcacatcaagttggcttagttcttggaggaaagtcttagtgactaaaattgtacacagatcacaagacaagagaactagtctaacaaattcaataagaaatcaggacaactgtagactatataaaaactgtcttagaaaattatttacaactttatcatagtgtaaatactctaaatgtaaaataaatctatggattttatacaaaaatactctaaagtacaaatgtaagttaaatgctgaataaaacattttcaccttttccagtggatgctattactaagactataatctaggtgtcaaaacttaaagtgataaccacaaagcaatgttttcttaatcactcataattttacatttgttagtagtcatcacaaggtttagagttccactgaa

SEQ ID NO: 177 - DNA, 323 bp, Homo sapiens
  I.177 (AI634473)
  misc_feature (238)..(238): n is a, c, g, or t
taaaatttccaggaatttattggaaacacaatacaaattggttagtagatggcatctccttacagacagacaatccacactgtggtatcatgctcagaacgaattatcctgcggaaacactcatgagcacaggtgcgtgctctgggttagcttccctggcagggaaaatcagagacatagtgcagaggaacaggaggggtggacagaaaactgggacatggccttcctggggggaatnggtgagagggctgctaactgagtaaattcccccaaaggaaaacagggacaacagtaaagaataaaggcttccccctccctcccca

SEQ ID NO: 178 - DNA, 453 bp, Homo sapiens
  I.178 (AI632869)
  misc_feature (413)..(413): n is a, c, g, or t
tttttttttccttcgaatgtatttattttcccaaattaaaaataagcagggatggaagtagttattatgcatttttcaaattctcctttcaacagtctatataaatgttgcagaatgctagactaggatgaaaagtaggagtcatgagaactgcagaagcctgagatcctaaaggaagtccgtaccatctgacttggcaatgtaagacacacacgttagtgtggggcacaaacgtggaatattaggagagagctggttccagcaccaaatccagagtcactcggggaaggaggtatggtggcaacactttatgcttaatattcaattctgctccagtagaacatggtacccaggagaaccccaaaaagtccagcagagaatggcaaatccaaaccaggcaacccccccagggntgtcgttcattggaccaagaatcagtcaatagcagccttg

SEQ ID NO: 179 - DNA, 446 bp, Homo sapiens
  I.179 (AI632205)
tttttttttttttttgaaggacaggcacatttattgatcaaaaatattgaaatgggctgggcacagtggcaaatgcctgtaatcccagtaagttgggattataggctgagtcactacacccagcctctatatcatgacttctttcatggcgagtaaggtgactggaacgagtgtaggctttaccgcatttcttacattcatagggtttttctccagtatgaattctttcgtggaggtgaagggaactgaggcgactgaaggcttgatcacattgtttacattcatagggtttctctccggtatgagtacttctatggttacaaagggaactcaaacgactaaaggctttgccacattgtttacactcatagggtctctctccagtatgaatgcttccatggtaacgaagggaagtggaacagctgaaggctttatcacatttggta

SEQ ID NO: 180 - DNA, 383 bp, Homo sapiens
  I.180 (AI631380)
tttttttttgcacttatggtatttattgttggaagattaagtaccttaatgcacaccaatgctcagatgacttgggggcacataggggactgctgtcaccatgcctcactcctgcagggaaggggctgccctactaaaaccccagcgggcccagtgctgtgtccagaacaggtccttatattactgcagcccacaatggaactactgagtaggagccaaaagaggagggagcaggaagaggtggcatttggagaggggagaccgcacccacaggtctgccacagcgcgtcaacggtattgggtacttttacagtcaagttgactttcgtgtccgcccaccatctacctttgtaggaccactgaaacaagggacatccaccacg

SEQ ID NO: 181 - DNA, 451 bp, Homo sapiens
  I.181 (AI628692)
  misc_feature (34)..(34): n is a, c, g, or t
  misc_feature (72)..(72): n is a, c, g, or t
  misc_feature (187)..(187): n is a, c, g, or t
  misc_feature (199)..(199): n is a, c, g, or t
  misc_feature (320)..(320): n is a, c, g, or t
  misc_feature (321)..(321): n is a, c, g, or t
  misc_feature (351)..(351): n is a, c, g, or t
atattttcagtatattaaaaaggaacagtacaanatgctggggattaaaaaggatcccttatttttcaacanatgaacttttataaacaattctgtaatgaaatgaaaacagtatcttaatacaagcttttgttaaacaagattttaaaattttaaaattagaaaacgttaagattaaactctttcnaggttcaaacanaaaacaacctgtacaatctccattacatgtgtctttgtacacagtctgggcactttgaaaatgttaaagtttttaacgtttgactgacagaagcagcacttaaaggcttcatgaatctatnntccaaaaagtatgctttcagtaaaacattntaccattttatctaactatgcactgacatttttgttcttcctgaaaaggggatttatgctaacactgtatttttaatgtaaaaatatacgtgtagagata

SEQ ID NO: 182 - DNA, 657 bp, Homo sapiens
  I.182 (AI628652)
  misc_feature (552)..(552): n is a, c, g, or t
  misc_feature (643)..(643): n is a, c, g, or t
ctctgtatacttttcccgcttccgcttgcgctctttcactcggttggtttcctcctgttgccgtttctcttcctgccgcagcctcagtttcttctccaactcttcgtcgtctagaagaagactaaccacctctttgggtttcaaggtatctggtttgaagttcccacctgaaatcaccatccgctgaatctcactcttctccttggctctttgcagaatgcgttcttcaatggtgcctttacagatgagccggtacacagtaacctgctttgtctgccctaagcggtgggccctgtccatggcctgctggtccacagtggggttccagtcgctatcatagaaaatcactgtgtctgcagcagtgagattgatacccagtcctccagctcgtgtgcttaacaggaacacaaagatgtcattcctgttctgaaaatcagcaaccatgtctcgcctctccgagatcttggatgagccatcaagcctcatgtaggtatgcttcctgtaaaccatgtattcctccagtaggtctatcatcctggtcatctgggagtnagataggaccttatgcccttgagacttgagccgagtcagcaggacatcaagggcatacagctttccactgtcagtgatgaggctctccttngccctggatctgat

SEQ ID NO: 183 - DNA, 421 bp, Homo sapiens
  I.183 (AI628529)
gcttgaacaaatattttatttattcatgggtagaccataaggtttgataatacagttcttcctctgttagagatgaaggagtcaaggcatgatcagctgcaatgtcagcaacaaaaccaggaggagatagggctctctcctccttcaggacacggcacagcacagcacggcagtgttaagggtgtgtctccctttggggtttccaagttgctctgtatcttctcgtgctggggctgaatgttcttcagctgtacctccactaggagaacatcagctgtgaagacagagcctcaacagtgtgaccacaggacagatctttgttctctttgtcctcaggagatgaattttcttaagctctcatggagctctttggggactcccttttgttaggctgccttcaagcaaatgagagaatgtggga

SEQ ID NO: 184 - DNA, 409 bp, Homo sapiens
  I.184 (AI627912)
ttttgagcacacgccccctttattataaactgccccaaaccctcttaagaaggaggtggctagtcccctgagagtgcggctcactttggggtgcaggaaaccgagggagcctagacctgttccatttcaaaggctcactctgggggcctgagtgaggaattggctacatgtggttgggagacatcaaaggacccaggacccctgtgaccagagaaaaggggtctagggcgccttcacaccagggtattagaaatgctacgttaagggcaatatgcaataaacgggggactggcgcggcagggttcaggcactctgagtcgggctgaggcttcagagcctgccccgcaaaggcacggctgcagaacgtggcaagcctgccgggccctgcctttgtaactgcgcctcccct

SEQ ID NO: 185 - DNA, 460 bp, Homo sapiens
  I.185 (AI625626)
attttaatttttttaaaagaaaatctaagtataaacattaaaaagaacccactgacccattagctactgtccaaaaatattactactgatattttggtaaaagcaaaattagctgccctgaataattttccttttcaggcataatctttgctacataagattgtctgtcattcaatatccaacaataggcatctggattagtgctattttgtctactgtggatacaaaagttgatatgaaatgtgatcttcatttaaatgaataatcaccaggctttaggcataaatgactgtatacatgacaaggtagcttgaaaagtatacaaaaaaaaaaaaaaaactaaatatttttccttggtttttgcatgttaacccagtcaaattaaatccagaacagaattactacattcaattgtctgataaacaagcaatgtaatttcaaaaaaatatatattatacta

SEQ ID NO: 186 - DNA, 427 bp, Homo sapiens
  I.186 (AI625594)
aacataactgtggacatataaacatttaataaatcagcacacaactgtgatggtgattgatcctttgacacgcacgctctgtgtggacgacacgtgctcccagcatggtaggggaatgacctacggggctgacttcggaactgaagactccccatatatgcacactgaacacttgcgtgcagacgctcccgaataccgcaggtcttagccaggcaggggtgaatggagggaacagagcagctccttccagcctctgggcaagcagagtgcttcctttttccagccccaggcatcgccttccctagacacggttttctctctgtgtgttctctcattctttccagcaacagcacagacagagctcagactggctgtgtgtggggtggcccacaagacagcgagcctgcttgcgctgccgttgtgctgt

SEQ ID NO: 187 - DNA, 505 bp, Homo sapiens
  I.187 (AI624830)
gcagcttttactaacagagatttattaaatttaaacagctccctttttcgtagcttctggaagggaattctcttcatttcaggattatagggagcttcagcaataacctgttccatcctacagcatatgtccttgtttctccttggtctttgcactaacacaattatctttttctcatgtgcttaacttttctgagatggcagtgggaatctatttctttaagcgccttctcgagttgctgaattaagacaacttttttaaaccttgctgcttccttgatggtaaattcaacaaattgtctcttgactttcatagatccttgtacctcttcaagcaaaatgaaaattctttcataattttgcccaaaccttcgaacttctttcattaattgatattttatatcatcattaattttctttgccatggcaggagatatttgtggtgtatttggcacagtttccaccaaagacattactgtaactggtgggtcacctgcagagacact

SEQ ID NO: 188 - DNA, 461 bp, Homo sapiens
  I.188 (AI623978)
  misc_feature (458)..(458): n is a, c, g, or t
ttctatgtaactgatagttcattttatttttataagccttttgtaaacatactgctatgtaatatgagtatatataacatactaaagaacatatctttttagtccataaccattacttctaatggattataagtatacccagattttgaaatgtatacaaagaaaatttaacaaataataacatgtaagctatacatgtcatattttacctgttacccatcaatctgtttctgtttttaaaacacagttttcaaacactaagtctgtgattaaacaatgacactaaaattaaattgtttatatgtcctacctagttcaataggcttaacaaacatgtatgcatatatgtttccaaagagctaatgattctaaaaactgctttagaatcagagaatttgggaagcaaaaggaaccctagaaatcattttatccaatgccccttgtgttacaaataatangac

SEQ ID NO: 189 - DNA, 438 bp, Homo sapiens
  I.189 (AI623132)
gtctgtaatgttagtactttttatttttttaacaaagatcattgctttttattatactttatcaaattcaatctagtaacaaaagtaaaaaagaatgttcactgtagaaaatttgcaaactatacaaaagtttcagaagaaaataaatatcacctacaatctcatcttccagaggaaaaaaccatttagtgcctttcccttgaatctgtttttatacacatacatcctttttaaaaagttcatagaccaggcgtggtggctcatgcctgtcatcccagcactttgggaggccgaggcaggtggatcacgaggtcaggagatcgagaccatcctggctaacatggtgaaaccctgtctctattaaatatacaaaaaaattagcccagcgtggtggagggcacctgtagtcccagctactcgggaggctgaggcaggaga

SEQ ID NO: 190 - DNA, 337 bp, Homo sapiens
  I.190 (AI620374)
tttttttttttttttttttttttttttaagaaggagtctcactcttggcacccaggttggagggcaggggcacaatctcagctcactgcaacctctgcctcccagattgaagcgattcttctgcctcagcctcctgagtagctggtattataggcgcccgccaccatggggtttcaccatgttggccaggctggtctcaggtgatccacctgcatcggcctcccaaagggctgggattacaggagtgagccactgcacccggctggcattctattcttttcatggatcctttcttggccccttttaataaaaaatatgtatctctgcttcactcctg

SEQ ID NO: 191 - DNA, 207 bp, Homo sapiens
  I.191 (AI612918)
gatattgtgaacacaattttctttatttcatttttggagttttctgaacagaaaaatacaattgattttctgtatattgatctagcctgtgaccttgctgaacttgattaattctattacactatgattttttgttggtggttagacccttacacaatcaaatgaggttaaaaaaaattgtccagagtggccccagaccaacaacag

SEQ ID NO: 192 - DNA, 468 bp, Homo sapiens
  I.192 (AI610598)
tttttttttaccagaacatcacataagtttatttcagatgtaacagcaatgttaaaattgacaagtttaattcttaactgcaccaagtaaacttagccatttaagtatttttttaagttattccctccaaaaaactgagggagcttttcttttccaccaccacaccatggtttcccaatagttctctttttggaggacttttcaattgatgagtaaactgctttagatatttcagaactttattccccaaatgaaagctaatctggacaaactatatattgcatagatttctctacagattctttgctttaaaacctaaatgcaactaacatagtgtaattttaacctatttgccccacagtaaaaactatctgtcctgaaaaatatgatggatatatcctgtgattttccagttaacagaattgttctacttcaaagataattattatcatatatcaaaataaccag

SEQ ID NO: 193 - DNA, 428 bp, Homo sapiens
  I.193 (AI609367)
ccactgttgctgagacatttttattggcataggttatatgtttgtgtgtgtgtgtgtgtgtgtccctaaacaatatttagcaagttgactgtttttaaactttatatcaatggtgtatattaaatatgatcgtctacagtttgcttttacagctcaatagtttaaaaacaaaacaaaacaaaaagctgcagtaatccccctgccgttattcatgaggattacatttcacgacccccagtggatgtctaaaactagattagtactaaatcctgtatacattttcctatacatatgtacctatgatggtttaatttataatgtttgcacgggagattaaaaacaataactaataataaaatagaataactagagcaggccaggcaaggtgactcacgcctgtaatcccagctctttgggaggctgaggtg

SEQ ID NO: 194 - DNA, 437 bp, Homo sapiens
  I.194 (AI597823)
ctagaaatattatagtatttctttatattatagaaagtgacacacacacagtgaggcaagggtaaaaacacattaaaaagcattgataaatttttctcactgacaccagccctgagcaacatttgttccctagttctccttttccataacagactgaacagtgttattagaatgcagacatagccatttaaagtttgacaactggaaataaaggataatagaataaaaacaaaaccaattctaaaaaaaatagaattttcattacatgaaaacatatgaaattaaacacaaaattagtataacttacatgttttaaaagtatatacttcatttataaatatctctagttgataataatctattaagaatcataaatattcaagtgagcatttaaattttctatttaatagttcagaattcttgaagtcagattagtg

SEQ ID NO: 195 - DNA, 466 bp, Homo sapiens
  I.195 (AI591353)
gcactcctacatttattgcagctctattcacaacagctaagatatagaattgatataagtatccaacaatggataaatagctagaagaaaaggtttgaatgtttccaacacaaataaatgataaatgtttgaggtgatgaatatcccaattaccctgatttgattgctacacattgtatgcacatatcaaaatatcacatgcaccccataaaaatgtacaactatcatgtatcaataaaatacccatagaatatacaaaaaagaaactaacagaaaacaatttaaaatattttaaatgacaaaacaattaaatgacaattaacaataatgttagcctataaagctattttctaaaacaatttggtaaggagagtagcattgttttatagttctacaaatctctttaatgtttagcttgatagaaggcagctgaattaccatacctgcttctgcattcaacttgctg

SEQ ID NO: 196 - DNA, 466 bp, Homo sapiens
  I.196 (AI591043)
  misc_feature (442)..(442): n is a, c, g, or t
acttttttattgaggtctaacaaaataaagtgcacagctcaatgaattattacgtatgaatacatttgtgaaaccactgcccagatcaaaatcaacatttctggtacaccagagggctcccatgagccccctctgtatcaatcccccaccacccagaagtaaccactattccaacttctattattgtcaattagtcttgcctgttcctgaactctgcataaatggaacttcggcctggcttctttcattcaacttttatgtctgtgaagtttacctgtgttgccacatgtatccgtaattcattctttttaaattatttttcattatatgaatataccacaacttgttaattcatcctaccatcaatatacagtttggggctattatgaataaagctgctatgaatattcttacaatatctttcggtgggcatttctgctgngtacacacacctacgaggaattgc

SEQ ID NO: 197 - DNA, 463 bp, Homo sapiens
  I.197 (AI590144)
tttttttttttttttttttacataccatttacattttatcaggtattttaatgtagagatgatttaaaatatacaggagaatatgcataggttacatataaatactatgccattttatgtaagggacttgaacatctgcagattggggtgttcacagctaaacagactgctctgtgcagggagaggccctacagtgaagggaaaagtagacacttgattgtggactaatttgttcagtatttcccaaaaacttacagctaacaataatattaaacaggttttattagcatcttatacatctgacactctctcctaagcatccagtttattttctagtcacgggttacttactaaaagtctgtgtaacatgagctcacatcagattagaaaacatcaagtgggtagtatttttgactgaattaacatacaaaagaaattgcctatatcatgtatatgggctcca

SEQ ID NO: 198 - DNA, 264 bp, Homo sapiens
  I.198 (AI589435)
tttgatgagaatcttctctgggctttacttggcttgactcacttaattctggcactgtctatctgaggtaggcacaattatcacccccatttcctagagagaaaaacagaggctcagccaggatgtcattagtctgaggtcgcacctcggggaatggcgatgtctagattcagactgcagtgagatgcagtgcagttcttgctctgccctctccgtcttgccctctgcctggtgctggcacaggcccttccaggcgggaggctg

SEQ ID NO: 199 - DNA, 478 bp, Homo sapiens
  I.199 (AI589096)
  misc_feature (406)..(406): n is a, c, g, or t
  misc_feature (448)..(448): n is a, c, g, or t
  misc_feature (466)..(466): n is a, c, g, or t
cactcccgacgcatttccatagcgtggggagaggctgtgtgagctgaattaggaagtggggcagccagctgcaacttacgacaatatttgtgatcggaagagggcagccacatggatctttccctcctctcccttcctttctggttaaacgtaaaaaacagccgagtgcaaagggaagggctcatgccggcgcaggctgctccccggcgcggcatttccccggcgctggccgcggccccggcgggcccccgtctgggtgctcgccttccctggattccacacatttcagcgagcctcgtaaacacaatgaacccggcagctccgcagactcgcaccgcgaatttaaggtggcaatttgtttacaacttttcctcccccgaccaggccctaaggagaggcggctcanaacctggaaaacgggggggatatctttttccgagaataattntttaagggagcagagatntcatgctcaaca

SEQ ID NO: 200 - DNA, 455 bp, Homo sapiens
  I.200 (AI584003)
tttaatttttatttattttttttaaacaataacagaggtcaaccacagatgtggacctccagcaataaaagcaggaattcaagtgccagatactcagcatattaggtttcctacgtaagtcacagggtaatatgttctaaatatctctaatgtgatccaaaaccctaaaaagagctggcacaaaaccattgtgaatgactgcctctcttgatgtaaatttttaaaaatattattacagtatcatagtccccactaacaacaactggggtacatataacaatgtattgtgaaattaagtgtatttattctctttaccaatagcaaatgctaccctaccttagtaaaaccaagacttgcttcaatcaatgctgttttgtaaaaatagcaaagcaacgaatgctgaaatcaatcaaagctgcattacttgggttaaatcagtttctacttagaacaca

SEQ ID NO: 201 - DNA, 280 bp, Homo sapiens
  I.201 (AI582909)
  misc_feature (248)..(248): n is a, c, g, or t
  misc_feature (264)..(264): n is a, c, g, or t
tttttttttttttttttgcttggaaaggggccctttattcaacaaaagtatcataagaaaagtggcttagtctcaccctcctacccaattcctgctattcagactggccaggggtcctgcatcttcttcaacattctagctgatgcctagcgtttgtacagtcctttgcagcttgcaaaactcttatttgttccagaaaactaaagcccagagaacctacatggcttgtccaaggccaggcagctttnggtggtgaaagcctanccacaaggctttgctg

SEQ ID NO: 202 - DNA, 394 bp, Homo sapiens
  I.202 (AI582734)
tttttttcaaatagaaggggagtctgtttaataaactacgcccgaatcttcccctaaagatccctctgcagcctcttgctaagaatgtgggcacccacaggcacaggaccggaagaggcagcgtcgggctcagaccctggggctggtaaagtgtggaagggactgtgtcctgggtaagagaccttgttcttttggtgctttgctgctcttctatccatgttcatttgcaaattacccatcctttgctgccaagacaccatccgtccccacccaacccagtgccaccctgggcttggcatctctgacaggtcaccgggcttctcacctccttcctgttcttcagctacccctgcaggctgcccctctccccttccctcttcccagccttcagcct

SEQ ID NO: 203 - DNA, 162 bp, Homo sapiens
  I.203 (AI572407)
ttttttttttttttttttttttaattaacaaattttttaaagatttttcctaggtcattaaaggttataatgttaagaaacgtttcccaaacctttcagagctctgttacatcctatttcctgataattactcagcacaccacaaagtgcaaaatggcacat

SEQ ID NO: 204 - DNA, 166 bp, Homo sapiens
  I.204 (AI572373)
cacacactgaaggaaacttgatctgaagattgacgacctgattccactctgggtttgcatttttctcaattatgtttgtacaaaccttttttccagcaaaggaaacttctacaaaaggatccacgagatttttcttatctgcattgcctccaaatatttcctttac

SEQ ID NO: 205 - DNA, 565 bp, Homo sapiens
  I.205 (AI572080)
  misc_feature (462)..(462): n is a, c, g, or t
  misc_feature (562)..(562): n is a, c, g, or t
ttttacacgtctaacattccctttattgcttacgtcacatattccaatgaatacaataaactcctttttaaaaaagtaaggcacatgaaaagccttttgtgtaagttccatgttattttaaaattcctattggctaataaaagcatttgcactatagagccagagacatctagaaaagcacatgatagatttttttgcaagcagaatgcctgaaacattacatttacctcatggcacaatgagacagtcaccaaatccaatgtctgcattagaacgatacagctactattacagttgcaaaaccattaatcagcttatccacatatgtacagctgggtccccacgtgacaaaatctaaaggaagaacagcatctaactgcacctgtgctccattccctcacagataggaactgtgacattttggctctttccatgttgtgctgctcttcacgagaggccagngtcatacgatactgaagaccatggacaggtactggtcgtacgacacctgaatccagccgtcctgatccgtgtcgtaacgtctgaatatatccgcaacctnctg

SEQ ID NO: 206 - DNA, 500 bp, Homo sapiens
  I.206 (AI571948)
agcggccgccctttttttttttttttaatatcgatctcttttaatttttaggccaattttgagtagtcaaagtcagagcagtcaatctgtgttgtgagccgaggcacagctgcagaagcgtgtctgaggtgtccggtggaggtggcagccgagctctgggactaatcaccgtgctggggacggcaccgcgtcaggatgcaggcagatccctgcagaagtgtctaaaattcacactcctcttctggagggacgtcgatggtattaggatagaagcaccaggggaccccacgaacggtgtcgtcgaaacagcagcccttatttgcacactgggagggcgtgacaccaggaaaaccacaattctgtctttcacggggggccactgtacacgtctctgtctgggcctcggccagggtgccgagggccagcatggacaccaggaccagggcgcagatcaccttgttctccatggtggccattgcctcctctctgctccaaaggcg

SEQ ID NO: 207 - DNA, 413 bp, Homo sapiens
  I.207 (AI569784)
gcgagggaggaaaaaagagagatttccaaaaattaaaacgaatgcacaaaagtcacccgctcgatccgcctccgaaagcagacgggaacctggcgacccccctcctccggcgggtctgcccgatgctaatgtcaccaggaacacattgcagccggagccggagatgctgactttccagacaaaggctcgatcggcttctctccgcgggcggtaaacaagatttcctgctctttttagggccggtccccgcgccgctccggggctcggctcggggagaaaagggaaagccgccgccgacgccgccgctcggctctgcccggctggggccccgggcgcctccaacctcggctcgcggctgccaggggcgggcgggaggaagctggcgccttccgcgcgcgtcccctcccccgagt

SEQ ID NO: 208 - DNA, 378 bp, Homo sapiens
  I.208 (AI569059)
tttttgcactgccagcagttttattagagagccctgtcccctgattaaaagtggacacgtgcccacgggggtctcctccttcccggtgaggggctcagctggggtgcccctgtggcaccactcacaggccaggagccagggaagttctggggaagcactttcccagaaacccaccccagaccccaaggtagctcagggcttctcagaggcaggcccagatccggtcccaccgcagggaccaaccatgggccccgcctgcctgaggcctgcagcgggccaagccggctggcatgggctggcctattctgttgggtgggttcttggcccaccagagctggacaggcaggtgatcaagccacgttgggtgtgctgggggcc

SEQ ID NO: 209 - DNA, 391 bp, Homo sapiens
  I.209 (AI567785)
tacagaaagattggtttattagaatgaattagctcttgtgactgtagaggctgacatatctcaagatctgcagtcagcaagctggagatccaggagatccaatagcatagtttctttcagtccatatgccagcaagctcaagacccaagaagagccatttttcagtttgcgtctgaaagcagaaaaacttatgtcccagcccaaagcaggagttcccccttacttgaggaagaataagcccttttgttacactcaggccttcaacagactggatggggtccacccacattagggtggagtttgttctgccactgtgcagttatcattctgggatgggggtaccttactctcccaatgagaaattctaaatttcctcttttgagcctggtgc

SEQ ID NO: 210 - DNA, 427 bp, Homo sapiens
  I.210 (AI567090)
  misc_feature (13)..(13): n is a, c, g, or t
gaaatcacacagngctttattcactgtttcagtaaaagtaccgaacggtacaacacatttaattgagcagttaaacagttactgtgagggatgggaaatgaggagcaaaataaagaatgaaaaggttgacaaggcctggaaacagtggcaaattctactggtttctcaagacttcacttcaaggtcccctgcccacactagagggaagcaaaccccagagccccattttcaccaaaccccgatgtccaccttccacccagcccccactcctcagcttccgcctcccgacctgtaagggtctccgcacatctccacagagccatggagagaaaaagcaaatagggccaagctttgcctactggtgaatctgagcagaatctgtggaggccaggcagcgggagtctgtagaggcacagctacaggtgtt

SEQ ID NO: 211 - DNA, 687 bp, Homo sapiens
  I.211 (AI566451)
  misc_feature (477)..(477): n is a, c, g, or t
  misc_feature (537)..(537): n is a, c, g, or t
  misc_feature (605)..(605): n is a, c, g, or t
  misc_feature (632)..(632): n is a, c, g, or t
tggtacactacgctcaacatgcagaatacatatccttttcaagtgcagaagcaatatttataaaaattaatcatattttcaatcattgagaagacacaaattccacagagtttttagtaatacaaatatttaatcacagtggaactataagtttggaaattaagcaaaacattttcagtatggtaaagggatgaataaaatcaaagtttgcttttttgaaacactaataaaattgatggcctccagcaagattgattaacaaaacagacaaaaggcacaaactctaaccggagactttataagtattaaaaagataaatgaataatagaataactttgaaattttcgataaaatgaacaaattgattcagcaaacacaggttaccaaaatgaatatttatatatatgtaaattgaacctgtagttaaaacaccttataaaagaaaactacagtctcacatgggcttataagtgaatnctttccaaatgctttaaggaagaaatagcacacatcttacataaactctgtcaaaaatangagaagaaccattttcccaattgtctaaccagcatagcttttatacttcatataaaaaccttacaagnttctgggctggtgctcaagcctgaatnccagcactttgggaggccgaggcggtgggatcgaggtcagaatcgaaccatcctg

SEQ ID NO: 212 - DNA, 235 bp, Homo sapiens
  I.212 (AI566163)
gcggccgccacgactcgggcccgctcttcaccttcaagctcctgaccgagcccgagagccccgggaccgacggcggcgccagcaacggaggctgcgaggccgcggccgacgtggccaacgggcagccgggcttcaaaagcaacatgcccctggcgcccgggcagttttagggcccccgtgcgcagctttctttccctggggaggaaaacatcgtgggggggaggggagggcgggg

SEQ ID NO: 213 - DNA, 183 bp, Homo sapiens
  I.213 (AI565502)
  misc_feature (50)..(50): n is a, c, g, or t
ccaaagtaatattctgatttcgcgaatctttttcttttgaaatatctttngctatttttccttttttccgtctggactcataaccactattgatattttccatggattcagaactacgttttagaacagggcactctgggttttctttgaggcatgcacagtccaccttgtacttacaatttc

SEQ ID NO: 214 - DNA, 375 bp, Homo sapiens
  I.214 (AI561280)
  misc_feature (191)..(191): n is a, c, g, or t
  misc_feature (211)..(211): n is a, c, g, or t
  misc_feature (227)..(227): n is a, c, g, or t
  misc_feature (259)..(259): n is a, c, g, or t
  misc_feature (270)..(270): n is a, c, g, or t
  misc_feature (287)..(287): n is a, c, g, or t
tttttttcagaaaccaattcacattttaaaaatatatactgtacactaccccatcctcttcctaatagctaaagtgatctaccctaaaacaccaagcaatccttcttacagtttgttccctcctgacagttcattgattacaatgtgaaagcaccaacctgagctaaaatgaaatgagaagccttgatgtnttcaggcacccaagtacttntaaaaatgtctactgnggctgtcctggcagcattttacttaatcattntttagaggagnggaatgaggaactggtntgggggtaaagggggaaatcattcaaatgggacgcctataaatactctggatcacaaagcggcttttttgtggtaaaaaacacacaaa

SEQ ID NO: 215 - DNA, 463 bp, Homo sapiens
  I.215 (AI561202)
taagttctcaaacttttaatgtttttcaataaagtaacacggttctccatatgcagatgttacatttcatgtgttagatttgctaagtatgatttaattatacatttccattttttgatcttcaacttaattacacttaaaaaatgagtattttgctggtgtaaacacctccacttctttttttaaaaaaacagggtctccatgaaccaagctggagtgcagtggtgcgatcacagctcactgcagcttcaacctctcaagctcaaggcatcctcccacctctcagcctccgagtacctgggaacctgggcacgcaccaccacacctggctaatttttgaattttttgcagataagggcttttgctatgttgctcggactggtcttgaattcctgggctcaagccatctgcctgcctgcacctcccaaagtgatgggattacaggcctgggccactgtgcctg

SEQ ID NO: 216 - DNA, 392 bp, Homo sapiens
  I.216 (AI560205)
ttttttttttttttttttttttttttccaaacaacttttgtcattaacatttatttcaattaaaaaaatgtgaatccagaattaatgtaaggggaaatattaaagtatctggcgaaaaaaatgctattaaaagtttaagtaaaatgtttgcggtcccagggctatgtttaacaaacaaacattaacaaaattaaaaacacattctttttttgttttaaattgaaatggagtcttgctctgtcacccaggctaggagcgcagtggcatgatctaagttcactgaaacctttgccacccgggttcaaacaatttttgtgcctaagcctcccgagtagctgggactacaggtgtatgccaccatgcctggctaatctttttgtatttttagtaaa

SEQ ID NO: 217 - DNA, 430 bp, Homo sapiens
  I.217 (AI559626)
ttttgtttttttttttttttttttttttttttcctggaatatatttttttaattggttgatttgcttcgttcaaagtgcttaaaatggaaaatttagtttgaggaggggcaggtttgggggtaggctcagcgggcatagtggccacaagaagatgcccatctcacacctggagacgtccatgagcacctcgaagctggccgtgtggctgcactggcgtacgacatgggtccggttcctggacaggagcttgaagccccgggcagaccaccctcccgtcccactgacactgcgtagagaagggagaagaggcaggggtgagacggttccctccgcccatgtctgttgggggcagtctttgcccggccctggggactcccaggccatcctggccaaaccaaacagcaggtatagtgagtgctgaaagcccgg

SEQ ID NO: 218 - DNA, 452 bp, Homo sapiens
  I.218 (AI559554)
tttttttttttttttggtttgatatactcaataggcactggcttttttttgtgatgtggctttttttgtgatgtggctttccacactattgtagaagtccagaatcccatttaataagatgcatgagctattagtcaatgaactttagggctggatggatcaacgaagtgtttttcactgccccagcttccttatgaaccagattactgaccagcggtgaactacaataaattcgaagacacaactaacaaaaacttaggaaggcctggaagagaggtgccaaactgcactgcaaatacaaaataaaatattttcatgttcttgataaatatttataaaaaaatatacatataatgaataggccattttataatgctagttaaaactttgaagagctgttaaatctgtaggtccatcaatatcctggcttcaaatcaatatgtagaaatatt

SEQ ID NO: 219 - DNA, 574 bp, Homo sapiens
  I.219 (AI554655)
gtaatgtagtaaatagcaatagatataacccacatcagcaaaagctctctggggtcctcaataattttttaatagtatgaaggcgtcctggttccaaaaagtgtgagaaccacttatttaaaagacccattctaaggcacactgagtgaggcagtgatctatcctcccctccctggcagcgagcatggtttcctgctcacccctttctccaggctctctccctagacagccacgatccccgtccttaccctgggggacctgaagaaccatgtggacaccgcagtgctccacatgacaggagtaaaggttgctgctctgaggatcaagctcaattgatgcccacgcctgataggttccatccccactgggaagaatgtctccataatcaatttcttggacaatttcttccccgtttttcatccatgtcatgtaaatttctggggggtaaaagccatgagctttgcagaagagagctgtaacccctggaaaagtttctttgcgatttactctgaccagtgggggctctaggaagaagaagctaaagttaaatcaaagtgccttatgtactgagcat

SEQ ID NO: 220 - DNA, 417 bp, Homo sapiens
  I.220 (AI540783)
tgcctttgccgcgccgcctacgtgcgggtccgggctccgcggggccgggtgcgggaccccgcagatcgtcacccgcaacccaggcagccccaccgcgagtgccgccggaccccctggacgccgctgccagaggcgttcgcgcctatctggtatgaggtccacagacccgattcttacaacctggcgctctaacctcgccaacgggccaggaaaaaaacagaacaaggaaaagaagaaaaagtctgttccaagtaataatgggactagacagtaactgtttgcactttcgtctcttatggaaaatatgattattttgatgctttagtattacagactgtatcagacatactcttaaaagtatttaaaaacgtggggtcctaaaaatttcctagatcgggacagctgataatgcgactt

SEQ ID NO: 221 - DNA, 284 bp, Homo sapiens
  I.221 (AI540569)
caaaaatgtggggttgctcatcttggcccagtagtttgccgctgttgctaagtttgggaacattcgtggtgacagctccccaataatggggtggcaaagtacacccccaaactcaaaatatttccccaatgcctttttaaccattgttttttttctcctcaaagactgggatctcagacacaatggcccgtagagcaatggagccattcatgcactgatctagaaacattctcacagcattaatagggtgtcatctgtgctttcttcgcaactaacttgacttg

SEQ ID NO: 222 - DNA, 453 bp, Homo sapiens
  I.222 (AI539832)
  misc_feature (428)..(428): n is a, c, g, or t
agggtacaaaatatttgtttttattagtgcttctgcaaaagcagctgcgtgaagttaaccatactctttgggctattaataattatgaactgttcttggtagatgtcagataacttgaacgtgacaaagaagaaagagcacagatcatctgaagcatgattaggtgggtgttgataaatgattattagcaaataaattctatcttttcagtcactgaaaagtaagatttcattggtatgaaataatcactctggtactataaatgtcacatgaataaagtgaattttaaaatagaaattattaaagagatatgccctgtttacccttaaaaataaacagaatttcaaacctgaataagttaaatctgttagtaaaagcagagtcgatcaactattcttcacaatggtgagtgcttgatagctaaactntagaatgataccaaatctgttttca

SEQ ID NO: 223 - DNA, 468 bp, Homo sapiens
  I.223 (AI539168)
  misc_feature (387)..(387): n is a, c, g, or t
tttgaattgaatgctgcatttattatagtgtttttattaacaaactttcaccagaaagttccgagtgtgttaatacagcaggcacattggcttccatgtttggcatttgacagtccacagaattgcacttcactctcacaattctgccacaactttgtgaattatttgggcaagacctacaaccagcctcccccattaaatgattaaataggacttttggttcattctgattgaaatgttctgagttcacacttgcatccgtctgtgacaagctcagctccactttccctcctgccttgttttcagtccctccactgctctccagattgctcacgtctctatttttacagagttccctttgtttattctcggggtcgcaacacgttntgagtaacgatccagtgcttctgcagacaaatgacgatggctctgccatctttggaagatgctcttctatgctcctctgaa

SEQ ID NO: 224 - DNA, 538 bp, Homo sapiens
  I.224 (AI538703)
  misc_feature (243)..(243): n is a, c, g, or t
  misc_feature (252)..(252): n is a, c, g, or t
  misc_feature (253)..(253): n is a, c, g, or t
  misc_feature (255)..(255): n is a, c, g, or t
  misc_feature (258)..(258): n is a, c, g, or t
  misc_feature (259)..(259): n is a, c, g, or t
  misc_feature (262)..(262): n is a, c, g, or t
  misc_feature (264)..(264): n is a, c, g, or t
  misc_feature (279)..(279): n is a, c, g, or t
aagtaagacttccctgcaacaacagcaatggaggagaacaacaacaacaaaaaaatcagaatctgcaggtgcttgaagaagcaggagtctacacagtagtggaaaccggaggcttttttttaactttatattctttcccgttttcctccttatatagaacgtggggtatctgtgtggccctctgtttgggacggaacggctgcagcgggtgaagaagactgctgtcttgggggtgttgggggngtggggggnngnttnnttntnccttgcgtctctgcnccaccgtctccccaaagtctcgacccccacttgctctctcacttgtcctcgatccggggtgccagagttagccgggcctgaagccgtcgtcttcttaagaggagttcataatgggccgggagtacaccccctggtagtaggaggtatctgcggccaggggcgaagcgtccaggcccgttttgttcgtgaccgggcccatggccaagctgccaggcatgggggaaccgtaacccgggtagtgcatcacctggtcgtagcc

SEQ ID NO: 225 - DNA, 278 bp, Homo sapiens
  I.225 (AI537525)
tttttttctgttaatatcaactattctgtaccagagacacattctgaaatttacattattattgttaaagattttattagaaagtacttaaatacttaatacattagtatttaagtacttgttagtacttaattagtatttagtaataataaacaagcactaaagaatatttaattgcagaagtagaaaatacattgtgaacttcctaagttatcaatcacgttatgagaatgtaagttttatgtattaaaaaataaagcaaggcaaaaactttattg

SEQ ID NO: 226 - DNA, 668 bp, Homo sapiens
  I.226 (AI521668)
  misc_feature (527)..(527): n is a, c, g, or t
  misc_feature (528)..(528): n is a, c, g, or t
agggccgccttgcctgtcgcagcttcctggcagcagctggccttgcctggaccagcctgtctgccccagcggccggacgtggccagctggaatccgtgctgcgcgggcgctccggccgtggcagggacacataggcccgcacatgcttagtttgttccagggcgtcccagtgacatcagggaggggcaaggccaaggtgggccacaggctctcccagggtaggactcctgagtggcgccctcccgaaaggggtcctgctggcccctcacccttctggggccggtttcacccacggggtgggcagcaggagcacggagcgcggggtgccacacacaggccggggggctccgcagaggaggcccaaggttttcatgatcagacaatgcacatcctggctccaggtggacagagcatggggatggaggcagaacgttctcagacagcagtggcctcctgggccgggaagccacgggtgtgtggggagccatgggcgcagggacacagaaaggcgtgcagccacactcatnncacgtggtgtaggtgtgcaggatggctgagccgttaggacagtgcaagggcaccggtctctcgtggaccccgctcttctggcagcaggtgcacttgtgctgcatggcctgggctctgctgagtacttggacgcttccggg

SEQ ID NO: 227 - DNA, 341 bp, Homo sapiens
  I.227 (AI520932)
ccctccggcccttcttcctactcagcgtctcacttttggcctattttctgctggatctctggcagcctcgctttctccctgacgtttcagcatcatccccagaggagccacactctgacagtgagggtgcggggtcaggcgcccggccgcacctgctgagtgtgcccgagttgtgcagatacctggctgagagctggctcaccttccagattcacctgcaggagctgctgcagtacaagaggcagaatccagctcagttctgcgttcgagtctgctctggctgtgctgtgttggctgtgttgggacactatgttccagggattatgattcctacattgtct

SEQ ID NO: 228 - DNA, 458 bp, Homo sapiens
  I.228 (AI492835)
  misc_feature (446)..(446): n is a, c, g, or t
cgggcgccgggccttagtgctggcgcgggcccgggagagcgccgagctgccgctgcccgccggctgggaggaggcgcgagactacgacggtcgcgtcttttacattgaccacaacacgcgccagacgtcgtggatcgacccccgcgaccggataacaaagccattgacctttgccgattgtgttggggacgaacttcctttaggatgggaaaccgtatatgataaacaaattggagtttattacatggaccacataaataaacttacccagattgaggatccaagagaacagtggaggcgagagcaagagcgcatgttgaaggaatatttaattgtagctcaggaggctctcaatgccaagaaagaaatctaccagattaagcagcagcggttcgagctggcccaggaggaataccagcagctgcacaaaatgtgtgaggatgacnagccgtcgtacg

SEQ ID NO: 229 - DNA, 462 bp, Homo sapiens
  I.229 (AI492493)
  misc_feature (288)..(288): n is a, c, g, or t
gcggccgcctctgctctcagtgccccggatcggaggccgtccatcgcccctcgggccgacgccatgaagatcaaagatgccaagaaaccctctttcccatggtttggcatggacattgggggaactctagtaaagctctcgtactttgaacctattgatatcacagcagaggaagagcaagaagaagttgagagtttaaaaagtattcggaaatatttgacttctaacgtggcatatggatccaccggcattcgggatgtacaccttgaactgaaagatttaacactntttggccgaagagggaacttgcactttatcaggtttccaacccaggacctgcctacttttatccaaatgggaagagataaaaacttctcaacattgcagacggtgctatgtgctacaggaggtggtgcttacaagtttgaaaaagattttcgcacaattggaaacctccacctg

SEQ ID NO: 230 - DNA, 495 bp, Homo sapiens
  I.230 (AI480038)
aggtttccaggatttaatgattctttcaatcaactttaaagttcttcaggaagattctccaggtccgtcaacagttttccccttcatgactttgtgacaaagctttcttgttccactatccaggtgttcccaacaagttgctgtaacggtggcccctcataagcttgcctggaaaccctagaaagctcagaaaaattatgaactttgcccagtaagaggctgggaagtcagaaagggttttaaacaaaactgaccccacttgttacatgctcctttcactgtccaaacgtcaaccaaaggaacttttgtgacgctaagacgctcccggcgtcctcacccgttcacagccagagttgatcttagaaggcagggggctcgcaccgagacgctcctagcaagcccctcacgcgagcgaatgactggcgccaggagaaacgcataggacctcccgaagccgccgagagcaaaaggacccatcagagctgtgctgagacc

SEQ ID NO: 231 - DNA, 490 bp, Homo sapiens
  I.231 (AI471037)
  misc_feature (316)..(316): n is a, c, g, or t
gaagcgctgggcattttatattttgaagaaagtactactcttttcaacataattgcaggatgttgacttctggatgaaatcttcggccagcatgtttctattcctatatgaaagttcttgctcctttgaacagataaatatggaaggttggggtgaaccagtagcgttgcttacatatgttgtgtttataacgtccacccatggatcactggagctgtataggatagtcttctccaatagagagtcctgactgaggtcagcccagatcctagttgattgatagcctggaccttgacatcatagggggataaacggngcgtatacccactgtgggggggtgtgggactgggttcttcttcccactcatggggctcccctggtggttccaggcaacctctgtactctagggctggggccattctgctccaatgggatttaaaggctccactttataatatttctcttggggttggagaggcttgacccctat

SEQ ID NO: 232 - DNA, 372 bp, Homo sapiens
  I.232 (AI469528)
tttttttttctgggtgcaaggaacattttattccataactgtctccaccgaagccgcagaagcaaagccaggagcagaatccattctgccagcgctgggctctggggagacatctgtgccctcaccatggaggacagaaggcaggggcctcccgactccttggtcctgcctggggtgctcctgtccctctttcttgctgggggacctaccccaccctccccctcccacctcagccacagaggaacaagggagacaaactgagggctctgcagtccccgttcaaggccaacataatagtcgtgtggccccagcccagctaggcgcatcctctgcggcatggcagcggtgaccaagcacagccaacgtcagctc

SEQ ID NO: 233 - DNA, 363 bp, Homo sapiens
  I.233 (AI473516)
  misc_feature (314)..(314): n is a, c, g, or t
tttttgcagcttttaaaatataacatttattgcttaaatggtttgatacagaacagctttcttctcattctgaatttggaagttctatacaactgaatacaaagaggaacaaaaagtaccaaaaccaaacttgtgattctctgttcatgtggcataaaccagttttgtacataacatgtagcagcagtttttaagttccctttagaaaaatatgaattctacaaatttattattgtttcctgtttaatgcatgggctgaaatactaaggatcaatttccttcttgaagaagaagaagaggaaagagacgaacanaagggttcaaacgcattggggaattctttccaaactgggcatcccacgg

SEQ ID NO: 234 - DNA, 206 bp, Homo sapiens
  I.234 (AI473446)
aggtggattactaacagtagaagtcatctggggatgacctagtaattgaaaatctgactgatctatcccagccattgtggcaagctgcccaagcccagcatctttaaggagatccaagaaagcatgaaacttctgaaaagaattctcaatgctgcccaaaacaccttcatcatcaggatcatatttgtcatgactgtgcatgaagg

SEQ ID NO: 235 - DNA, 455 bp, Homo sapiens
  I.235 (AI473374)
tcaaagatttaattagtcgaaaaagcacactttaagatggacatattgttcatttcagctaacctgcgcaattacaaactcgctacagaagaaatgataagaaacaaaatactaacaatgaacattgtggcagatagtgtggagggtgaagcattgtagaaaatttgaggttcttctgtctccatgggaggttttagaaaagcatctatacagacaccatcagcaatacacacatcaacagcatcagtgtcttttacatcagctttctccttacaactcaaggtgctataacagctgcaataaaatttttcagaaaattgctccaggtcttcaagtggcggtttttccacgtactgtgaactttccaccttttctcaagttgaatagcacaattatcttgggttgaaggggaaagatagtcacttgaatttcccagtttttcctttatacacact

SEQ ID NO: 236 - DNA, 394 bp, Homo sapiens
  I.236 (AI431939)
ttttttttttttttcactttttggacaacttttaatttctaagacatttaaaaagtcacactaaaagtatctcatagaaacaaagactaacaatttgtaaacaaaacaatctgtaaacaaaaatcaattactagtgtgtccaaatgttatttttaaaagttaacattataccagttttttcaagtttaaaaagtcggggctgcatctatgttcacattaaaaaaaaaaacttgtaagaattctgcctttatgcattaaataacgtgctaccaacaaaactagcacataaaagcctgtaaatgatgaaaacctgtgtccctggcagacgaggtcatcactgaggctgcagggagggccatgggcacccagcaaatgggaggccgcactgccgctg

SEQ ID NO: 237 - DNA, 432 bp, Homo sapiens
  I.237 (AI431323)
cccctcgagggatactctagagcggccgccctttttttttttttttttttttttttttttttttttttttttttttttttttttggttaaaaaagtttaatgagctgtaaaaaaaatacccttccattaaatattaaataaattatttacaacttgaaaaaatactttttaccttcgggcccctttatatacagaaatagcataaaaagggacaattgaaagtttaaaaccatcataacaaaaagggtccattgtcttatgatccactggaaagaggaccgactcatcatttatggctatgacttggcagggactccaatgggatatcctgggagaaaataaaataaaataaaataataaaataaaacaaaatcggacgcgtgggtcgacgatatcccgggaattccggaccgggaccagcctgcttttttg

SEQ ID NO: 238 - DNA, 374 bp, Homo sapiens
  I.238 (AI434650)
  misc_feature (312)..(312): n is a, c, g, or t
ctcaaaaattataattcacatttaattacaagtcatgatttttctttactttttcaacaaaatggtaaatatagtctttaaaagatgtaaaaaaaaattttttttacatttaaataagcatttaaaaatctaaggtaagactacaaagcagcataacaggttttctgtcacttgtaaactggattagaaggcaatccccagaattccagaaccgttgtggagatatgatttttaatttacaatctagaaaaactgcattcaacaagtagtccaaggatttgggttctagttgccagcttgcatggtacaatncttgagtaagtctctcaacttctggatataggaaatcaaaggccccccaacagaattgaaag

SEQ ID NO: 239 - DNA, 410 bp, Homo sapiens
  I.239 (AI434289)
  misc_feature (357)..(357): n is a, c, g, or t
ttttttttttttttttttatgtaatattattttattgccattttcattatattcagtagaaatagtagtactagaaagaagaaaatgagattttaggaacataaaactggctttagatatttgaaaatgagaggaattttatgtttacagatttcaaaaggctttgatattatatttcaatgcaaacagtaacttatcgtatgatttggttcattaataattggagtgatgttcagatttaaacatttcatagaatctcaaatatgacttcaggtaccacattttacagggaaattactgtgattcacccactaaatgatagtgagtaaataataacctgggatctgtaactataancctaggagtcttgcgttctagtctaataactgttctcaaaaatatcattaact

SEQ ID NO: 240 - DNA, 499 bp, Homo sapiens
  I.240 (AI452559)
gactttttctaatacagcagtgttttggctgggacaggttggccggactctccaggaacgtggtgaagagcgtgggggaggcggctgaggcagggcagagcccaggctgcagagctgtgtgcttcacaagttggctctgtggtcgggaaggctccacggccataaggaccctggcctttgatttcctgggaggaacagcacttggaacggagtaagaatttcaggcaatcacctggtttccccaatggctttcttgtctcacggacagtttaacaaagctggcagagtcctgtaactaggatctgtaactttgggggtaagggcaagtaggaacagacatccaaaacaactgagtgctgggataaaggcttgaccggaaagatttcaggggcctgggctttgtttgcattctgggaaacttctcagtctcttggtcagaaatgaagcagcacctttcacatctaagtacaggccccaggctggatactggtagatgact

SEQ ID NO: 241 - DNA, 350 bp, Homo sapiens
  I.241 (AI424367)
gctggataattttgggcttctttttggaacccatctgagagatgacaagaggcttttctggggcctgagatttttgtttcagcagccactcttgcagcgccttccagttttgagaaaagtcttctggtgcctttggaggtcgcaccacagcaccggggccgcttgctggcttcttgcttacttcccgcgccttgcttttccaaaacctttttttcttcttgtttttcttccgagtgagcgtcttgacaggacccggcttagccacggggctgctcggggcgcgcttggaggcggggaccttcgccttccccatcctgctgccgtccagcgcctgggccggcgcctcgtgc

SEQ ID NO: 242 - DNA, 291 bp, Homo sapiens
  I.242 (AI421118)
attatggttaagaattttattatcaaaattattacatctcttgtgaaagttcaaatgttacagcaaggggtaaacactccacttgagaaagaagtgatacttcttcccttccaagagtccccccacccccccgcccctacccccccaagagggctggtcttgacagcaccctgcccacacagagtggctggggtctctgcacgtgccaggcagggtgagggccgcctgcccgctggcctctccccttggttaaatagccaaggggagaatgcaaaccccagcccaaatgga

SEQ ID NO: 243 - DNA, 437 bp, Homo sapiens
  I.243 (AI368787)
tactttaaaagtgcttctcggtatagaacaaagtaaatattacagttttgttcaacagcagccaagatttaattgtctgtgaaatataaggcttacgacctgagtcgagtccactactgttctgctgatacaaactaggctggcctacgaggtgaccgaacgcacccagcagctgatttacacagaagagccatctccaaagaattaaaagtgggccagggacagccacacgcctgcaggagtccatccaaagggctaggtgctttattctttctgcagcagatttaaagtgactttgtacaaaaagtcaaacaagaataaacagctgtggaaaatgtaacaaatcatgctagcagttgaacagcgagggagaagggaaatccagcaaaccgctaacatgcactgaagaaaagcgaaacggaggtagaagagagagg

SEQ ID NO: 244 - DNA, 360 bp, Homo sapiens
  I.244 (AI357099)
tttttttttttttttttccttacaaatcttatactgcttcttctgactttctaaaaaagttgtcaaatctttcttctgctgggccaagatctgttgctggaacttcttctcatctgctgcagctacctttgcctccttttctatgatagccacttgcttcttggccagcttctccagctcgatggacgagttgttggcatgcgtctccacctccttctgtagcttgaggcggggctcgtccatctcagccttcagcttgttctccagggcgatcagctgcttctggtgctggcgccgcatccgcttataacctgacatctgttcccgcaactcgttctcctgctcatgctcatggatctg

SEQ ID NO: 245 - DNA, 349 bp, Homo sapiens
  I.245 (AI355775)
ttttctcaggaacataccacgtttatttcttgttgtcaagccagaaatgaaccaaaagaagcacatctcaggtgaaggaacaactccttattgcagtcatagcccagctctcctgggatccggggaacgccctctctcctctccctcactccctcctgtttaacttgggactgaactggaactcaactcttcccccaaacattttaaatccaaaaagaccagcagggggcgccctttcctcagggtctggccctgcaggcagggcaggtgagggcctgaatacccacacccagctctggcaggccccctgccttcaacttggcacttgttccagtgcccggggacccct

SEQ ID NO: 246 - DNA, 463 bp, Homo sapiens
  I.246 (AI355007)
  misc_feature (300)..(300): n is a, c, g, or t
atttatttatttatttttgagatggagtttagctctttcgcccaggctggagtgcagtggtgctatctcggctcaccgcaacctccgcctctcaggttcaagcaattctcctgcctcagcctcccaagtagctgggattacaggtgcccaccactacacctggctaatttttgtattttttagtagagacggggtttcaccatgttggccaggctggtctcaatctcttgacctcaggtgatccgcccgccttggcctcctaaagtgctgggattacagatgtgagccactgcgcctggnccattaaggaaatttttaggagaaaacatggaatggaagaatatttgtacattaagtaactgacagcttactatataaaatgccatcaacatgttcgggcagtgggggctcaatggggataaataggcagtgtacacatgagtaactcaaggccatcatcaca

SEQ ID NO: 247 - DNA, 461 bp, Homo sapiens
  I.247 (AI367287)
aagaaacttgcctaaagttgtggatttaataatgaaggaagccagtctgggcacagagcagttctctttccatctgtcacccatgtcccaaccctgtctcatctctgctttgcaattgttagatgagtgagagattggaaagacaaagctatttttaattaaacatgttgggacactttatatcctgagtcactctttaggatactcatattatgaatctgaattccccaaacatgaagataatgatcttgttaatgtccagcatagcacaggatacccttgtaacactgatcaaaatacgtttacaatgtccaagagaaagtccagagtaccttaagcaatccttttctactcttttaataaaatttggctttccttatacaaatctgactttaaaacaaccctcgagtgggggaaaaaagatatttttggccagtcaacatttcctctcaccttcagca

SEQ ID NO: 248 - DNA, 370 bp, Homo sapiens
  I.248 (AI339669)
actgaaagtgtaatataatgaacaaaccattaggatacactctgtcatcaataagatctaagcattattcacattccttgtctacttaatctacaccacagcctgtgagatgggaattcctgacggttcttcacctgagaggtggtatttcaagatcacttagccagatggagtgagagcaaactaaatgtaatgtcagccttcttccctcccagctcagggcagccatgacacctgactcccatgtggacaggccagtcccccttcatctggaagccaccttggccggctgctgcgggactttggatctgggagagagaccttaatatccctaaagaagaatgtgggatgtgattcatcctacatttca

SEQ ID NO: 249 - DNA, 415 bp, Homo sapiens
  I.249 (AI339400)
ttacaatcgccatatttatgttggcatgtacattgatgacacataaactgcatatttacacaggagaaagggtacaggcaggctgaggattcctggaacaagggccttgctgaacgctgaagtggcaggcactccgctgaggcctacaggggaggatggtaggggcaggaattgaagtacagtcttctgggcagagaggtgggcagccacgtggacagctctctggaaaggggtggctctcttgaggatgggccaaggcagccaggcgctgctgtacacactcagctgtcagccgtgcttctgggtctgcatcccaacagtcttctaggagctccctcagcccatcagggtctgtggcaaagcagcgccaggtggatgggatgtagggacgcctcctctcctgcactgccaaggc

SEQ ID NO: 250 - DNA, 485 bp, Homo sapiens
  I.250 (AI334246)
gcggccgcggccaccgcctcccggcccggggccgccctggagcccgcggtggcctgaggcgccgccgccgccggccgacgtgctcggggatgcggccctccaacgcctgcgcgaccggcagtggctggaggcggtgttcgggaccccgcggcgggcaggctgtccggtgccccagcgcacgcatgccgggcccagccttggcgaagtgcgcgcgcgattgctccgggctctgcgcctggtgcggcggctgcgcggcctgagccaggccctgcgcgaggccgaagccgacggcgcggcctgggtcctgctgtactcccagaccgcgccgctgcgcgcggaactggccgagcggctacagccgttgacccaggctgcctatgtgggcgaggcgcggaggaggctggagagggtccggcgccgccggctgcggcttcgcgagagggcccgggaacgcgaggccgagcgggaggcagaggccgcgcggg

SEQ ID NO: 251 - DNA, 453 bp, Homo sapiens
  I.251 (AI333774)
gtatggaaacatttgactttatttaatattgagacaatacatatagttctgattaagagcatcagaaactctgaatcaagtgtattcttcttggtcaagagcttaataaaagtccctctcttaaaggctcatcttgataggaatagaaacaaaaggttaccccatagttctcttacatttggaagttagctatatagagggtacaaggatattcattttccttcaggacaaagtcatctctgtacgccctttattgttgaattgcagtttgatttaggggattagaggtggtatggtaccagtaattgagtaatggtggaaatgtgaaagtcagtcacaggactctcattggtgccagtgtcatagttaagaaagaaagaaagaaagttttatatatcctgtaatctagactggaagctaaataattgctaggaagcaaacctaagtgatagc

SEQ ID NO: 252 - DNA, 490 bp, Homo sapiens
  I.252 (AI332905)
tcttgagcactttcattgccttttccaactttttcttgtttttggaacttttcttccctgtagcatattgtactagcaggtctcttgctgttggtccatcatcctcagattcggagtcactgtcctgtttttcatcttcatctttcccaagaaagaatgtcaaagcggcaactaatatcttggtgaccttagagaaacatgcagttgtgataacattgacagtttttgcatcattccagatgttccttctgtagagttcaatcattacatctaaagacatcttggctgcggttgcattgctatctcttaacatggtgtacatgaaattttgcaatactacattcactttattgctcttgtgttttgcatttatattcttgatatcagtcacaatatgtgtgtataaagtctttcgcagaagtttatcatggcaacgaaaaagttcaaagaagagttctagcaggcttgatggattgatgagaatcttatt

SEQ ID NO: 253 - DNA, 533 bp, Homo sapiens
  I.253 (AI332438)
  misc_feature (495)..(495): n is a, c, g, or t
tgatagtttatgaatctggatttgcccttttataacttcacttcaaatagaaacatcttgtaccctcaagtccaggcaaaaatccaattttaaaatctcattcttaacctttgaaagtagagcctttggaaacagaatgaacttcactttaaagcactgcctttaagaactgtaacatctattttccagagatgtgacccaggaaacaattcatcaatagtttatccattccactggcaaaagttttaacaattctgatgatttcatcatatgtgcagtgaataccatccgtatcatttcacaacaggatcagcagacactatttcaacatatcgacttggcaaatccctcatttcactggcatgccgttccttcactgagcacaccttgacagaagtcccccagccaataatcagtgtcacattgtccttccagcagaggctgcagggatacatgtctgggcgaagacttatatcatcccggggcaccatggtngatctttgctttggagagatggcaaaaatctcacaccc

SEQ ID NO: 254 - DNA, 434 bp, Homo sapiens
  I.254 (AI400399)
aattttgatagatttattttctttccttttagcttctctaagatttcactttgtatctaaataaaacatcagaatctggatactgaataccaaacaacaagcggctgtagtttagtcctatgggcttatcatcaattatttctaaatcaaaataagttaaaagtataaccaacaattgttttatttccataagtgcaaaaaatcggcctggacatttgctggttccagttccaaacggcattaggtaacacttcagctttttccctcttttgaaaaaggtggttttcttcttaccatcttctataaaacgatcatatctaaactcctctggagcttcaaagatttcagggtcaccatgtaggactggaggaaagatggctaccaagtctccctttcgcacacagtagtccccggtctctgaactgagagtcaaa

SEQ ID NO: 255 - DNA, 363 bp, Homo sapiens
  I.255 (AI394625)
tcacggcacccgaacccaccctgctgggcggtgttgagcccccgccgcggcgcattcgcgtggacctggactgggagcggggccgcgtggccttctacgacggccgctcactcgacctgctttacgccttccaggcgcctggccccctgggggagcgcatcttcccgctgttctgcacctgcgaccctcgtgctccgctccgcattgtaccagcggaaagctgagtctcgtctccaactagaagtttggcccggccactggccctgcagctgctttttgggggtggaattccccactcatttctgggaacacattcacacgcccattgcaggagtattaatagcaacccacattttcgcccca

SEQ ID NO: 256 - DNA, 288 bp, Homo sapiens
  I.256 (AI279911)
agatgatctcttttgcctttatttcttgctatagtgggaacgtgagttctgctacctggggctgagtgcactgggcagcaggcccagcagacggggcctgcagggggaaggcacggctggaggcccgtgcgcaccgccactctcctggaaccgctgctggccgagccacagccctgcggaaattctactgcgtgtggccgagaccgatgtgcaaaaggtttctggtgaatgttttatggaaattgctccaagcactaaggaaagcgggaccgtgcctgtgctgaccgt

SEQ ID NO: 257 - DNA, 441 bp, Homo sapiens
  I.257 (AI262169)
  misc_feature (340)..(340): n is a, c, g, or t
  misc_feature (343)..(343): n is a, c, g, or t
  misc_feature (399)..(399): n is a, c, g, or t
  misc_feature (400)..(400): n is a, c, g, or t
tttcattatgtgaatattatttactgcaaaactacgaaatatgcctggacgtgcagatgacaaggtagtcctgtttcaccaaacctgggccacttgaacaagaatgctccaagcattgaagtcacattaattctcttattatactccacaagttgctcaaaatcattctacatttttagctggcttcgtattgtgaatggctttaattttcaaataccctcaaacttgaaatttagattggtagttctcaaacttgactgtacattggaattactgagggagctttaagaaatctaatagttagaggatcccaagtctagggtttctgatttaattgagnctnggtgtggcctgagcatctcagtttttaaaattttgcggcttgattccaatgactanngcagagtgaagacctttactgttgaaacccagtcatgtcta

SEQ ID NO: 258 - DNA, 431 bp, Homo sapiens
  I.258 (AI253190)
tttttttttttttagattatttaatttaattattcaatgtatagaaagttttttagtgtagtgcttttcagacgtaactattgggagtgtattttgaaatacatatcacatatagcaaaaagaaaaggaaaacaatcctattttttaaattacattgcaatatatacagatataaatataaatacatatattcactatgatagcatccaaaatggcccccatgaagccccacctcctgatattctcaactctgtttgattctgtccacgttgtgccattgttggtccatgtgaccaacatcatgtggaagaagagatgtcacttctgtgattaggttttcaaagactgtggcttacatccaagttccctcgctctttctctcatgtgctttctctctcagtatcattgctctaggagaagccagatgacat

SEQ ID NO: 259 - DNA, 333 bp, Homo sapiens
  I.259 (AI344681)
tttttctgttctcaacttgctgcttttattcagggactccaaaggaaggtcaaatgcctacagccactgaagaaaggccagaggtactcacagcgaagatcttgagtgtgaagcccacgtagtcctgccatgccacacacaggacgtagggcaggtacagcgtgaagtagatgatgcccccacaggctgctgccaggttggctctggagaagagtgtgctaatcaggaagcactgcaggattgtcaccacagcaaacacggacaggaagacaaacaccacgctgggatcactgtagggcagcaggtttcctaacttcaggatgaccactagca

SEQ ID NO: 260 - DNA, 408 bp, Homo sapiens
  I.260 (AI350210)
ttttttttttttttttatctttgagcagtctattcattatgaacacatgtaatctgttggaacaaagttctaggacaatccaggtcatccttcaatatttgcagaaaacagcacaaagaaaacttgatacttaaacttagttggaaactttatgccacagccattaaatacagagatcatataaaggaatagaggaagctgttgaatactaaactaactcaaatcatcattatccttacgaagtgcacactgaattaatgtaaaaagcatttagtaaacaaaaagtattttcaatatacaattaagactgaaaagtattgaggcctcataagctgaacctgacacaataaatttaaaagggaaactaatttggaaatcagaaaaccatctaaagaatttgggaattag

SEQ ID NO: 261 - DNA, 416 bp, Homo sapiens
  I.261 (AI299421)
catcctgaggggcctgtaagcaggggagctcctttttcttttttgcctgtagaggtgggaagactgttggtgtttctgtcctttacaggacattaggaaacagttgtgtaattacacaaggtggacctttatcttgcctgacatgctgggaatcttcaccccaccagggcaaatttccaaatagctcattttattctaggtctttcaaactttcatgtgacatatttccctttcccattgttgctgatttccaaatcgctgtcagcaattttttcctctctccttgcctattcttcactcatttggtggcaaagttcatagaactaggggacttggaagatgctttgaaaatattgttacaaaggcactgctaaaatgattcacagggagagtggccagttggaagaaggatccta

SEQ ID NO: 262 - DNA, 339 bp, Homo sapiens
  I.262 (AI301232)
tttcatttattattgactttactgtcaaaagatatctttaatggctgaaatcaaatattttcagtgaaaaaaatcaatattgagggtagtattcttattgccctcaatttttattttcatttcttcacaggcaagtcacaattcatttgagttttcaggtcactgatagaatgtcatttactttcgcttcacaaatgtgcatgtcatccttgcacaagggccatgctaatctctgtatcattccagttttagtatatgtgctgccaaactgagcacttgtcactttcaattgaaattaaatatataactatgtaatttgctgcatctattcattcaaca

SEQ ID NO: 263 - DNA, 435 bp, Homo sapiens
  I.263 (AI298375)
ttttttttgactttgttcttggtaaattcttgatactggtaggctctatcactgtccatgtcctgatctctacaaccctcaggtggctgggtcattgtccgtttgttagagatgtcctgtgggagatctactgccatgcgttttacctttctcctcctgcgcagagttctattcccaacattgtccacagcaaaatcagactcatgccatagaggtcttttccctcgaacattattatttaagtttgatgacggcctgcgctttgctactaacatttggtcatcagagtcactgtgatcttttttattattattgtgattctctctatagtccttgcttggttcttctaaactagaatcagagccttcacttaagcagtgaccagtctcccacgggtgatgcacattatacgacctccgttttctccctctcctt

SEQ ID NO: 264 - DNA, 438 bp, Homo sapiens
  I.264 (AI290504)
aaaagtgcttggtaagtcttttaaagtgtgtgtctatatctatgtacagatatacacacagacactgtccacaccaccacgcatacctgcacacatacggaaatgtatacatatacatacatacggaaatgtatacatatacataatcatatacatatacatacatacatacacatatatatatatattcatatatatatatatactttaaaaagtcctaggtgagaagatctgggccaggctgggccaggcctgcagggtcacgactggagggtgtgggcccggccaggctggcagatggggcactcgctgccctcagcgcagagctcacacagcgcagcgtgttggcacggcagcactgcccgcttctgttcctgacacttaaggcatttcaccgactgcatgtggaacacggccttgtccacttgttccaggtgg

SEQ ID NO: 265 - DNA, 429 bp, Homo sapiens
  I.265 (AI278521)
  misc_feature (23)..(23): n is a, c, g, or t
  misc_feature (25)..(25): n is a, c, g, or t
ttttttttgttattaaaagcaantnaatgagggcagagcaggaaacatgcatttcttttcattcgaatcttcagatgaaccctgagcagccgaagaccagaaaagccatgaagactttctgcttaattcaggggcttacaggattcttcagagtgtgtgtgaacaaaagctttatagtacgtatttttaggatacaaataagagagagactatggcttggggtgagaatgtactgattacaaggtctacagacaattaagacacagaaacagatgggaagagggtgtccagcatctggtggttggcttctcaagggcttgtctgtgcaccaaattacttctgcttggtcttctgctgagctgggcctggagtgaccgttgaaggacatggctctggtacctttgtgtagcctggcacaggaactttggg

SEQ ID NO: 266 - DNA, 415 bp, Homo sapiens
  I.266 (AI278055)
tttttttttttttttttttttatagggggacactttattactcctgaagccccaccggcagaacccacaggccaggcagaccccgcagaccccgcagaccccatggacccaggtgcagaggcccgacggcaaaaagcacagggtaggtgggtgtgggggcaccagcagggacaggaggctgactgtggggacaggatgtctgggtccccaggctttgactgtggggacaggtgtctgggtcccccaggctttctcgggcgtggggggactgccttgctggccctcccccacaaaggttagacgcaaagcaaagcccccagtccctgccccttcttatcggggcagggtctcccgtggatgaactcccagctccctccaagtccctcatgatctccctccctccacccacctggct

SEQ ID NO: 267 - DNA, 419 bp, Homo sapiens
  I.267 (AI275613)
tttttttttttttttaacagttcctagagatttattataatctgtttcttctttggctttttgctttgccccatatgcacacatagtagagatttctataatctgcattcttctttggcttttgttttgccacatacacacacatactcaaataatcaagtggcctaaacacagagattagaaaccaatcagtaagaaatcagaagccctaccagtctacccctccccgaccctgcatctgatgtggagccatagtcaagtgcctaggaggaagacaagcttgaaggacgacccttaataaagagcttctaggaaagttcagagatctcagaagaacttggtgcacagccaaagcgctgacaaaggcctaggcgctagctttctagaacaactggaaaatagccacagctgccttccca

SEQ ID NO: 268 - DNA, 425 bp, Homo sapiens
  I.268 (AI272878)
gaggcaacaggaaatgcgaacccacctgctggcccaagccctccaggccgcccagaaagcccccgacttcggctaagggagccatggagggggagatccggaacacaaaagacccccccagtaaagagtgttgtgggggtgggatgaggtggatagagaaaaattatagcaaaacgagcgcaaaaagttaaggcccggttactcctctgaggtcgctccggagggactttgcactgaaatggcagggaagctctcactgtcttggagcgatcttctctccttgggtaggtgggagccggctgctggctctgcagaaatatctatagctgccgctgccaatactaggactagggctgttggctggggctccaattccgcaaactgatcagatcagagtcctgtgtacatacacaccgagtatataa

SEQ ID NO: 269 - DNA, 731 bp, Homo sapiens
  I.269 (AI383932)
  misc_feature (673)..(673): n is a, c, g, or t
  misc_feature (727)..(727): n is a, c, g, or t
ttgttttctccttaaatgtttaatatatttatgactgtattatatttatagtaggtaaagaaaaatacactataattttaaatatatagggttttttctaaagatctccttttgaagcaaataattcttagtgggagataggggaaactataaatgttgcttgggattacttgtgttatttataagatttccttaacagcaggatttatagggtttaaaggttaggtaaactttgattaaagctgttaactaaatgaacaatatttataagtttcctcttctatgattattgtgaagatgtgaattatgatcaaatcccttataatattcacggcatttgtaaggtttctctcctgcatggactctttgatgaattcgaagagctgagctatgactgaaacctttaccacacttagcacattgataaggcttctctcctgtatggaccctctgatgaatgtgaagattagaactgtgactaaaaccctttccacaatcatgacatttatagggcttttctcctgtatggactctctgatgaatgagaagatgtgaacgctgactgaatcccttgccacactcttcacatttgtaggggttctcttcagtatgtactctttgatgagtgtgaaagcttgaactctttactgagccccttccacattcaggacangtataggttttctccctgtatggactctctgatgaatgcgaagatctgagctgngact

SEQ ID NO: 270 - DNA, 394 bp, Homo sapiens
  I.270 (AI383368)
  misc_feature (327)..(327): n is a, c, g, or t
  misc_feature (347)..(347): n is a, c, g, or t
gcagcggtgcgcgccgccgccctccacacacgtgccgccgttagcgcaggcgcggcccgcgcagtcgtccaggtcgtgctcgcagcgaggacccgcgaagccggcgcggcagcggcagcgcagggcgtggcccaggtccaggcagagtccgccattgcggcatggctgcaggctgcaccggtccaccctcttctcacagttggagccttggaaaccaggtgggcagtggcagatgtaggcagagtcagggtctgcacccccgacacacaagccgccgttgaagcagggtccatctgcacatgtcaccccgctcacctcacaccgcangcccgtagaacccacgcggncaggtgcattcaaggacctggggtgtctcactacagctgcctccatt

SEQ ID NO: 271 - DNA, 338 bp, Homo sapiens
  I.271 (AI382995)
  misc_feature (284)..(284): n is a, c, g, or t
ctgagagctgccacaccggttttccagccaacagagcaaagatgcgcagtctctcatcctggatgaaggagtctgctggagctgatgccagtccaccaactgcatggtgagcagctcccggactgactggctacccacaaactgagataaaagaagagcaagacgatgatcccctgactgctgggccagagagcaggcctcactgatccttttgcctgtgaggtagctgaatacagcctccacagggctgtttttttgggttaaggagacttcctcttcatctngaggtgtgggcagtacaggatagccagcgggagaaagctcttcttcgctccaga

SEQ ID NO: 272 - DNA, 446 bp, Homo sapiens
  I.272 (AI382219)
tgaacaacctatgacaattatttgaatgaaaaagatcaggtaccaaggcattgctagacacttgtctttctggtgggtctggggtttcagtttttggtggtttgtcagttactctatttgctgtggggtatttaaaccattttattctgcctatgctctgctgacatgttttaagtataaaaatagcctggttgacatctgggtcaacatatccttggctgctctgcatcacttattaaaaaggttttatcaatactgagtatgtttcacaacgattgggattcaaacccaggttcttggaacagcatgccaagggtgaactttacagcacaggttaaggattactttatttaaatgtgtaccaagaaaaaaaaaaggcagcaagtaagttaatgaaaagatatattggagtacaatgggcaaaggaaaaataggaatagacaatg

SEQ ID NO: 273 - DNA, 413 bp, Homo sapiens
  I.273 (AI381513)
tttggagtatgccagggagggttttaatgatggaccttggactccaggttgggtaaggaggaagtaaagacaagaagggtggcagggaaaaggggggggtctggggatctggatcaaggggacttgaaaaggtgggaagatcaggctggtggggctgagaatccatcttccagtgggagttacctgaagtggtccacctggttgagcacgtagatgtggtgccggatcttcttcctgctcaggaagcggcgcatgtggggcacgaagaccaggagctcctcgaagcgttcgcggaagggcaccagcactgccaggcggtgggggccccaggatgcgtcttcttcccagtgctcaaggggcggctctggggggcaggcgcggggagggcccgaggtctcctgcccttgtcccct

SEQ ID NO: 274 - DNA, 386 bp, Homo sapiens
  I.274 (AI246243)
gtgtttctgttgatttattagcgagtgatggaaacgcagctggacccataccgaacacacgtgtagctggcacacacctcgagaaccgcccccccacccccatcccctgaattcagtggttcagtcccagagttttcccgctgtgagctgccttggtggatccagccccttagccccctctcctgcagcagagcaggatgtggaaacgctgaccaaaggccaacagagagcctgagaccaatccagaggagaggcagcggtctctcctcctgcagagagaagtcccagggccaatgaagcaaccttctccagacacctaatattaaccatcacaaggtggatcaccatagtcaaccatgtgtattatgggaactacttttcaccct

SEQ ID NO: 275 - DNA, 538 bp, Homo sapiens
  I.275 (AI380703)
tttttttttttccttgcatcctctaatttcagattggtcattttgttaaaacaatgagaagtgttattgtcattatactgccattctataaactcactgatacaatctgcccgggattcctgttctttggccaatcgaactctcttgatcatcgcctcaatttcatctctagcctgcatcacatctctgctaattcccaaaaccttaatcaaaggtctcttatggtccagggaaatgttaatatttaacttcttctgcagctcattcaactcctgatactccttttcatcaaagtctttgatgcactcatcttcactggtgtaaggacactgttctttttcaatcaggtcttgtagccaggagatagcgtattccacacacgtgacattttcaccacacacccgaaaagttgctgattctgttttcttttccaaaaccaaatgattctttttttggggagattgctttgaaaagcccaaaaatgatgcaagtttagacatcacagactgttgggaagaaagctgagtcccttctcttt

SEQ ID NO: 276 - DNA, 486 bp, Homo sapiens
  I.276 (AI380218)
tttttttttttgtatagctttcaggaagcaggaagacttttctctttttaaatgatagaacataaatactgaaacaatgacattggaacatctatccattcttgtttcggtggaaagtctatctaattcagcttctggaccgactgttcgtttttccatgatctcttcctgcaggtttgctagaagtccctttccccccataaacaccttcctttgggagatttgggtgccttccttttttaaggttttaaaaactaaaatgatttatagactatccgtatcctgttagagttgggcaagtgaatggatcatatttgcgtgggtcactctgattataggacttcactgtttcttgaactaaaagtgcaagatttattattctattaatgctcataaagtcactcttttgatgagccataacttctctttatgaggagtgtgtatgccagtcacctatgataagggagaagaaagtccagacttcta

SEQ ID NO: 277 - DNA, 492 bp, Homo sapiens
  I.277 (AI378142)
tttttttttttcagggagttcagagtttaatagggaagtcagatacctaaatggatattgtacttagacacacagaaataggattcctagagatgtccaagtattagaagaactgagaggaaaggttcttaactcagcctgcggtgcagggccccctggaggaggtgtcatctcctgtattatatgggcttagtaagtcctgaattgaacagctacacatcaagtcttatggtcactttgaagagaataaagccagagggattcctggtgtgtctccgttcttccctgccagggagttagtggttctgagttggccacggtgagtgtgcaactcaccaaacatccctcttcctccttcctttcactcccttctcagagcatgatggaagcctgcgttttcatttcagactgatgggtttctgaaggacaacaacaatgctgcccagcgcctgttggacgggatgaacttcatggctcagtcggtgtccgagc

SEQ ID NO: 278 - DNA, 1002 bp, Homo sapiens
  I.278 (AI376565)
  misc_feature (464)..(464): n is a, c, g, or t
  misc_feature (689)..(689): n is a, c, g, or t
tttctagtggtaggagattctttttattaatataatttcatagctttttttttctatgagaaccaggagtagcttttagctttttttttttttttttttagatgaagtctcaaaaaaaagagaaaagaaaaagaaattagcagcttccaactgccagccccacccctggaaatactcacttctgcctgtttgagctcctctcggctcacctcctccagtgaggcctccaggaatttcatggcatagcgctcaatgggggtcagctgttctacgagggcagcaatttcctgctcagcccgggacatctcctcatcctcagccccaggccggccagcttcctctccctcaccagcaggaaacccatcgttatcattaaattctgcaagctcagccacctgttcagccttggcctgggtggctgcacggatatcctcttcatcttctgcccgacacaatgcctgctncagaatatgagtctgcttgctggcacagtctcttcttcttttcagggcagagggccggatgagctagagggttctccaggggcatatcaaacagctctcgatggtctgctgtttgaaatagctgtggggaagttgcctcctcaatggcatgtcccccacattctctctgatttgccttttttagatggtctcctccactggccgtcactgataagcctattatgntgacattcccggttctgcccaatcggtgacagcggtcctgggcctggcatccatggtgggattccgtcgctggcataaaaaacacagtgtttgttctgtaggttacgccccacccccacttcgggttgaaggatgagcaaatttgcgttgtttgattgaccgttcatcaaggccggttttgtaactttagagatcaacaagcgcaggtgaaaggcattgtggtagaactgttcatcctccaaattggtcatttgggaaaagaccttggggcctttgcttggtgccaaaaagctggaagtgggatttccaatat

SEQ ID NO: 279 - DNA, 402 bp, Homo sapiens
  I.279 (AI374647)
tttgcagagtattgaagccttttattctagggtctccaaaactgagtgtggaagtaaaaagtttctacatttaaaaagtttatataaattacatgaattgcaactttcataaaaatcaaaatgaaaggttctgcataggacaaaagatatgcctaagcaacatatcgtatttgcacaaggccactgaatgtcatggatattagtaacaaatgaaaagcttaagtctatggcagattgaactaagatttcagtttggtattctataagcccgagattgtaaactactcttattatacaaaagctataatgatttacagagttttgtgtaggaactcttgtgcttctggttggcacattatctactttttaagtatgtgaaattaatacagacatttgtgagag

SEQ ID NO: 280 - DNA, 394 bp, Homo sapiens
  I.280 (H49415)
  misc_feature (161)..(161): n is a, c, g, or t
  misc_feature (182)..(182): n is a, c, g, or t
  misc_feature (224)..(224): n is a, c, g, or t
  misc_feature (311)..(311): n is a, c, g, or t
tacacagttttgtttgctattttcaggggaaacttaggcattcaactataagctgataaaataccatacctaaaaaagtataaaagtataaatatccccttagaataaattttagtgaattgtcttaatatctttaaatttaaaaaaaaaacacaacacangcctatctattgtatcaaggncaaaaatcaaacaatgctaaggggccagcagctccccagagngtacaccctgagggcccacagtggctgccttcctccagagctctgctggggaggacaggtcatcccatgggctaagtctgccctctnggaaaggcttttataaattgtctaaggccaaacatttaacaggcatacaaggggaccttacaaagagggaggtgggtaagtcc

SEQ ID NO: 281 - DNA, 441 bp, Homo sapiens
  I.281 (H49229)
  misc_feature (47)..(47): n is a, c, g, or t
  misc_feature (62)..(62): n is a, c, g, or t
  misc_feature (155)..(155): n is a, c, g, or t
  misc_feature (205)..(205): n is a, c, g, or t
  misc_feature (305)..(305): n is a, c, g, or t
  misc_feature (323)..(323): n is a, c, g, or t
  misc_feature (368)..(368): n is a, c, g, or t
  misc_feature (411)..(411): n is a, c, g, or t
gggcatgctccaagctctttgtttctggaactccagcttcccaaggngcactgtgcagactnaccaccagctgcccatgtgcaggtcagaggctctgacactgtctggtttccagtgcttctggagacttcttgcctaggcctcatcttcttctntgccaataacctgattaaccaagttctccagcattaggacttaccacctnctctttgtaaggtctcttgtatgctgttaaaatgtttgggcttagacaatttataaaagcctttctagagggcagacttgagccatggggatgacctgtnctccccagcagagctctnggaggaaggcagccactgtggggcccctcagggtgtgactctctnggggtagctggctgggcccctgagcattgttttgatttttgancttgattacaataggtagggtttgtgttgt

SEQ ID NO: 282 - DNA, 393 bp, Homo sapiens
  I.282 (R85579)
  misc_feature (7)..(7): n is a, c, g, or t
  misc_feature (17)..(17): n is a, c, g, or t
  misc_feature (20)..(20): n is a, c, g, or t
  misc_feature (192)..(192): n is a, c, g, or t
  misc_feature (235)..(235): n is a, c, g, or t
  misc_feature (274)..(274): n is a, c, g, or t
  misc_feature (296)..(296): n is a, c, g, or t
  misc_feature (306)..(306): n is a, c, g, or t
  misc_feature (346)..(346): n is a, c, g, or t
  misc_feature (351)..(351): n is a, c, g, or t
  misc_feature (356)..(356): n is a, c, g, or t
  misc_feature (361)..(361): n is a, c, g, or t
  misc_feature (372)..(372): n is a, c, g, or t
aggatgnctttgtatcngantttcatgaatagaatatccaatagagataagctgacttgaatcattttgagcaattttgccctgtgttatatgtgtttcacgcacatatttgcagttggattttctccaacagaaagtggattcactactggcacattaacaagcaccaataggtttttattccaactccgngcactgtggttgagtaacatcacctcaattttttattatcctnaaagatattgcattttcatattctttatttataaaggancactgctgctgtaaatacaggnatttttaatnttaaaatttcattccaccaccatcagatggcaggttgccnctttngttgncatgnaggggtatatnagggggcctaatggggggctt

SEQ ID NO: 283 - DNA, 371 bp, Homo sapiens
  I.283 (R84812)
atatgtgcacagctttagaaattaaagcccgagataaacgctcgagatctactatccagaggcaaaaatcagagtttactagaactcatcatttggagagcttaccaatcaaggaatctgtaatgaaagctgcagtttccctctttcctatttttttttaaacacaaaaatcaatgactaagaacttaatactggatgacaaatcacatccacactattcgttaaatagcctcacagttaaacacatcttaaagaccagtcaaatcagtatttacattttataaatttctgaagacaccattagaaagcttatatatcccttcattgaaacaaaataggggaactgcattctgatggtggtgggaatggaa

SEQ ID NO: 284 - DNA, 351 bp, Homo sapiens
  I.284 (AA897296)
caactctgttaggagtgaaggtttcattatttccacttttctgtggttccaacaaactactgtttcttgatggctgttcttgcttgtcacgcagtactttttctttcattcttagaaatatttttcctggtgattcatagtttgctttattttttaatccatccttgttgggctttatagcactgatatcaagagaactgttagaggtagtagcctctgttagcatagttgattgaaatatatttttattgttaaaagttgtcatttttaggaactgattctttttatggtcattcaattttaaggaggagttctgatatttcaccaaatcttttacaggagtaagtgtgc

SEQ ID NO: 285 - DNA, 610 bp, Homo sapiens
  I.285 (AA889813)
tttgtgtaatatgggtatttattcttcatacaggattccagatcagaatttttaaatggattgtaaagctcagggtctttcacaccgtcaacagaagcgaggcatctcgctcataaccggagattagttccaatttgtttcagtaaatttgcttcttcaaatgatggagtttggcttagcatgatgtaaatctaccccatacattgataattttttggcattttccaagaaatgcatctctgcttctgctggcgtcattcctctgtggctcttgtgcagctcgatcactttgtcttgcagttctttagtgtggtttggtgcaaagcggaactcactaatgtaatcgctcccacattcatctgggtcatagtctccgagctctgactggacagtgtaggagcccagcaaggccagggtaacaaaggagcagggcagccttccggacacgatgtcatctcgcaactgccagcagaggtagtacccggtgatatcctcagatagttggggcaaggtctggtggataaaatttcacattaaattgaaagtgccaagcacaatcttcgaactgttttttaatttcctagcaggggtccatcaattctctctggtt

SEQ ID NO: 286 - DNA, 485 bp, Homo sapiens
  I.286 (AA845635)
agtcagagagcataatagaagtactgcgttttgatgatggagggctactacagaccgagacaacacttggactcagttcatatcagcagaaaagtatatctctctaccgggggaattgcaggcccatacgatttgagccaccaatgctggatttccatgaacaaccagttggaatgccaaaaatggaaaaagtctacttacataatcctagttctgaagaaacgattactttagtatcaatatctgctacaacatcacattttcatgcatcattttttcaaaataggaaaattcttccaggaggaaatacatcatttgatgtagtttttcttgcaagagtagtaggaaatgtagaaaatactttatttattaatacatctaatcatggggtatttacttaccaggtatttggtgttggagttccaaatccatatcgattgaggccgttccttggggccagagtcactgtgaatagcagtttctca

SEQ ID NO: 287 - DNA, 511 bp, Homo sapiens
  I.287 (AI282924)
tttcgctgggcccggcgtggtctccgggcgggtttaattgagtcccggggcgcaggaagcgccgcccgccgcccgcggggccggggttcaggggcgggaaagcggggccaaggcgggctttgaggcctgcccctcgggcgggagtgagggagttggtccgaagccgccgtgtgaagtcgggggaagcgggaaggagcccgcgccgagggccaggccgcgggggcggcccgggtaggcgcggggctggtgcgggctccgggccgtccgttttggggtccacctcgcttggtcctggcggcccactcggcctgcgcctcggctgcgctcacaggtgcgtgtcctcctcgaacacgtccgagtcctcggggtcccgcttgccccccatgagcgccccccagctccccgggccgttgagggccccgccgccgttaggctgggtgcttctcctgatctcgactggctgtcgtggccacgtcacgtggggtgcggtgcagctgtctcacgagcgcag

SEQ ID NO: 288 - DNA, 415 bp, Homo sapiens
  I.288 (AI224586)
taccaaaagccaaaccattcatatgtatggatttcataaacatttattgatccttttttgaggtaagtataaatacctttacatggctaaccttctaacgcttgaaaaatcaatttcaagggactctttaatcagttaaataatctgctttagaaggcacaaatgatcatacttcagattaaaatacaggtaagtattcagggataaaatggtacaaaaaaggctgtaactcttttacttcacattgatcacagacagaacttacatcctttcagaaagatgatgtatcagcactgaacatttcttaaaacaaatttccataattacgaagtttaaaaagtacctgagcaaagggttcaaccaattatttcaggttgatatataaatttctttcagagtatatgacaactacagt

SEQ ID NO: 289 - DNA, 423 bp, Homo sapiens
  I.289 (AI216577)
tcagcagatttggaagcattgtggtaaagtctaaggttttcatatccatagtgctgtttggtgagtaccggcagtacagttgaggggagcagggaacagcattgccccgtattgaaggtggagatggttacattcttcactgctttttgcattttgagttgtgtgcctataaaatttggccaaaccattttattattttgttcaaacttgactaagctgagtgatctaaaattatacagaacctaaatcaaagaagagaatgtaaagtcctttagttacttctaagaatttgaagtcaagcacgaatctaagacatagattatttttatatagctaatgaagagtatgttacgaaattgttgggtttttggcgtattgacggtggaacatttgtgaatcatgcatgcttcacagaaacaacca

SEQ ID NO: 290 - DNA, 411 bp, Homo sapiens
  I.290 (AI248396)
tattcatttttcctttattctaaattttagaacaccgttgtatttacaatatgaagattcatttctccagataaggtcctaattcatttgtaaattttgaccatgaaattatactccctgtcttaagtagttccctctgtatgttatcagcctccttagtgcaacttgctcatagttgattatccaaggctgtattgaatgtttcctaacatcttaaagaatgactctctagcaagcccaaggccttctacaatctggaaggcttatctaaatgttctgctttgatcaatcttcccttggctcaattgtccttgagtcttggatcactgtgaagcctctgaccttgatctcttcaacccttatgaggagagatgctaatttcatatgctgtcatgcaggaagacttttctt

SEQ ID NO: 291 - DNA, 518 bp, Homo sapiens
  I.291 (AI222069)
  misc_feature (477)..(477): n is a, c, g, or t
  misc_feature (483)..(483): n is a, c, g, or t
  misc_feature (503)..(503): n is a, c, g, or t
gcggccgctccaacatcagaatggtagccggctcccgccgcctccgcgctctgtctggggccagccacctggcgggccgctccggtgcgcctgcccgcgcttttcactgacaggcgctgttccccacagccagcgccgcccgccacgtcccagctctcggccaacggagctgcgcggcgggtgacctttccgagcccagcgcgatgacggctccttgctcccagccggcgcagcttcctggacgccgccagctcgggctggtgccgttcccgccgccgccgccgcggacgccgctgctgtggctgctgctgctgctgctggccgccgtggcgccggcgcgcggctgtgagagcggagacctggacgtgtttgacttagtggaggaggtgcagctcaacttctaccagttcctcggcgtgcagcaggatgcatcatctgcagacatcagaaaagcatatcgtaagctctcactaactntacatncagacaagaataaagatgancatgcagaaactcag

SEQ ID NO: 292 - DNA, 378 bp, Homo sapiens
  I.292 (AI220662)
  misc_feature (348)..(348): n is a, c, g, or t
  misc_feature (350)..(350): n is a, c, g, or t
  misc_feature (360)..(360): n is a, c, g, or t
gcggccgccatcatcctcacctatgatgtgaatcaccggcagagcctggtggagctggaggaccggttcctgggcctgacagacacagccagcaaagactgcctcttcgccatcgtggggaacaaagtggacctcactgaggagggggccttggcgggccaggagaaggaagagtgcagtcccaatatggacgctggggaccgtgtctccccaagggcacctaagcaggtgcagctggaggatgcggtggccctttataaaaagatcctcaagtacaagatgctggatgagcaggatgtgccggccgctgagcaaatgtgctttgagaccagcgccaagaccggctcnantgtggacctnctgtttgagaccctcttt

SEQ ID NO: 293 - DNA, 514 bp, Homo sapiens
  I.293 (AI220377)
  misc_feature (478)..(478): n is a, c, g, or t
ttccagtctataaactttattcagatttttccaattgtcccaataacgtccgttatagcaacagaaaatcctggcttgtgagttcattcagcttttcatgtctctttaaactcttttaacctagaacatttcatcttttttaatctttcatattattgacacttttgaagtgtaaagttcagttaggttgtagaaattccttcattggagtttgtctgatgtttccttgggatgagattcaggttatgctttcttggcaggagttaccggagaagtgatattgagtacttctcaatgcgtcctgctgtggaaaacaggtgcggactgagtgctctgtgtaaccaaaagatggcccttcaaagacagctgttgggagcttcagaacttccttcagaaactcgtcaaacttgctaaatatcattaagccattggaatctgacatctgggagaaaacatatctcactttgtccagcatttntccaccacacatggttgctaacatagctttaactga

SEQ ID NO: 294 - DNA, 469 bp, Homo sapiens
  I.294 (AI218453)
  misc_feature (416)..(416): n is a, c, g, or t
atgaagagctcggtgggaggtaggagagaaaagctcctgggggcgccgaaagctcagcccagccgcgatttcacctgtgtacacgatggcgagagtgaggctgaattaatacctgatgactttgaagaaaagccagaaagagaaaagaaacataccaactttactttgtgcaatgtatgtaacattcagctgaattcagccgctcaagcacaaatccactacaatggcaaatcacatcaaaagagattaaaacaactcagcaatgggacgctgaaaaatgacaatggtggtacatgccagagtcctgctctcccggcccttgtccgtccaccagcccctcctttgcaaccatcgctggatattaaaccatttcttccctttcctcttgacactgcagctgcagtcaacctcttccncaatttcaatgcgatggacccgattcagaaagctgtaataaaccatacattcg

SEQ ID NO: 295 - DNA, 435 bp, Homo sapiens
  I.295 (AI209185)
tttgggggggcagtatcattttaactagggaggagagggaaggcttcccttaagaggtgatatttcaactcaaggatggtaaagagggaagccacaaagacactcgaaataaaggtttcagggaagggacagacagcaggggtggcggagaggtgggtgcggggcaggagggccatgaaggcgctcgtgtctcctgcgagggctcagggtgctcggcctgtcataaatggacttaggctttgacagagcagtttagctgccctaaagaaacctgggaaggttcccttggcacttgggattgtccgtttccttttctgtctatgtgcgctgtctatgctggacttgagataattctccggagtccgactcaccaggagactcgggtgtcacccagattgaccttcaaggctcatttcttgtcagtccagtacccgt

SEQ ID NO: 296 - DNA, 369 bp, Homo sapiens
  I.296 (AI208805)
tttagagagaaagaattttaatcatcagcctaaaaaaattacaaaacctcattgaacataaggtacgcaacattaaattctgggtaatacatgcattgttatttctatgtgggaatacctcattgtgagcaaacctgacatacagcagtaggactgaccgtcactagaaagctttgacacaacacttttttttattatagcacactgccaaaatgtgtttaacatagagtttgatttttaaaaattgatttgcacataattttagagagaatatctattggttaaaatgaggtatatctgtgctgccatgaagtgtgccatgagaacacacttcagtttctgataaagcatttttacacatcataataa

SEQ ID NO: 297 - DNA, 493 bp, Homo sapiens
  I.297 (AI208615)
ttttacacacaaatggctttatgcaaaggccctgacagaacgatatttagtttttcagattaggtacatagggccaaccagcccaccctgtacattccagcaagtgcaagagcagcaactttcctatttcaatacaattatgggcagaaattatatgatgtaaaatagaggcccttccataaagttaagatttagggtagaagaagggaagataaaaccaaaattcccatgaagtcaaaattagacagtggtcttgtactctgctgaaccctgtgatgaactgtagtcctcaaactcatggactcggatccaggttcaccaagacacttcagtatgcttccaactgtttcatcatcatcttcctgctgtattcgtaggccacaaacagtgccccattggcagggattgctcgaatcatagtagctttcagtccagaatataaggctactattccttcatttctcacaacacttaagagggtaccaataaatcc

SEQ ID NO: 298 - DNA, 376 bp, Homo sapiens
  I.298 (AI206507)
tttttttcaatgatataagcacatctttatttttcatttaaacacttaatatttacaaaacattaaaccactcaattttgactattgtatcaaaagtgatatattttgcaacatatactgtaatttaaataattctattaattttcaaaaagtacatttaattaccatactaattttcaaaagaagagcaatggaatgtcagaagtaatctttcactatgtgccagtagcttgagtggttatattctgaaaaatgaatgacacattttctgttattctttcaagaaaaggatctgtaagatttaaatgatctccagaaaaatgtttccattgcttcagctgggacatagaaagaggtttcagggagttagatttct

SEQ ID NO: 299 - DNA, 345 bp, Homo sapiens
  I.299 (AI205706)
tttgactaattgtaagcttttatagttgattaagtcacacagtgcaaagaaaggtccattgacccttttggtaaagggagggctggaagccacacagattaagttcaatggatagtccgtatatacatgtgatgaggaacacccaaactaaatttgtgcttcttaggttggtcattctgaatcccgatgcacttctgaagcatcagctcggcaaattgggcaagtacgatttgccttaagccatttgtcaacacacttggcatggaactcgtggttacagggtaagactctaagtagctgccttgactcaaaatcacacatgcatactacacacaagtctgtctg

SEQ ID NO: 300 - DNA, 396 bp, Homo sapiens
  I.300 (AI200139)
  misc_feature (281)..(281): n is a, c, g, or t
gcggccgccgagcgcatactggacggcggcccacaggtcggtgcccaggtcgagcaggaaggcggcggtgcccagcacgcccaggaccaggtcccgaaggagggcgccgcgggacgaccagggcatggcccgccggcctccgccctctcctgctcctccgcggttggggcctgccctcagggcccggggttgccgaggcaggaaggaggtgggcgcagccctcggggcggcccggggcctgggccctgtgggcgggacttccccgtcccgccccgtccggngaggagcgaggcccgcggttgtcccaggtcctccgcccgaaccccagctaaaagccgctcgatgctctgctcccgccgccaggcccagggtccaccgacccagcccagccaagcc

SEQ ID NO: 301 - DNA, 509 bp, Homo sapiens
  I.301 (AI283934)
  misc_feature (353)..(353): n is a, c, g, or t
  misc_feature (419)..(419): n is a, c, g, or t
ttttttttttttttttttttttttcatgtttccactaaaaacttttactacttgattattttaaaaagtcatgttgtaccatcacccaatcctgtttaaaacagcactcaggccgtttatgtagctgatcttggattaccccttgttgcacagggatgatttaccactggattccttggaatccgttttcgacggtctctgaatgctgcacctgattgtagggcttttaaaaaattatccatcacaccagtctcatcaccctctttgtttatatcaaggagtggtttctttttcttctggcgttctaacttttcttggtcagctttctcttttgcaagtttggccctcctggncttctcttccatttctcttctcttattgttttctctcactgcttccaaaaacaaagttcgggagtngttgagatcaccaaagaactcttctatgctcactgtctttgagtcaaaaatgaagtattctccaagattctcatagagcttcatcatgtt

SEQ ID NO: 302 - DNA, 517 bp, Homo sapiens
  I.302 (AI251828)
  misc_feature (389)..(389): n is a, c, g, or t
  misc_feature (430)..(430): n is a, c, g, or t
aagttgaaaatttcatataattttatttattaagaattccaatctaagtataaaggtacaaggtagtgagaaggaaatactacagttcggagaactgcttatttccaagtatatttaacttataaagttaataaatagttaaatgaaacaaagtttataggtgacctttagtaaatggggaaattaacaggactttcttcttcatcttcaaactcttcagaagcagcaacagggctagttaattcaactcccaattgttctgaaagtttttttaccttctcttctaagagaatattcttcttcacttcttccttgtaattatacttaagatcttcaatttcttcaaaaaatggaggatcaaaattttccagttcttttttcagcttctntatttcctccttcaaatgctgcttttctagatctgacattntgagctgtgtctctagatcttttattttttccttttagtgatcagcatcaggatggtgctttcagctccactttggccctttgtagc

SEQ ID NO: 303 - DNA, 505 bp, Homo sapiens
  I.303 (AI149693)
tttttttaaaacagaacaagattatatttcaatatacaacttctgtataaccaaaaaataaaacaccatagtaaaatgaatgagaaaaaacatatttgcaattctagacaaaatgttaacatgtttaatcataaatgaactcttcagaaatcagtacaaagagactaacattacaagggaagtgaaaataaaaggaacagaggaaaatggaatagcacaaatgagttataaggctatatgaagatgatgtagttaacattaatagctgataaagcaatttcattataaattatattatcgatccttacaaatattgattatctgatgtttgtacagctttaggaaataaagaatactcaaatactgtggaaacttactagagtcatggggagtttactcaaaaatgtagatttttgtataaacttggccccagcagttccaaaccacaggaatctgtccaacaaagtaattagacacacacccacacacatacacatacatgttt

SEQ ID NO: 304 - DNA, 389 bp, Homo sapiens
  I.304 (AI244490)
gcggccgcggcgggaacatggaggagctgctgaggcgcgagctgggctgcagctctgtcagggccacgggccactcggggggcgggtgcatcagccagggccggagctacgacacggatcaaggacgagtgttcgtgaaagtgaaccccaaggcggaggccagaagaatgtttgaaggtgagatggcaagtttaactgccatcctgaaaacaaacacggtgaaagtgcccaagcccatcaaggttctggatgccccaggcggcgggagcgtgctggtgatggagcacatggacatgaggcatctgagcagtcatgctgcaaagcttggagcccagctggccgatttacaccttgataacaagaagcttggagagatgcgcctgaaggag

SEQ ID NO: 305 - DNA, 170 bp, Homo sapiens
  I.305 (AI187962)
cggaaattctcacttcttggagcactaaagggttgttagtctatctgggcaagcctcgtttccctggagaaaatggagtctcagagattagtgactggtcctagagctaatgagtgaccaaagtgtgaccagagcccaggtctgcttctcaacccagggcactttgattc

SEQ ID NO: 306 - DNA, 243 bp, Homo sapiens
  I.306 (AI222455)
ttttccatccaaggtgggataacttcataaacgagtgagttttctctctttagcccattcttggacatctgcttctccaaatatgaggtagaagagtagtcctaacaggttaacggcaaacagcaagaagaagacattcctccacccaaactcagggtcctgactaagaagaaatccgctgacagtgggtacaatgacaggtgctatgctcgaaaatcctcttgatgctcccatgagaaaact

SEQ ID NO: 307 - DNA, 486 bp, Homo sapiens
  I.307 (AI204258)
ttgggtggtgggataacatgaggtttttattttcttttaggtgtttatctatgctttccatattttctcagtgtaaaatgaagtgtctagcacataacagatggtcagtaaatgcgaatctcctttctcccccaactcctgctctcttctctgaaaggacaatgaggaaatagaaggccaagggcttcccgaggacttctccatcaggcaggaacctactgaagctttgctctttctgtggtctgtagctgtcagccctacaatagttcatgttcagccaacatctgacccagagccagggtcaggagcttagtagaagggcctgaagtagcccctgggatctgggtactccatgtagtaaccctgcctggggctgaactgagatctccacagggacttgtttctgcagaggtggcaagttgttcagagataaaagagatttttgatggaagaagtaagcaatacacctcagccctagcaaccata

SEQ ID NO: 308 - DNA, 410 bp, Homo sapiens
  I.308 (AI204634)
  misc_feature (370)..(370): n is a, c, g, or t
  misc_feature (405)..(405): n is a, c, g, or t
tttccaattaaataacccagtttcgatcatgaaaagggcacttgtttctacaggagctgtgtccagcttcctcagttccaagtactgtttccacacttcttccttgtcattgctgaggttgtatatccacttactcaggaagcaaattccacaaggttgcaagaactgaccccctaagttgttctttcagattctatttctccatagagttcagctaactttttaaactcgggtccccagtctccaaggtagtgataatcctggtctgattgtgtcgttgctgaatccagcgagctgatagacccagcttctgatctctgaccctcataggcataagtctgaagagagtcataagggggaacgctagggntctaggtctgctctgccagtctttgcttaataaantcctg

SEQ ID NO: 309 - DNA, 396 bp, Homo sapiens
  I.309 (AI204106)
  misc_feature (338)..(338): n is a, c, g, or t
  misc_feature (355)..(355): n is a, c, g, or t
ttttataattctgtgactgtcaccattttattctgatgttcaaatcgccccatatttggcctgttggaatcttttcaagttggcttctctgctttttttgggcatgtctccatcattctttgagcattgccttactttcttgtacaaaaagatattctgggctcatcttatactttctgtgctctagctttgaaattaccgtttcttcaaagagctctgtttccttttagaggaggatggtttttagaaaccaagttctaggtagcaggtgtgcttgttgctgttgaggtgttgcagctcccaggccctttccgtgaacagagccaggctcagatgangcgagtgggcggccggngctgcagctggcgttggccattgaggagcttctgcgcgaca

SEQ ID NO: 310 - DNA, 481 bp, Homo sapiens
  I.310 (AI203498)
ttttccaaatacactgttttaataaagagattagaaaacaggacagtaacagtttcttaaagcaatcttacaggaagtctaatttaatattctgttaggtgatgtactcacgtaggctcccagaagacccagaaactacatgaattgcggaaggctgatttaagatgccagttcttcaataaacagtgaactttgtaattagaatgatttttaagccaaaatactactccttactcttcagaaataaaatatagctatcctcttataatacagcaagaaacataattgttctggtaattgccagcttaactaaaaagacctccccttttcgttttgtccattaatttcttgctggtatcacttcctttggcaaaccacacaggtaatcgtctctttctctctgcagatgaagtctcagtattgatgcctacttcttccttgcttctcttagacttgaacagatctcttcagaaccgggaaa

SEQ ID NO: 311 - DNA, 379 bp, Homo sapiens
  I.311 (AI192112)
aacagagcgggcgcactaagaaactttttgtcatcagtaactacttttaacactttcagagttacagtacagcttaggggccaaaaattctaatcatgtaaattgcagggtcacattagataaaaacagtattgttcagtctataaactgacactaaaaatcatactgtacacaactgatgatacactgtacaaagaactaaggctgaaggatgggagccattcatgtcttttttccaaatttgtgttagtatggatggcagtattatatacttttcagtacttactgaaactaacgtcattaaggctacttgcaggattccttttgaatataaattaatataaatttagagtagaaaacagactagaattttcaagta

SEQ ID NO: 312 - DNA, 452 bp, Homo sapiens
  I.312 (AI188479)
ctatttttttacgatcctacagagatggtccagctgccaggactactttggcaggcagcgtgctacaggacgaaaatgtaagagaagtctattaaggctggacagcccagggttatttatactctctcagccccaagtcccccggactaaagacctaaaggctgattgactcattcctgattgatttaatggaaagtctcccaccccatcatcatttgccagagtaccaggcaccgatgaaaggagacgagtaaagaactgccacttcctaatgtatagtaggccttatcacactgtaagtggtccaagcccatagggatgctctttttggttcctggaatttccagttggatgtgacagacatctttcagtataggtctaagtcaagagtagcctctgggttgaggtgggctgggagattaacatcttacctggggtccttcagataaacc

SEQ ID NO: 313 - DNA, 478 bp, Homo sapiens
  I.313 (AI188136)
ttttttttttatacgcatcattcctttattcagtccacttattctgcttcagggtcacaggtcgcaggagcctctcccaacagctcagggcacaaggtggaaaccagcattggacaagacatcatcttatctcaggtacacacacacagacattcactcctcctgggatgatgtagacataccaattcacttaaagtgtacacctttagtggatgaaatagccatcctctttccacaggctgggagacacttttttccttgtattcttcctctactcgcttctgcagtggcgtgagggtatctgaataaacagcctaacactcatcgttgcttattcactcatgcagcaagcacaaatggttaaccttgctctccacatacagtccttcagaatcccattcatttatttagctgctcatgtaagtggacttgcagtggacagaagagttctccttcagcatcaggcccaatttctctc

SEQ ID NO: 314 - DNA, 488 bp, Homo sapiens
  I.314 (AI160574)
cgatcttcgagccaccagctaacagctggatgaccttgagcacgtttttaatgtctgtgcctcagtttctccctttatagaatgggaatgggaatgcctagctgggagagcttttgagaggacaacctgaactaataacacgatgcagtgtgtagtgccaccaatccctcatcctgctggatgtggttttgggagggaggttaggagagagcgctattcaccgtccctaaccctgttggttgttcagtaggagctgtggcgcggggccttccaggagtctgagctatgagtggcccctgtggagagaagcctgtcctggaagccagccccaccatgagtctgtgggaatttgaggacagccacagccgtcagggcaccccaaggccgggtcaagagctggccgctgaggaggcctcggccctggaactgcagatgaaggtggacttcttccggaagctgggctattcatccacggagatccacagcgt

SEQ ID NO: 315 - DNA, 449 bp, Homo sapiens
  I.315 (AI159821)
gaagccggtcttgcctgctctcccggcaattcggcatccctggcacacatgtctctgcaagaaggactgtaaagatgtcatagcacagccccgccgccgccaggctgcacagatgcagcccgcgcagccgtccgaggctgggaggaggctcggggctcggaagatgaacctcagaacaaaggacttgtctattcccccatatctcagcctccaaggcaacgcacaatacctttgcgggcaaacactaagaaattttttaatgtcccctccgagcggcacggcaaaacgccagttttttcggtttgttcttaaatcatcgatttccccaccccattatccagtatcctaggtgtttcgcatccccccagctccccaaagtagccttcccggggagaaccactcgggctcggatttagggaatgccttcacagggacgcggatgatgaaag

SEQ ID NO: 316 - DNA, 452 bp, Homo sapiens
  I.316 (AI151377)
ttaaggaaaaatagctttatttttaaaagaaataaattctctatttaaagcatacatgagatagtatctttcatttagtcctaagcttgattatttatgctcattgtaatattccagtgacattctggacataaatttcaagtatatcaccatatacttattgttaaatatcaaacaaagctactgactgtgagggaaaaatttcagtgattttttttgtttgtttttttgttacttaccctgagatactcatcccacagtatatctgagatttagctgaacatttacaaattttaacaaattttttttctttccattgcatgcatcgatatgccaaattctgcacttcaatccaggtaaaataatgatagtgtttgtaaaccagatagtgaaaaccagtgtgttttctaatactgcccatgatagacagagtgaaatcacagcataaacag

SEQ ID NO: 317 - DNA, 460 bp, Homo sapiens
  I.317 (AI125328)
ttttttttttttttttcttctttctttctgcttctttttgtctttcttcagctaaccgaatatgctcttcattttttagcctttgctcctcctctttctctcttttcttttcctgttcctcttcatactcctgctgaattcgtgccctctgttctgcaagccgtctttcttctttttcttctgcaattctcagtctctctcgctctgcttcctctctttgtttcttttcctcaatctggaaacgaagaaaattcttgtataattcttgctgtttaatctgaagttcagttggaggctcaccaaatacatttccccgagcaaaaggagagctctgtgtttgcatatgacctgagcttttatttgcagcatcttctaggttctcagcatttgaagtggctaaatttgggtctagagatacaacagcccttttatcttcatatgttcttgcatctgggttatg

SEQ ID NO: 318 - DNA, 382 bp, Homo sapiens
  I.318 (AI150732)
ttgattttttaattaaaatttatttaattttaaatgttctttccaacggaagaggtaggtatatttccacatatgaaaaatcaggaacagccataaatcaaaacaaggaaagcctgataaaaatcaacatattctaacagcacataaatgtaactatcttatgatgttactaataaagacatgagttgtttcatgtttcaatcagacaataatcttaattttcataatatatttctgctactaacaggagtattcaaatgctgccttttcattacaaaaaattgtttccccacagtgatttgtgcctcaagtcatggtgatctctgggtcaccagacaagactttactgcaattctttcttattttcaccaacaccatcatc

SEQ ID NO: 319 - DNA, 507 bp, Homo sapiens
  I.319 (AI126520)
  misc_feature (489)..(489): n is a, c, g, or t
  misc_feature (503)..(503): n is a, c, g, or t
tgttatttatttatttatttatttatttatttatttatttatttatagagacaagggcttgccatgttacccaggctggtcttgaactcttgagctcgagcgatccccacctcccaaagtgctgggcttacaggtgtaagccatcatgtccagccgttcagatattctagttgaattggagttggtgggctagtacaccttctaaattaaatgagtaaaggatttagaatggtgcctgacacacagtaggtgctacattcatgttagctactattataaacctttcctgcctctgactttcagggtcttgcccaccaccagcgatgcccagcccttggtagagcttgaaccaccttctataaacaggatggcggtggagagacaggcccagtccctgagcccatgaggagtgtggccccttcaggcccaaagatggtgaacatcactgcagacaactcctcgatgagctgtaccatcgaccataccatncaccagacgctggncccg

SEQ ID NO: 320 - DNA, 396 bp, Homo sapiens
  I.320 (AI161362)
ttttttttttaacatttattgagaactttattcagaatagagcactgttctatgtattttacatgtcttaactcatttgaccctcataataattcataacaggtattatttttaatcctattttacagatggggaaactgccatacagagaggttaagaaatctgtacaaaatcacacagctattaagtggcagagctggtttttgaacccaggcatccaggcaccagagtttttgctctaaaccactacagtatatctgcttccatgacttactgagctcctatgcatcagatactatgtcagccactttacccacattatgtcaatataacagcagatgctgttgccaaaactttactgggaagagtgttaatcttcccaagcaagctttgatc

SEQ ID NO: 321 - DNA, 219 bp, Homo sapiens
  I.321 (AI127142)
ggactttccagctgcccgggcctcgcaagataggctgaatgagagccttaggagagagcaggctttggtttcacatgtgtaacagacgggtgctgctggcagtctgggcactgtcaggagggagaggctggcttaggcctgggaatgggtatagccagtactccaggctcccagcagcacaggtgcaccttacaaggagagaggaaggaggaggaccct

SEQ ID NO: 322 - DNA, 380 bp, Homo sapiens
  I.322 (AI207066)
tttactctttaaatgagtgcatttttattatgtaaaaattataccttcatgaagttgactttcaaaagttggaaaaaaaataaaagcttaagaacactataccatctttttaaaattaaagagaaaaaaattcaaaatgttagcagtgcttccaatctcccagtgcttatttctctcccagagcggtcttgcgaggaggtcgtgagaagagtcctcctcccaccgccatttctgtggccgggtggtcccaccaaaggcagctcagtgactctcctggctggtctgacccaggccagcctcgcagacccagtggtagggcctctggcaacgtcgtcattccacctgccgtctgatgggaagtgagcacagtcctcgcctcc

SEQ ID NO: 323 - DNA, 435 bp, Homo sapiens
  I.323 (AI188613)
ttttttttttttttttttgagatggagtatcactgtcacccaggctggagcgagactccgtctcaaaaaaaaaaggggggggggcaataaaaagtctaagtctaaaacacatagattttagggtcaaattagaaaacagaaaatgtaggaataaatcaaaattttagataggcatttaattcatagaccttcttagtgcccaaaaggagggctgcagaaggaatacaacaattcccatgaatgccttgtttgttctgcacaaccagttcaggctcatcctgcaaatgccttcagactcatcatgcagtcagctctgtctccttgatttctcactccaaataaggtgagccatagagaagaggttggctgatccctcaccggactcaaatggcagttgccattggcctgagaaaggaaaaggcagtgccaagccta

SEQ ID NO: 324 - DNA, 472 bp, Homo sapiens
  I.324 (AI128812)
gatgctgtcataggtcagtcattttaattcagggacatgagtcagttatcagtcaagaacatgtgtggaggcaggagttaaaaacaaacccaaaacaaacccataaccagaagctccatgtctctgaattactccctttagcagctgtcccttgggtgaaaggtcaccctagtaccaatgtgactagaccagggagccaaaaagaccgtgcttttctatttcctaatgccttcatttgggaaatgctgtaggacacttgcttttatcagttctatctaacagctagaagagaaacactccctcctaccttgataacatagaaaattacagccagatggcaacggcagtgactcactgcgcgactctttctggtgatatagaagacccttgccatcgcagaccctccttccaatatgggagggcagcaatctcagggcctctgcattttatgtcctgtagtgttaatgtgtac

SEQ ID NO: 325 - DNA, 394 bp, Homo sapiens
  I.325 (AI086982)
tttttttaatgtttcaaatattttaaccattattaaaatggaaaggtaaagaatggatcacaagatttcagtgaaagagattatgtatcagattacataaataacacatagtttgagaattaccgttaacattaagaagataaaggcagatattcccaagatcaggatttctttgttccccttgctttccatgtgcagcttccgataatagggtccaatgagatacttctttataacaagacataaaagaaaaaccgccgctagtgaaaaaagaatctgaccaatcaaaaccaggattcggagaacttccacgacaatgctagaagatgcactggcgcccgcctgtatgagagtcggcatgacggccatgaagagcccgagctgcacgtcctgc

SEQ ID NO: 326 - DNA, 453 bp, Homo sapiens
  I.326 (AI086719)
tttttgcatgaactaatttgagcttcttattcattcaaatgttgtaacaattaacagaggtgtactatttggctttttatgctagtatttatgcttgttatccaaatcatgttcacatttaagaagtcattacacattttctgatgtattttatctaacaaaagacatttcttgcttttggaagcaaatgaagacaggtttttcataccccactgagtgacgtgttccactcagtacacagagataagatctccacagttggtagttgaacaggtgaccagaagcacggaaatgcagttcttcaaactgagaaacacagatttggaagaatgcttacaattcttttaatgagtctaagtaattcatctgccttgggaagggacacagacagccagattaagtaaccttttgcatgttcacaggtcaacttggagtatgctctttactataact

SEQ ID NO: 327 - DNA, 630 bp, Homo sapiens
  I.327 (AI077481)
gcggccgccccattcccagaccggccgccagcccatctggttagctcccgccgctccgcgccgcccgggagtcgggagccgcggggaaccgggcacctgcacccgcctctgggagtgagtggttccagctggtgcctggcctgtgtctcttggatgccctgtggcttcagtccgtctcctgttgcccaccacctcgtccctgggccgcctgataccccagcccaacagctaaggtgtggatggacagtagggggctggcttctctcactggtcaggggtcttctcccctgtctgcctcccggagctaggactgcagaggggcctatcatggtgcttgcaggccccctggctgtctcgctgttgctgcccagcctcacactgctggtgtcccacctctccagctcccaggatgtctccagtgagcccagcagtgagcagcagctgtgcgcccttagcaagcaccccaccgtggcctttgaagacctgcagccgtgggtctctaacttcacctaccctggagcccgggatttctcccagctggctttggacccctccgggaaccagctcatcgtgggagccaggaactacctcttcagactcagccttgccaatgtctctctttttcagcca

SEQ ID NO: 328 - DNA, 452 bp, Homo sapiens
  I.328 (AI074113)
  misc_feature (397)..(397): n is a, c, g, or t
tttttaacatttccagaatgtaggttttacttgaaaagaaggcattctgatagactcacaatatggttttatctgcaaatattacctaaaaacatagaatttatagtgagatctctgcgttccgcatctttctgccagtcagttgtaaattctacctcagcatgtcttccatcagtggtgacatcaatccgtagtgtagtaatctcaaaattttcttcatgaagcctggcagtaattgttccgtgcttttctcctctgttgtttatcatccgaatcccagccgactgaaacatctccttcatttgagtaggggtagcagtggtggcaaaatctatatcctgaggctttactccatttaataaatccctcactgctcctcctgctattcttaattcgngattctctttgacaaataattctgtcagactcttcagtccttctgtgaaaagtga

SEQ ID NO: 329 - DNA, 540 bp, Homo sapiens
  I.329 (AI056693)
ttttgggggttttaaatattttattcattataaaacatataggaccacaacccagaaaatgaggaaaagggatgagaagggacaggagaagcatcccagggaagcaacactgaccatgtgccgtgggacccagacccagctcttacttgtaggccacatcacacccactgttgttgtggacatgatgggcctgcagttcccgcagtctctggctgcagactgtctggtcgtgacactccagtccagggacatggtgtataacaaggacattcactggcgtggtcagctgaatactgcagccaacagcttctgccccccatgccttgcgagagaccgtggtggagacatctttttcagtgagctgggagatgttctcaaataggtactggagcccctctgatacctgtttagcttgtgttttgttccaggaggaatcaccccaggcctggatacccagagcagagaagacaagaagccacagcagcatccccacgtggtcccaggacaccaatctggagagtgtggatggcagcagatatc

SEQ ID NO: 330 - DNA, 420 bp, Homo sapiens
  I.330 (AI142901)
tttttttttttttttctggggtggaaggagactactgacactccatatttattgcttacattacaagaattaaacaaaaaaagcagactagaaaatcactttctgtaatttcacaatcaccaatttgcaacagaaactgaagcataatatttatgctaacaaatatgttggatgaattatcacctcagcacataactgcagatggatactcctggattttcacttaatccattactcaatgatgaacactataaaatgaaaggtgacatacttatgaactaaaatcacaagaagaaactctccaagatcaatcttaaatgagctcctattccaataagccataaagagcagtaaaaggcaatattcatttaacagtacaagaatctcgatgacaagaaatcaggtatttatattcctcta

SEQ ID NO: 331 - DNA, 489 bp, Homo sapiens
  I.331 (AI142427)
cttctccccaaggcacaaatatttctggtttaacttatttttgtgatgtacccaactaaccacaaagccaggcctgctgggatgaggataaaaatcaaataaacaatcctctcaacgtccaggaaatggctgccaggccttctgacttcatgaaacgccggggccagctgtgctcttctatgctgggtcctcttcgtccattgccacattgctgtttgtattcttcttctgctcagcctctggctctgcaggcagaatgctggtgacggtgtggagaagagcttcaatctgctcctccgtgagccgctcttcactctcttccaccatcagctggatctccacagcagtcacaggccggtggttcagcagctggagcttctcagctttggtcaacttgtggcttttcaatgctgtgagaaattctctgacaatttcaggactctggtgcctgcatggtgtttttgatatgtattttaacgtttcataggt

SEQ ID NO: 332 - DNA, 351 bp, Homo sapiens
  I.332 (AI085103)
agcttttctaattttatttgactcaaactatattttagacctacatatcatacaataaagtaagctgaaagactagtgaaattaaagtaaatacaggttgtatggatagctcaatttctttaatataaaatgtaaattcagagatgactgggataaaagaaaagtgtctagaaaaaaaaaccaaagatgaaactatttaagctctttactgcaatgtcatattctgatctcagacagtagaagagtagtaagaaatgtacaatctcaagtctctcagtcctaaaatctatcagtggatgccaaaaatcttcaagacccattaacgttttctagaaaataagtctttttttt

SEQ ID NO: 333 - DNA, 642 bp, Homo sapiens
  I.333 (AF088034)
ctcaaagatagaatggctcatgcaatgaatgaatacccagactcctgtgcagtactggtcagacgtcatggagtatatgtgtggggggaaacatgggagaaggccaaaaccatgtgtgagtgttatgactatttatttgatattgccgtatcaatgaagaaagtaggacttgatccttcacagctcccagttggagaaaatggaattgtctaagccaaaagaaagtctaattatatacagagataaagctaaacgtaattattatttaaatgaaagctatttttttaaatgaattgaaatttttcatgatgctactaatttgccactaaatactgcaaatggtcaccctgaatctcttctgacattggatgttatttgcttatattcttataattttaaatgagggcacagtgaaatgaaaattttatactctatgtttctgtttatttttaaatccttaacagcaaaatatttgcctttaatttcttttttatatatactctcagagaattcctcttaatttttaaagatgctggtgataataaaattcattagaaaatttcctcattgtggaatgagcattctcttgttttaatgttggtgtcagaaaataaatatgaaacattaagtccaaaaaaaaaa

SEQ ID NO: 334 - DNA, 708 bp, Homo sapiens
  I.334 (AF087973)
agggggaaaaaagcaacgcaagccaaccacaaaaacacatataccaatgaaagaaattggtttaaatttcacagcattaacattactttttaagtaaaacagttcattgaagaaagtatgtatgcagcagtggaacatgggcctgtgctttgcagtgactccaacatcctgtgcctgtcctggaaggggcgtgtccccaagagtgagaaggagaagcctgtgtgcaggagacgctactatgaggaaggctggctggccacgggcaacgggcgaggagtggttggggtgactttcacctctagtcactgtcgcagggacaggagtactccacagaggataaatttcaacctccggggccacaatagcgagatttgtaagactccagggcctcccagccgtgaataatctgatggttcctgaaatgactggggaagcagacgcttcgtatggcagttgaagagtgtgtgtctatgtgcatttaaaaccttctttctgtacttacacattcacacgggaagacaggctcattcttgtgcacacttgagagttttacaactgatgaaaattaatttaagaatcagatggagcaacttgacaccagtgggctcaggagcccggggagaaaaatacatcactaatggccagttttccatatggtctgcacgggtaaagaaagtctgcaaaaaaaaaaaaaaaaaaagatcttta

SEQ ID NO: 335 - DNA, 423 bp, Homo sapiens
  I.335 (AF086539)
ctccagtgctacgtgtccctggcattttaggtgtcggttgggtaggcagtcatggatcaggtaatgcagtttgttgagccaagtcggcagtttgtaaaggactccattcggctggttaaaagatgcactaaacctgatagaaaagaattccagaagattgccatggcaacagcaataggatttgctataatgggattcattggcttctttgtgaaattgatccatattcctattaataacatcattgttggtggctgaatacattttggaagagagtttttcatcttagagattggtgaacaagtgtgagggtgtgagaaactcacagaatacaaatttgcctgtatgttttgtgggtttttttttttcctttcaagatgttttctatttctaaattaaagtaatttcaaagtaaaaaaaaaa

SEQ ID NO: 336 - DNA, 540 bp, Homo sapiens
  I.336 (AF086213)
gtgaagacgagaagaaggcaactgtctccaatccagacggagatgccaggcacagcccttctgtcacaaccctcagaaggaaccaaccctgccgacaccttggccttgtacttctggcctccagaaccgcaggaaagtacatttctgttgcttaggccgctcagcctgtggcactttgttacagcttctcacccagttcaggcccttttaattgattgctgggcctttgcagttgtttttgcttctaatatattcatctctcaatttatttctggaggctgccacccgaggggcagaacttcaattgtgtccctaatgggaaaccttgctgggatcatgtggtctacagcacaaggttgctaaagcatcttctgccagaattctgtgagtatctggttaggtgggtctggaatatactgagtttaaaaaagttaaataggtttctttactgcaagatgtttcagagactttaatatgctactctgctgtatgaatctccaggcaggaaatcttataaaatgtgtttctgaaaaaaaaaaa

SEQ ID NO: 337 - DNA, 665 bp, Homo sapiens
  I.337 (AF085847)
gcgtttttttggggaaatcctcgacaggtgcaggaaaattgtgttattgtaacaatttaccgttatctctctttcacggctctccatcagttgtgaacatctattggtttatcccaagtcactaagcatattttcattaggtaaacctgtttttccttctacagctgtttctggagtatagggtcgcatactcataaacccagtgtaactcagaaacgcatctaatattccagtaaacccatcataacgttgaaaaatcgtaaatcaaaccatcataagtcacggtttgtccgtggatatgggcgtcatcaattccattgtattcagtaatgctgtacaccattaacaatggcagactgattgggagtggatattgatagcattataaaagtcagttattagagggatacttctttaacctgactgaagaactgatctaatggctttagtacagtgcatgattatgtgcgatgttttgagacagagtagtacatttgtgaatgaaattttatggcttttttttcacttagtaggaaccattgtgtgtggaaaagtgagaaaatggctttctgctgtagggtctggcattcattgtagatgtaagcttatttttctgtgagcaaatcttattcaataaaatactactctttatactaaaaaaaaaa

SEQ ID NO: 338 - DNA, 346 bp, Homo sapiens
  I.338 (AI086232)
actccaaggttttattttttttaaacacacattcgcgcctaaagaatataaaaaatattttctttcaggaaaaaaagaatgcatgtaaaaaaatctatgtttaaacattataacattgatgtaatatgcataattatttttaaggagattttaagtagaataataaaacatttctacatcaaaaacttaactgaagtccattctgtgcccagcacagtgctataggttaggaaacacaaagaataaaatgaggaaaagaaaagcatttatttgctatgccaacttaacagggcaatacaactaaatgcttaaacttttgaatatattcaatatatgaagttatttt

SEQ ID NO: 339 - DNA, 462 bp, Homo sapiens
  I.339 (AI033829)
aggcaaattgagtctgaagaaatgattgtttccccataatatcctgtccccatggtgtagctgtattggactggagacagatgacccatttacaaatgttctggtgttcttctgaggagtcagcataacctggccttctgacgtgatgtctataatacagtgttcaggaagaattcccatgccgcacagttggatatcttgggaatttgctgaccctatcaatgtatgttcctttaaatagtacaccagaagctcattcagagctgggtcagcattcagattcacaaggaagcatttatcatccccaactttgattcccgaagactgaagagatattccaagactctcaagctgtttctgtcgttcctgtgcaatctcctccgttttccttaatttctcctcccaggtcacagtcatttcctggattagcttctcagattcttccagcccgtcctttagctc

SEQ ID NO: 340 - DNA, 454 bp, Homo sapiens
  I.340 (AI026799)
cagcgccccgcaccgttgccgtagcagcagaacgcgagctcttgtggaggagcagggccggcgcgaggcgagactcgggagcgtgagcggggcccctggggcgccgccgtccttcttcgccccggcgccgggggctgtagccctggtccccgctcctctgtcgggccagtctgcaggcggagagagtcggacggcgcccggagcgcggatctcgccttgtggaggacagcgcgtcggctgcggttctctctcgaccccttctgcccggcgcttcggcccgggccgctcaggtgcagagcatgaataatctttcatttagtgagctatgttgcctcttctgctgtccaccttgtccagggaagattgcttcaaaattagcgtttttgccacctgatccaacttacacactgatgtgtgatgaaagcggaagccgttggactttacatctgtctga

SEQ ID NO: 341 - DNA, 479 bp, Homo sapiens
  I.341 (AI024863)
tttagtagggctttttattgtttttaggccattgcctgctcagtcccgacagcattcccccttcttgaaacttcactatagctgctgacactcttctgaactttttctgacttgatactctgaattaaaccaagtataagtgtcattttcttctaagagaatattagtgtcagcatatttttcttcataaatcttgtgtataaatcctgataacagcctccatcggttcaattccatatgagatgtttttcagctgcattgttcccctgagtcctgaacatacgctgagagtcacaagagaatttggaatacccgcaacatatccattataaatgcaatccatctgaactagcagaggtttggaatgacggatgtcattttcgtcataagaattaataacagaagctgaagataaaattgatattatgttctggatctgtttttgcatccgatgatgaaatcttctctggaattgtggc

SEQ ID NO: 342 - DNA, 461 bp, Homo sapiens
  I.342 (AI024035)
ttttcatggaaaaaagcaacaaggaactggttttatttcttttaggtgacactaataaccaaacatgagacacatcagaatttaagtggctagtcaaaaaaaaaaaaaaaaataccagtgaaaatagcaagtctacattgatgttagttgttatataacaggcgctgttctaagcgttttgcctgtagcaactcactgaatcctcataattactttatgaagaggagattcagtaacctggtcacataggcaatgaatggccaggattcgggctctaaaactgggtctcctgaccacgacgatccctctctagggctgatggagatcatcactaaatcacctcctttgggattctctgctcgttggaaatggagtgttacctgcagagtactgctgtgacctctcctttaggcctctctgtgcagagactgcagtagtctgtgttagtgctgtcctgttga

SEQ ID NO: 343 - DNA, 536 bp, Homo sapiens
  I.343 (AI018451)
attcaacgatttgccacttcgcttcaacagcatgccctgtttaattgggatggctcggcgctcccaatgctgtccgcacgactctccaggcctttcttctctttgtctgggtcgctccctttccgagaggtgaacaggttggaccggcgcttagactgcttgcgaacgggcgtgggcgtgttggcagtgggaggaacatcgatccgaagttccttctggctggtgctgggagtcgatggaacggaggaggaatagtcgcttaaactcccacctccattacttgtctggctgatgtgcacggcagacacctgcgcggaacagacggaggaatggctgggagaattaggtagcgacttgcagggtcctatggacagctgctgcttcttccttgtggcaacaatcttctgggcaacgtcctggaagaccctctccacattcagcccgtatgtagcacacgtctcgtagtacgtgcaccgtttcaggtcgttggagagcttcctcgcctgcgtcatcgatgaccctcggttagcagaact

SEQ ID NO: 344 - DNA, 468 bp, Homo sapiens
  I.344 (AI016127)
tttgaaagaaaaaaacttttaatatggaatacagaattaagagaagaggtgagccgcagtgactaggtgatagaacagaagacgctaaggaatctattttcagttttgcacttgcttgtttcaaagctcctctcagagtaaaggtcccagaaatgaggaggggcagacgtctcctgcactgagctctatgtggagctgtggccatcctgtggccaggaggagtgtgcaatctcggtctgtgctcctactggatggcaggcagcatgttaggaaactgcacgcaggtcacaaggaggcagattatctctgcgcaaacttagccccttcaactagcgaaccctggagcctcggtcagaactaaacagtactctgatttcggaaaggctgctgttgtgatggccgatccctatgtgtgtggctttctcgagttattgcagatgcaccagaatctacgtgaactgagcctat

SEQ ID NO: 345 - DNA, 364 bp, Homo sapiens
  I.345 (AI015693)
ttgaaggaaacaaggcgcttgttttctctttgcacaggcagggagggtgttcctgagtgaccttccagaagagttcgaaattataagcctggagtgccgagggaggcctctgccgctgggggtctcgctgtctgctttggggttctggggcctctccttaccccatctggggtcccaggatgggcccaggggtccaggaaccaaggcagcactgcactggtgcccgcacggtccgggagcaggcctccgtagatcaggggtcaggggccccggcatcaggctctggggagtgaggtattggaatctgaggctcaggggtcaggggccccggcgtcaggctctagggagtgagctattggaatct

SEQ ID NO: 346 - DNA, 376 bp, Homo sapiens
  I.346 (AI004809)
ttttttacttatttttactttcattttatttcagagcatttaatgcggtttacaaatcaatcacatcttccaaaaacacactgtgttgtttttctcctcaaagcagtttttcatacattgcatcattttctgttcataacagtcccaaggactggatagggtcggctttgctgtctccattttaatgacaggaacttagatgtggaggccttacgctgtccaggaaggggttttacagacgttacttcgtttggtcttctcctcccaccctgcacggcgcaaagagcccatcagtttgcggaagtctggggtggaggacagtctggagtgacaggctgctaccagaccagtcgatctggttcgggctgtgacataa

SEQ ID NO: 347 - DNA, 604 bp, Homo sapiens
  I.347 (AA992733)
tttttcatgctgaagatttagatttatttgaaaacacttagtctaatttatattagtgcagaaaaatcacattcaataaaccacaattgtagaagagacagataagtgtgtttgtcacattttcacacaaatataatttgatatttaattaagggatgatgaatcacaatcacatgtaaataaatgatttattctctcagtaatagtaagaatctcttttgagtatgtagggtcttctgggtttattctcatacagctgccgtttcagaatataaggaatttttctctttatgacttcttcctttccatttttgtcatttccagtatcaagaatatcttcctggattaactcccagtgttgaaaagccctgctgtgacagattttgtggagctggtatattgtcaacattgcttccaagctaaagccatctaaagcagtaggaagtttccttctttgcacaagctcctcttcatgaacttctcctgtttcctcagctgggctgttcgaattatttacaagactgcaaacatttagcagagtcatcttccaagagggacatggtctttactaactttggatgtatggatattgggcaagaatctg

SEQ ID NO: 348 - DNA, 367 bp, Homo sapiens
  I.348 (AA992716)
tttgaatcaggattgtgaggtatataggcatcttgaaaactgtctgaaaataaaggcaactcttccttattgcaattaaaatattttatctcttcttctttaccatctttcaattcatctaacttatcagaacactgcactgcatcaatttcttttatgtgtatactgttctttgctgaaggtctagctgactgtatattagatggcaaaactaaaggcgttgcacctggtacacatgaagtaggaattgaagtagttccattttcttgatttaattcagaatatttctcttggtctggaaatgtagccacttcctgggttagagaatctgaagtgctttgggatttgctaaatttaaatgttgggc

SEQ ID NO: 349 - DNA, 431 bp, Homo sapiens
  I.349 (AI090008)
tttttttttttttttcattatttacgtttagtttattgcagagatgaagacagcatactagaagttggcttctatttcacaccgttcacagcactcactctgttctccatttcatccactcacccatgcaaaaggtctgtacacgcaatgatgtctgatgtttcttggtttccatagtgtaacaggaaacttgacatttcaattaaaaaggtaaaatgaagacatttaccatcagactataaaactcctcttctgtaagagaatactatagtacttgaagatatgatttgaaaaaaaatcatgtaccaaatgaaaggggcaccatttcaagagcactaggactacattaaacttaaatatattcccacattcttaaaaatgtaactcaaaaccaaatctagtcttaaaaaagctcccagtacctaaactac

SEQ ID NO: 350 - DNA, 557 bp, Homo sapiens
  I.350 (AF075063)
ccgccaccatgacccactaattttttttttttttttggatttttggtagagtcggggtttcactgtgttggccgggatggtctcaacctcctgacctcgtgatctgcctgcctctgcctcccagagtgctgggattacaggtgtgagccaccgcgcccggcctggaactgcaatttctaactcatacatcattgctataaaccttatttgtttactgtttctcttccaaggacggtcagtcatcctttaaaattcatttgaagttatgaaaagatagtttttgttacatgggcaatttacttttagtacagtaaaatgttatgtgaatttctacagaatgtttgctagaatgaattatatctaggatatgcttaacaatatattctggaggcagctttcatttgaaattaggttcatcttctgagagtattaaaaagttaatgggtttttgtgcctgaagattttgatgttgcatttggctacatttaatccactttcacccataaggtttagcatctaaaaaaattaaatcactgctaatgcaattaaaaaaaaaa

SEQ ID NO: 351 - DNA, 375 bp, Homo sapiens
  I.351 (AA931779)
gattagcacagacacgttttgatgttgaatgaactagtaagtcacagtaggtggtagtcttcattgatttctctgtaagtttttaaagaatgtatgaagatagtcacgaatgtactgagtgttcgcatcccccttcagttcaccttggctgtgtctacaggacaacaaatgtttgacagggaataaagtcgtgtctggtgtcatttgcgctacgtgcccctcccctttcggtgttggctccaaaccttcctttccttttatgtttgtggggagtggggaaccacatcagcagcaatcatcaaccaaccaaccaatgggatctacttagtggtgaatagattggctatttaattggtaaaagttgctggtctgacc

SEQ ID NO: 352 - DNA, 465 bp, Homo sapiens
  I.352 (AA931658)
ccagaaaatgcttggacagaagagatgagtactatttccactaaggcctagaattgcctactgtacaaatagtcctgatcaggcaatatacgaatggcccaaggaagccaccaaattgattttcaggttttacatgacctgcgacaaaaattccctgaagtacctgaagttgttgtatccaggtgcatgttacagaataataataacctggatgcctgctgtgctgttctctctcaggagagtacaagatatctttatggtgaaggagacttgaatttttcagatgattctggaatttctggtctacgcaatcacatgacttctctcaacttggacttgcaatcacagaacatttaccaccatggaagagaaggaagtaggatgaatggaagtaggactctaacgcacagcattagtgatggacaacttcaaggtggccagtccaatagtgaactatttcagcag

SEQ ID NO: 353 - DNA, 530 bp, Homo sapiens
  I.353 (AA918208)
ttttagtagggctttttattgtttttaggccattgcctgctcagtcccgacagcattcccccttcttgaaacttcactatagctgctgacactccaaatttttgtccacaacaatatgcatttcaatatatcgagggaataacttaataaagtcagttttttctgaactttttctgacttgatactctgaattaaaccaagtataagtgtcattttcttctaagagaatattagtgtcagcatatttttcttcataaatcttgtgtataaatcctgatacagcctccatcggttcaattccatatgagatgtttttcagctgcattgttcccctgagtcctgaacatacgctgagagtcacaagagaatttggaatacccgcaacatatccattataattgcaatccatctgaactagcagaggtttggaatgacggatgtcattttcgtcataagaattaataacagaagctgaagataaaattgatattatgtttcggaatcgtttttgcatccgatgatgaaatctt

SEQ ID NO: 354 - DNA, 193 bp, Homo sapiens
  I.354 (AA939330)
  misc_feature (164)..(164): n is a, c, g, or t
  misc_feature (165)..(165): n is a, c, g, or t
ggcatgtcgccgggcccttgcgggcccccgtcctggggcccgccactgtagtcgcccccggggtagccctggtagccccgggccgagctgggcgacgtgagcagttggttgagggtgggggtggcggtgggctgcggagttccccgccggcagcggcgggggcnnctccccccatggccccgaagcgctgctg

SEQ ID NO: 355 - DNA, 700 bp, Homo sapiens
  I.355 (AA928419)
caaagtaacactgatttttaaatggaaatatattaatatgacctgtataaattatgagattcaaaacagtggcgccactatactgctaaacctatgcatgaaggtagtgactaggatggaaatctgtcagtgctacaaaaatatgtatgaacaaaataattttcaccctttgataaagctacaagatataaaatttagaatacttatataatttcatactagatatgtgaaaaatatgccatgctagaaccatcttgttccaaagtttgaaacatattctgtcaaaaatactcttcgtacaatgtatgaacttatcaataactttctgggtataaagttgtttttatgtcatagtcagatgaagatccttctgaattatatgttgattagaattttgtttcaactggcacctcatatacccgattacgtaatcctccatttgtatttatggtaaaatcaatttttccatctttttcctgactgggattaaactttgaagtactgtaatctttcttcatcaaaatatgcaaaacagcatcatggattgttaagaaaaatattgagcttttcacttcaccatcaaaaaaattcatacccggtaaggcttctcaatgaaagtcatcatcgtttcaacgatataaacatctaccctgatcctgataaattcttgcaaaatcgatttaaggcccctcactgaaga

SEQ ID NO: 356 - DNA, 299 bp, Homo sapiens
  I.356 (AA922727)
agcttgggctctggaggcccttgggcggctgcgcgggaaccctggccctttatccccaaccccaccccagaaatagggtccccggaggcgaacaagccgaggggcgaagtgggccatggatcacctgccccgcaatgacctgcgccccgcccccaggcctgctggagctctcgcccgtggagcgggcgtgagtgagcatcttcggcgtggcagccggttcttcgtggccatgagcagcaagggcaagctctatggctcggtgagtaccgcagggtactggctaggcacctagttgggaa

SEQ ID NO: 357 - DNA, 479 bp, Homo sapiens
  I.357 (AA935686)
taattaaaaaaaaaaaggacatagaaaacatcagtcttgaacttctcttcaagaacccgggctgcaaaggaaatctcttttttttttttttttatgtgctgtcaagttttgaagtggtgatctttagacagtgactgagtatggatcatttgaacgaggcaactcaggggaaaagaacattcagaaatgtctaacaatgtgagtgatccgaaggtccaccagccaagattgcccgcctggagcaaaacgggagcccgctaggaagaggaatgcttgggaatacaggtgcaaaaatgcagggagtgcccttaaaacactcgggccatctgatgaaaaccaacctttggaaaggaaccatgctgccagttttctgcgtggtggaacttatgaaaacgcattgaatatgcttgccaggaggagcctgcaaaattttttcctcggaaaaaaggaattgcttttcaacaggttaatccaaatgg

SEQ ID NO: 358 - DNA, 345 bp, Homo sapiens
  I.358 (AI001846)
ctttcctttagaagaagtagatgaacgagacgatgcagcagactgggctcctgatgaatgctgggaggtaacatccacagaggaaggatcataggcagactttctgttagaatggtcctcctgagggcttaaagtgctatgaggttcaagagttgattttttttctgtcgaagtcccagtccctggagaggagacaaaatcatcttcatatgaaacaccacttagaggagttgcggtggcattcaaaggccgtgatgttgatgttcctctgtccaacttgtcttcaaacccttttccatataactgataggattttgtaaaaatattaatgacgctatgtggact

SEQ ID NO: 359 - DNA, 320 bp, Homo sapiens
  I.359 (AA917369)
gtgtttcatttctagacttttattctcaaagggatgatgaggaagagacacggcttaagaagttttgagctgagaaatgaaaagaagtcacttttctttgctgccacagaactaagtagggggaaaattaagcccaggggttcatttaacctgttacaacaaaacacagaaaccagacggcaaagtgtcatttgcaaggtgatgtgtctttgtcggagctgaaggctgtcgccgttcggctgtctccatggagtccccatctggccctgcactccccacaggattgatttcatcaggagcgtctgcatctgctgcgtttc

SEQ ID NO: 360 - DNA, 370 bp, Homo sapiens
  I.360 (AA909293)
ctctttcgtcttctttttggaggagataaattctcagtagatatttcatcttctgaactactacaaaatcgagtaattcgtcgacgacatgatgttcttaaaggaggctgcaaattgatgcccgcatcagctgtccaatcggaatatctagatgaagagtcacttgaactttcgctgtaactctcactttttctgtcacttctccattcatcctcttctgaagaaccagaaccttcactctgatcacaggaagtctcatgtcttacagagcttgaagactcatttccagaagataactcacgccagctacgatttcttctaccataatttggatatttacgcctacatgtcctttgtctagactgtgata

SEQ ID NO: 361 - DNA, 492 bp, Homo sapiens
  I.361 (AA909201)
tttaaaattttctaggctttatttaattattacatgtaattatatattttatgagaattttgtcaacagccagataaaaatgcttcttattcttgtttgggttaccatgggattctttattgaccagcagcaagccagtcctcttttttgctctttaaatccaaagtgcccatagccaacagccaaaagatctggatttgttttattccaggcaaggctgctcacattgaggcctttggttaagtcacaggaaaaagaccaaagtcgttccaagttggcgggtattgttgattcttctgcatgtatttcttcttcctcctccttcttagattcttcctctacctcttcatgttttgcactttctaaaacatcttcaggctcttcaggttcaggttttttttctgtagtgctccctggcaatctttggtcctgatctttaggaagtacatttgctttactacttgactcaaccacagattgttttactgataa

SEQ ID NO: 362 - DNA, 329 bp, Homo sapiens
  I.362 (AA894636)
aatgcatttgttactaaaattataaaatgtcccttaattaggttatagtaatgattgtgtatattagcaaacacctaaatgttttactgattgggtaatgtggggtaaataaaaaaacattcatttcaaatttcttcatttaaaagaacaatgtaaatcatttatctattattctgtcttgcttagaaaacacttaacagaaaggtttcattaagattctaaatttagactttgatgattttgaaatgaattcctggtttcctctattcccctgggagccagttataataatttcaaggacagtcattagcaactctaattcagttgac

SEQ ID NO: 363 - DNA, 359 bp, Homo sapiens
  I.363 (AA953859)
aggcccgcgcccgtcccggcgagcggctctgcaggaaaacggcccgaccagtgcccggcgcctgggctgcgtccgagcccaccttcttccctcgtcgtcgtctcccagactaaatcccggaaagggcaagcgggatgtttgcgcccaccgcgctgatagctgtcctgacacttgcaaaatggtcagtggctcctgctcggccaggctgagtgtgtgcgtgtgtgtgagcaagggagcgagggtgtgcggtgtgcagggggtgcgctgtgtgtgcgcgcgtctccgggaaggtctcgcggcggctggagcgaggactgacagcccgggcggagcagcgcagctccacacgctaaacctct

SEQ ID NO: 364 - DNA, 399 bp, Homo sapiens
  I.364 (AA931465)
ctaaatatagaaataaattttatttacattctaaaatacaatatgtttgtcaattactacactgtgtagcctattaccgattaagccatgactagacatagtaggaaatcagagcttcgtatgtaaacatttagtaaatttgcatctacacactctattttgattagtaagttaattagattttactccagtcatgctcctttggacttctattacttcttctcactagtatcaaagggtttatgatcacattcatcctaaaattttccctatagagaagataacataaattgatttccttatgtttcaaatggacaaaccaacttgataaattatatagttattcaatagtatatacacatgaaatatccaggataagcaggaagtgggttagtaggt

SEQ ID NO: 365 - DNA, 1657 bp, Homo sapiens
  I.365 (U69563)
  misc_feature (455)..(455): n is a, c, g, or t
  misc_feature (978)..(978): n is a, c, g, or t
  misc_feature (1010)..(1010): n is a, c, g, or t
  misc_feature (1054)..(1054): n is a, c, g, or t
gcagggaatctggcttgattggcgtgctgagacgcacctggcgcaaccctcccttctgaatcgaagttcaagtcccgcggacactgcaaccatgaaggagagacgggccccccagccagtcgtggccagatgtaagctcgttctggtcggggacgtgcagtgtgggaagaccgcgatgttgcaagtgttagcgaaggattgctatccagagacctatgtgcccaccgtgttcgaaaattacacagcctgtttggagacagaggaacagagggtggagcttagtctctgggatacctcaggatctccctactacgataatgtccgtccactctgctacagcgactcggatgcagtattactatgttttgacatcagccgtccagagacagtggacagcgcactcaagaagtggaggacagaaatcctagattattgtcccagcacccgcgttttgntcattggctgcaagacagacctgcgaacagacctgagtactctgatggagctgtcccaccagaagcaggcgcccatctcctatgagcagggttgtgcaatagcaaagcagctgggtccagaaatctacctggaaggctcagctttcacctcagaaaagagcatccacagcatctttcggacggcatccatgctgtgtctgaacaagcctagcccactgccccagaagagccctgtccgaagcctctccaaacgactgctccacctccccagtcgctctgaactcatctctcctaccttcaagaaggaaaaggccaaamgctgttccattatgtgaagtggaaattggaggggggagacaaccccctacttcctcccttggggtgcagaggcacggggagagggaggatgagacaatttaggacactggacatgagtttttcagatggccacggtgagggcttggaaggagacaggaatggggcgaggaaggagccaggcccggcatgaggacctgacgctganagagaaccatcataccccaagccaggcactanattttggagggggcgactaccccagtgccccccccgctccagangaaggaaagctgtgggggacggggggcatgctggcctcatgggcttgggggcctacagcagcctcaccttcagcttcatgcctcttccacacagcgtttccatgcaggtcaggggatgggaggggtccctgagcccttcccttcccctctaaggaggcagcaacggcagagtggggaartggagcggcagctcccttgggggcttagcccaggtgcttcgtaactgcaatcggaagtgcaggagctggtcagagccaatgagaaggaaacctcatctttgcatagcccatgcctcatggagaggtgacatcatacattcacatgcttctcacctaagtccccagggtccaagggagaagccccagacccccttctcttgcagagtgtgggggtggtggtgctgcaggggcagggctgggtgggggtcaccagactttttctgcccttagggtagtacagctggcatttgttttatagactcttgtctttggaattggggggagggggggagtgtttcaatctgttatatgttctgtgtttaatgaagaaaacctatttattaatgaaaaatataatacatataaagtaaaaaaaaaaaaaaaa

SEQ ID NO: 366 - DNA, 157 bp, Homo sapiens
  I.366 (AA883471)
aggatgatatctggctaaaaagcgagggagacaactatagtgccaccctcctggagcgtgctgccagctctctttccccagatcacaaaaacatggaaattgaggtgtctgttgcagaatgtaaaagtgttcctggaatcacctctaccccacatcc

SEQ ID NO: 367 - DNA, 458 bp, Homo sapiens
  I.367 (AA187437)
  misc_feature (414)..(414): n is a, c, g, or t
  misc_feature (452)..(452): n is a, c, g, or t
tttttatctttatgtttataaatttatttaatttccaagacttatgtgttcatctcaatccttgacatactcatctgccagacacaaaaaatagtggtctatttaagaggccttaatgaatgacaacatttttgaaatatgctatatgagtacaaatatttccagagcaaagagggaaaactgttgattgggtagacaatcaaattccaagcatttatctgatttacagaagtacatctactttttgtttttcactaaatgaatacaaccacttttaatatatatgtgggtgtggctgtgtgcgtatttcaaaacacacacgcacacacaataaaagaaacatttcatagtggcaaaattttagtgcactgccaaagtgctacaataactgtcatccacagacatccacatgcnaacactactggactagtacactagagccaataaggagngtattt

SEQ ID NO: 368 - DNA, 498 bp, Homo sapiens
  I.368 (AA187449)
  misc_feature (1)..(1): n is a, c, g, or t
  misc_feature (297)..(297): n is a, c, g, or t
  misc_feature (366)..(366): n is a, c, g, or t
  misc_feature (426)..(426): n is a, c, g, or t
  misc_feature (433)..(433): n is a, c, g, or t
  misc_feature (440)..(440): n is a, c, g, or t
  misc_feature (463)..(463): n is a, c, g, or t
  misc_feature (482)..(482): n is a, c, g, or t
ntggactctttggccatgaaaaactccagtccagagcctcaggtttgacacccagcagtaagctaacagtggacacagatgctctgactccttcgagcaccctttgtgaaaacagtgtctcagaactactgacaccaaccaaagcggagtggaacgtacatccgtgactctgacttctttggacaggagggagaaacccagtttggattcccaatgcagcaggaaaccatggttctcagaaagaaacagatcttatcactgtgactggcagctcatttttggtatgaaccaactctnttcattcctcatcatgtggcttacttttattacagtcaattttgaggatattctggactaaatattttnagtgcagtccatttctttttggtttgcaaaaagagcacagccctggactacaagtttggngatttanattctgntccttgagttttggaactgacangttgtgtgaccctgagcangtcggttaacctatct

SEQ ID NO: 369 - DNA, 484 bp, Homo sapiens
  I.369 (AA845015)
tttttttgcatagttgtcactttattatattattttccttctgtgacctttccaagtctgaaacagtcccagggacttcttttggttagttatttgcaatcaccgaattgatccagtcgatgtaattggagacccgcgtgaagacggagggcttgtggtagtagttgcagccgaggcgagacccgaagctgacgatgccgtgcacctgccaccggccgtcagacgcctgacagttcagtggcccgccagagtctccgttgcagctggagatcacgccatcacccccagcacagatcatactggttttcacgctgctgccccaccaggcagagctggagcaggtggcatagtccacaaccagcaaccggccctgctgcaggacatcaggaacagccccgttggtctgcagccttccccagcccgtgacgtagcaggggtagttgttgggtagaatggtgccggcagaggggaggcaggccagctg

SEQ ID NO: 370 - DNA, 450 bp, Homo sapiens
  I.370 (AA844831)
tttttttttgcttcaaaccaaagagattttaatggctcttgtttcttccccagggccctaataggggtggtctcgcacatgctccatgattgccttcaagccaagccaggtctcctcggctgtgggcaggatctgacgggctggcaagaggaagccgtagcgccctgtgtctctcagttcaaaggcaaatgagtacttgatgccataatcataggaccagtcaatgcttcctccactggcttggtagatgacagagcagattggtcccactttgtacttggtgccatgcaggcttctcagagattgggcagccttttgggccacttcactcagctcatcaaagtcatctaacttggtacatttgtacccataggggaacatcagcagctgggaatagctgtggagggtaatgaaggccttgacttttccatgactcttgatgaagtccac

SEQ ID NO: 371 - DNA, 257 bp, Homo sapiens
  I.371 (AA807376)
ttgacggactctttttaatctatacagtgatccttaatctttggggaaggggacaggtcacacacagactactttggagaatacatgaaagctataggtgacttcatcccacctccaaaatacatgcacatatgtctcaactttcacatacagtttcggggggttcacaggtttttaaaaaatccagtaaagaactcatgcacttgtgcttttccttgccactgtcttttcagtaaagagaacatccagccagcccc

SEQ ID NO: 372 - DNA, 693 bp, Homo sapiens
  I.372 (AA628925)
cggctttcctcatccaactcataccacatcctcagcatctcctgagtcccagggctgcggcattgcggttttcactctcaagtttcagggctttcacagcttcctgaattttctgggaataactcaagaaggcgcctcttctcagcagggtgttggggtgcttgctttgccattttttgatagctctgaagtggtggagagcttttttgggatctgctctggataaaacttcatggagatgctgtgatttcattatcacctcgtagttgctggccaggaaggggaactgcttgggctgcaggaactgtgtcttggggatgtccaggccatcctccccatacaggaactgcaccacactgccgtcactgtcacggaccgtgagatcatactgcacgaccagcccctctaggtgcttgatgatgcacctttggagatagcctgagcgactggttttcacagcagtgtccaccaggccctctcgtcctgccatgcagtggaagaagaactcaggaggtttgatgccggtaaggaacctgccagtgacaaagccaccagccctgggggtgaactcataaggctcaaagcagggaagtgaactgccagacgccatcagcgggggtctccgacttacagtttcaatctggccagcaggcacgagattcgcatcgtgttcaaagttgaaccttggcatcc

SEQ ID NO: 373 - DNA, 160 bp, Homo sapiens
  I.373 (AA628699)
tttaataatcacggcatctttaattggcaaactcagggccaagatctatctggctgtcagtctgggctgagaactggtgttgcaagctgggctttccccaggctgtgttgagggttaggggaggggactgagatgtacactggaaattaaaacctggtac

SEQ ID NO: 374 - DNA, 421 bp, Homo sapiens
  I.374 (AA609857)
ttttttttttttattttacaaatacacttttattttttggaatacattttacaaataaatattaaatgaaatttacacacataacagtaaatctcaaatacaggcataaaattattctaatataatttacaaacctgtgcaaaaatcttaaccagtcgtgagttgtgtgagggtcgaatttgcaaatattctctccaccactgcttagcatatacaagaaataatcgctctttctctgcagttttctgacgttccaaagcaagctgtgtgttcactacttcttgagataacgtttgattgagtggtggatacatttcaagttttatatttaaaattcccacagaaacttttgattctgtgcccataagttccacagtcagactggtcactccattttctgagcccaaaaccgatcgccatt

SEQ ID NO: 375 - DNA, 402 bp, Homo sapiens
  I.375 (AA609149)
ttttttgtgagcccccaaacagcaaacactttaatcaacaactcttacctgggcacaaaagactgagtacagggtttggtttaaaggggattagacatcagtgactcaacacagacaacaaaaagtgttcatttctttaaggatgcttcaattgtctcagtgagtgagctcttcatgattctccttaagctttcattaatttccccttaaaaatatctctgttcatgcagtgagtatttcttcagagggtagcttggtctttcaatgatataatttacttcagaggtagaatcttccttgttttggtgcagctgtgctctgtgggatgtcagaagactgcataccctctcatggatattcttccatgtggactgagaaccaggatggaacctttctctgaga

SEQ ID NO: 376 - DNA, 536 bp, Homo sapiens
  I.376 (AA609053)
ttttccaatttgatttttaatgtaattaatagtgatttaattttcaaaggagcaaataattacaaacaagagaaaacattgctgagatggtgcctggttgcttctattcaggccattgctgaactatatagaaaaaaagtatattcatggtgtcttcattattatgaaaatcacagtaatatgactcatcaggaaatcacaataattttatgacagaaacaatatatttagaacgaatctgtcagtatttgactctcttttgagggaaaaataaatgaaaaccacgttctctggaaagaaataagacaagaaatgcccacagttgcattctgctgttgggaatacatctccaaaattcaaggttcaaaggttatcacatttaattttcaacacttatcaccttcttcttctctcaatttatggagatagatttctacgttcattattcgggattattagaaatttccttcagtttgaacaatgcgtaacaagtattctgtgacatgggtgcaaaaagttgtcattttcaatcaagt

SEQ ID NO: 377 - DNA, 470 bp, Homo sapiens
  I.377 (AA779604)
actgttagagaaattttttattggtaaaaaaaatgacttagtcaactatttttactatgattattacattactttctattacatttttcaaatacaagttatcgttttgaaagaagtatctggcaaagcaaatccaaacctaacaggtaactaatttcttaaaaactattctctctgaaatcatcatttgcaaacccaataattgacctgcttacttctgtccagccgcggtcttgggttatatcgatacccaacctggctccaaaagacaggcacagagcctcgtgtttgaacaaatgacagggtatgattatgaacatgaatcaactgctcagtctccacataattggcaacatttccatttttatccactcctcttcgtttatagcgcattcctgctctgtgcctacttcggcgtgaaatgagagccactagaaatcgtgggtgaatatcatctacacaggtggact

SEQ ID NO: 378 - DNA, 414 bp, Homo sapiens
  I.378 (AA749151)
tttttttttgagagagagtcttactctcttgcccaggctggcgtgcagtggcaaatctcagctcactgcaacctctgccttccgggttcaagcgattctcctgcctcagcctcccgagtagccgggaccacgagcgtgcaccatcacacctggctgttgtattcttagtagagatggggtttcaccatgttggccaggctagtctcgaactcctgacctcaagtgatccacctgccttggcctcccaaagttctgggattacagtcgtgagccaccacgcccggcctggaattttaaattctatcaacagattcacataggctttttccagtacattaaagaaaaagactctcatataacagaactaagttgcatgttacctttgaggagtgaggttaaatgaattaaagcatc

SEQ ID NO: 379 - DNA, 422 bp, Homo sapiens
  I.379 (AA746488)
ttttttttttttttttttttttttttaactgctcagaaatctcctctccagctttatttacattgtaataaggtctcttacagaaatttaaaaaatatgattccatagaactatgatatcacatctggcaaaatacagtgaagaatagcatttctcaaccttgtcttcagatgcaactttgcaaagtctgccattgaaaatctaggactaagactatgaattatactttacttattgagaatttcttcttcctatacctccaagatagatttgggcaattattcaaggcaattattattatgttttctaaaataaagtataagaagtaattttgggaatgaagccttttcctgaaaatttaaattcatactcatatactggtattgttagccagggcacagaacacagtaacctatgtttgc

SEQ ID NO: 380 - DNA, 340 bp, Homo sapiens
  I.380 (AA731532)
ttttttttttaaaggcagagtttattatgagtttatactaatattttaagttcaaatttagttttggagagttggtacttaagtttttaattttatatttgtgtctcttttctctaatgttgcaaatctttgtcactaatgacattaacataattatcatttgcttttggaagcgcacgctagagcttgcatctccagctcttctgatgtcctcttttaaattcctctctctgtaaaccattccagatgggttctttaatctgcaactgaatcctgacagtgtaagctgtgcaggcagaagtgaaggggcttttcattgtttgcacagtgcctgtgtagc

SEQ ID NO: 381 - DNA, 364 bp, Homo sapiens
  I.381 (AA721466)
tttttttttctcaaaagctttaatgttgacctactagcaggaaaatcaaaggatattgctctacacttgaacccacgcctgaatattaaagcatttgtaagaaattcttttcttcaggagtcctggggagaagaagagagaaatattacctctttcccatttagtcctgggatgtactttgaggtgaggttacagtttttgaaaatgggacagcaataagaatcctgggagcaggggtgggataagtggtccatttaaatcaagtcctaactcagtatgtggaagttgtgtatgtattttgtttacttggagattgtaatttgcccctttttataacgtgggcaatcagtataaatggcaaagc

SEQ ID NO: 382 - DNA, 281 bp, Homo sapiens
  I.382 (AA733100)
aactcataccttaagtaataaaaataaaggccaagaaaaaaaatcaatttaagacaaaatttacagtttatattcttaattccccattcaataaaatatcgattgccaatttaataaaagtaaatgaactgtatatatgcaatctgttagcactgaaaatctgaaatatatatttttaaaaatcactctttctgacagtatttaaaatattgcatctctggtggcaaacctgaaaacaatcaagcatcttattaccctagttttcatacctaccccatacc

SEQ ID NO: 383 - DNA, 387 bp, Homo sapiens
  I.383 (AA705423)
tcacagctgaattacatttactgtacaaagaacggttcggagagaaccaggaatggcggagtgtctaacagcagcgcggggtagtgttgatgccgtgaatgcaggaccatccaggtcctcaaagtctgtgaggtttgttcataatcccaaacaagggccctgctggcagcaacaggacaggtcgggccaggacagggaagctggagcaggaggccagtgtctttgggggctgtggcagggcgcctgcctggggttcccttactcatctggtagttcatgcaggccacggccctcatctcccaggaacgggccatggggcgagtccactggtgcccagtaacaccctccgtgggaccaccttgggaagcatgtgccgcggagtccacc

SEQ ID NO: 384 - DNA, 446 bp, Homo sapiens
  I.384 (AA678072)
accatttagctctggttcaaaagataaataataatctataatccagaaatgtatacaaacttcttatcacattttcccttattctgtaaaaaaggaaaataggtttaatgtttaaaagaagcattagtgtgatattattaccgaaaaacaattttgctattatcacagctcaaaaagtacccacaggaatctttcaggaaacaggttactgtacatttcacaaaacgtgaaattaggtgatcataaatacacaagaaaaacaaaacattttttgtccttagttatattgatccctcccagcctgaaattcagatgaagactaaacaacttctgcagatcacatctatctattttagcaacttaatggaaatgaaaagcaatcttcattttaaaataagtatcataacaccatttttgaaacgcaaatgaaactctcatcatataag

SEQ ID NO: 385 - DNA, 445 bp, Homo sapiens
  I.385 (AA682916)
gctccaattgtgggtccatggaaaagttttctgcttgtccattctcatcattttcagctacagatttgtcaggatagaccccagctcttagtagagatgccttccagctgtcgacatcctcctgggaatcacatgccagctcaaggaagcgatagtctttgtatacattcctttgctctgtattaaagagtgcaaagatgtgcttgctagacataaagctcttttccacatcccgaactttcaggttgtccaagggaagcatgtacttcttttctttttcctcatcatctttataccaggacaagctttccgcagtaaggacgaaccagtatcccttcgagccgcctttcatgatgccaatgttgctgatggtgagccaccccttgcgaatcacagaacttagctcgtacaatttgccttgaaggcggaagattggttccctgat

SEQ ID NO: 386 - DNA, 125 bp, Homo sapiens
  I.386 (AA652703)
gagattacaggcatgtgccaccatgcccagctaatttttgtattttcagtagagatggggtttcaccacgttggccaggctggtctcaaactcctgacctcaactgatccgcccacttcagcctc

SEQ ID NO: 387 - DNA, 394 bp, Homo sapiens
  I.387 (AA496095)
cagtaattaaaccccgtcctcaagtagtaaaacaaaaaaaacagcgaccaaaatctattcacagagatcatattgaatcccccaaaacaccaataaagggtcctccagtctctagcctttctttggcatcgctgaacacgggtgataacgagagtgtacattcaggcaagaggacgccaagatcagagtctgtagaaggcttcttatctccaagtcgttgtggcagtcgaaatggagaaaaagactgggagaatgcatcaacaacttcttcagtggcttctggaacagaatatacaggaccaaagctctacaaagaacccagtgcaaaatccaataagcacataatacaaaatgctttagctcattgctgtttggctggaaaagtaaatgaagg

SEQ ID NO: 388 - DNA, 410 bp, Homo sapiens
  I.388 (AA478384)
tcatttttagggctttttatgtggccttcaaagcacgttgcaaacaaatccctttcactcctcagaggaggagccattaggaaggtagggggcgacaggcacagcctacagcctctcctcaggaggacagagggggtcatcgcatttgagccccctgcagtcatctcgggggctcctgagggtccaggtccacatgttcgagggtctgcagcacatccacggcgctgtaggacttccaggcctgcatgttacagctcttcaggatggctcccagctgcctgccagggcctacttcgaaagtttgggggaaccccctgccctttttcctttcgtatatggcatgcatcgtctgctcccacttcactggggagaccagctgctgggccagcacttgtggatgtgcccgggat

SEQ ID NO: 389 - DNA, 424 bp, Homo sapiens
  I.389 (AA478379)
ccagggtgggaccagccgtggggcagaggactgggccgactgtgatggggtgtcagagatgggacagggacagtgggcaggagtgtgggtgcatgggccgtcggcagggtcccctcaccttccccctggagccctttctccctgagatcccctccctccagggcctccccctgccacacgctggagagggctgaggcctgtgggtgtgtgtccacagtcttctggaagtactactatgggcattacttggacgactatcacacaaaaaggacttcatcccttgtcagcctgtcaggcctcggcgccacttcaacgccagcctccacactgccctcaacgccagcttctgcccagggtgggtgggactgagcaggatggattttcttttgataaaagagtcgatgcctgaaagagaaaccatttc

SEQ ID NO: 390 - DNA, 351 bp, Homo sapiens
  I.390 (AA478318)
aggagcctagaaacaggagctttattctctaatgtgcgtccagcaagttccttacacaatcaaggaaatggtttctctttcaggcatcgactcttttatcaaaagaaaatccatcctgctcagtcccacccaccctgggcagaagctggcgttgagggcagtgtggaggctggcgttgaggctggcgccgaggcctgacaggctgacaagggatgaagtcctttttgtgtgatagtcgtccaagtaatgcccatagtagtacttccagaagactgtggacacacacccacaggcctcagccctctccagcgtgtggcagggggaggccctggagggaggggatctcaggga

SEQ ID NO: 391 - DNA, 289 bp, Homo sapiens
  I.391 (AA477921)
cctgctcctgctgtgtgtcgggcttattattgtgaccatcctgctgctccagagtgcctttccaggtttcctttagcttccctgcttcctgggaatcaggagcctggacactgccatctctagagcagagtggaggcctggactccctttgctcactccattcgggtccacagcgtgaggttgcctctgacaagatgaatgggcactgcctgcccttctagtgaaaaggcttggctatggccctgtgtgactccaggtcccaggaaccttgccttcgtcatctgtggat

SEQ ID NO: 392 - DNA, 412 bp, Homo sapiens
  I.392 (AA477887)
gggacagccagctgaaggtggccctgctgcggatgaagatcagcagcctggaggccagtgggtccccggagccagggcctgagctgctggcggaggagctacagcatcgactgcacgttgaggcagctgtggctgagggcgccaagaacgtggtgaaactgcttagtagccggagaacacaggaccgcaaggcactggctgaggcccaggcccagctacaggagtcctctcagaaactggacctcctgcgcctggccttggagcagctgctggagcaactgcctcctgcccaccctttgcgcacagagtgacccgagagttgcgggctgcggtgcctggatacccccagccttcagggacacctgtgaagcccaccgccctaacagggacactgcaggtccgcctcctgggc

SEQ ID NO: 393 - DNA, 439 bp, Homo sapiens
  I.393 (AA477776)
tgtcagcaactgttcacagcccaggaggcgtacctgcagtgtccctgttagggcggtgggcttcacaggtgtccctgaaggctgggggtatccaggcaccgcagcccgcaactctcgggtcactctgctgcgcaaagggtgggcaggaggcagttgctccagcagctgctccaaggccaggcgcaggaggtccagtttctgagaggactcctgtagctgggcctgggctcagccagtgccttgcggtcctgtgttctccggctactaagcagtttcaccacgttcttggcgccctcagccacagctgcctcaacgtgcagtcgatgctgtagctcctccgccagcagctcaggccctggctccggggacccactggcctccaggctgctgatcttcatccgcagcagggccaccttcagctggctgtccccctcgtgcc

SEQ ID NO: 394 - DNA, 503 bp, Homo sapiens
  I.394 (AA477173)
ctgtaacttacgtgtactttaccaacgagctgaagcagatgcaggacaagtactccaaaagtggcattgcttgtttcttaaaagaagatgacagttattgggaccccaatgacgaagagagtatgaacagcccctgctggcaagtcaagtggcaactccgtcagctcgttagaaagatgattttgagaacctctgaggaaaccatttctacagttcaagaaaagcgacaaaatatttctcccctagtgagagaaagaggtcctcagagagtagcagctcacataactgggacccagtgaagaagcaacacattgtcttctccaaactccaagaatgaaaaggctcttggccgcaaaataaactcctgggaatcatcaaggagtgggcattcattcctgagcaacttggacttgaggaatggggaacctgggctccctggaaaggggttttctacctccacttcccaaaatgctttctggttttccgggggggtcaaagaaaaa

SEQ ID NO: 395 - DNA, 380 bp, Homo sapiens
  I.395 (AA477156)
gttcccaatctgaagtgggagctggcgagaagtaggggagggcggtgctccgcgcggtggcgttgctatcgcttcgcagaacctactcaggcagccagctgagaagagttgagggaaagtgctgctgctgggtctgcagacgcgatggataacgtgcagccgaaaataaaacatcgccccttctgcttcagtgtgaaaggccacgtgaagatgctgcggctggatattatcaactcactggtaacaacagtattcatgctcatcgtatctgtgttggcactgataccagaaaccacaacattgacagttggtggaggggtgtttgcacttgtgacagcagtatgctgtcttgccgacggggcccttatttaccggaagct

SEQ ID NO: 396 - DNA, 567 bp, Homo sapiens
  I.396 (AA479812)
  misc_feature (114)..(114): n is a, c, g, or t
  misc_feature (117)..(117): n is a, c, g, or t
  misc_feature (121)..(121): n is a, c, g, or t
  misc_feature (122)..(122): n is a, c, g, or t
  misc_feature (123)..(123): n is a, c, g, or t
  misc_feature (124)..(124): n is a, c, g, or t
  misc_feature (125)..(125): n is a, c, g, or t
  misc_feature (127)..(127): n is a, c, g, or t
  misc_feature (128)..(128): n is a, c, g, or t
  misc_feature (129)..(129): n is a, c, g, or t
  misc_feature (130)..(130): n is a, c, g, or t
  misc_feature (131)..(131): n is a, c, g, or t
  misc_feature (132)..(132): n is a, c, g, or t
  misc_feature (137)..(137): n is a, c, g, or t
agcatcggcctcatgggcacagaaaaatcccctgctcctcacgctccctccacctccagtccagctgacgacttgggacagacctacaacccgtggcggaaaaggagccccacnganaggnnnnnannnnnnaaggnagggacgggggggaagaggcgccccctctcggggagtagaagaagcgggggagagaggaaaacagagggggctcgtccagatcatgatgtgccagtttctgagacatctttttaaggctcttactgcagctcccctccccaccctcctcttctttgcaaaacagacccaagcagggcaggctcagaccactcgcttctttcagatctttcttgcaattatgataacatgagatttgctgttgtgcttttagagaaaagtctggactcagccacaaactctaataagacctgtacatctgagaacctttcccgttactgcgttttcaccacctgtcttccccatgctttatttatctgtatgaacacagatttgacattacagctaaggaaataatttgagttgattcagaaatcctggcatgtgacaatt

SEQ ID NO: 397 - DNA, 386 bp, Homo sapiens
  I.397 (AA479784)
aaaccaagtctcgctctgtcgccaggctggagtgtagtggcatgatctcaccacactgcaacctctgcctcccgggttcaaacgattctcctgcctcagcctctcaagtagctgggactacaggcatgtgccaacacacccagctaatttttgcactttcagtagagatggggtttcactatgttggtcactatggtcttgatctcttgatctcgtgatctacccaccttgggttcccaaaatgttgggattacaggtgtgagccactgcaccaggcaaactgcgatcttttagtggtgcctcttctctcttttgacttaaggatgttgtcccttaaggaaacctggaggctactactgtgatacactacttgagagatggattgt

SEQ ID NO: 398 - DNA, 499 bp, Homo sapiens
  I.398 (AA479691)
tgaaaaaagcatcatttatttcaaagtacaacacaaagttgtatttttaagaaatacacattcaatcttgtatctcaagacttggctatgtgcatttcagttcatctttaaaataagttcaggtatacaaatgttacatacctcaagtacaaacagcacagaaaatgcatatggtctcaactgaatgtttttacattcattcaccgttcttaagttgacttacatttctgtaatctgcttttaaaccaagacagccttactttaaaaaaatactctattttcagcacaaagtcctcatacagttttaaaattagatcttggcgcataatattgagaaattattaaaaaccaaacttggtaatttaacaaaattgtcacatgccaggatttctgaatcaactcaaattatttccttagctgtaatgtcaaatctgtgttcatacagataaataaagcatggggaagacaggtggtgaaaacgcagtaacgggaaaggttc

SEQ ID NO: 399 - DNA, 149 bp, Homo sapiens
  I.399 (AA479657)
ggaagaatacagaaatatgtttaatacttagtatcaaactaaaaagtaatataaaattacaaaacttcttttttttcatgcacaggctttttctggtaaggaccgctgggattgaacagaagcttccggtaaataagggccccgtcgga

SEQ ID NO: 400 - DNA, 312 bp, Homo sapiens
  I.400 (AA478985)
tcactctttccttgtttattaaatatcaacttttcctgcctaatgggctgaggttcattttcccattcctcaaggtaagggtagactacctaggaacttattgcatctttaggccagctggcttagtgctacccatctgaacccccagattactacccaagtcttccttttgccccttcctgccctaacagcaagtaccaggccagtcccttccccagcaaatgccaggggcttcatgtgaagaggaactggccacaaggatgaggggaggaggagaaactgtttctgcaggaaggacagcagtgcctccag

SEQ ID NO: 401 - DNA, 480 bp, Homo sapiens
  I.401 (AA470134)
ttttttttcagatttcccagcaaggcatctttacttcagaacggtgctacttgcgccgtgttaatcgcaagagcaccccaaacaaaggagagaagggctttttaaccctaacgcagttcctgtttctgtgtcctttccccattgactggggatggactgcacaatctgagctgatcccgactggctaaggtttaaactttcccaaacagggtagactggcgaaaaagaagaaaaacggggagaagtttatgaccaggaagttgagtctttgaagagcttagctgtcccaacaatttcctctcttctatttgatacttcttcctctgcaaaaaattttaacaggatttggcttcgttgttcttcttgattatccaggagcaagagcttgtccaagtatggagggagagaagagaggaaggctttagtgagggctgtttctatgagcctttgagttaacccacgaatacaaggtatgatgcg

SEQ ID NO: 402 - DNA, 397 bp, Homo sapiens
  I.402 (AA435789)
  misc_feature (199)..(199): n is a, c, g, or t
cataaataataagttgttcagctttattcagttgtaattgacaaaaatataaagttttgaagcttgcaaggaccttagagactgatgactcttgtttttcgattcgataactgaggtatagacattgaaagtagtgtgacagaagcccaggcaaaatactgggataacggagaacaaggatacattcattccgataggnatgggtggtatgaaaccatggaaggcttcactgaggaggtgactcttgatggtgtccattttgaggagcctttccaggaaaaatgctcttccagtgtagaatggaactcaaccagtgagaatttaattaacacaaattgtctggaagtgtctgaaatgacttcataactcttcagtccagaattcctcctatggtatt

SEQ ID NO: 403 - DNA, 418 bp, Homo sapiens
  I.403 (AA435635)
ttttttttttttttttcgcacagtacccacagctttattttgcttcacagcagtacctgaccttgtatgtttacatttccttctccttctgcctgaccagaataaagctccataggggtgagaagtgtgcttgttttttcatgttgtattcactgtcgtatcgtcagcatttgcctgtagcaccaaggatacatatcttcattgctgtgtgcttgagagcagtgggggttgtttttctacttgatgcagggcctctctgtctccactgtcaaactgggagctccctgaggtcagggtttgtgttttcctttcagattgagaattccttaaggattgaggctatgaatctcccatagagtagaagcccacacatgcttcccatgccagaatggggtggaactggaacgacaagatgcag

SEQ ID NO: 404 - DNA, 383 bp, Homo sapiens
  I.404 (AA430604)
caagtcattatattcattttaaggcacagaatgtataatattgtgagaaaggaggcaaagaagaaggatttggggtcgctgaaccctttaatatgagttctgttaagtttggtaccaagaaaaattaaactctgtggcgtgtgcagtcttgtaaactcttacaatgattgaaatgtgctattttgggatgaaaatgtgaggtttataaattttaaaagctcaaaaaaggaatctagaaaatgactcctgtgcctgttgcatggaggagatggcacctttgactgttggggggtgtctgcctacccctaagtgtctacatcagccccaagttttagtgcgctgtgacggtgtcattgttattttaacactgggagacgttatat

SEQ ID NO: 405 - DNA, 463 bp, Homo sapiens
  I.405 (AA430603)
cgggtgacacaggccacccttccttgccttcagtaactcggtgggcccaggttctgctcttccctggggaccctaacctcgcctccagctgacctgccctgtcctctccagctgtccccacaagcagagccctgaggggtggggaccagctggccacatggtgctgcttttcaggttaggggagaggtggccctgagggacagcccagctctgagtctcagtcgctgatcactgccagggaggctcaggctgccatggctccaggctccctcccctgcctaggggcaaagtccatcgggtcctgggcctcagcttcccttcccacattcctccggccccaggagcaaccccttgaggctaggtctgaccccaggtgtccctctggaaggggctggctggtgcctatttccagccaccccagcagctagggaggcaaagcaggctgcagtcagtccctcaagcc

SEQ ID NO: 406 - DNA, 447 bp, Homo sapiens
  I.406 (AA430519)
ggtagagacgggatttcactatgttggccaggctggtctcaaactcctgacctcatgatctgcctaccttggcctctcaaagtgctgggattacaggcgtgacgaccatgcccggccttcttcatttctttctaatgaatattatacaaggaacgtttttgttttcattctagttttccttaatgaatcttagtgggaaattcatgtttctgggaaattttgacaacataaagacttacatatctctggttggggtatgcccagcaccatctggccattaagactgtactaaagtatgggcctcattactctcgatcttgtcagaccacttggctattcgggaattatttcatcaagctgaagatattccctaaaagatcccagtgaagcctgttccctacaattgacaatgttttatattttaaaaatacataaattaataacgtt

SEQ ID NO: 407 - DNA, 461 bp, Homo sapiens
  I.407 (AA430518)
acagatacaaatgtttattctacataaaaatttcacaaaatgggcagctggttgtaccaagacctttggtgaaggggttggggggaatcgctgttcaagaaggcaacacggacagtggtcacagtcactgggcaggagtaaagccgagggagggtggggcacacggacacggccccatcccctgctgcatgcactcgcatcagtctccctgcctgtccacaagggagagggtcctggggcgggggcacatttcccatgagaagccccaaggtggtgaggaggaggaggtagccctccccggctggctgccgaatactgcatctgggacacgtgacacccacgtggcacatcgatgggaggatggcaagggcaggatgagactgcaggcctgaaatgacatctgacttcccagagcgcaagacaacaggagccatcatcccaaacatgcaacgctggcttga

SEQ ID NO: 408 - DNA, 477 bp, Homo sapiens
  I.408 (AA421705)
tttgtttttctttttttctaaaaagaacaactgaaaaaaaacctttcaacaacatgctaaatgattctcaccctttgatatgattatactatggtcggaatgggtgctaagggctcggaatagagctgcagattataaaattcattgaaaaagggatgttcattgtggctttttgtcttggttaagtgcctagggataggggaggggtaaataaaatgctgctcgataacggattttcttttacataccagtccgttcccaaaaggcccccatattgcaatggttctatcaaaggttaaaataaagacaagaaaaataaacatgttttcaaataacaaagagttgacactttttcccccttaaataaatcagcataagttttccacataatgtaacaatagtaaaaatgcaccttgcaaaatccaaaattactcactgaaaatgtaatagaatatatatttatatatatatatagat

SEQ ID NO: 409 - DNA, 535 bp, Homo sapiens
  I.409 (AA421671)
aaatgattccatacacctttcccaatcggccttacttctcactaatttgtaggaaaaagcaagttcgtctgttgtgcgaatgactgaatgggacagagttgatttttttttttttcctttgtgcttagttaggaaggcagtaggatgtggcctgcatgtactgtatattacagatatttgtcatgctgggatttccaactcgaatctgtgtgaaactttcattccttcagatttggcttgacaaaggcaggaggtacaaaagaagggctggtattgttctcacactggtctgctgtcgttctcagttctcgataggtcagagcagaggtggaaaaacagcatgtacggattttcagttacttaatcaaaactcaaatgtgagtgtttttatctttttacctttcatacactagccttggcctctttcctcagccttaagaaccatctgccaaaaattactgatcctcgcatgatggcagccatagtgcatagctactaaaatcagtgaccttgaacatatcttagatggggagcc

SEQ ID NO: 410 - DNA, 345 bp, Homo sapiens
  I.410 (AA421431)
  misc_feature (114)..(114): n is a, c, g, or t
cctagctgctgctcacgtgtgccataagaaggtgatgaaggagcgctacgtggaggtggtcccctgttccacagaggagatgagccgagtgctgatggggggcacttggcgcanggtggcactgtcccctccaccctgcaagctgccctgcctctcaccacctacctacaccaccttccaagccaccccaacgctcattcccacggagacggcagctctatacccctcttcagcactgctcccagctgccagggtgcctgctgcccccacccctgttgcctactatccagggccagccactcaactctacctgaactacacagcctactacccaagccccccagt

SEQ ID NO: 411 - DNA, 508 bp, Homo sapiens
  I.411 (AA421326)
ttcagttctgtaccatttaatgcgtgcaaaggacattccatggtgtctgctgggttcagggcaactggctttcccaaggcatacaagaaaagttggcagaaagtcctcccctttaaaattcaagcctgaaggttttgtgtgggggcctactgccccctaatgtcttctggtgatactgcagcacagtccatcaaaatagtttgtggttttgccatctgttactccttatgcccacctggagaggggctagcatctttaggtgggaccacccctggcacaacatggtctctgaggtccagatactctgagggtaggggctggctctctctgcctccctatcccctacaagagggacagggagaggtagaacattgggatctttactcagaggctcagatggacccttgattctcccaggagtcatacattgaaggtaccagagcttccattttataaaagaaagcaagcctgccgtggacctgtcagccccacgatatctgtcggcatg

SEQ ID NO: 412 - DNA, 451 bp, Homo sapiens
  I.412 (AA421067)
gttatgaaagttacagggaaagtatgacaaaaaagattaacatgcaattataagaccaggctaatttccatgccttctcagaggtttagcatccttaattgcctgggatcccaggggcccccgtggctccactgtgcgttacaaagacctgattgcctctcctaagagtcataatctggatacagagctgactgcttggcatttccccctgcctcagagtcctgtgtgccggtcataactctactggtttttctttcagggccatggctcccctgctgcccgggaccagtttttacgtcagatggaacagattgtggaaggaattaagcaaagtagaatgaagatggaaaagaaaaagcaagagaacaaaatgagaagagaccagttgaacgaccagtacttggagctgttagaaaagcagaggctatactttaagactgtgaaagagttc

SEQ ID NO: 413 - DNA, 362 bp, Homo sapiens
  I.413 (AA420987)
tttgcaggggaaggtataatttttattgacgtgtcctcagcacaaggtctgttttcaattttctgagaaatcaacttgagtaacgtataaaaattaaaacaacactgaactttcgttccagttgctgtcaccaccaagcctgctggctggcacctggaggagctgggaacaaaaggtaccatggcaggtgaaaggcccaagtgaccaacactacatgggctgatcatttcagctaaatgccttctgtttactgaaaaacatcttggatagcccagttctgcggtcaagtgtgctgtatctgcctccctgggccacctgctgggtacttgtgcagtaggaactgtgttttacacgtctctgaa

SEQ ID NO: 414 - DNA, 384 bp, Homo sapiens
  I.414 (AA416720)
tttaaccctgtgtgtggcagtgacatgtccacttatgccaatgaatgtactgtgtgcatgaaaatgagggaaggtggtcataatattaaaatcattcgaaatggaccctgctgatggagcagtttacagaaaagaagatggagagaccaccttcactggcagactagataaattgcatttccccttttctcttttcccggggttccttaaaatgagattggtaacacacaatttccgagaacaaggatggaagacaggcaagtggaattaaggattatttaaaggaaaaaaggatccttggttcctggcttttgcccctggagttaaacctactggccaagttgactgggcaatgccttaattagttggaattaaatccgcatt

SEQ ID NO: 415 - DNA, 364 bp, Homo sapiens
  I.415 (AA416641)
tttcaatgctgattttatttcaactaaataaagcaatgcacaagtcacctgggcattaagcttaactccaggagcaaaagccaagaaacaaggattctttttttctttaaattatccatcactacacatggctgtcttccatacctgctctcataaaatgtgtgttaacaaatctcatgtaaagaaacacaggaaaagagaaaaaggggaaatgcaatttatctagtctgccagtgaaggtggtctctccatcttcttttctgtaaactgctccatcagcagggtccatttcgaatgattttaatattatgaccaccttccctgattttcatgcacagagtacattcattggcataagtggaca

SEQ ID NO: 416 - DNA, 453 bp, Homo sapiens
  I.416 (AA417130)
gtcgcatttagccgcacagcagcctggaacctgaagttttcggccgctgagcgttctgggtgattgcgtagtgcgagggccaacgaaaccttctgggaagtgtagtccagcaagccgctcacttttcgtgaggcgtcacatcctgctgcttcaccctctggtgcacgggaggaccaactatttcagtcgaaggtgctcagagtaatgctcatgaacacttgtggaccagagatgagctgccttcccaaaacgtagaataatgactccaaagatatccacatcctaatccctgggacctatgaatatgttaccttacatggtaaaagggattttgcagatgtgagtaaatgaagactcttgatatgaggagattaccttggattatccatgtggacccgaggatatctatgagggaaagagggatgcaggagagtcagagtcggaaaaaggaat

SEQ ID NO: 417 - DNA, 392 bp, Homo sapiens
  I.417 (AA417044)
tttggcttaaaacaacactaatttattatcttacagttctggaggtcagaggtcccaaatgggtcttactgggctaaagtcaaggtctgtgtttcttctgcaggttctaggggagaattaatttctttgccctttccagtttttacaaaccacttgcagtccatcttcaaagccaggatcttcacatcactctgacctctgctttccttgaacattcctttttccgactctgactctcctgcatccctctttccctcatagatatcctcgggtccacatggataatccaaggtaatctcctcatatcaagagtcttcatttactcacatctgcaaaatcccttttaccatgtaaggtaacatattcataggtcccagggattaggatgtgga

SEQ ID NO: 418 - DNA, 453 bp, Homo sapiens
  I.418 (AA406094)
ttcaacacgaataaaaaccctttattttgctgaataaagtttatataattatgttacgtttcttagtcacattttataacattatttcaatgacaaatcttaaagcctattgctagtctttaataaaatctgcaggcttccagaacctaatgtgaaaataaactaaatctgataattaaaacatctagctacagatctttttacatgctgttgaaagtctaggcccatgagagtacattctcttgaatggataaaagacttctacagtttgccaaatttaattttcatgcaaacatgcttacctccagtatttttttcttctgaccttcatttacttttccagccaaacagcaatgagctaaagcattttgtattatgtgcttattggattttgcactgggttctttgtagagctttggtcctgtatattctgttccagaagccactgaagaa

SEQ ID NO: 419 - DNA, 417 bp, Homo sapiens
  I.419 (AA405894)
  misc_feature (307)..(307): n is a, c, g, or t
ttctccctcacttatttttcagctgtactgcttctataaagaaaaatttccccttctactatttggttacctagtgctgcatttatatagaaaaggcgggataaatattcttgctcttatcagttttaatagtaatgtattccaccatctagcaaccttcattgtaaccaattagcttttccccattcttgtttttcgagagtgggcctcattcttttgtccaagctgagtgcaatcatggctcactgcaatctcgacttcctgggctcaagcaattctcctgcctcagcctccaagtagctggganacaggcttgaccaccatgcccggctaatttttgattatttgtaatacaggattcattatgttgcccaggctgttttttagtccattcttttttttttttttttttttttt

SEQ ID NO: 420 - DNA, 415 bp, Homo sapiens
  I.420 (AA405788)
ttatgctggagattgtaatggttagaaatgtacaaattaatcctagaatgacttgtcttaccatatagcaaagaagtcactaaggattaattgatcaaagatgagacaatttgagcatcaataagaaaaataactacaatggactgaaacacataccttttaaatccacagctcattaagaatgggactaaaaaggccaggcgtggtggctcacgcatgtaatgccagcactttgggagggtgaggcaggtggatcacctgaggtcgggagctcgagaccagcctgaccaacatggcgaaaccccatctctactaaaaatacaaaattggccgggcatgttggcacatgcctgtaatctcagctactcaggaggctgaggcaggagaatcgcttgaacctgggaggcagaggttg

SEQ ID NO: 421 - DNA, 508 bp, Homo sapiens
  I.421 (AA402824)
cggaccagctcgaccatctcaatgtcaccaagaaatggtcctaatcctgagtcgtcacccttggattttatggatcacggagctgaccatctttacctggtcctggaactgaaaaactgtagcttgtgtgaaaatgagcctttggaccagtctttattaaaacaaacaaacatgagtagtctgcatatcgaatatctagagctctaaaccccccaatacttaaaagtctaattgctgtcctgtggtttcattagtctgataggaagatagggatttcctcagtcacagatgatattttgaaggaaagctgcaataaagccacaatgatttgaggtctttgcttaagtatgagatacttgatgggggctttatcatgcaacattagtttgcttaccttaagaattgcccaaaaatgaaagaaaatatgagcttttcagttaaacatactcctaaaaacattttccgggattttactactaaaattggacatttaagcgaagtaaaagag

SEQ ID NO: 422 - DNA, 452 bp, Homo sapiens
  I.422 (AA402701)
aaggtggggattgacttttattccaaggaacaacatcagttcactgttgttggagacatgacaatcattttcatcccaagaacactttaaggaaacattttacaagtatgcttgaaagaatgtcactaactggtccagaattttatcttcttgatttttccagatttctctatgtttttgagaaagatgttaatgttttgccatggtaaaagatttcaaacctcattttttttgttccttttcttgttacttttaagaaaactcatgctctgtttctctgaatcaaatgaagtagaagtttacaaagctaactttcttcttgtctagctattaacatgatttgtcaaatgcatgtttttttcagccaaagccttgtttccatttttgttgatgtgtactcttgctcttttagctagagtgtatgtgaaaataaagaaatatatcattgtatt

SEQ ID NO: 423 - DNA, 534 bp, Homo sapiens
  I.423 (AA402707)
tggcaaataattcttacttttcccaggactgtataacaaatttaaaaaattaaattcttgttatttctgagtatcaaaaccaattttatttacattaacatattacattgttactgtgtggataaatgtgaaatatattattaaaatcagaacacttaaatgtaccattatttattgaattagctgtggaatttaatttactgaaatcctctaatgaaacagcactacaggaaactcccctctcccctaggtttattttttcccccctcaaagccattatatcttaacatataaagggaacctgggagtagagggattaatatctttttgtaataaatatggtttagttctaaattggaacatccagataccaatatgctcactgaagtcaaattattttgtaaactgcaggtaccacaaagaaattggatctgcattactatgaaaattccaatgccatgataatccataccaccagtatagcagcaattctaacagcccccctactgtcatactaatgcaggctgaccagtc

SEQ ID NO: 424 - DNA, 571 bp, Homo sapiens
  I.424 (AA402274)
ctacttttggcgtgtatctggtatatgtaagtgttcagaacaactgcaaagaaagtgggaggtcaggaaacttttaactgagaaatctcaattgtaagagaggatgaattcttgaatactgctactactggccagtgatgaaagccatttgcacagagctctgccttctgtggttttcccttcttcatcctacagagtaaagtgttagtcctatttatacatttttcaagatacaagtttatgagagaaatagtattataaccccagtatgtttaatcttttagctgtggactttttttttaaccgtacaaaactgaaagaaccatagaggtcaagcctcagtgacttgacaccataaagccacagacaaggtacttgggggggagggcagggaaatttcatattttatagtggattcttaagaaatactaacacttgagtattagcaataattacaggaaaataagtgcgaccacatatatcttaacattactgaattaaaactatggcttctaagtccttatccaaactcagtcatccaaactagtttatttttttctccagttgatta

SEQ ID NO: 425 - DNA, 423 bp, Homo sapiens
  I.425 (AA402283)
cggtgaggcccgaggccccgtgacaggagggggaaggtgattgagaactgtgttgctgctgctggattcagtgtgggagagtttgcagccctagtgtttgccggagccatggaatttgctgaaggctctacggtttctccagaagaattcctctaagtttcatttcagacgcaccaggatgttgccggttagtggcgcattccacacccgcctcatggagccagccgtggagcccctgacgcaagctttaaaggcagtcgacattaagaagcctctggtttctgtctactccaacgtccacgcgcatagatacaggcatcccgggcacatccacaagctgctggcccagcagctggtctccccagtgaagtgggagcagacgatgcatgccatatacgaaaggaaaaagggcagggggttccc

SEQ ID NO: 426 - DNA, 475 bp, Homo sapiens
  I.426 (AA402240)
ttaaacaaaaagttataaatgaagacacatggttgtgaatacaatgatatatttctttattttcacatacactctagctaaaagagcaagagtacacatcaacaaaaatggaaacaaggctttggctgaaaaaaacatgcatttgacaaatcatgttaatagctagacaagaagaaagttagctttgtaaacttctacttcatttgattcagagaaacagagcatgagttttcttaaaagtaacaagaaaaggaacaaaaaaaatgaggtttgaaatcttttaccatggcaaaacattaacatctttctcaaaaacatagagaaatctggaaaaatcaagaagataaaattctggaccagttagtgacattctttcaagcatacttgtaaaatgtttccttaaagtgttcttgggatgaaaatgattgtcatgtctccaacaacagtgaactgatgttgttccttggaataaaag

SEQ ID NO: 427 - DNA, 612 bp, Homo sapiens
  I.427 (AA402170)
ggctggtagtgcagcggcatgctctcggctcactgcaacctccgcttcattgcaacctctgcctctgaggttcaggcgatcctcccacctcagcgtcccaagtagctgggattgcaagcctgcaccaacatacccagctaattttttttgtattagtagagacgggttttatcaccttgcccaagctggtcttgaactcctgacctcaagtgatccgcccgccttggactcctaaagtgttgggattacaggcgtgacaccgcacccggcctcttttacttcgcttaaatgtccaattttagtagtaaaatcccggaaaatgtttttaggagtatgtttaactgaaaagctcatattttctttcatttttgggcaattcttaaggtaagcaaactaatgttgcatgataaagcccccatcaagtatctcatacttaagcaaagacctcaaatcattgtggctttattgcagctttccttcaaaatatcatctgtgactgaggaaatccctatcttcctatcagactaatgaaaccacaggacagcaattagacttttaagtattggggggtttagagctctagatattcgatatgcagactactcatgtttg

SEQ ID NO: 428 - DNA, 235 bp, Homo sapiens
  I.428 (AA400371)
  misc_feature (91)..(91): n is a, c, g, or t
  misc_feature (92)..(92): n is a, c, g, or t
  misc_feature (105)..(105): n is a, c, g, or t
  misc_feature (106)..(106): n is a, c, g, or t
  misc_feature (116)..(116): n is a, c, g, or t
gcaaattaagagtgtgtttatttacaggaaaatcatgagaagcaggaacaaacagggctgtaggggaggtgggctggcagtgaggcctagnntctgtgtaaaagnncattggctgngatagagggaacacaggagccaggctgcgggaagaggtttcctttctctggcagctctggcgtaggccccaggagggagcatcaaggcgagatattttctgggagctcccccaggcgtg

SEQ ID NO: 429 - DNA, 320 bp, Homo sapiens
  I.429 (AA400370)
agcggacatgagaagagcaaggaatatcgggaggccatggagcgcatgatgacgagaacctgcgcagtgagacccagctggactactgcccattctgccagtccgcgaagaaactacatgctggagggtgctcaaggatgagtgcctcagcgacttcaagcagcggctcatcaacaaggccaacctcatccaggcccgctttgagaaggagacccaggagctgcaaaagaagcacagtggtaccaggagaaccaggtgacgctgacaccgaggatgaagacctgtacctgagttactgctctcaggccatgttccgcatc

SEQ ID NO: 430 - DNA, 510 bp, Homo sapiens
  I.430 (AA284302)
aagaaggcaactgtctccaatccagacggagatgccaggcacagccgttctgtcacaaccctcagaaggaaccaaccctgccgacaccttggccttgtacttctggcctccagaaccgcagaacagtacatttctgttgcttaggccgctcagcctgtgcgactttgttacagcttctcacccagttcaggcccttttaattgattgctgggcctttgcagttgtttttgcttctaatatattcatctctcaatttatttctggaggctgccacccgaggggcagatacttcaagttgtgtccctaatgggaaaccttgctgggatcatgtggtctacagcacaaggttgctaaagcatcttctgccagaattctgtgagtatctggttaggtgggtctggaatatactgagtttaaaaaagttaaataggtttctttactgcaagatgtttcagagactttaatatgctactctgctgtatgaatctccaggcaggaaatcttataaaa

SEQ ID NO: 431 - DNA, 494 bp, Homo sapiens
  I.431 (AA284108)
gcaggatggagatcctgtgcctgtgcagccgtcttggcgccgcgcctcggcccgttgcccggactttcggcgcccggacgcctctttgaccagcgcttcgggaggggctgctggaggccgagctggctgcgctctgccccaccacgctcgccccctacagcctgcgcgcacccagcgtggcctgcccgtcgcccaggtgccgacggaccccggccacttttcggtgctgctagacgtgaagcacttctcgccggagacaattgctgtcaaggtggtgggcgaacacgtggaggtgcacgcgcgccacgaggagcgccggcatgagcacggattcgtcgcgcgcgagttccaccgtcgctaccgcctgccgcctggcgtggatccggctgccgtgacgtccgcgctgtcccccgagggcgtcctgtccatccaggccgcaccagcgtcggcccaggccccaccgccagccgcagccaagtaggagggggctgggc

SEQ ID NO: 432 - DNA, 546 bp, Homo sapiens
  I.432 (AA284232)
ggggatcagtgtccacacttaaaagttgtatgtgtttaaaaaacaacaacagtaatgtgcaaggtgaaatgcttttggataaacgtaagcctattttctgacgtttcttaatgcaaactctttgccttaaatggtagaatatttagaaatttgcacaaaattaaaaaaataaacattgtcttggagggttaaaaaatagaaaggtgtatgtgtatagattcacatacacatatgtatatacaggctgacttgatctagaacattaaatccgccctgcaagttaaccccccattgcaatggttgccttaaggtgtttgctagttgtgtacatagtgtggttaatcattagctacactgcttcccacttgattagagcaatgggaagcatactgtggcctaccagcatctggaagtgtgtgctcgatctgtatgtgtgcagaggtggtgtggatgtgagcgtgcatgaaggaaaaaaagctgctactcccagtaggcccaacgctcaggtttaaacaactgacgagtgttactgtagggtgttttttt

SEQ ID NO: 433 - DNA, 406 bp, Homo sapiens
  I.433 (AA654173)
tttttgttttttttttatctattttccaactgtaacagtgtatatttttgatctacgtggtatgtattataggaatctgaacctctctgttagtattctctttcctgaccagctgggcttgcgcactttgtgagatttgcaaaaaatatatatataatagatatatatttccataggaaaacaacatcagatgtcttcccctagatgaacgatgaagagtcaaactgcaggttcttaaaacaaaaacaaaatcaaaacatcatgattactaacacggtggaagggtgagggtgaggaattacagatggagagattccaaatcagaaggaaacgtgacatggagtccaggctcatgcctccgccagaattcagccccgcctgtgctgggtagtttgtctaaggtgct

SEQ ID NO: 434 - DNA, 172 bp, Homo sapiens
  I.434 (AA641858)
aaacaaaaacaaaaacaccatgatactaacaacggtggaagggtgagggtgaggaattacagatggagagattccaaatcagaaggaaacgtgacatggagtcccaggctcatgcctccgccagaattccagccccgcctgtgctgggtagtttgtctaaggtgctccaggg

SEQ ID NO: 435 - DNA, 347 bp, Homo sapiens
  I.435 (AA641857)
ctggcgtggagcctttctgggttggggagaggaaaggaaagtggaaaaaacctgagaacttcctgatctctctcgctgtgcgacatgtctgagactcctgctcagtgtagcattaagcaggaacgaatttcatatacacctccagaaaacccagcgccgagttacgcttcctcgacgccacttcatgttccagtgcctcgagcgctcaggatggaggaagactcgatccgcctgcctgcgcacctgcgtttgcagccaaatttactggagcagggatgacgtagcccagtggctcaagtgggctgaaaatgagttttctttaaggccaattgacagcaacacgtttg

SEQ ID NO: 436 - DNA, 287 bp, Homo sapiens
  I.436 (AA629034)
tttttttttaccatttaaacctgtttattttataaacaacggggaaatgtagggcttgggctagttggggaaggactgagccaagaagccgaatctgttctagacggaggtgggaaggggcctaacggtcagggctcagagaagcggtttcgccttcttttccgcggagggatccagacacgaccgcgtcctgaggcggttctgaaaagccgggccccttaaacctctgcgtcgggggctgcctcccgacagttgccgtaggaaatgcaggtgctgggaggcctgcc

SEQ ID NO: 437 - DNA, 499 bp, Homo sapiens
  I.437 (AA429778)
  misc_feature (465)..(465): n is a, c, g, or t
gatttttccattggaaatgtgcattttggtttctaatttttttgttttttcatttactggcatactgttatacctcatttttaaaaatcaactgaatccaatatttcctgtggcaaataacactttcctcatttcataccttttctcctctcttccatgccaacatttctccacccacaacgtacactttttatttctccatcaatatttgaaagcgagtgatttgtgaccaggatttttttttcttagggttgcatttataatttacagattgccttccttgggaacaagtatttttttgtatgatctgtctaaaaacctctcaccgtgaattttgtggtagaaagtctgtatttgttgttgtgagcgtgttaaattgataacaaaccaaactacttgatagctaaagcagattgtttcgggtggggagaaaaagcctaaatcagaatgtttatatttgcctanagatgtccttaataatacaatatgctttagatct

SEQ ID NO: 438 - DNA, 400 bp, Homo sapiens
  I.438 (AA429554)
ggggcgggatgtaaccggctgctgagctggcagttctgtgtcgctaggcttctgccggccgccgccgcacataagccacgaggaggagctttacgacttcccggtcttcggcgccgggcggcaagggccagactctgcgctagagcgctgcgcgaaccggccggcacctgtcgagaaggtgaacgatcgactgtccgcagaagctctaatggcacgcagctgcagcccggcgccactcgctcattgagctgggaaatctggattgggaaagttgacattatcaactattattctcacagatttgtattctccagagtatccaggtccttctcagagaattaaaaagcctgtacaggtctagatattggtatttttaattgatgataagctggaataatat

SEQ ID NO: 439 - DNA, 515 bp, Homo sapiens
  I.439 (AA428463)
ttttataattctgtgactgtcaccattttattctgatgttcaaatcgccccatatttggcctgttggaatcttttcaagttggcttctctgctttttttgggcatgtctccatcattctttgagcattgccttactttcttgtacaaaaagatattctgggctcatcttatactttctgtgctctagctttgaaattaccgtttcttcaaagagctctgtttccttttagaggaggatggtttttagaaaccaagttctaggtagcaggtgtgcttgttgctgttgaggtgttgcagctcccaggccctttccgtgaacagagctctaaggaagcataatgaaagttacaacacgtgctttgtgtgtattaatattattccagcttatcatcaattaaaaataccaatatctagacctgtacaggctttttaattctctgagaaggacctggatactctggagaatacaaatctgtgaggaataatgagttgattagtgtcagctttcccaatcc

SEQ ID NO: 440 - DNA, 599 bp, Homo sapiens
  I.440 (AA429459)
gagaccccgacgtggagtgccgagcctgtgactgtgaccccaggggcattgagacgccacagtgtgaccagtccacgggccagtgtgtctgcgttgagggtgttgagggtccacgctgtgacaagtgcacgcgagggtactcgggggtcttccctgactgcacaccctgccaccagtgctttgctctctgggatgtgatcattgccgagctgaccaacaggacacacagattcctggagaaagccaaggccttgaagatcagtggtgtgatcgggccttaccgtgagactgtggactcggtggagaggaaagtcagcgagataaaagacatcctggcgcagacccccgcagcagagtcactgaaaaacattggggaatccctttgaggaagcagagaaactgattaaagatgtttcagaaatgattgctccagtatgagttgaaattatctgacacaactttccaatagcaacaggacaggcaaagaaactggattctccacaggaccgaaggccgaaaccctagcaaaactgttgaaggaattggttgaaaacttgaatttttctaaaactccggtatccgggtgccttgatagcatt

SEQ ID NO: 441 - DNA, 510 bp, Homo sapiens
  I.441 (AA429326)
aaaaaaaatttacaaaaaaaacaaccacacaaaaattatcttttttaggccagagttttctacaggtattaatgaatatttttcttaatccttataagttttatgtgtttaatatttcttaataccggtagcattaatttatacttttgtagcaacacaatatttttataaacagccggtgcttggctcaagtcttcacgaggggtttaggcagggccatcttggggaccctgtgtaccatgtactgtatttaaaaaaaaaaaaagttacctattgtcacacttgctgtgttaattaacaaaagatgttgtgtgcggtctcctgtatcggtgtggatccaacagctctccagggagtcacattgcatgggggttgagttgacggttcttgtgatatgtaaacccccgagaccaaacttgagggtttatttagggttttctgtttgtcctttgggtttttgtttcactttgttttggtgccgtttctccatttacagccaaatcagtttca

SEQ ID NO: 442 - DNA, 431 bp, Homo sapiens
  I.442 (AA429257)
  misc_feature (378)..(378): n is a, c, g, or t
ggagtataaaaataggacttttttccttatcacatcaattatcaaagaaacagtacgtaacaaaaatacaaagctctggtggatttttttgtcttttgtcccccccaccaccacttctacccaacagccccttgccagggagcccttggctgaagcctggacgctgtccctgaggtgaccccagggctcaggagaaacggtggtccaggtctctctgggggctagcagagtatgagtaggccttgccaataccaagcggtcccggagcagcttgaagaaggcatagtagttgctgaagaggatgagggccagcgagatggtctggtgccacttttcagaggacattagggagtacagctgatagacaatgacagcgcnctccagcagcaggaggatgttgaggatccgcagggtttgctgaaaagaactgc

SEQ ID NO: 443 - DNA, 417 bp, Homo sapiens
  I.443 (AA429154)
ttttttcttacttttaaattccaacttaaaattatgaggtttcagaaatatattgaaagtttaacaatgtttaaaaatagaaaagcatgagtgttcatgctttaaaatgatttttaaatttgtattttatattgttttatctatctgtctttgcaagcagtcttcaggttaaagatacttctaacaggttacagtacatttcctctgtatgtaaattagatgggataatagaattcataacccataatattctttgaaagctaagctttaaacttcattttatgtcctttcacaaataaattagtttaaaacagaaagtggctacttgccattttgacatcaactcattttgcgaggcttaggcagctagacatcgtttaaaacaaaatattaacttatattacatgtgtatctatc

SEQ ID NO: 444 - DNA, 340 bp, Homo sapiens
  I.444 (AA428995)
ttttttttttcattgtaaatacatatgatttattaaaaatataaactgatggtattctctataaattattccccaaacacattaaaagatgtgataatagatataaatttgcaaaccatttatagccaccctccccctttgagtacaagagaaaacatacaacatactgtaggtttatttttattcaaaaagttactgtctcaagacataaatacaaatcagaaaacagtacaattaggacaatagaatgtggaggacaacaggttagagtaatatataaaacatttttagctggttgaaaacaaagctgtaagaactgctttcacaaagaagtactcct

SEQ ID NO: 445 - DNA, 443 bp, Homo sapiens
  I.445 (AA428698)
caggaggaataccacaagcaaaggcagatgaggtggcaaagtccacatccaaccccagaaagtcttcttccccacccatgtctgcatggccccccaggaggctgtccccttcactggcccacccagaacccccatccaggaggaagatttctggagcacaccttttagccatgcccacccgcttccgggcagttctttttcagcaaacccctgcggatcctcaacatcctcctgctgctggagggcgctgtcattgtctatcagctgtactccctaatgtcctctgaaaagtggcaccagaccatctcgctggccctcatcctcttcagcaactactatgccttcttcaagctgctccgggaccgcttggtattgggcaaggctactcatactctgctagcccccagagagacctggaccaccgtttctcctggagccctggg

SEQ ID NO: 446 - DNA, 444 bp, Homo sapiens
  I.446 (AA426202)
  misc_feature (343)..(343): n is a, c, g, or t
cgcccggatgtctataaaaatgtgcccggcggcaaagctgccgaaggggcaccgctgagctgccgagaggaagctcgctctgcccggctgccctcttgtagtccgccggcgaggggcagttctcggtgaggaggaagagagcagcggacggcacagcacccgcgcgggccctcccacaacagctccagctggcagcatcacttcccgccaatttatccaacttctgccaaggctctgaaatgccaacaacgtcgaggcctgcacttgatgtcaagggtggcacctcacctgcgaaggaggatgccaaccaagagatgagctccgtggcctactccaaccttgncggtgaaagatcgcaaagcagtggccattctgcactaccctggggtagcctcaaatggaaccaaggccagtggggctcccactagttcctcgggatctcaa

SEQ ID NO: 447 - DNA, 368 bp, Homo sapiens
  I.447 (AA424760)
tcttgaggaacggatcagatgtctatattgctgaatgcaagaagtggggcagcagcagtggagagatgggacaattagataaatgtccattctttatcaagggcctactttatggcagacattgtgctagtgcttttattctaacttttatttttatcagttacacatgatcataatttaaaaagtcaaggcttataacaaaaaagccccagcccattcctcccattcaagattcccactccccagaggtgaccactttcaactcttgagtttttcaggtatatacctccatgtttctaagtaatatgcttatattgttcacttcttttttttttattttttaaagaaatctatttcataccatggag

SEQ ID NO: 448 - DNA, 410 bp, Homo sapiens
  I.448 (AA426516)
ttttacataagtaaatttaatcatagcatactacatagctcagctgtgagtattagttatgtagacttttgatctaatctataattgtgacaaaactataccgagagaatgaagaagtggaaatatatgtggaacagagccttcctccatggtatgaaatagatttctttaaaaaataaaaaaaaaagaagtgaacaatataagcatattacttagaaacatggaggtatatacctgaaaaactcaagagttgaaagtggtcacctctggggagtgggaatcttgaatgggaggaatgggctggggcttttttgttataagccttgactttttaaattatgatcatgtgtaactgataaaaataaaagttagaataaaagcactagcacaatgtctgccataaagtaggc

SEQ ID NO: 449 - DNA, 400 bp, Homo sapiens
  I.449 (AA425134)
ctctttgtaagtaactttatttttatttacaacagaattggtggctttattcctccatctttagggacacttggcattagcagctagatggaaagtccgcagtgaagtcaaactcattctgccccagccacagctccggaagctcattggctcggtccaaccccagttccaccaccagcgacatcagcacttcctcatccactgggtccgaatcgatgatagcagggctctgggcaccagcatgaaggagagagtgattctgcccctcccgcctgggccccaaagtcccagttttgcaggggtcctgcctccccgggttggcctggagtggcagcagcatcccctgatactggctattaagtttctgcagctgcatactagccagcaagtgaggggcggg

SEQ ID NO: 450 - DNA, 414 bp, Homo sapiens
  I.450 (AA425105)
ctaaaggttgttttattgtaaaaccataaatacaacactgacatgaaatcatttaagcaactgatcctctctaactgttaaaagttatctttttgccttggcatcaaccaactgggaaatagtgctgcaagaattcggggggcaggggaggtactgaatcccgggctggggcttttggcgacttaaagaaccgagtggaaccttcctcttctccctgggaatgttccacttttggacaagaacagacaggtaaaaacagcaacattaaacagctcagttttaaattttattactttgtaaaaatctttttttctgttcctttcctccatttgacatcagtaaatgttttgaacatcatgaaactgatttggctgtaaatggagaaacggcaccaaaacaaagtgaaacaaaaac

SEQ ID NO: 451 - DNA, 496 bp, Homo sapiens
  I.451 (AA426553)
gcctgaaactcatagacactgatctggctgcagttttgctatctgggctgtgggcaagcctaagggatcctgcctgcccctaccctggacttgcctctgcacaccctccagagacaacaggtaaaacagggccacatagatgctgatggagccttcccaagttgtgcttgagcaggaggctgctagggttaggaggtccttaggcctctgagaagctctgaagaactctctggaagcccctgggcgcagtacctagctggctctgtgagggtgctgactggcttcacaagttagactagcaaaccaggaccctgtcaatctttgacaattgggagctgccaagagtgaagggaagagacagcccaggatactggcacagaggtagtctcactgcttgaactaggctgagcaatctgaccctatgggtctaggacacagttcctgggaacatcacattcctctgcccttcctgcaggcaggagacaacagggctgcc

SEQ ID NO: 452 - DNA, 464 bp, Homo sapiens
  I.452 (AA426397)
gttggatgttacctttatcagcttcacattctcaagatggtaaaaatcatgtatatagattatcagaactctaagcaaagatgactgtcacatctgaagctgaggtgccttaggtactctactgaccttgatgggtttggagttccccattgcttatcaagagctttttaattgctttggttctttagtttttctttttgcaaaaatccttcctgtcactttaactaaaaaccaaagatttgttttctattgataagcagactagagaaaaactgccttattttcagaagcatgtcttcattcaaagcttaggcttcaatagaaattcagactaatcactgaaatgactatttcaaactagtgaaatatctgggaaataaactgcttcaaaaatattttactgacatgaattttgctagtgaatacaaatacactgcctcaaataaggccatgtatgaatgaac

SEQ ID NO: 453 - DNA, 375 bp, Homo sapiens
  I.453 (AA426024)
ttatgttctttaatccaaacagtttaattcaagcaatctggaatataaaaagcactttctgatattagaaggagatcagactcccaaaaaagatcagcattctttagtcaagcaaaacttggaagtttacaaacagctaaatcagaagcttgaaattcaggtcctctccagtacctgctacattatatgtaattccaaacatgacttcagagattaaagaagaaagggaagatgtttcccattcttttgtaccctatataaactaagggtaccctgccctaatcttttttccaacacttccccaaataacccttccttacaaagaaagaagtctaagagaactctctcatctaaatatatttaagtagaggcaag

SEQ ID NO: 454 - DNA, 495 bp, Homo sapiens
  I.454 (AA425485)
ggcgggtgcctcacaccaatccaccagaatatgaattctcttggggtccccgaagcaactggaaatcagcaagatggaagtcctggggttcgtggccaaactgcataagaaggaaccgcagcactggccagtgcagtaccgtgagccctagcagacgaggccgacaggcagagcaaggcagactgaagccagtatgagggcagggcagtgctagggccggcatccacctctggtgagggttggtgaaaagttggccagtgggtccccgtgaggacgaactactgtcctgagtcataagtaatatgggtggggcgagggtcttatttctgtagaaatcgtgtgactttaaggatttagattttgtatcttatgttttgtaacatttaataattactgttaaaatgctgtttgtaaatgagattggtctactttttcctgtaggattttattgtagagtgttgctggttttgtaaaatggatggaagaactttgtat

SEQ ID NO: 455 - DNA, 408 bp, Homo sapiens
  I.455 (AA425302)
tttgctccacaaatgtttaatttattaagtgtgccagggtatactgctaactcattgcattttaatttttctctagatactcaaatagctaagcaaatgaaggtacatgccagtctttcttcttttatacacaacagacaaaagtgttggggggctagacaccaaccagctatttttttcccctggaaccagatcatcatactgctgagttccttcaaaccatcaaagtacagccttccttccaatgttgcataatctgttcaaaatcacagtataaatacaaagttcttccatccattttacaaaaccagcaaaactctacaataaaatcctacaggaaaaagtagaccaatctcatttacaaacagcattttaacagtaattattaaatgttacaaaacataagat

SEQ ID NO: 456 - DNA, 425 bp, Homo sapiens
  I.456 (AA424661)
ggtcccttggggctctggatgctgggtaacccagaggtaatgtgggtaccctttctgaagctgtcagggctgtgactagcacccttatcacccctcactgccttgtgggaatagtagagggtttttttcctccagaccccctggcctttcagttcttaactatttccctccaggccagaaagttttctttgaggaaggagaggagagggtggcaatgatgcctttgatctggaattggacatttctctgtcagagcacagaggaggctcatatcacctcttccctctcctacttggcccagctgcttggaggaccgaccccatggctgagaatatgacggcaagaggaacagagtttgctccaagtgggaaagggtcccaagcagtccagagaagatgtctgtgtggctttccctccctgcctcc

SEQ ID NO: 457 - DNA, 179 bp, Homo sapiens
  I.457 (AA424564)
tttttcacaacaaagaccacgccatttatttacaaaggccagtgtgggagctgggggaggcagggagggaaagccacacagacatcttctctggactgcttgggaccctttcccacttggagcaaactctgttcctcttgccgtcatattctcagccatggggtcggtcctccaagcag

SEQ ID NO: 458 - DNA, 484 bp, Homo sapiens
  I.458 (AA424100)
aacagcagctgctgagcacactgaagtgtcaggatgaagaacttgagaaaatgcgagaagtgtgtgagcaaaatcagcagcttctccgagagaatgaaatcatcaagcagaaactgaccctcctccaggtagccagcagacagaaacatcttcctaaggatacccttctatctccagactcttcttttgaatatgtcccacctaagccaaaaccttctcgtgttaaagaaaagttcctggagcaaagcatggacatcgaggatctaaaatattgttcagagcattctgtgaatgagcatgaggatggtgatggtgatgatgatgagggggatgacgaggaatggaagccaacaaaattagttaaggtgtccaggaagaacatccaagggtgtcctgcaaggctggtgtggaaacaagcagtgtgggtgcaggaagcaaaagtcagactgtggtgtggactgttgctgtgacccacaaagtgtcg

SEQ ID NO: 459 - DNA, 417 bp, Homo sapiens
  I.459 (AA424023)
tttttttttagacgggctaaggtttatttacttacttaacatttaaaaataattcatttgcttcaacaacatggcagacaatcaagagtactattgaaacataattcagagagggtcaggacaggaaagatcacaacctcattcctgaggtggaatgaaagatctaagccaggcctccatcctaggccaggctcctccattaagcagagacaaccaaaagataagaaagccttggcctcatccccatcaggagatagcctgaactgctcacaaataagaaacaacttgaccagactgaggactggttcctgatgagtcaataggaaagtcagttggttctctcttcagtaggtgacttagcacccttctggagaacatagagtagtagtctggacctggaggctaagggccacatcc

SEQ ID NO: 460 - DNA, 393 bp, Homo sapiens
  I.460 (AA423797)
aaagaaatcatagggatagaccatcagtcaactccatattggagaaaggttttatagccaaacgcattgaaaagtttctctctcctcagcttattgcagaagaattttgtctaaaaacattttcgaagtttggatcacagcctataccagctaaaagaccagcttcaggacaaaactcgatttctgttatgcctgctcagaaaattacaaagcctgccgctaaatatggaatacctttagcatataagaaatatggagataaaaaattacacgaaaagaaaccactgcaaaaacataaacaggcccatcaaactccagagaagagagtgaatactggagaagaaaggaggaaaatatctgaggaagcagcaagaaagagaaggctggaattta

SEQ ID NO: 461 - DNA, 398 bp, Homo sapiens
  I.461 (AA423792)
agaaggggatgagggaaagcgcacgcaaagagtaggcaggccagccacacgagggcccagcgcttgtggatgtatttgtccatggggcaggcccatagcgctcccaagtcatcgtcccatagctgcagacactggcctgactgcaggtcttgtagtaagtactctccaaggcgagctgccctcgtggaggctttgctgggtagtgaagtacagccactgggttccaaggcacagagggatctgttgtcctgggggcctcgtgtctccaacagtagcacatcgtctttgagaggccccagggagtcagcccacaagcactcctgcagctgcagcttcttccgagctgttcacctgaacacagagggttagggtggcctttcagcaatgggaactcgaga

SEQ ID NO: 462 - DNA, 533 bp, Homo sapiens
  I.462 (AA422112)
caggaaccagctcatgatctcaggatgtatggaaaaataatctttgtattactattgtcagcaattgtgagcatatcagcatcaagtaccactggtgtggcaatgcacacttcaacctcttcttcagtcacaaagagttacatctcatcacagacaaatgatacgcacaaacgggacacatatgcagccactcctagagctcatgaagtttcagaaatttctgttagaactgtttaccctcccgaagaggaaaccggagaaagggtacaacttgcccatcatttctctgaaccagagataacactcattatttttggggtgatggctggtgttattggaacgatcctcttaatttcttacggtattcgccgactgataaagaaaagcccatctgatgtaaaacctctcccctcacctgacacagacgtgcctttaagttctgttgaaatagaaaatccagagacaagtgatcaatgagaatctgttcaccaaacccaatgtggaaagaacacaaggaggcttagacttcgtca

SEQ ID NO: 463 - DNA, 428 bp, Homo sapiens
  I.463 (AA422109)
tggccctctcgcttcctgcccccttctcaccccccttcactggccacctgttccaaccctccatgatcctgttcctcccgagggcatcttaggagggcagggtcctgcgcgcactgcgcctccactccgaccccgtcccagtttggacccaggtcttccaatgaaaatataattatgcaaatcagtaagcatttgtaactacgaatatcacaaaaataagcttcaagtctggatttagaagtgaagcatgcattttaaacaaagaattgctatgcaattttaaaaacacattgatcccagagcagtgtgtggattacactatcactggaaaaatacgaatcgcgacgaaggaaaagactggaagatgcagaccttggttcctgttagtggaaacactgtaaggtcccaggtagggacttttaattgga

SEQ ID NO: 464 - DNA, 406 bp, Homo sapiens
  I.464 (AA421980)
gattcaagttgctaccatgtacattgacagcacaatataccataaccagcgtgttgggttgaattgcactttctacctttgtatgagatttacagactttccttctgggtttgtatcatgaccagaggggtactatagggttggtttatactgcaatatagaggatcagaagccatttgatttggtaggtgtgtcagaagggagaatgatggcagacgaactgctggaagaggtcagaagatagccatgctaaaatgcaattatatcctcatgtttatcccaaactaatcttggacttttccactcattagctttgttttgcccttgtttcccttgaaggtttaagttcaaccatattctgtcaactgttcagtttcagtggaatcttgtatttctggttcattat

SEQ ID NO: 465 - DNA, 485 bp, Homo sapiens
  I.465 (AA421924)
gcttagaaaattcagctttaatggtccagccttctgtctgagtctagtagtccagggcacagatgagggccacaccacgctttatccagtgtcgctggggctgatgggtggggatctccacagcaatgacatagtttgtagagtgtcctgtggttgatagtgttccagcacgagtcagtgtcttgtagatggggcacaggtaaaagtcctggtcctgggccttgcggttgggtgttggcaagagccagataacggccatctctgtgtacagctccttgggctgagactcagccagctggaaggcctctggatcccagcgggcaccttccaggaataatccatggatatagcaccctacttggggtctttgtgttaactctgatggtgcctcaaaacatcacctgtgggtagacacagacacaccccacacacataacaatacccagaatctgggttaggaggcacaaaactcccttctgagagag

SEQ ID NO: 466 - DNA, 505 bp, Homo sapiens
  I.466 (AA421923)
cctatagtagccttggtgaagacttcctcaactcctgccacaaggtgatggagttcaagtctctgctgctgtctctgtgcttgttccatgggaacgccctggagcgccgtaagtttgggcccctgggtgtcaacatcccctatgagttcacggatggagatctgcgcatctgcatcagccagctcaagatgttcctggacgaatatgatgacatcccctacaaggtcctcaagtacacggcaggggagatcaattacgggggccgtgtcactgatgactgggaccggcgctgcatcatgaacatcttggaggacttctacaaccctgacgtgctctcccctgagcacagctacagcgcctcgggcatctaccaccagatcccgcctacctacgacctccacggctacctctcctacatcaagagcctcccactcaatgatatgcctgagatcttttggcctgcatgacaatgccaacatcacctttgcccagaacgagacgttcg

SEQ ID NO: 467 - DNA, 551 bp, Homo sapiens
  I.467 (AA418907)
tttttctgaacaatatctttatttagctcaggtagttgttcttacacatttttggatacctgggttagaattttccctattacattaaatcaatggttcttaagctcttatgcaagcatgcaagctcaatgcaggctagaatagaaggattgttgtgtacaaacattaaaaatagacattttattacaagagtgtagagaagggagaccaatagaaggtaattgaaatacccccccctcactccagccctagtcctggtgcctggatatgtgcactccctgtgcgctctgatccccgcagacacaagtccccagcccctccaggacagcaataagggtcttacaaggccagaaggcagccctgtttgttcctgcctgcaggaagaggcagaggaatgtgatgttcccaggaactgtgtcctagacccatagggtcagattgctcagcatagttcaagcagtgagactacctcatgtgcagtatcatgggctgtctcttccattactcttggcaggtccaattttcaagattggacaggtcctggttggcta

SEQ ID NO: 468 - DNA, 542 bp, Homo sapiens
  I.468 (AA418779)
  misc_feature (208)..(208): n is a, c, g, or t
gcgcgcgagtcgtagtgtcgctgtttgcgggtctccggcggggaccggggcgcacggggtcgctgaggcgagggtgtcatgtcagacaacgaggacaattttgatggcgacgactttgatgatgtggaggaggatgaagggctagatgacttggagaatgccgaagaggaaggccaggagaatgtcgagatcctcccctcgtggagcngaccgcaggccaaccagaagcgaatcaccacaccatacatgaccaagtacgagcgagcccgcgtgctgggcacccgagcgctccagattgcgatgtgtgcccctgtgatggtggagctggagggggagacagatcctctgctcattgccatgaaggaactcaaggcccgaaagatccccatcatcattcgccgttacctgccagatgggagctatgaagactggggggtggacgagctcatcatcaccgactgagctggagtcatcttccctgcctttgcccatgcccaattttcattctcactttatatgtgtaataataaatattcactttc

SEQ ID NO: 469 - DNA, 447 bp, Homo sapiens
  I.469 (AA418689)
  misc_feature (354)..(354): n is a, c, g, or t
tgaaagttgaatattttattatttacacatataaagtgagaatgaaaattgggcatggggcaagggcaggaagatgactccagctcagtcggtgatgatgagctcgtccaccccccagtcttcatagctcccatctggcaggtaacggcgaatgatgatggggatctttcgggccttgagttccttcatggcaatgagcagaggatctgtctccccctccagctccaccatcacaggggcacacatcgcaatctggagcgctcgggtgcccagcacgcgggctcgctcgtacttggtcatgtatggtgtggtgattcgcttctggttggcctgcggtcgctccccagaggaggnagtctcgacattctcctggccttcctcttcggcattctccaagtcatctagcccttcatcctcctccacatcatcagagtcgtcgccatcaaa

SEQ ID NO: 470 - DNA, 618 bp, Homo sapiens
  I.470 (AA418151)
tgcgaaatccatcggatagaaaagtgtgtttcaaagtgaagactacagcacctcgccggtactgtgtgaggcccaacagtggaattattgacccagggtcaactgtgactgtttcagtaatgctacagccctttgactatgatccgaatgaaaagagtaaacacaagtttatggtacagacaatttttgctccaccaaacacttcagatatggaagctgtgtggaaagaggcaaaacctgatgaattaatggattccaaattgagatgcgtatttgaaatgcccaatgaaaatgataaattgaatgatatggaacctagcaaagctgttccactgaatgcatctaagccagatgggacctatgccaaaaccacacagtgtttcacttaatgataccgaaacaaggaaactaatggaagagtgtaaaagacttcagggagaaatgatgaagctatcagaagaaaatcggcacctgagagatgaaggtttaaggctcagaaaggtagcacattcggataaacctggatcaacctcaactgcatccttcagagataatgtcaccagtcctcttccttcacttcttgttgtaattgcagccattttcattggattctttcta

SEQ ID NO: 471 - DNA, 441 bp, Homo sapiens
  I.471 (AA418000)
ttttttttttgcagaaattaactttttttattatatatcatataatgtagtagtaaagtttgtttgaagtgcatgaataaaaagttagtggaattacaggagggacaatctatatagcaataaaaggtgcaatccccgtgcatcttaaagaagaaaaaagaaatttcactccttttggcccaaaactcagtggtcaggttccccggagtctggcatcagaacccggataacgctgattagaaccataggggcgttacaataaaagctaaaatattggccatatgatggcgaaaagtcttattttgtggttaacttattctcttctagctactctctgatgaagttggtggtgctgtggaagaggaccgccgcctcctggacgaggaccgggaccgctcagcattgtaagtgacgtgcttgtcgtagctctccatctgagcc

SEQ ID NO: 472 - DNA, 469 bp, Homo sapiens
  I.472 (AA417981)
gttaacagttttatttttttttatgttaaataccatgggacaggattgtaaggatgaaaaactcagtcaacaactgcctcacaagggataagaaaaattctgccatgatattagcaaaggtaaaggaggaaaaatttacactgtaagaggcaccatttccccaaggaatacctcttggcatttcctgaatgagtgggattagcaatctaaataaatcatatttcaagaggtaacagcaacagataaaatttaaagggattattaaaataacatttacaagactctgaacaattcttgaactcttattaaaaccacaaagaaagagcaattctttatttatgaatttcataaaggactcaatgtgcaactgacatctgctagtgatgatctggtaatatacaacctgtccagtagccgaacagtttgtttttattgtgttttcgaaccgtaagagatcattaaaggcaaa

SEQ ID NO: 473 - DNA, 304 bp, Homo sapiens
  I.473 (AA417844)
cttgagcactgtattaagaagaaattctcctaatttcttccaagtaacagattcactttgttattgttgagagtccgttcagtcattacagcttctgtaacatcagtgactaaaataatgaaactattttctctataaaaatgtttaatttttgttacaacaggttagaggtttaatctgttgtttggcttagattcgagtcattgcctctgacactacctttttaatagcagctccatcccccaccaaccccaagcagatggcagttcccttacaagtctaaggatataggggaggaagacaa

SEQ ID NO: 474 - DNA, 416 bp, Homo sapiens
  I.474 (AA417757)
cattatacacagaagttttattatctaattgggtatcaaactgtacaattaggtttgaatgcttttcaaaattatttctatatatatcatatttactaagacattcttctgtaggatcatattcttgtgaaaggactgacttcaaactgaaacctctttcatcagtgtgaattttccagaagccaccttttcctcgcctctctagtctatcatcgtagtcatatgagtcttctaatttgatggtatgggtttcttcctttgtgagtttagacatatcctccactggagtacatgcttgggctttagtttcccattctggactagggccttctaaaatttcttttatcaccatccatggttcttccaatatgggaatcacagttggtctgtacactgtaagtcccagagaaaccatg

SEQ ID NO: 475 - DNA, 375 bp, Homo sapiens
  I.475 (AA419064)
gggccatggctcgagccgccccgaccccccgcgagcccgccttgtctgcggcgtgactggaggcccagatggtcatcatgggccagtgctactacaacgagaccatcggcttcttctataacaacagtggcaaagagctcagctcccactggcggcccaaggatgtggtcgtggtggcactggggctgaccgtcagcgtgctggtgctgctgaccaatctgctggtcatagcagccatcgcctccaaccgccgcttccaccagcccatctactacctgctcggcaatctggccgcggctgacctcttcgcgggcgtggctacctcttcctcatgttccacactggtccccgcacagcccgactttcacttgaggg

SEQ ID NO: 476 - DNA, 436 bp, Homo sapiens
  I.476 (AA419092)
ttttttttgagtgtaaagaaaggtttactccttgtatcatcccctccccgtggactgcttcaattctattggggacaggccagtccctggaggctgcaaggagccacaaacctttcccagctcacactctgcacccctcagtctctgctgctaaagaatcagactcaggtagatggggtgtccacagtctgtcctcattacccagtcataccgggtagcatggcccgagagagcccttatctctccccaccttaaaaccctcagcatcacacagcaggaaccagtccacagggcttaccaaggatacgcagtgaaaacagaataatgtctgttacaaaccccctaaacctgagatggctgaagagcagattcctgcaccccatctgactcccccaggcagtgggagatgacccaaagcccccattccctgggcaga

SEQ ID NO: 477 - DNA, 272 bp, Homo sapiens
  I.477 (AA419043)
tgcagtggtttcttttcgtgtaattttttatctccatatttcttatatgctaaaggtattccatatttagcggcaggctttgtaattttctgagcaggcataacagaaatcgagttttgtcctgaagctggtcttttagctggtataggctgtgatccaaacttcgaaaatgtttttagacaaaattcttctgcaataagctgaggagagagaaacttttcaatgcgtttggctataaaacctttctccaatatggagttgactgatggtct

SEQ ID NO: 478 - DNA, 492 bp, Homo sapiens
  I.478 (AA419038)
ccctgactctgtattcaggtgtggcctctggaacctgactcagttagacgaacatcagccccttcaggaaggacccccgcgcacaccagaacctctggcaagccgcccgactgcgactgctgaacctgcagactggctgctggacgcaccgtgctcgctgcccgcagaagcgcacatgtgctggcgggctccgggtggggacccctgccagccactggtcccaccgctttcctgggagaacgtcactgtggacaaggttctcgagttcccattgctgaaaggccaccctaacctctgtgttcaggtgaacagctcggagaagctgcagctgcaggagtgcttgtgggctgactccctggggcctctcaaagacgatgtgctactgttggagacacgaggcccccaggacaacagatccctctgtgccttggaacccagtggctgtacttcactacccagcaaagcctccacgagggcagctcgccttggaga

SEQ ID NO: 479 - DNA, 362 bp, Homo sapiens
  I.479 (AA626324)
tttttcagagacaaacactttttaatttcagtaacagtagggaaaaataacagcatccatgcattaaaactaagagccttcacaaagacgtttcaagatgtattttgaacaaaagaggacaggctcttgggacccctctgggtcctgcctcagcacatcgagtcctcaaatccgagtgaggaaagtctggggagctgcactgtggagccatcagaaagtacctggagcggctgctgctgggctggaaaagccgcagaagtcctcggcggtactagggttgctatggcaacaggagtcccaggctgcccgtgctttctggccacaacctttacctcatcattaatgacttcaaagtgctcctc

SEQ ID NO: 480 - DNA, 303 bp, Homo sapiens
  I.480 (AA626278)
ctctccagtgaatttaaagattctgcactaccaatgcttgatgtctgtgacatttccaccaccataactggaggaacccttgttttgctggaacatacacaaagtacatctttctgagaagcagatgaacagtcggggcattttgtggattttttatctaagccactatcagccatttgtttaactctgcaacaaaagcaactttaaaaatgtttccactgtttgaggaagaaaaccaggccaaaaaggataaggtagttgatggtgaaaactgtaatttcgaactggtgaagtcctcaggtt

SEQ ID NO: 481 - DNA, 401 bp, Homo sapiens
  I.481 (AA626239)
ttgtttttgcagaaattaaactgtatttattggtggcaatgcgatgggagaagaggaggtaatacagcaaccctcacaccactggtgtgaccattttggagaatagtctcttaatgtgtacgcaggcctaaagatccaacggttcttgcctgggtctgtgtccgaaataaattctcatatagactcaaagagcacatgactgaggatgtccatagttgcactgtggtggtggtggggtggggggtgggtagttggaggcaagccgagcatccatcacgtggcgccggcggagacggctgacgggtggtggagggaagaaaagcgacagagagcaagaggaagggcgggcaggcacgcagcgcgccgtgagaagcgagcgccggctcgagcaaaagcggagg

SEQ ID NO: 482 - DNA, 321 bp, Homo sapiens
  I.482 (AA621255)
tttttgaccacggatatatgttttatttctggactctcgcctctattccactgatctatgtgtctattcttatgccactaccacactgtgtagattatcgtagctttgtggtcaatcttgaaatcaggaagtgttgagtcctctttgttttttctctagattgttttgactattctgggttccttgcatttccatgtgaattttaagattagcttgtcaatttctgctccactgtgcagccccaagtctgatccaagtcaggctcctgaatgtgaggaagccgagcatgggggcgacagggaggtgggatgcactgaaaag

SEQ ID NO: 483 - DNA, 417 bp, Homo sapiens
  I.483 (AA564296)
atggagaagcatgttaagaagtttattttatagaccacagcggaattcaaaacaaaaatctttagaggaaatcacctgggtgtggcaaacagacagggctgtccattattctacctttaggatttcaatagtataaaaccggttgtttttgatggggattacagcagcatcatcagggcagatgcctaattcccgaataacatcaacgacggctgcaatttgcacagttctgttggtgtaaaagtcccagtagaaggtttttggattgtcgtcacataggcaggcagtatacttatagttgaatgcaccttgtacgagggatgctgctaatgaggtaagttttaaccaccatgcattctttcaattctgtttgaactgcaagcactgcagtgacttcgtcatttggacgtactgact

SEQ ID NO: 484 - DNA, 463 bp, Homo sapiens
  I.484 (AA521498)
gataaaaaacagtccttcaagtcttctctgtttttattcttcaactctcactttcttagagtttacagaaaaaatatttatatacgactctttaaaaagatctatgtcttgaaaatagagaaggaacacaggtctggccagggacgtgctgcaattggtgcagttttgaatgcaacattggtccctactgcgagataacagaactgcaggacctgggagcatcctacagtggtcacggttttctatgacttttaggtaggatgagagcagaggtagatcctcaaagcactgtgagaggatcaaatgttttatatcaacatcctcattattgaatcctcgagttaaagtggtgttagtgatagaatttccaatctcttcctgacgttacttcaagtaccacaatcttcatcaggcagattttatgactctcatggagtactgggagtgtgaccccaaccctccc

SEQ ID NO: 485 - DNA, 576 bp, Homo sapiens
  I.485 (AA513806)
aaccttttttttttttttttttggtctaagtaagatattagggctcgtgtttacaaaagtaaatgaaaggatcaaataacatgattaatacattttattacaaaggttttagaagatgaggggcagagctaacaaattaccttaatcattaaaaaaccacaaagttggagaatttttttaaaaagagtggataccaaaatagcttttaggaagacgacagcttaatagtctcttaaattgctgaagagagcaaaagaaagcttaagatctggaggataaaagttatatcaaaaacatgctaaagaatacattaaaacaaacaaaaaggaaagaggaaaaaataaactatgccttagaagttaaatccctatcctaaatgaacatcatttctaaaggactatggcccacttcaacactcaaacaaaaaaatcctcattgctaaaacagcttcaacattcctttggagtttgctgttaaagaatttatcctgcatatatggtagacacgaaacacatcctgaagagactcagaatatctgcaaacataaaactgcttctctaaattgcatttactggc

SEQ ID NO: 486 - DNA, 393 bp, Homo sapiens
  I.486 (AA505969)
aagacataatttttatttttcataatgtgaaagaggttgtactatagattattttattccctctagtgaattcatggcacactattagtcataagtagattattgcttgatatttggaaagcttaatagaaatggtttttactgatgtgggacttccagtcttttttatcttgaccttaacagttcaggaaacccattttgggcaaagtatactacattgtacttcctataacattttattcatgtcttatattttttcttttttagtaggtattttggtattcatgtattacttagaatatttttatttcaaatagatgagcatttgaatattcaaaaattactacttttgaaaattaattgtacaagtttagaacctgagatgaaaagtgg

SEQ ID NO: 487 - DNA, 412 bp, Homo sapiens
  I.487 (AA244449)
ctactactactaaattcgcggccctcgactggatggccttagggttccttctgcggctattgctgaacccctgtccatccacgggaccctgaaactccacttggcctatctgctggacctgctggggcagagttgattgccttccccaggagccagaccactgggggtgcatcattggggattctgcctcaggtactttgatagagtgtggggtgggggggacctgctttggagatcagcctcaccttctcccatcccagaagcggggcttacagccagcccttacagtttcactcatgaagcaccttgatctttggtgtcctggacttcatcctgggtgctgcagatactgcagtgaagtaaaacaggaatcaatcttgcctgcccccagctcacactcagcgtgggaccc

SEQ ID NO: 488 - DNA, 369 bp, Homo sapiens
  I.488 (AA244380)
tttttttttaatgtttttgtttattatactggccatgaacactccaccacagtaactctccttcttatttgcttcctaagtcagaaattctggaatctagacaggaatctatatttaactccacttgtaaccttcagtaagttgtttaaccacaccaaacctcagctttgtcaattataaaagtgaaagaggttagttaccatgaattatatgacataatttactttgaatttattcacatctggaactgtgaacactaccttgtcactgagaaggccccccctcacttccatcctcttcacttctttccacactgctctctacaatactattcttcataggtcatttttcatcaaaaaccttcaatgg

SEQ ID NO: 489 - DNA, 596 bp, Homo sapiens
  I.489 (AA541644)
gctgagatgacaatagtgtatttatgctgtaccttttctatgtttagatgtgtgtagatgcacaaatacttgccgtggtgttaagattgcctgcagtattcacaccataacatgcactgcaggcttgtagcctaggagcagtcgactctagcgtccatcctgggtgtgtattgggctgtaccatctgggttggtgtaagtgcacgctacaatgttcctatggtcataaaatcacctaacgacacatttctaacgacacgtccctgtcgttaagcaatgcatgactgtactaacctctcctgcagttgctcagatggggcgagcctcctgtttgtgctagggccctggctgctaggctggaagcctcatacgtctcagtgcatcttcccctcccaggtcatggtgatgcccaatacgtttggctggagcaccctgaagtctctgctaccatccaagctggtttggagacgtgaaccagaccaatgaagggcaggctttagatggtcattttctcattaggctcctctctccccacgctagatccctggtgtctgctgcccctcaatggagaaatccagcactggagaaagaagggtc

SEQ ID NO: 490 - DNA, 289 bp, Homo sapiens
  I.490 (AA503092)
ggtcactattgtcatggtttctcttaacagcattcttccagaatccgacacagtgctttcagtgtgatctgcctggaacactgcattttgattaatgcaaccaaaggtcgatttttgggtaaccatatcacctgctggctctgagttcagactcagtttaaatcctcataccttttctttacacattaagccacgttttgttcatatacttaaaaaaaaattcttgtttttaatttgagacttaaatgcaggacttttaatttattcctactggacttcaccttagata

SEQ ID NO: 491 - DNA, 380 bp, Homo sapiens
  I.491 (AA508868)
tgcatatataaataacatttattaacttaggctgtacaatatattgatttagtcaaataaaaaataccgtacacaaaaattgaagtaaaatctgtaagatgccattcagactgaattttatattctgaataagacaagggactgccattcacttaaagcaaaatggctccaattccgtttatctatctatctatctatctatctatctatctatccatctatctatctatctatctataagtctcgctctgtcacccaggctggagtatctatctatttatttatgagataagtctcgctctgtcacccaggctggagtgcggtggtgcaatctcggctcactgcaacctctgcctcccacgttcaagtgatgctcctgt

SEQ ID NO: 492 - DNA, 320 bp, Homo sapiens
  I.492 (AA504603)
tataaagatgatggtgtctcgccatttggttcctggtaaaacttgaatttgaacccaagaatatgacacagtgtttgcggttcacacatactcatgtaagattctaacaaagatataaagaagtcatcgtgttctggcctgcattcaaacacttctaaaatgacatccaaaactctattgggatccagattaaagcatcctattaaagatttgatattttctaagattaaatcactagtaatacttccagataaatcttgcccccattcagccatcagcttggcataaccttcattctcttctcttaacaaattgaattt

SEQ ID NO: 493 - DNA, 364 bp, Homo sapiens
  I.493 (AA504519)
catttatgtcggatcctcagtgaaaataaaagccatgatagttcaacatacagagatttccagcaagctctctatgagttgtcatatcatgtaattaaaggaaatctaaagcatgaacaggcatctaatgttcttagtgacattagtgaatttcgtgaggatatgccctccattcttgctgatgtattctgcatattagacattgagacaaattgtttagaagaaaaaagcaagagagactattttacacagttggtattagcatgtttgtatttagtttcagacacagttctaaaggaacgcctggatccagaaacactggaatcattagggcttatcaaacaatcacagcaattcaatcaaa

SEQ ID NO: 494 - DNA, 456 bp, Homo sapiens
  I.494 (AA504392)
tttcactcttgtcgcccaggctggagtgcaatgacgcaatctcggctcacgttgcaacctccacctcctgggctcaagcgattctcctgcctcaccctcccaagcagctggggttacaggcacccaccaccacacgcagctaatttttccatttttagtagagatggggtttcaccatgttggccaggctggtctcaaacttctaacctcaggtgattcaccaacctcggcctcccaaagcgccaggattacaggtgtcaccactgtgcccggccctcaacatttctcaggcttcaaagaaaagcaggccgctgcagcagctcacgcctctaatcccaggacggcaatcttacttgagcccaggagtttaagaccagcctgggcaacgtggcaaaaccatctctatcaatcaaaaatacaagaaattagctgggaatgttgtatgtgcccgtggtc

SEQ ID NO: 495 - DNA, 453 bp, Homo sapiens
  I.495 (AA504336)
gcagcgcgtacgcccgtgcagttctacaaggtgtgcgtgacgtggtgagcgagaagtgccgtatcgacacggagatcctgccctccctgttcatgcgctgcaccaccgacctcaaccgcaaggacaagttccccgccatcacccacctcaagttcctggcccgggacatgtcggagcaggtgcttttgtgcgcgtccagccagaccagcagcatcgtggagtgctggtccctgcgcaaggagggactccccgtgaacaacttcttccagcagatctcccccgtggttggcgacaaacagcccacaattctcaaatggcggatcctatcggccaccaacgatctggaccgtgtgtcggccgtggcgcttgccaagctgcccatctcgctcaccaacaccgacctcaaggtggccagcgacacacagttctaccctggcctcgggctggccctgg

SEQ ID NO: 496 - DNA, 402 bp, Homo sapiens
  I.496 (AA504132)
ggtgcgcggggctgtcgtgttccagtccgtgttccccgtcgctggagtgcagcttaagtgcgaatcatttcttggaaagtttagagataattttgtcaactacccacaatatgtatgtgtggactagattactttcttatttcaggatctaaaggcaaaatggaaaaacgtcacattttgtggttattaccagggactgaagtgagttgcccggtggcccctggtggctttagctcccctggtcacctgaagggctgcagtgacccctcctggccagcagaggtattggcccaccaggctgggggaggctgaaactgcttcccttctctgcagccacaaagggctggattccttgggcgccaggaggggaggatttttcttttccctccgatagccctactg

SEQ ID NO: 497 - DNA, 379 bp, Homo sapiens
  I.497 (AA491238)
tttttttttttttaatgcttctggagtggggagatttatttagcaactgcttgaacttgtgtacggggtcgggaaggaggtggagctgaccccaatggggctatcggagattggggtgtgggtggtgcccactgccacgctgacaccccgggcctcgatgatggcagacaggagctgctgctgctgctggcgcagggtgtcggcgatgagcagcggcagggagttgaagctggcggtgagatgctccagcttcgactccaggctgccaatctgcttctccaggtcttcgctccggtcattgagttctgtgattaagtcatacatgacattctgcatcttggaaaggtccaccagagtgttggcttggtcactcagcttc

SEQ ID NO: 498 - DNA, 168 bp, Homo sapiens
  I.498 (AA283048)
cctaaaaaatcttttaagactcgaaaacaaaagtcttcttcaaaggctgaatacaatttaactgcatgcaaatgcctcctttgcaagaggaaatatagttcacaaataatgcttaaaagacatatgcaaattgtccacaagataactctttctggaacaaactctaaa

SEQ ID NO: 499 - DNA, 415 bp, Homo sapiens
  I.499 (AA490752)
aggggaaagtcagcttgaaggacactccttgcagggactgagctggcacctactccttagagcttgctgataccaggcctgccacgcgacatctgcaaggacagttgtttggtgttttgcttcaggttatagatggagagacctataaaggactccatgttttcgttggccctgaaatgccttatcagtctgtccaccatcatcattttgggcttgatcatcgcctaccacacacgtgaagtccagctcttcgtgatcgacaacggcgcggatgactggcggatagcatgacctacgagcgcatcctctacatcagcctggagatgctggtgtgcgccatccaccccattcctggcgagtacaagttcttctggacggcacgcctggccttctcctacacaccctcccgggcgga

SEQ ID NO: 500 - DNA, 555 bp, Homo sapiens
  I.500 (AA489115)
  misc_feature (176)..(176): n is a, c, g, or t
  misc_feature (181)..(181): n is a, c, g, or t
  misc_feature (184)..(184): n is a, c, g, or t
  misc_feature (187)..(187): n is a, c, g, or t
  misc_feature (190)..(190): n is a, c, g, or t
  misc_feature (193)..(193): n is a, c, g, or t
  misc_feature (195)..(195): n is a, c, g, or t
acaacagagttaggaaactctttctgcaagtaaagttaacttgattacagagaatagggtagttctttattccttgtcatcattgctgctaccacttctgtgagttataggagaaagactagactttggtagcttagatgtatcttaagtgtaagtgggttttgccatacttggcngcaanccnccnaanttntnacagtttacttggggtgttttacaaaatgataaattattgaagacatttaaaagtactgtcaatgcaaaggcagaaatgtaatgtgtgaactgtaatactgtaatcctctcatatcaaataattaagatttaggggtttagacttttaattcagtcaaaggcacacaatgtacaaatttagaattttccctcaaatcatctttaaggatagatatgtcatagtggtttgttagtttgtttttaattctggaaattttttcttttttttaattctggaaattttcaaatatatgagtggagagaatagtatatgaatcccatgtacctattacccaccttcaacaatgaccagtttatagc

SEQ ID NO: 501 - DNA, 415 bp, Homo sapiens
  I.501 (AA489077)
tttttttttattttgagacggtcttgctctgtcatccaggctggagtacagtggcgcattcatggcttactgcagcctcaacttcccagactcaagtgttcctcccacctcagcctcctgagcagttgggactacaggcgcatgcaccacacccgtctaattattttatttttttgtaaagacacggtctctctatgttgcctaggctggtgttgaacttctggccttaagtgatcctcccgcctcagcctcctaaagtgctagggttacaggtgtgaatcactacatctggcctaaatttaaaaaagtttttagtctacatccagtgacctatcagggatgcttgttattttatacaagctgctttgttatcatatcagcattctcttcagccagctccaaggcagatagtcac

SEQ ID NO: 502 - DNA, 569 bp, Homo sapiens
  I.502 (AA489053)
tttttttttgaactgctaagaaagactttattaataaggtcaggtaaggggaaggcaaggagcctggagatggacacactggtaccaggggttacaaacagtaagaaacactttattataactttataacatataaatagcttgggtcaaatctgtgctttctggcagctgggcaccaagtctgctcccctgcaggctcctgccttccttcacattgcactgttcattgggtggctctggcctggggctaggcggtcgaggctggagtcaaggggctgggcggcccagtcccgccctccatctcctcatgcggtggcctgtgcctgtcatctgcttgggttgcggctggtgtggaaggaccgctcctcaggggtcaggccagcaaagaaggggtgcagcagggcctcggccagtgtgatgcgctgggcagggtcaaattctaacatcctcctcatcaggtcaaacagctgcacgtgctccagggagtcttggagcatgtaactcttcagaagtttgcagttctccttcacataccggccgtcagagctgttctcatccaaaataggccc

SEQ ID NO: 503 - DNA, 434 bp, Homo sapiens
  I.503 (AA489020)
tttttttttatctctgcatcatgatcaaatttacactggtctcccttaatacatttcctttcaagaaaatatttacaaatttgttttcccttgcgttccactgtatgttggttgatgaatgcctgactcaaatgctgctgcttctctttaggtttaccatcctcttcctgtgagccgctgttcctcagcaaagcatttgatcctttgtttccagggccaggccattttcgcttcattttcttctgtttgccattcttgtgaccagctttaagatttttatttttttgtttagcagcctgtggggtatcttttactccttctttctttgtagattcttcaggttgagcagcatttgccatttctctggcttgtatgtactgttgaagctctttggcaaaattatcttctgattcctgactgcagatatcattatc

SEQ ID NO: 504 - DNA, 469 bp, Homo sapiens
  I.504 (AA488940)
ttaagagacagtgtcttgctctgcctcctaggcaggagtgcggtctcacgataacagttcactgcagcctccatctcctgggctcaagcaatccacccacctcggcctcccacgtagctggggctacaggcacgcatcaccatgcctggctcttgtcagtatgaatccctgctgtgtccccagcatctagagcagagcctggcacatggcaggcccatctttgtggagtgaactgggaacaggagcgctgggatggtggagtgttctaagtgagacagccacagtgcccgtcctgtttgctcctctcgcccgaactgccactttcagtgtcaggactgggaagagcataggcagaaaggcctggaatccagggagccccaggctgcccactgcccaccgcccacctcagcctggcccagcactcagagggtctccacctcggcctggcccagcgcacagaggcctccca

SEQ ID NO: 505 - DNA, 449 bp, Homo sapiens
  I.505 (AA488863)
gcacgctgggcaaggccgaggtgggaggccctctgcgcgctgggccaggccgaggtgggaggcctctgcgcgcttggccaggccgaggtgggaggcctctgtgcgctgggccaggccgaggtgggagaccctctgagtgctgggccaggctgaggtgggcggtgggcagtgggcagcctggggctccctggattccaggcctttctgcctatgctcttcccagtcctgacactgaaagtggcagttcgggcgagaggagcaaacaggacgggcactgtggctgtctcacttagaacactccaccatcccagcgctcctgttcccagttcactccacaaagatgggcctgccatgtgccaggctctgctctagatgctggggacacagcagggattcatactgacaagagccaggcatggtgatgcgtgcctgtagccccagctacgtgg

SEQ ID NO: 506 - DNA, 427 bp, Homo sapiens
  I.506 (AA488830)
agggaccaccctcccgcctcacctcgggacaggaagcgctgggtggccaagagcagctgaggcgagattgttactttatattcatcatcagacaccttgaacaaggagaactcctccttccgcttcagaggggccatcagagaagcaggcttcctcttcaccacggtgtctcctaagacgcaagaagagggcgcgctcaggcatcagccacctgtcagtcaacacgaccacactaaggggctgcatcgcctgctccttcctcctgaggccagggggtcctcgatggagcagcatcggaacgccagggacatgtcctcagcaccgctccctccacggggcctgctcccaccccaaccacacagagagaggggtgactatctgccttggagctggctgaagagaatgctgatatgataacaaagcagct

SEQ ID NO: 507 - DNA, 401 bp, Homo sapiens
  I.507 (AA488801)
gctagaaatcaacgtgctcaaaaacatcaaggagaaggacaaagacaacaagttcctgtgtgtcttgatgtctgactggttcaacttccacggtcacatgtgcatcgcctttgagctcctgggcaagaacacctttgagttcctgaaggagaataacttccagccttaccccctaccacatgtccggcacatggcctaccagctctgccacgcccttagatttctgcatgagaatcagctgacccatacagacttgaaaccagagaacatcctgtttgtgaattctgagtttgaaaccctctacaatgagcacaagagctgtgaggagaagtcagtgaagaacaccagcatccgagtggctgactttggcagtgcacatttgaccatgagcaccacaccac

SEQ ID NO: 508 - DNA, 347 bp, Homo sapiens
  I.508 (AA485206)
cggcacgaggcctttctttctttctgtaccttcaagttcttgatttttaaaattccaactctagagaaaaccaatatatggtggtgctgggctttgaagatagcatatcagacgccttggttctgtttgtacacttagccttacatttcgggaggaggcttttcattaggggcttaagctagctcctttggcttttaaaaacaattttttttcaaatttcttcattacctaagggagcctgcatctaaatttctcaactagttcagcctagctgaatttttctagtgtgtaatacactttgcttccttcttattgatgaaaaccagggggatgagtggcttccatgg

SEQ ID NO: 509 - DNA, 256 bp, Homo sapiens
  I.509 (AA485092)
tttttttttcttagatggggtcttgctgtgttgcccaggctacgctcaaattcttgggtttaagcaatcctccggcctcagcctctcaagtagctgggattgcaggctgcatccgcacccagctcctaacaattttttttccccctcttattgagccagggtctcactctgtcacccaggctggagtgcaggggtgcaatcatggctcactgcagccttgacctcccaggctcaagtgattctcccacacaggtgg

SEQ ID NO: 510 - DNA, 475 bp, Homo sapiens
  I.510 (AA465614)
cgcattgtgggatgcgatctgcagctaggatcggaattcccaggcctatagatttttaaaccacaccacaggggtaaaccttaaaagaagtgaaacctaacactatatatatttccatttctaaatacagtatattacagaagtttaaatataccacctctgtgtacttacaactataaaaagatacaataactctaccaattataaataatgtagcatttcatattaaagacattatcgtacaatggaagaataggaaccctctaacgtatcactatcaaggttagtgtctatatctacttgagataaaatactgaaaattcagtgtatgaagccaaatcctgagttaacaagttattggtagtataagtgataagtgttagctgatgaagggaagggcaaatggtggtaattatatctctgacaagggtgataggcccattttatacattgttttcggtataccccactggtt

SEQ ID NO: 511 - DNA, 458 bp, Homo sapiens
  I.511 (AA465605)
ggcagcagtcccagagaagggcaaggaagctctgctgtgggttttgaagttccacagcaagatgtgatcctgccagagtactaaacagcttccttcagatctggaagccaaacaccggcattttatgtactttgtccttcagcaagaaaggtgtggaagcatgatatgtactatagtgattctgtttttgaggtgcaaaaaacatacatatataccagttggtaattctaacttcaatgcatgtgactgctttatgaaaataatagtgtcttctatggcatgtaatggatacctaataccgatgagttaaatcttgcaagttaacacaacgtaacacttaaaagcatacattttcagcaaccagtggcacatatttgaagtgaatagtagcaaattgtttttgctttgaaaatctagccatcctacatcctttggatttcttcacaaggcagtaattc

SEQ ID NO: 512 - DNA, 381 bp, Homo sapiens
  I.512 (AA458912)
gacagtgtgaagaatgtaagtcgaaccttatctccttccttacatttcattgtgtcctcgtttctaacccccagtacttccattttcccagtgttgtcacttaggtcaaataatatgtttttcttcttttctgttaccttctggactacaaacaaaccattcacaattgttccaaggggctgagtttgaagcgtgttgatcttcggggtttcaccagcttttcttcttgggtctcaaacgtgaagggcttctttgctttcagtaccataactggcaaacagcgcttctgaaacccttctctgatagattcctgctgggccaccatctgtttctgttcaggcttaacatgaggagagacttttggtgcagcacgttgctttg

SEQ ID NO: 513 - DNA, 408 bp, Homo sapiens
  I.513 (AA455691)
gatgaggaaagcagtggaaacaatgcccaggctctcacctttgtgtatccttttggtgccacattgagtgtcatgaaaccagcagtggcggttctgtctacaggttctgtctgcttcccacttaacagacccattttggctttctatcactcaaagaaccaaggtgggaagctggcagtgcttggttcatgtcacatgttcagtgatcaatatttggacaaagaagaaaacagcaaaatcatggatgttgttttccagtggctcacgacaggagacatccacctaaaccagattgatgctgaggacccagagatttctgactacatgatgctgccctacacagccaccctatcaaagcggaatcgagagtgtctccaggagagcgatgagatcccaagggactttacc

SEQ ID NO: 514 - DNA, 578 bp, Homo sapiens
  I.514 (AA455687)
  misc_feature (489)..(489): n is a, c, g, or t
gtagtttggcttaaagcctcttgctgtcgcctcagttcctcctgttctctgtgtcggatcatttcttcctcacgccgccgatgctcctcttcatgtcttagttgtatttgcttccgtttttgcaactcttggtttctgagttcttccaagcgtctgagttcttcttgacgcctcattagatcttgcctcattagcattaattggtgttcatgcctagctgcttccatttctgcctccagtttctctttggcttctctgatgtttctatcaacctgctcacgctgctgcttttccatttcatcaagagccttccatcgagatgcatactcaaattcaaatgtcccaggttgagcaaaacgtggtggttgttctctttccttatgatattgttgagttttctgcatcagcttctctggcaagccatcttcatcatcaaactgctccatgggttccacaatgactggacgacgggtcgttgttagcaagaantgcccatcaccacatctttcagaggctttcgtgcagtaggtttgctgcaacttctacaaacctttcctggagctctacgcgatcatcca

SEQ ID NO: 515 - DNA, 543 bp, Homo sapiens
  I.515 (AA455638)
tttttagggtataaaaagacagatgcaaccatacatttaatttttaaaaatggaatgtatcttacataaggattttgtgaaaaatcttatacctatctgagtattacagaagatgcatataccttccagagctcatggaggaaagagtgtataaacaattttgataaggagttgaaaaacaatttgaaaatagtttacaaagagagaatcaggaggcagaaaaagcttcaagaggcatggtcttcagaaattgttctggaatgctgtttcacttgtatcgatgtcatgttcctggttcaatttcttgaactccaccacttggaagaagacgtgctcaaggatatgtttggcatcctgttggtcctttggtagtttactggttactccaagaatatcaccacacttcctgacataaaattccaggtcttcttcagtacacttattggtaatctgagccagccgtgccttctcagaggagaacgtttcatctaaatcaaatagctccagaggaggaggtggtaactccggaaactgggaggaaaa

SEQ ID NO: 516 - DNA, 307 bp, Homo sapiens
  I.516 (AA455634)
ccgggcaccatggcgctcgctcttgccggggagccgcgcgcccgcgcccgcgcctccagaggaccacccggacgaggagatggggttcactatcgacatcaagagtttcctcaagccgggcgagaagacgtacacgcagcgctgccgcctcttcgtgggaaatctgcccaccgacatcacggaggaggacttcaagaggctcttcgaacgctatggcgagcccagcgaagtcttcatcaaccgggaccgtggcttcggcttcatccgcttggaattcagaaccccggctgaaattgccaaagcagaa

SEQ ID NO: 517 - DNA, 444 bp, Homo sapiens
  I.517 (AA455308)
ctgaagtggttgaggaggaccttgggcttgaggcggatcttgatcaggtgtgagatgacgtccatgtcttcggaaccgtgcgtgttgcagttcatgcagacggacatcagcaggtcctgggccggccgggtcagcttggggttctgcagccacatctccagcttctgcaccgccagcagccgcacctccttatagccgcagtggaggtgaggagccgcagaggttcctggagacgttgtcgatgggctggcgccggttcagctggtcccgcagcatgtccaggacatactcctccacgctctccgcgagctcttcgtacctgggcatgagctggccctcctgctcggggctcagcttctcctccgcgatcagcaactccgtctggctgtcctcctcctccgtgaggaaggggtgtgggctgctccctgcacccaggtcgcccgc

SEQ ID NO: 518 - DNA, 502 bp, Homo sapiens
  I.518 (AA455235)
  misc_feature (469)..(469): n is a, c, g, or t
taaaaaaaggatttcacagtgagaaagttttggttagtgcataccgtggaagggcgccagggtctttgtggattgcatgttgacattgaccgtgagattcggcttcaaaccaatactgcctttggaatatgacagaatcaatagcccagagagcttagtcaaagacgatatcacggtctaccttaaccaaggcactttcttaagcagaaaatattgttgaggttacctttgctgctaaagatccaatcttctaacgccacaacagcatagcaaatcctaggataattcacctcctcatttgacaaatcagagctgtaattcgctttaacaaattacgcatttctatcacgttcactaacagcttatgataagtctgtgtagtcttccttttctccagttctgttacccaatttagattagtaaagcgtacacaactggaaagactgctgtaataacacagccttgttanttttaagtactattttggatataatttctgatt

SEQ ID NO: 519 - DNA, 418 bp, Homo sapiens
  I.519 (AA455227)
gtttttgtttgttttttaaggtaaataaattgcattgtgctaaatttattggcagccacattctcaacactacattgtaaaatgtgggtactttcattccaaatacgagaaaaagacatactagcttttcataaataactttagtttataagtgatatgtgtagataaccatcaattggataaaaaaagagctttgataaacaataatgttttcttactctattaaagtcaataatgaataatcttaaaatggaatattattcctactctatgaagacattttggcactaacctgtgaaatagaattttctaaatatttgcaacttggtaattatagagtttatccattaaaatgttcttatctgtaaagttgtataaattcatgagtaaatacaattttatctggaaaatgaaaagg

SEQ ID NO: 520 - DNA, 443 bp, Homo sapiens
  I.520 (AA454920)
tgcggccgcgttgtccagtgcctcggccctcaccggtctcaccaaacgccccaaactctcctccacaccccctctgagtgccctgggcgcctggctgaggctgcagtggcagaaaaacgagccatttctccgtcgattaaagagccatctgtggtgccaattgaagtgctgcccacggtgctgctggatgagatcgaggcggccgagctggagggcaacgatgacaggatcgagggcgtgctgtgcggggccgtgaagcagctgaaggtcacccgcgccaagcctgacagcaccctctacctgagcctcatgtacctggccaagatcaagcccaacatcttcgccactgagggcgtcattgaggctctgtgtagcctcctgcggcgggaccatccatcaacttcaaggccaaggggaacagcctggtgtctgtgctggcctgt

SEQ ID NO: 521 - DNA, 313 bp, Homo sapiens
  I.521 (AA283049)
caagagccttagatcttgtacttcggcctttggttttgtttccttcaggtgaattggaagcatttgccttatgagttttcttatgatgttcaaggtaagtctttttggcaaatgcctttccacatttattgcatctgtgaagagaaaagttttttgtgacttttacttcaataccgacgtcagctacttcatactttttactaggagagttagaagtgccatcatgttttgaatcactatgttttgcttcatccctcgaagggcctctttttgccactttatttagaacaaaatcaataggcttttttatagc

SEQ ID NO: 522 - DNA, 420 bp, Homo sapiens
  I.522 (AA280580)
caaatcacaagaagctttcaggtctggaggctgacatttctcaagacagatgcaaaaacccaggcccagagagatgaagaaacctggctaagctccttgaagctagaaatggcctacctgtagaatctgtcttcacttcaaagtcagtggagtgcacagttttattgtcgtgttgaactgaacatgtcactgaatttgaatcttcatatttaccaagcttgacagcattgtacttcccactgggagagatgacaatagcaggatcaaactctgttatcttcttggatgacacgagatttattcttatatccttggggtagaattccttcaccagacaagcgacatttgttccatttttcatgacaaaaacggatggtttggtatgaggctgacttcctgcaaatataatcaacttattag

SEQ ID NO: 523 - DNA, 321 bp, Homo sapiens
  I.523 (AA280317)
aacgattaaatctttaatctaaattctggactacaatttcatacagcttcacgtctgggtttaagtcaaatacaaaatagactaggatgcatatggcaactatattgagtgcactccagttttttaaaaaggtttaattcagtcagacacccatttctttggttaccaagatgccaaacaatggattctataagacactttctttcaaacaatcgttttgaaaatataaacattaatgtagaaagagggattcagaaaaatgttttatcaaatcaatgtattatgctctatctgaaatgctgactaacagagtcagagcac

SEQ ID NO: 524 - DNA, 349 bp, Homo sapiens
  I.524 (AA278392)
ttttatttcataaagctacttttaatatattaacatttattgctcttgagttcaaagtatatcttattctagccaccaaaacatttagaaaatagaaaaaaaggtaaaaactaatttttttatctcttatatttcagacacttaatacccttaccccattcactgaatccaatttcattgctatttccttgttttgtccttttgagtggttcgggatctgcttcaaatgacaaagagatgtgagtaatagggttcaacgtctttcttattttcagatttaaagctcttcaatgatgtagctcaaaatgaaagttctttcaatccaacaactttgcagagatgctgatcc

SEQ ID NO: 525 - DNA, 401 bp, Homo sapiens
  I.525 (AA278373)
ccatctttgggtaggcagacttccctgacgacatcagtgatacccaaagctgagcagacgtggcttacaaagactttatttattttactgtctttgaaggaaacgttcgcaacgtttctgaagtctcggttgagtatttatgctctcagccttgtgttgtcaatttggaagcagttgtttcatctgagttcagaagtagcattcccgtgtacaaaaaaaggtggaagaatgagaaacatcttcacaccagcaggacacaaatagtacatgtgaaatttccaagcattatggtttacagagatgattatttcatcagacattccatctctgtatctgcagtgatagtacgcgcctggattactcacaaatacagtggcagagactggaatgttaaatgggag

SEQ ID NO: 526 - DNA, 384 bp, Homo sapiens
  I.526 (AA278366)
gaacggtttgagtgggaactccccctggatgaggcccagagacgaaagctggatgtctctgtcaagtctaattcctccttcatgtcaagagagcgtgctgctggggaaggtgcagctggacctagctgagacagacctttcccagggtgtagcccggtggtatgacctgatggacaacaaggacaagggcagctcctaggactggcgagtcccagcctgactgctctgtctgtctgccttcgtctcgctccatcaccgcctcaatgtgatgagcctaaagctagggtccaagggcagagctgtgcccttcagccctttcacctaacaggcccatattcgggcctttgcctgaccaaagagaagaaccgtatgttccctttactg

SEQ ID NO: 527 - DNA, 466 bp, Homo sapiens
  I.527 (AA280049)
ctcagctcatctgttttcctttcctctaacccctctcctccatagccttctgaggcttcacctgctagctttacccagtctgtttcttcctgttgggtggcaattaattaatcctgtgaaggttacattgctgctgctagagagggtggggattgcaccttccaaatctgtttctgtaccaatatttgggggatggaggggtgactcaaactgcttctagtgttctcctaatcccttaagactagaacctataggaaactacttggagcaaactcaaaggacagattagggatcgagattgggtcaggttagcatggggttgtggttgaaatatcttggtatccaggataagggtatgtggaaaaacaggctttaggcaagtggaaaattcaaaatgtgctgtgaaaggacaatctcaggctgaaatcccataaaggaacttggagggaatattatgatggaggga

SEQ ID NO: 528 - DNA, 571 bp, Homo sapiens
  I.528 (AA280070)
  misc_feature (312)..(312): n is a, c, g, or t
gttcagaagcagaaggaactttccaaagctgaaatccagaaagttctaaaagaaaaagaccaacttaccacagatctgaactccatggagaagtccttctccgacctcttcaagcgttttgagaaacagaaagaggtgatcgagggctaccgcaagaacgaagagtcactgaagaagtgcgtggaggattacctggcaaggatcacccaggagggccagaggtaccaagccctgaaggcccacgcggaggagaagctgcagctggcaaacgaggagatcgcccaggtccggagcaaggcccaggcggaacgnttggccctccaggccagcctgaggaaggagcagatgcgcatccagtcgctggagaagacagtggagcagaagactaaagagaacgaggagctgaccaggatctgcgacgacctcatctccaagatggagaagatctgacctccacggagccgctgtccccgctcccctgctcccgtctgtctgtcctgtctgattctcttaggtgtcatgttcttttttctgtcttgtcttcaactttttttaaactagattgctttga

SEQ ID NO: 529 - DNA, 549 bp, Homo sapiens
  I.529 (AA280062)
ccataaaggagtgatttagaacagtcattaattttcaactcaatgaaatatgtgaagcccagcatctctgttgctaacacacagagctcacctgtttgaaaccaagctttcaaacatgttgaagctctttactgtaaaggcaagccagcatgtgtgtccacacatacataggatggctggctctgcacctgtaggatattggaatgcacagggcaattgagggactgagccagaccttcggagagtaatgccaccagatcccctaggaaagaggaggcaaatggcactgcaggtgagaaccccgcccatccgtgctatgacatggaggcactgaagcccgaggaaggtgtgtggagattctaatcccaacaagcaagggtctccttcaagattaatgctatcaatcattaaggtcattactctcaaccacctaggcaatgaagaatataccatttcaaatatttacagtacttgtcttcaccaacactgtcccaaggtgaaatgaagcaacagagaggaaattgtacataagtacctcagcatttaatc

SEQ ID NO: 530 - DNA, 123 bp, Homo sapiens
  I.530 (AA279990)
aaattgaaaggaaacttttattgagtcatgttttcaaagcaatctagttttaaaaaaagttgaagacaagacagaaaaaagaacatgacacctaagagaatcagacaggacagacagacgggc

SEQ ID NO: 531 - DNA, 138 bp, Homo sapiens
  I.531 (AA279987)
ttcagcaatcagacaaacttatttattaggtaaagacgatgagcaacgtctatcctggaaactggagaatacgatggaaatggaaggtataagcctggagtctattggcaagacaagccacatgtgtaaaggaaagtg

SEQ ID NO: 532 - DNA, 353 bp, Homo sapiens
  I.532 (AA280029)
ttggagggcttcccagacatttgattggtttagaattcatttgggtcagtggttgtcccccaggagtgatttctcctcgcaggggacagttggtgatgtctggagagtttgggttgtcaattcggggtgctactggcgtctattgggtagccaccagggatactgctaattatcctacaatgcacaggagagctcccgcctaacaaataagtagtcagcccaaaatgtcatagtgctgagactaagaacccctgtttggattaaatgctgaggtacttatgtacaatttcctctctgttgcttcatttcaccttgggacagtgttggtgaagacaagtactgtaaatattttt

SEQ ID NO: 533 - DNA, 382 bp, Homo sapiens
  I.533 (AA279762)
ataaacaaaactttttattacagtgcacttattgtagttgaaaacatgcagcaccatttgaaacaaagaagattcagaaacatggaaataagttttgtatctaaacataaatggatggtaaaaattaaagttttcattttttaaggaaaagcatattcatttttgtcaaacatttacagtaatccgggttaaaaagctatagttttcatgattctgttaagtctattcttcaaagtatgctatgtgaggttgacctagagaacactttgaccacatctacttctccacctccattctttgcccgttgaaagtgaatgttaattaaatcctccacaattccttcacccatttgaatgccttccactcctgtcagaagcactgc

SEQ ID NO: 534 - DNA, 241 bp, Homo sapiens
  I.534 (AA279601)
aaagatgtaaatcgtggaggttacggccaagccagttccattaaattcaggagtcagattccaggtttatgtagaagtttctaaaatgaaaatcaatgttactgaaattcctgacacattgcgtgaagatcaaatgagagacaaactagagctgagcttttcaaagtcgcgaaatggaggcggagaggtggaccgcgtggactatgacagacagtccgggagtgcagtcatcacggttgtg

SEQ ID NO: 535 - DNA, 431 bp, Homo sapiens
  I.535 (AA278921)
cggcacgaggcggcacgagggaagttggcgtgcactgggagagctagactaagttggtcatgatgcagaagctactcaaatgcagtcggcttgtcctggctcttgccctcatcctggttctggaatcctcagttcaaggttatcctacgcagagagccaggtaccaatgggtgcgctgcaatccagacagtaattctgcaaactgccttgaagaaaaaggaccaatgttcgaactacttccaggtgaatccaacaagatcccccgtctgaggactgacctttttccaaagacgagaatccaggacttgaatcgtatcttcccactttctgaggactactctggatcaggcttcggctctggctccggctctggatcaggatctgggagtggcttcctaacggaaatggaacaggattaccaactagtagaa

SEQ ID NO: 536 - DNA, 214 bp, Homo sapiens
  I.536 (AA278759)
ttttggttatatttctgctttaatatatagtaacatttgaaaatacacagatatccaggaaaaaaaggtaaagcagtatgaggtattgacagcacaactgtgttttaatttgggagttaatttggggtgttatgtaacagcaatcatacttgtagacaaacacatccactagctctgcaaacacattcaaaggtaatagtatatagtacactcc

SEQ ID NO: 537 - DNA, 396 bp, Homo sapiens
  I.537 (AA481638)
ggacagcacagacttgctctacttgttcccggagatcaggtggaagtgcttctaaaacagactgatccagctataaaatgccaaacatatgagtaggaagttaaagcatgctcggagatgaggtgtttgggagttaacacgccactttaaatttcaatttgaatactgtggataatcaatgtaaggtacagaccatcaagctaggaaagccacctccaaatcagcacatttttggaacgtcttggccttttgtcattgaagcctgaagtactatgtgtagtctggaaagaagtgtatatatactaccagccactatcacatgaccaggtaagtccaaatatactcacagaatgtcctgcaattggggccaacagatatgaatagccttggtgaagc

SEQ ID NO: 538 - DNA, 328 bp, Homo sapiens
  I.538 (AA481633)
tctgaggtttcctctggtcctggtatgaagaatgtatttacccaaaagtgaaacattttgtccttttttagcatcttgttctgtttgtggaagaactctactttgatatcaccacacacaggtaacggctgagggaactcaaagtacatgaacttgtcttcccgtcgtgtgggtcctgaattggaggaatatatcttcacctttagctggcagaccacaaactgaggattgcaagttccgccactgaacattggaatagtttcaaacatcatcttgtgaaacaacagtgccactggtctataatccagatgattctttaacaggtagc

SEQ ID NO: 539 - DNA, 275 bp, Homo sapiens
  I.539 (AA481504)
tttaatttacagtttcttctgggcctttcaacattatcaatgtctccctttctggcggcacgaatgaagaaattttggaatccataagagccaaaaagggagacattgataatgttaaaagccccacgggggaagaaacagaaaaagacaagaatgagactgagaatgactctaaagatgctgagaaaaacagagaagaatttgaagaccagtcccttgaaaaagacagtgacgacaaaacaccagatgatgaccctgagcaaggaaaatctgag

SEQ ID NO: 540 - DNA, 520 bp, Homo sapiens
  I.540 (AA481406)
tttttttttttttttgagaggtagtgacattttattctttcaatgccgagttaaaaattgcacacatctggcacgtgggtcacaagtgagaagcccagaagcagcactgtccactcctgctttggtatgtcaggtcacctccactcgctggctatggcagctgccgtccgtcaccgctgtactagtcggcagacagcacaggtgggcttccatcatctttcagaaacgaggctgctttcctcccgttcttctgaatgtgatcttcattcatcttctccaaagcttctatctcagctaagaaatcagcttcattgtctgccgagatgttcaggccagaaacagcattgaacagctcccgttcattgagggcttccgttactcctcctttctggaagaactgtgaaacattcctacagtcacggaataagaactccaggccatgaggatgggttggctctaccgactgactgacgtcaatcaaccagaccttcccagcatgccacaacatgttatactcgct

SEQ ID NO: 541 - DNA, 453 bp, Homo sapiens
  I.541 (AA481399)
tttttttttatttggtggagatggggtttcactacattgctcaggctggtcttaaactcctgtgctcaagtgatcctcctgtctcagcctcccaaagtgctgggattccaggcatgagccacctcaaatggcctcacatttaaaaattggggcagattcacaccagtccagatttcagaaatccccagatatccaagggtggggccacaacaattggcctccttggcaacagtgagcaggagctgagttatgctggccccattcatgccttcaagtatttattgagcacctgctgcataccaggcactggagagcaagacagttaaaaaacctctgccttcccagacactgcacacacttctattagttgcccaggccctgtaagcatctgaatttgcagcctttgtgtagatgggtaagctgagctgcagagagaaacttgggcaagatcac

SEQ ID NO: 542 - DNA, 523 bp, Homo sapiens
  I.542 (AA481189)
tccttcttctactcttctttccttcttccactcttctttcctttcttctttcctttttccactcttctttcctttttcttctctttttttttgactttctccttttcttctctttcaattgatgtcatccggtgtaacctggtacgtcctaaagattctcgccatattggtagcatcacaactggtttaactgcacactccaaaacggctaaagcaatgcaaattctctgggtttgctacacatctgaactgccttgatccaatttgccctatgtgatgcccagttgggatgaagagaggatgaagggatgttgttttccatttgggtgatagtcagtctcagagtagatatggtaagaactttggacccatggacagaaccgttccatttgaactctcctgctggagtcagacagaacttatgtgcaagatgccttctcttatcatggtcttctctgtgctggtgcttattcaaagcaaatgaattggtggagtattgattgtggtagacgcgatacttccc

SEQ ID NO: 543 - DNA, 427 bp, Homo sapiens
  I.543 (AA282936)
ccaattctgtggccagcctttcaacttcctctaatttagcctcaagcacttgatcctgttctacctgagtttgttcctgttcttctagtgtcattcgcatgtcttcaattattttctctttaacatttagatctttgcatgctctctcatactgttgtatagcttcttccactttctgattatttaactgctccttgagttgctgaatggttcgctgcttcatatctaattcctgagaacactggtttttgtttttctccagttcattaattttaatcctcagtaatttatcctcatcacgcattacagatacctctttctgtacttgcttaatctgctttttggcatcagtcagtttctctttcaggtcagcataatcttcttccttcctctgaagatctgctttcagattctgggtacgagcaga

SEQ ID NO: 544 - DNA, 314 bp, Homo sapiens
  I.544 (AA282935)
ttaagttcattttcagcaggaactttctctttctgaaaaaaagaatttaactttaagtaaagaggtccaacaaattcagtcaaattatgatattgcaattgctgaattacatgtgcagaaaagtaaaaatcaagaacaggaggaaaagatcatgaaattgtcaaatgagatagaaactgctacaagaagcattacaaataatgtttcacaaataaaattaatgcacacgaaaatagacgaactacgtactcttgattcagtttctcagatttcaaacatagatttgctcaatctcagggaactgtcaaatggtt

SEQ ID NO: 545 - DNA, 324 bp, Homo sapiens
  I.545 (AA280548)
ggaaaaaaattaagtgatttttatttccaacagttgtaaattaaaattgtacaacatgttttctaatctatgtctcatgtgtcttgctgtatgactgaagacaatgaatgtatttttaaaaattatggcagacacaatatacttggtatttacaatggcctgtgacaaatataatacctggaaataatttctaattttccacttattattgctatttagtcacagaaaagattaacactctccaagaaattttagcatatgtcatatatagatataataattttatataatgaaaaaccataacagaacagggtgcctttacaa

SEQ ID NO: 546 - DNA, 408 bp, Homo sapiens
  I.546 (AA281872)
ttcaggtggctggcttgaacatgagtctgctgtgctatctacataaatgtctaagttgtataaagtccactttcccttcacgttttttggctgacctgaaaagaggtaacttagtttttggtcacttgttctcctaaaaatgctatccctaaccatatatttatatttcgttttaaaaacacccatgatgtggcacagtaaacaaaccctgttatgctgtattattatgaggagattcttcattgttttctttccttctcaaaggttgaaaaaatgcttttaatttttcacagccgagaaacagtgcagcagtatatgtgcacacagtaagtacacaaatttgagcaacagtaagtgcacaaattctgtagtttgctgtatcatccaggaaaacctgagggaaaaaaa

SEQ ID NO: 547 - DNA, 373 bp, Homo sapiens
  I.547 (AA281734)
actgattggaatttttaccattctgtacactctgaattataactaaacaactacatgttactgacaaatttgtgattctttgagtctaaacaacacagaaactagaagatccctttcctagatttatatacttgattttcttataaaaataacttcagttattatgtcaatatttatctgaaaaaggcagccctctgacagtaaactagtaactggaataactacagtatcattataagctacagtaaaacaacctgtaaagtaatttttcctatttgaataataaatagactggacaggagtgaaaaaccaaaactatgaaagaaaaacccaatgtaaataaaggatacaggtcaaaacaaagttcagaagg

SEQ ID NO: 548 - DNA, 177 bp, Homo sapiens
  I.548 (AA281467)
cggacgagaataacatttatttagcacttattagtttctacctttatgataatcattttaagcactttaacaaggttttcaatgtgcccccacatctctgcattccagccaccaccgtgcctttgtggagtttctcagagctaccaggctcctcccaccacagggcctttgcacgtg

SEQ ID NO: 549 - DNA, 434 bp, Homo sapiens
  I.549 (AA281330)
gagtatgatgtttaatgtaagatccagtggcttggcagagttggtgcaaaactgtaaagtaccagattaagttctagtcagtgagttagcagcctaggcacttgggcaaaaaaattggccctgctgtcccaagtcctccaaagccctctccgtatcaccagctaggagctccaagactgatatgccactacttggaggcttgagtagaatccacgcgtcctcagtttccaaagtgacaagagactggccccagccatcaaagcagtagaattttcaggacagggttgaggacagtggggacagaactggacatgggggcctgagctgctgaacatttgctacatgcagtagtctaagaggctcacagctggagaggttagcctgtccaccttcccacccatgtgtggtagggaagaaggtgaccatctagttaa

SEQ ID NO: 550 - DNA, 426 bp, Homo sapiens
  I.550 (AA281285)
tctagtcacctttgaggtagatattgtgattttctggagtatagtatatccgtgtctctgtgtctatcctgctcttgctgcaataatacttctctttgacatttgtactgaagtgatttgatattaagtaaaacagttaatgtttgaatataggcatatttataggttttttccgctcccccccaacccacccgtttttaaaaaatctatacaaagcccttgtttgagtctcatcatgcacatcaaatcatggagttaggtcttctctgagctcaggggaacacaagtgcacagagagagatgtcttgagggtcactaccaaagaattaccctcattgtccctcactcaggccatgtgtacatgcgatgctgctgagtgtgctggggtgggtggtggcccgtggctcccccagagcacttcctaac

SEQ ID NO: 551 - DNA, 384 bp, Homo sapiens
  I.551 (AA281252)
ctccctaggaaggatatcccaaagcaagggcatcttgaaaagcatgattttctcggtaatgtttgccaacactgttcactttccacatggtcacgactgaaaacacatttaccaatacctttcaagcgatatgactaccagaaatagatcttctttactaccctctctgaaatgagtaaacaagaaataaattcagaaggcaggcttttgaaagaaaaagaaaaaaaaaattgcttgcggcttcacagtgaaaaaaattggagtgtttgtgccggttaagattttaatgttttcttaatcaaaattctctgaagtcattctcaatttacaaggttagaactccttcaaagaaaagacatacaagactctagctttaattattat

SEQ ID NO: 552 - DNA, 358 bp, Homo sapiens
  I.552 (AA280214)
gcggccgcagtggcgtcctggagccctcctcagtgctgaagctgctgaaagatggcagaagaagtggtggtagtagccaaatttgattatgtggcccaacaagaacaagagttggacatcaagaagaatgagagattatggcttctggatgattctaagtcctggtggcgagttcgaaattccatgaataaaacaggttttgtgccttctaactatgtggaaaggaaaaacagtgctcggaaagcatctattgtgaaaaacctaaaggataccttaggcattggaaaagtgaaaagaaaacctagtgtgccagattctgcatctcctgctgatgatagttttgttgacccaggggaaa

SEQ ID NO: 553 - DNA, 487 bp, Homo sapiens
  I.553 (AA280230)
ctgctggagaagggagactacaaggacagcagcgactttggggcccgtcaccctcagggacatggatgaagctggaaaccatcattctcagcaaactaacacagaagcagaaaaccaaacaccacatgttctcactcataagtgggagttgaacagtgagaacacatggacacaaggaggggaacatcacacaccgaggcctgtcagggagtgggggacaagagggagagagagcattgggacaaataccaaatgcatgcacggcttaaaacctagatgacaggttgatgggtgcagcaaaccaccatggcacatgtatacctgtgtaacaaacctgcacgttctgcacatgtatcccagaacttataataaaaaagaaaccagtaagtgctcaataaatgttactaacatctatttcttcattcattcttcaaccattacccactgagtgcctatttggatacttggcttagtacctgggtgatga

SEQ ID NO: 554 - DNA, 200 bp, Homo sapiens
  I.554 (AA278160)
ggctgcgcggcggagagtagagagctagagggtgagaagcgctgggccggaccagaactgtcttagctttccctctgcggctgctctggttggttactttgagcctgcctcctcagcgccgcaggagagacttaacagcaaaaatgactgtgtcctgagttcagcccccactgctctgggagcttcccccgtggtttctg

SEQ ID NO: 555 - DNA, 103 bp, Homo sapiens
  I.555 (AA278141)
tctgggcggggtgcagactgcgaaggcgatagtacttcaggggtccaaaaaacccttcaatgccagccacatacctgctccctccaataatgaagtacccagc

SEQ ID NO: 556 - DNA, 424 bp, Homo sapiens
  I.556 (AA459132)
aagtgtttattaggggtacatgtgaagccgtccagaagtgtcagagtctttgtagctttgaaagtcacgtaggttatttgggcatgctctcctgagtcctctgctagttaagctctctgaaaagaaggtggcagacccggtttgctgatcgccccagggatcaggaggctgatcccaaagttgtcagatggagagtaaatacaaggagatactcttgctaacaggcctggatcccatcactgatgaggaactggataggtttaagttctttctttcagacgagtttaatattgccacaggaaactacatactgcaaacagaatacaagtagctaccttgatgattcaaaatgctggggcggtgtctgcagtgatgaagaccattcgtatttttcagaagttgaattatatgcttttggcaaaac

SEQ ID NO: 557 - DNA, 462 bp, Homo sapiens
  I.557 (AA282621)
ccagaaaacacacgtttacccgtacgttcctgatacggccctggcagtcacaactccaaggccccttcaccaatgaaccccaggctctcggctgccccaaccagggcggccagcctgagaagtgtggcaccaaaaggtggtaggggcggctggggagggaggaccaggactggcacaaggtcatgatgctggtgagttgggggccatcagcccaggggacaaaggccacttgacagacctggaggtggggtgacccccaaatgccatgaattgctcacggagtgtaaagttttaggtcttgggatgggacatcccggagcctcgcaacggcatggcggctggcaggacgacggaagctactcagtcctccaggacggattgggcgaacacgatgggcctcttcttggcccagcgggagaagaccgccttctcagtgatgaagcggtgggcgcttcggggcgc

SEQ ID NO: 558 - DNA, 254 bp, Homo sapiens
  I.558 (AA282615)
agagatgcctgtggacaaagtcaaggcaccccgtgagagagcttctccgagagcgggcagagaagatgggccagaatctcaaccgtattccatacaaggacacattctggaaggggacacccgcactcggccccgaaatggaaccctgaacaaacactctggcattgacttcaaacagcttaacttcctgacgaagctcaacgagaatcactctggagagctatggaagggccgctggcagggcaatgacattg

SEQ ID NO: 559 - DNA, 233 bp, Homo sapiens
  I.559 (AA282404)
  misc_feature (132)..(132): n is a, c, g, or t
gcgaccgcacctaccgcacgctgctgcagctcaccaggatgtaccccggcctgcaggtgtacaccttcacggagcgcatgatggcctactgcgaccagatcttccaggacgagacgggcaagaaccggagcnagtcgggctccttcctcagcaccggctggttcaccatgatcctcgcgctggagctgtgtgaggagatcgtggtctatgggatggtcagcgacactgactgc

SEQ ID NO: 560 - DNA, 416 bp, Homo sapiens
  I.560 (AA282482)
  misc_feature (391)..(391): n is a, c, g, or t
cataataaactttattgtgacaggcggggctgatccctcccatgttgggagacaccatgtggcaagtgacaaagctctgagcccgcccctcttggcgcacagtggtagggatgggggaaggggatggaccccatggctggggtagtaccatgactggtggcggggtaggcaaccagaggcctgctgctttggggaggtgcattcccccaaccatgtcccgacacctctggagttcagtcaaggaccttccagtcctacttgtcctgcatcttctcaaggataggcacaatcatgtcaaatttgggtcgctttgcagggtcttcattcatgcagatcttcatgaacttacacacatgaggggaaatacctggtgggatggtaggccgacgtnccaatgccaacttacatccaatctc

SEQ ID NO: 561 - DNA, 388 bp, Homo sapiens
  I.561 (AA282473)
ccattagtagaaaaaatttattaaataaaaaacttcaagtaataatttaaaaaaacacatgaggtagaaataaaaattttaacatatttaacactcattaaaaaaaaccctcaagagaaatggaagatttccaagccccagaagaatctgttaccccaagaatcttttaacctttgttaaaatctgttactttttatatatataatataatcactttgagacaattttgttttacaaaacatctttacacaaaaaagggaaaactgagtgatacccccaaacataggggcatatgaacatatgtgaaaataggaatcaactttttaaatttattatcaattcagaaaacaaaatttgttgcaaaagatgatgtaagaattattttctt

SEQ ID NO: 562 - DNA, 340 bp, Homo sapiens
  I.562 (AA282472)
ggcagtatctcctctagctagtgcccatacagaaaattctatcaccatacaaaatttaatgcagtatttatgttttaaagcacaggtgtaccgaaaactgtgaaaagtctgaatttatgggttctatgcatgcatttttgcctaacctagagaaagagtttgataaatttttaccagctttgaagatggattaacttttgactttgagctttaaacttttaagtcagacatttcaggactaatttgattttgtagatatcattgtaagaactttatttgaaagactgaataaagggatttgatttgttttcatcatttaagcacagtcttgtgatgatga

SEQ ID NO: 563 - DNA, 396 bp, Homo sapiens
  I.563 (AA282347)
gttgtgtttttttttttgacaggagttgaagtttattcttggaaaaaacaaagtcccatcctccccccattgtctaagaaggttcttctaggaggccccgccctccaaatggtcatttctcttttctgaccccagcttccaccaatgccgttaagatgccgccacttgggtgaggggctcctccaggtactgcaccaaagcctgggccttggcttgagcattccaaagcccacggtctccttggcatacatacacagcagaaggttggccactcgggtgatggctacacggccctccatgcagtccatgaggatgaatttgagattgtcttcattaaacgcttggttcccgttccggtcgtaggcggcccagatgttactggctatggcagcggtg

SEQ ID NO: 564 - DNA, 411 bp, Homo sapiens
  I.564 (AA282346)
agcccagggttaggaaccgtagtatgctgcgcccaaggctttgacccaggtgctaagccaagccaacactggaggcgtccagagcaccctgctgctgaataacgagggatcactgctggcctactctggttatggggacactgacgcccgggtcaccgctgccatagccagtaacatctgggccgcctacgaccggaacggaaccaagcgtttaatgaagacaatctcaaattcatcctcatggactgcatggagggccgtgtagccatcacccgagtggccaaccttctgctgtgtatgtatgccaaggagaccgtgggctttggaatgctcaaggccaaggcccaggctttggtgcagtacctggaggagcccctcacccaagtggcggcatcttaacggcattggtgg

SEQ ID NO: 565 - DNA, 439 bp, Homo sapiens
  I.565 (AA553729)
cgagggagaatcactttttatttattattttgcaaataaaaagattttaggtcaaatacttttatgtcatcacagattataggcaactgcctcagctattcaaaaatctcatcctgtagaatctcagcatatagtagcactgcatggtgcagccatatctttcctgtttgtttccttctattccttctcacaccttgttcttttatcctattttcccttttctactagtggtattaactgctggtgttctgctaaagtctttaacaattccataatgaaaggcagataattatgcttccttctgatattctcaatcttgtatctttttaatttctgtacttcttcttcaataagcatctgatttttggcaacttctgactgaatagcacttaacatactattaccttgatctgtatccatgggttcctctgcaagttgt

SEQ ID NO: 566 - DNA, 550 bp, Homo sapiens
  I.566 (AA496969)
cgattaattacaaaacatatatttatgtgtaatgtgttcttaaagctgtaatttacaaatattcataatgatttccaagcttcagtctgcctcttgatataggtccatttcatttatataatcataaataataataagttagtatttattttgctgatttaaggtgttcatccaaaagttcagcaatggcttcttcatctgctgattgaagcagtctctgaattagctgatccaggcccttcccaccacataaaaattccttaatatcacgaacttcatatgctatcctgtggtcactgactctatcctgggtgaaattatatgtccgaattcgctctgactgggctcttgttcccacctgcagttttctagcactttgttgctgacgcttgtctttctcaataatctgctggtagagtctagctctcaacacacgaaaggctatttctttattttttatctgtggatcttcttgttggcattctactactagccctgtggggatgtggacaagtctgacggcactatcagttttattaacatgctgccc

SEQ ID NO: 567 - DNA, 187 bp, Homo sapiens
  I.567 (AA496685)
tcagtcgacagttcattttattgatgcccactccaggctgcatagggttgaggggtgtacaagaggagaaccagattcagtccatgcctggaggttagtctggggggtcggcgggatggacacacagacagacacatagatctggcatctgatagcagggcatacagtctcatgtaggggcactctg

SEQ ID NO: 568 - DNA, 329 bp, Homo sapiens
  I.568 (AA412102)
ttttcaatattatactttttaatggaaaagcttaagtcatgtaatgtaaataccacttcactttcaacaattttactagttgcgcaacagtaagatgaaagaacacataagatggtatttatattctctctttacaagaacattttcttcctttcttgggaacttttctgagtttgtttttctttgagtttggcctcattttgctcctcttcctctaactggaagtttttcctcgcgtcctcttcagattgttttagttcaagcaccatcgctttcacattgtgagccacgccttgttcttcaagggttgtccctagttgtagttgctt

SEQ ID NO: 569 - DNA, 338 bp, Homo sapiens
  I.569 (AA412087)
tttaaatgcttggtcttattaaacattacttacttagtgctctggaatgatcagggtttctaatacctttcatttttaatctctgtaataacatggctgatgtaagctgccgtacaagatatacagacatagagtaattctacaaacaaacaaaaaaaacctgcattaaagatgagagataatattctctttgtttacatgaaatacttatttaagaaactctggtttctaaaaataacattcaaaataacttccatggaatggtcaatcactgcgaaggggacaaaattcaccaagctacttcactgaaaataaaagctcaatcattttaaaggtat

SEQ ID NO: 570 - DNA, 328 bp, Homo sapiens
  I.570 (AA411959)
aagtcaggcaagcagctgcatatggcctgggagtcatggcacagtacggtggagataattatcgccctttttgtacagaagcacttcccctgctggtaagagttattcagtctgcggattctaagaccaaagaaaatgtcaatgctacagagaactgcatctcagcagtagggaaaatcatgaagttcaagcctgactgtgtaaacgttgaagaggtccttccacactggttgtcttggcttccactacatgaagataaagaagaagctgttcagactttcaattatctgtgtgacctgattgaaagtaatcatccaattgttcttgg

SEQ ID NO: 571 - DNA, 423 bp, Homo sapiens
  I.571 (AA412710)
tttttaagagaaaaacatacacatttatttaatatgttttatgtgacacgggagccttcagaaatgaagacccaaagaaacagagacaactgtgcatttttatggacagtcatgcagaagtgtggccggaagaccaagggtatgatctaatggtaataaactgggggaaacctggcaaggcctgcttgttcaggtgcattctgtgtccccgggtcttcagagataagaatgctcctatcctccaggtgtagggtgggcacctctggaatgaaagttttatggccaactctaaaggaaaattgtgtcctggatggaaagtcagttcttaccagtctaatctttagtcagtggcaaacttaccatctcatttttctcatgagcaggaggtacttcatagccctaccaaataaaaagaaccacacc

SEQ ID NO: 572 - DNA, 425 bp, Homo sapiens
  I.572 (AA401779)
gctcaatggcggtctggccgtgaagaccaatgagatctctgtgaatccagagtggggtaggttcctaccctcccggtttccttgggggccacctccgttgtgaataacgccactgtctccaagatggatggctcccagtcgggtatcagtgcagatgtggaaaaaccaagtgctactgacggcgttcccaaacaccagtttcctcacttcctggaagaaaacaagattgcggtcactaagggagaacttgcgtggaaggagcaatgcagacacagtgaaatctctagaatctgctttgttttgtaagaactcatctcctcctgttttctttttcttactgatatgcaaatgatgtttactacgttggttgtgaccacaacctcaggcaagtgctacaatcacgattgttgctatgctgctttgca

SEQ ID NO: 573 - DNA, 517 bp, Homo sapiens
  I.573 (AA402484)
ttttttggaaaccgagtggggactttactgatagtgacagtgatgacttcggagaggctgacggccggtacttcagggtgtgtttcaaaaagctgcccctggagggaggtggtagggaggcggtggggagctgcactcaccccggcctgtcccctccagctcagccagcagtcacactgcccagatttctttcttttcctctgccgcctgctcagcccgctgctcaaggcctttgcacaggctgccgccttcctccgccaaggccagctgcccgatactggtgaggcccttgttcccttgcagtcctcgaggcaggctgtgtctgtgctgggtgccaggtctaggtcttctctcttctgcagagttgggctacacagagcagctgttccagttcctgcaggccaccgcccaggaagaagggatcttcggtgagtcccaaccagtcagcccaggctcctgcaggcagtggtgtttgctggtggctgctgcccctgcaggacagtgacacccaactcta

SEQ ID NO: 574 - DNA, 364 bp, Homo sapiens
  I.574 (AA402416)
agcatttgtatagaaatatttacttagaattatagatattttctctataccttcaagttgatgaacttgactttctgttgatttttggtcttataataaattatgtcaattttgagataccagttaatacaacaaggaatttacattttagaattacttgtttatataactgaaataatgaatggaaaggagatttcagttaatttctgaccatcagcttcagtgttaatattacatgaagcatcagtttcagtgttcttattacatgttcctaaacagaataatattcctgttttatggatggagaaattgaggcattatttatagcaggaattttttgttttaccaccaaggtaattgcaga

SEQ ID NO: 575 - DNA, 262 bp, Homo sapiens
  I.575 (AA400791)
gcgccgccagactgagcagaatgagctacatgctacacatacacacacgtggatgcatatgtacataccatggcagtgtatgccgtgaaggggtgtctcgtaccatgcagacatgaaatagcaaacagggctgaggtgttggcaaaaagacagtgtgcaggacctgggagggagcaggggagccaggaaaatttggactagaatatacagctgagatggagacttcagggggtgcccagttcaagccaatggcagaagacgc

SEQ ID NO: 576 - DNA, 578 bp, Homo sapiens
  I.576 (AA399396)
ggctactcaagcttcgggccttcctcacagacacactgctggaccagctgcccaacctggcccacttgcagagtttcctggcccatctgaccctaactgaaacccagcctcctaagaaggacctggtgttggaacagatcccagaaatctgggagcggctggagcgagaaaacagaggcaagtggcaggcaattgccaagcaccagctccagcatgtgttcagcccctcagagcaggacctgcgctgagcgcgaaggtgggctgagacctacaggctggatgtgctagaggcagtggctccagagcggccccgtgtgcttactgcagtgcagaggcttctaagcgctgctcacgatgccagaatgagtggtattgctgcagggagtgccaagtcaagcactgggaaaagcatggaaagacttgtgtcctggcagcccagggtgacagagccaaatgagggctgcagttgctgagggccgaccacccatgccaagggaatccacccagaatgcacccctgaacctcaagatcacggtccagcctctgccggagccccagtctccgcagtggagagcaga

SEQ ID NO: 577 - DNA, 133 bp, Homo sapiens
  I.577 (AA399371)
tttttttttcaactttttgcaaagcagcatagcaacaatcgtgattgtagcacttgcctgaggttgtggtcacaaccaacgtagtaaacatcatttgcatatcagtaagaaaaagaaaacaggaggagatgag

SEQ ID NO: 578 - DNA, 331 bp, Homo sapiens
  I.578 (AA398596)
tttttgaaaatgaacaaaataaagctttatttgaactccctcccctacagatcattcagatgcccgggaccatgtccaggttcctctcagcaacatggaaagctaagccatttcacaaacgcacaactgtagctacactacagccccccatgcccagggcacagctttgttgctaagcctgtaacaaaagaccaccactcagtatttgtgtaccctgcagccaacaccacctcctgggcttcacaggttcactcacccaagaggccagcacaaccacgaccgagtgggtactcagtggcccagacaccccccgaacactggcactgcacaa

SEQ ID NO: 579 - DNA, 548 bp, Homo sapiens
  I.579 (AA398442)
tttcatgcctcaaactattttttatttgcaactacatgatttcacacaattctcttaaacaacgacataaaatagatttccttgtatataaataacttacatacgctccataaagtaaattctcaaaggtgctagaacaaatcgtccacttctacagtgttctcgtatccaacagagttgatgcacaatatataaatactcaagtccaatattaaaaacttaggcacttgactaactttaataaaatttctcaaactatatcaatatctaaagtgcatatattttttaagaaagattattctcaataacttctataaaaataagtttgatggtttggcccatctaacttcactactattagtaagaacttttaacttttaatgtgtagtaaggtttattctacctttttctcaacatgacaccaacacaatcaaaaacgaagtagtgaggtgctaacatgtgaggattaatccagtgattccggtcacaatgcattccaggaggaggtacccatgtcactggaattgggcgatatggtttattttttc

SEQ ID NO: 580 - DNA, 380 bp, Homo sapiens
  I.580 (AA398341)
ttccaggtaaagaatcagtctttatttggaggatgatgtaacttaaacagtgactttcatgggtggtgtgggtatatttaaccttttacaatctccctctacatctcagctgagctcaccaaaaggctcactcaatcagacaggtaaacacatttttgactattaaagtgctattccggggcaaagtttttctcagtttcgtttaacagcagcttcgttggaaacaaacaaaaaaagctatctatggaaataggcctggggaatgaaaaaaaaataacaagcctcgtaactactttggaacatgacaaatgtaatgtgacttgtagatatcagccctggtactggtgactgataccaaagtctctgaggtacgtgttcta

SEQ ID NO: 581 - DNA, 402 bp, Homo sapiens
  I.581 (AA398320)
tttctatgacatggctgccttggggtttataactcaagcagatgctaggcatgaaaaggattttcaacttcagaactgtagagcaagcgcaggagacaggttcagggtttgccagcagatccacttggccttctggtttcctcaactctctttcaacctagtatgtgtgcgcagtgccaagttctcagctacctccccagctggagccacagcataatgacagtgaacacatgtccacacataccagcccgcccatcagtctggcagccagtagggttcctggaaagctggggagggtaggtgtgtgtctcatgcactggtagggggcctcggtccacaggcagttcttgaggtccttgttgaccaggaagccaactggggctgacagcaacccagacaaac

SEQ ID NO: 582 - DNA, 172 bp, Homo sapiens
  I.582 (AA398249)
tttgtttctggaggccagctttactgtgctagaggaagagggtccccacatccggccctggccatcctggtccggtttgctgaagcaacacacttggcctacccactgggtggggcaggaagtctcgagccttcacttggggtgaggaggagggagatcggtcagcagcttt

SEQ ID NO: 583 - DNA, 307 bp, Homo sapiens
  I.583 (AA397516)
tttgtgtgaattatgattctttattctgactggtgcctatgaaagcaatagggaaacatgtctactaatgagttttgtctttttccacagagaaagcttggactatatttctggaaggcacccactgtggggtcgtgcttgttctgtggtgttgctgtgcagcggccgggatgagcagagggctgcaggagaccctctgagattctgctttgtgcacatgtactgccagcgcatggcattcttgagcccataaagcaagacttctcaggccctgtggttagcatcccccacacccatatcagccact

SEQ ID NO: 584 - DNA, 438 bp, Homo sapiens
  I.584 (AA394283)
cctgttagtaacggcaaagaaacccggagagcagcaagagatagcatgacattctttcttcctgccaccaaccacatcccaagtgtcccctggagagcaagatagccttccactgattggctggtgtagcagtattttagccactgaacttcagtggagggtggtgagcagtgtccttatccaccctaatctcatactccctcattgtccagctgaactacctgtcccctgggagtcaggaccctctgcctgctctctttcctctttagaaatggcagttactggctgggcgcagtggctcacgcttgtaatcccagcactttgggaagccgaggtgggcggatcacctgaggtcgggagttcaagaccagcctgaccaacatggagaaaccccgtgtctactaaaaatacagaattagccaggcatggtggcgtatg

SEQ ID NO: 585 - DNA, 353 bp, Homo sapiens
  I.585 (AA394010)
ctcaataccacatcatatctcccttacaaaatggttattttgggctgacagtggaaccatctgctgttcccacacgatatcctctggtatcagtcaatgaggctccatatcgtaacatgctaccagcaggcaacccgtggttcgaaatgcctacgatcgctgatagatcagctgcccctcattccaggctagctcttcaaccatcaccactggacaaatatcaccctaattacaactgatctgccattaaaagaggaccagattatgaatgacaacagagactaacatttacattgacaaaaaaccctaaaaatttctgcaattatcttattgaacaataaaattgcatgttt

SEQ ID NO: 586 - DNA, 529 bp, Homo sapiens
  I.586 (AA393782)
accagatgcagttcacccaggctgtggaggtactgctctccatctaccccagagtacagaaggctgtgggctcctcagagaaaatatttgagtacctggaccgcacccctcgctgcccacccagtggtctgttgactcccttacacttggagggccttgtccagttccaagatgtctcctttgcctacccaaaccgcccagatgtcttagtgctacaggggctgacattcaccctacgccctggcgaggtgacggcgctggtgggacccaatgggtctgggaagagcacagtggctgccctgctgcagaatctgtaccagcccaccgggggacagctgctgttggatgggaaccccttccccaatatgagcaccgctacctgcacaggcaggtggctgcagtgggacaagagccacaggtatttggaagaagtcttcaagaaaatattgcctatgcctgacccagaagcaactatggaggaaatccagctgctgcagtaaagtctgggccatagtttcacctggactcc

SEQ ID NO: 587 - DNA, 520 bp, Homo sapiens
  I.587 (AA393567)
atgaaaaacagcatcttgtcatttctagatgtttctactttggttgactctttaatttttctgcagttaaaagccttaaaacagcaaggaagcaggggacaggaggggagcccagatctctcccaaagaaaaggagaaagactgaatccttgaggcctgccgtacaaaggagtggtgggttggaggagggtaggcagagactagggtggtctgggactttaagtacaaggccccgtggatttcattggggggcaagccatgtgcaacagggaagctcaggaaccggggggtttcgcacagaggtctggtgctgtgaggtacagggaaagaattagtggatctggaccagtggaacattggtttagtgtaatctctgatttgtgttgagtgaatttgagtatagtccaaccaccacccccctaccccaactaaaccatgtgcccctcaggagctgggactcttctattttctattccttatagcaggctcagtgcctgacacactacgttgaattttattt

SEQ ID NO: 588 - DNA, 427 bp, Homo sapiens
  I.588 (AA393517)
  misc_feature (385)..(385): n is a, c, g, or t
ggaatgtatcgagggaatggccatcagaatcactatcctcctcctgttccatttggttatccaaatcagggaagaaaaaataaaccatatcgcccaattccagtgacatgggtacctcctcctggaatgcattgtgaccggaatcactggattaatcctcacatgttagcacctcactaacttcgtttttgattgtgttggtgtcatgttgagaaaaaggtagaataaaccttactacacattaaaagttaaaagttcttactaatagtagtgaagttagatgggccaaaccatcaaacttatttttatagaagttattgagaataatctttcttaaaaaatatatgcactttagatattgatatagtttgagaaattttattanagttagtcaagtgcctaagtttttaatattggacttgagtat

SEQ ID NO: 589 - DNA, 257 bp, Homo sapiens
  I.589 (AA393489)
ggaagactggatggctgtgtcctcaaggcagtcccctcccatccccattcccaaagtcagaaagtgaagccagatctcaagggctgatacctgaggcaaggagagctaggggagagaaattggggctgagtggaagcagatgcctgcacaagccaagtgtgtcttattgatctgtacaagctgatagaaggaccatctgctgaaatccagggctcctgagttggtgggtttgcttgtgaagcttctaggacaaggcg

SEQ ID NO: 590 - DNA, 414 bp, Homo sapiens
  I.590 (AA393307)
gtgataacactgaggtccaatgatgagacttggaggtctggatccagtctctctttgttttaatgtgacttaggtgctgtcaacattagcaagataatggaaatcacgacgccagtgggatgcttacctccctgctaggcatgcaggggctggcggttggcacgggaaggaggcccagtgagccgggtcccttaggggagggagagtttgtcctctttgccccacagtctacccttcagggccttgtgcagtgccagtgttcggggggtgtctgggccactgagtacccactcggtcgtggttgtgctggcctcttgggtgagtgaacctgtgaagcccaggaggtggtgttggctgcagggtacacaaatactgagtggtggtcttttgttacaggcttagcaacaaagctgt

SEQ ID NO: 591 - DNA, 384 bp, Homo sapiens
  I.591 (AA393076)
agagaactgaggtccaaaatagctgaaacctttggacttcaagaaaattatatcaaaattgtcataaataagaagcaactacaactagggaaaacccttgaagaacaaggcgtggctcacaatgtgaaagcgatggtgcttgaactaaaacaatctgaagaggacgcgaggaaaaacttccagttagaggaagaggagcaaaatgaggccaaactcaaagaaaaacaaactcagaaaagttcccaagaaaggaagaaaatgttcttgtaaagagagaatataaataccatcttatgtgttctttcatcttactgttgcgcaactagtaaaattgttgaaagtgaagtggtatttacattacatgacttaagcttttccattaaa

SEQ ID NO: 592 - DNA, 389 bp, Homo sapiens
  I.592 (AA293849)
ttatttacgaaagccatgtctaataccaaccccgaaaagctatgcatatcaagaaaatcaggggctgctccttgtaatacagatgtagtacgcacttgccgctaagccttaccaggagactctcatcccttaggtaggagtgatgccactttaaaaggagaaacacctgcctgcagtgaatgggactggaatttccccagtagagaagggtgcgagaaacatcagggtgcagaattgataccagacagaaggtgtctatgtgataatgagtttcagaggctgatctctgccaaataccttaattggtgatgccttcttggcaaagagtacaccactgtaagatattctgagttcaagaaccctgtccagtgccccctgcattgcttttc

SEQ ID NO: 593 - DNA, 427 bp, Homo sapiens
  I.593 (AA293878)
cagctgagatgtcacctgctttatttctggctttggctgtggtctgtgatacccatcctgcttgatgttctgcagaatggcacttgactgctgggcatgcatgaagttaagggcaagaaacagtatgccatgtgttcggtaccatcatgtgtctcttcttgcttctgggcccttctactggtgaactttcatcaagatctgcgccatgccgtgtcactatcaagccattaagttttgtctgggttgctgtcagccccagttggcttcctggtcaacaaggacctcaagaactgcctgtggaccgaggccccctaccagtgcatgagacacacacctaccctccccagctttccaggaaccctactggctgccagactgatgggcgggctggtatgtgtggacatgtgttcactgtcattatgctgtg

SEQ ID NO: 594 - DNA, 463 bp, Homo sapiens
  I.594 (AA293836)
ctctggccagttagacctcaatgtttgcgtgcaaatgctgccgcaaagcagtcccaataccccacctagaaagatgagccagtgatttgggagaccaagaggcaggaaaccatcccaccttctccaacccatcaccaaatctgttgctggaagacaccaagtaaatcccagggtcttaatgaggcaccatcaggccagccctgtggagtgatggggacatagctgggtttccctgagctactctattggggtgggagcagggggacagaagatggtgacagtggctcctctcacccctaggtctctgaaggtccagacagcactgatggcgagctttgggtccgcacactctggaaagaagagagaagtgaaggctctaggtagggagaacagagagccactgggcacaggcttctctcctcttgtttaaagaacccagggagggatagagctctgactggac

SEQ ID NO: 595 - DNA, 401 bp, Homo sapiens
  I.595 (AA293809)
gagatggagtttcgctcttattgcccaggctggagtgcaatggtgcaatttcggctcacctcaacctccgcctcccggtttcaagagattctcctgcctcagcctcctaagtagctgggattacaggcatacgccaccatgcctggctaattctgtatttttagtagacacggggtttctccatgttggtcaggctggtcttgaactcccgacctcaggtgatccgcccacctcggcttcccaaagtgctgggattacaagcgtgacgcactgcgcccagccagtaactgccatttctaaagaggaaagagagcaggcagagggtcctgactcccaggggacaggtagttcagctggacaatgagggagtatgagattagggtggataaggacactgctca

SEQ ID NO: 596 - DNA, 369 bp, Homo sapiens
  I.596 (AA496526)
ggtccctcagcaaccccaggcgtgggtttgaggagacaggtgatttacatcccctttgctgtcctcccccggtaccaaggcagggagcctccggagaccggccctgctggccacgcaggggcagactccagcctgtttccccagccctgcaggtcttccttctgtgggaagcttcctagcaagatggcttggagtcctggtccccctcctccctggccctctcgttcgtttctgtttctgtttacacgttggagtggggtcctccgtgggcggcggcgccctgccccgggtgtcgtccggcctcttgtgctcgagcccctttccgagttggactcgaccatccctcaccccaccaaggaccacactgtg

SEQ ID NO: 597 - DNA, 378 bp, Homo sapiens
  I.597 (AA496454)
aaatcaagtttaataaataaaacagcaaaggggggttcaaggcagttatcacttcacagtgtggtccttggtggggtgagggatggtcgagtccaactcggaaaggggctcgagcacaagaggccggacgacacccggggcagggcgcgccgcgccacaggaggaccccactccaacgtgtaaacagaaacagaaacgaacgagagggccagggaggagggggaccaggactccaagccatcttgctaggaagcttcccacagaaggaagacctgcagggctggggaaacaggctggagtctggcccctgcgtggccagcagggccggctcctccggggctccctgccttggtaccgggggaggacagcaaaggggat

SEQ ID NO: 598 - DNA, 607 bp, Homo sapiens
  I.598 (AA496235)
tttttgaaggagaaaggctttaatatatattaaaaataggcaaggtaatgcttttcatagtatagtaagatttgcctaataccatcttatttctttgattaaaagttacttagcttcagcatgcgtgtacattcaaaatacaaaattaaagcatgagttgtcattaatttgcagaattctatgattgaagcctctaaatgaattgtgcaggagagggagtttgtaaacaactgactacagacattcacattgggtcatctttaaaaagctggactctgcttttggatgcttctcggaggcgagttggattttggactgaagtactgtcgttccattcctttttttgaggtgttatgagtggggctataacatcgccatcctgcggcttggtgaaatttctgtctgcacaccactgaacaaaatattgtcttgcggcatacaaactctttctgtccaccttcttacaatatactcgaatcagctgctctgcaaatttctctggcagaagttgtgaaacctggtttttagtaatcctgattgctctgttgggggcagtcttacaatagaagctaacatgatcaattggattcttttcttgcattccata

SEQ ID NO: 599 - DNA, 505 bp, Homo sapiens
  I.599 (AA496234)
ctcaaaccaaacaaaaatcaacctgaaatggatcacagacctaaatgtgagagctaaaactgtaaaatttctaagataaaatatagcagaatatctttatgacttaggttgaggagagttctgagatacaactttaaaagcatgattcataaaagaaataaattgtacttcatcaaaatttaaaattttgcactttgaaacacttttttttgggagggaaaaagacaagcagcagactgggagaaaataattgcaaatcatatatctgacgaagacactggatccggaatatataaagaactacttcaacttaataagaagatgacaattcaaattttaaaatgagaaaaatatttaaatcagcattttatccaaaaagataggtgaatggctaacaagcacatgaaaaatgtttaacattattagtaataagaaaattaaaaccacaatggcataacaacactcaccagaatggctataataaaaaaaaaagatctgttggtaa

SEQ ID NO: 600 - DNA, 246 bp, Homo sapiens
  I.600 (AA496019)
ttaattcattagcaaggttttcttctatctttatttaataaagtctgacaataattcagtaagatctgacaataattttttctcaatgatatattcaagtatttccctaatttgtattatatacagtagctctattaaaatattaaagcattgtatatggtatatatagtatccttctagttttttatatttcttgaatagcctgggacatttccaaagctatatatcttcacatagtaatagtca

SEQ ID NO: 601 - DNA, 561 bp, Homo sapiens
  I.601 (AA490688)
  misc_feature (529)..(529): n is a, c, g, or t
tgaggacaagagaaaaaagccaggttccacagaggacacagagaaggtttgggtgtcctcctggggttctttttgccaactttccccacgttaaaggtgaacattggttctttcatttgctttggaagttttaatctctaacagtggacaaagttaccagtgccttaaactctgttacactttttggaagtgaaaactttgtagtatgataggttattttgatgtaaagatgttctggataccattatatgttccccctgtttcagaggctcagattgtaatatgtaaatggtatgtcattcgctactatgatttaatttgaaatatggtcttttggttatgaatactttgcagcacagctgagaggctgtctgttgtattcattgtggtcatagcacctaacaacattgtagcctcaatcgagtgagacagactagaagttcctagtgatggcttatgatagcaaatggcctcatgtcagaatattagatgtaattttgtgtataaatacagactggatgtacaccanctactacctgtaatgacaggcctgtccacaca

SEQ ID NO: 602 - DNA, 422 bp, Homo sapiens
  I.602 (AA490567)
gtccttcctcagccagatgaggtggatgtgaaattggaccccaaggatttgcgaatagatacatttcgagccaaaggagcaggagggcagcatgttaataaaactgatagtgccgtcagacttgtccacatccccacaggctagtagtagaatgccaacaagaaagatcacagataaaaaataaagaaatagcctttcgtgtgttgagagctagactctaccagcagattattgagaaagacaagcgtccgacaaagtgctagaaaactgcaggtgggaacaagagcccagtcagagcgaattcggacatataatttcacccaggatagagtcagtgaccacaggatagcatatgaagttcgtgatattaaggaatttttatgtggtgggaagggcctggatcagctaattcagagactgct

SEQ ID NO: 603 - DNA, 444 bp, Homo sapiens
  I.603 (AA490466)
  misc_feature (440)..(440): n is a, c, g, or t
attatagagattatattttaatgttttaaatgtatttgatacattacaaaattattttagttacaagcatatcattaaagctattctttattattacaaaatgcttttacaatgctattcttgacaacaggaaaatacttaccctcactgaagtatgtggagtaccattttttggaaaccatgtcaagcataatggcaatattcaggttcaatcttcctatagatctgctcaatatttatctaaaccttagcttctattcttttcacatgttattagttatattttcacttaaaaaattggaggctgaaggggtaagcaaacaaacttttgaagtagacaaagctcatctttaatcaacagaatttagagtccagtctttccaaatctgttttaacgacagaaacttctccctccctgccccattttgtcctcccattanatgg

SEQ ID NO: 604 - DNA, 527 bp, Homo sapiens
  I.604 (AA482097)
cagaaaaggatattttttttattcaagtaactgcaaataggaaaccagagagggagccccaggctgggacaaatcatggctacccctccccaacagaacagggggaggaggtggcccctacaccctttatggtcgattcgggcccccttgctcactctgctgcagcatcctaggggcagggcccaccttccctgggactggggtagtcggtcacccagcctgccatgccccagcccctcttccccacaaagagtatcttgggggaggggatcgtgggcagaacaggaggcaatgaggatgaacatttggcgctggtagcagcagcaatgacggatgtcgaagaatggaacattgaacaaaaaacaacacaactgtccagaggtagtttgtgaacagaggaaaaatggaaccagaaccttggggggcagggaggagcaggaggggggttgggagcgggcagggtgagctccttgttattggtgccccatctgaggagggggaaatggctgagtggcggaacaaagtag

SEQ ID NO: 605 - DNA, 725 bp, Homo sapiens
  I.605 (AA482084)
ttttttttttcgcaggggcccagggcagcgctgggtgctttatttccatgctgggtgcccgggaagtatgtacacggggtacgtgccaagcatcctcgcgcgaccccgagagcccggtgagttgggcttgcggccgtcgcactcatttacccggagacagggagaggctcttctgcgtgaagcggttgtgcagagcctcatgcatcacggagcatgagaagatgttcccctgctgccacctgctcttgtccacggtgagcttgctgtagaggaagaaggagccgtcggagtccagcatgggaggcgtggtgttgtagttgttctccggctgcccgctgctctcccactccacggggatgtccctggggttagaaacctttgaccaggcaggtcaggctgaccgggttcttggtcatctcctcccgggatgtgggcagggtgtacacctgtggttctcggggctgtcctttggttttggagatggttttctcgatgggggctgggagggctttgttggagaccttgcacttgtactccttgccgttcagccagtcctggtgcaggacggtgaggacgctgaccacacggaacgtgctgttgaactgctcctcccgcggctttgtcctggcattatgcacctccaagccgtcaacgtaccactgaactcgacctcggggcttcgtggctcaagtccagcacaagcaagtgtacctcagggtccggga

SEQ ID NO: 606 - DNA, 509 bp, Homo sapiens
  I.606 (AA482070)
cttaagaaataactttaatgtatttagaaacctcaaaaccgaaatctccctgccgggtcccctccctccggccggccccttctcagaacgtggggcactcctgggcactcaaggcccttcttgtcccactcatgggtaggaagggcataggaggagacctcgcattgcccccaataatcgctattggtgcctcctgtgcccatcagtccaggtggagttgtcccctgggtgcagtggggaggtggggcccagcagctgagaggggcccagccagccaacgggaataggctgggctccctgggacacggtgtggccccctcgagcttgcctgggggtgcctctctggggacatgtgatcttcccttccgtgaagtgtctggagcccggcaccacagccacaggctcttgggaagccccagggaaccatgctgggtccttgagacagctccccacgctctctagagccaggcacgaccaattgctgattggggacaggctgtgctgccgcc

SEQ ID NO: 607 - DNA, 466 bp, Homo sapiens
  I.607 (AA481974)
agttgagctcaaaaccccacttggtgacacaactcacacatgcccacggtgctcagagcccaaatcttgtgacatacctcccccgtgcccacggtgcccagagcccaaatcttgtgacatacctcccccatgcccacggtgcccagagcccaaatcttgtgacacacctcccccatgcccacggtgctcagcactggaactcctgggaggaccgtcagtcttcctcttccccccaaaacccaaggatacccttatgatttcccggacccctgaggtcacgtgcgtggtggtggacgtgagccacgaagaccccgaggtccagttcaagtggtacgtggacggcgtggaaggtgcataatggccagacaaagccggtgtaggagcagttcaacagcacgttccgtgtggttcacgttctcagcgttctgcagcaggacttgctgaacggcaaggagtcaattgcaag

SEQ ID NO: 608 - DNA, 512 bp, Homo sapiens
  I.608 (AA481950)
  misc_feature (165)..(165): n is a, c, g, or t
ggcaaaggggagcgtctgggtggagacggacgtgtagccctgcaggcaccggcggagacagcctgtccccaatcagcaattggtcgtgcctggctctagagagcgtggggagctggtctcaaggacccagcatggttccctggggcttcccaagagcctgtgctngtggtgccgggctccagacacttcacggaaggaagatcacatgtccccagagaggcacccccaggcaagctcgagggggccacaccgtgtcccagggagcccagcctattcccgttggctggctgggccctctcagctgctgggccccacctccccactgcacccaggggacaactccacctggactgatgggcacaggaggcaccaatagcgattattgggggcaatgcgaggtctcctcctatgcccttcctacccctgagtgggacaagaagggccttgagtgccaggagtgccccacgttctgagaaggggccggcccgcggaggggacccggcaggagattt

SEQ ID NO: 609 - DNA, 212 bp, Homo sapiens
  I.609 (AA481830)
ttctctaggaagtccttcctgactacctgtgccctgagtgcccctacatgagactgtatgccctgctatcagatgccagatctatgtgtctgtctgtgtgtccatcccgccgaccccccagactaacctccaggcatggactgaatctggttctcctcttgtacacccctcaaccctatgcagcccggagtgggcatcaataaaatgaactg

SEQ ID NO: 610 - DNA, 463 bp, Homo sapiens
  I.610 (AA480128)
  misc_feature (332)..(332): n is a, c, g, or t
  misc_feature (335)..(335): n is a, c, g, or t
  misc_feature (337)..(337): n is a, c, g, or t
tgggagcggggcaggcgcaacagcctccggtgagtcccgggacagcgctggtagggagtcagaaggagcccagcgaagtgccaacacctaagagacctcggggccgaccaaagggaagcaaaaacaagggtgctgccaagacccggaaaaccaccacaactccaggaaggaaaccaaggggcagacccaaaaaaactggagattgaggaataggagggcatctcgcaggagtcctcggaggaggagcagtgacccatgcgtgccgcctgctcctcactggaggagcagcttccttctgggactggacagctttgctccgtttccatttttcnttntncttccccaggcccaccatcaccaccgcctctgtgcgctacccccatcttccacctgtgccctcaccaccacactatccagcacaccagccgctgcagggctcccatgggctgagtggggagcagtt

SEQ ID NO: 611 - DNA, 503 bp, Homo sapiens
  I.611 (AA479990)
tggccgccgtgcaccttgtagcgcattagcagcacgaagatgaagaccagtaccgaggctacgatgacgccgcccagcgcgatgatcatcgtgccgcccaggaagggagcgtgcgcgccccgcatggccgcagcgcagggttcggtggagaagcgggcgcacacagagcacgcgtggcgtcgagccccgtggcgatgtcctcatacacggcgagcacgcacagatcgtaggtccggcctgacgccaggtccgtcagcaggaacgagcggctctccgccgggatcatcctgtagacgaggatgtcatcagccgagctgttggtactggatctggtacatgcggatgcccgggataggccgctgatccggccactggacaagagcagctgtggccccgtgctcagtcaacctggacgccacggtcggtagggggcccagtgtcggccaccttggcagaagcagaggcagcggagggtggggtgagagcatcaggatccccgtccc

SEQ ID NO: 612 - DNA, 372 bp, Homo sapiens
  I.612 (AA479964)
ggatatatggatgggattctttattattacttaaagtttactgttctcataattacaggctacaacttagaggtttgaaactttaagagaaaattctataaagagagctcaaataaacatgaatcagtatgtagaagacatttaaaactttgtaagtagtgccacttagctctgggcaatacttatctgtccttttcaagcacaggccctggagccagagtcaacaacataaaataccacaaacgactctaagacattcatcctacacaagcgagcacatatacatatatatttatataatatatacatactttaatattatgttggtccacggggtatacacattttaacaaaagataaaaatctatgtaa

SEQ ID NO: 613 - DNA, 521 bp, Homo sapiens
  I.613 (AA479467)
tggaaatcatcaagcaagggtgtgagtttgagaacactgtgcacaagtggatttccatcaccgaggccctagctttcttccactgttgtctgaaccccatcctctattctttccttggagccaaatttaaaacctctgcccagcacgcactcacctctgtgagcagagggtccagcctcaagatcctctccaaaggaaagcgaggtggacattcatctgtttccactgagtctgagtcttcaagttttcactccagctaacacagatgtaaaagacttttttttatacgataaataacttttttttaagttacacatttttcagatataaaagactgaccaatattgtacagtttttattgcttgttggatttttgtcttgtgtttctttagtttttgtgaagtttaattgacttatttatataaatttttcttgtttcatattgatgtgtgtctaggcaggacctgtggccaagttcttagttgctggatgtctcgtggtaggaccgtagaaaagggaac

SEQ ID NO: 614 - DNA, 537 bp, Homo sapiens
  I.614 (AA479357)
tttaagtttaacatgtacttttattaacaacttaatacaagactgtacactgtaggtgctgaaatcaacccactcctgaaaactgaaaaaccagcatttctataccactttgggctttggttataagtgccatcttctacagcaaaatcacgtcttaagaacaggaaaaacgttccacgggaatggagagattatctatgcataaacagctggggatcatttctagctttacgtgattcactacacgctctggaatgttcagttcccttttctacagtcctaccacgagacatacagcaactaagaacttggccacaggtcctgcctagacacacatcaatatgaaacaaaaaagatttatataaataagtcaattaaacttcacaaaaactaaagagacacaagatcaaaaatcccacaagcattaaaaactgttcaataattgggccagtcttttaaatctgaaaatgtggaactttaaaagaggtatttatcggattaaaaaagtgctttacatctcggttagctgggggtgaa

SEQ ID NO: 615 - DNA, 373 bp, Homo sapiens
  I.615 (AA478944)
tgcgagccgcccgtggtgactcaccgctcaccacctctggctgtgccgcaggtcggccggctgccctgcgctgccgggcagtgggggacccagagccccgtgtgcgttgggtgtcaccccagggccggctgctaggcaactcaagccgtgcccgcgccttccccaatgggacgctggagctgctggtcaccgagccgggtgatggtggcatcttcacctgcattgcggccaatgcagctggcgaggccacagctgctgtggagctgactgtgggtcccccaccacctcctcagctagccaacagcaccagctgtgaccccccgcgggacggggatcctgatgctctcaccccaccctccgctgcctctgcttc

SEQ ID NO: 616 - DNA, 493 bp, Homo sapiens
  I.616 (AA478900)
tggacttatcgtacaatgacattcgatttatcccccctgaaattggagttctacaaagtttacagtatttttccatcacatgtaacaaagtggaaagccttccagatgaactctacttctgcaagaaacttaaaactctgaagattggaaaaaacagcctatctgtactttcaccgaaaattggaaatttgctatttctttcctacttagatgtaaaaggtaatcactttgaaatcctccctcctgaactgggtgactgtcgggctctgaagcgagctggtttagttgtagaagatgctctgtttgaaactctgccttctgacgtccgggagcaaatgaaaacagaataacttatttttcgttaaagtttgactgaaacacgcttctaccaaatacagtataaataattaggtagtcttaatgcctttcctatttttttttccttttcacacaaaatgtacacaaagatcgcgtaaggagtatgtatttttaa

SEQ ID NO: 617 - DNA, 534 bp, Homo sapiens
  I.617 (AA478781)
ttttttttttttttttaatattgaaaaaatacaattaaatttttattaaaaatacatactccttacgcgatctttgtgtacattttgtgtgaaaaggaaaaaaaaataggaaaggcattaagactacctaattatttatactgtatttggtagaagcgtgtttcagtcaaactttaacgaaaaataagttattctgttttcatttgctcccggacgtcagaaggcagagtttcaaacagagcatcttctacaactaaaccagctcgcttcagagcccgacagtcacccagttcaggagggaggatttcaaagtgattaccttttacatctaagtaggaaagaaatagcaaatttccaattttcggtgaaagtacagataggctgttttttccaatcttcagagttttaagtttcttgcagaagtagagttcatctggaaggctttccactttgttacatgtgatggaaaaatactgtaaactttgtagaactccaatttcaggggggataaatcgaatgtcattgtacgataag

SEQ ID NO: 618 - DNA, 261 bp, Homo sapiens
  I.618 (AA478744)
taatccggagagaagagacctgccagattatcagacctcttcatgttaaaagaccatctcctgtaaaactgacctagtggacaagctgaatttgaaatagactgtgaagtaagctgtaacttgtcattttaattttgtttaacacggttactgacttagatgatgtattaaataccaagataaagaaaaatgcacctaaaatctaattagaattctctgggtcaacaagtcaaggtggtattgatctgtgttaatctgagt

SEQ ID NO: 619 - DNA, 446 bp, Homo sapiens
  I.619 (AA477514)
tgcggccgcaatagtacgctcgcgcggcggtggcgggtggtggtccttggaacgcggtgggcggacagcggcacggcctcccctcccctccggacgcaagccgaagtacgtgagaggagacttccggccactgcgttgtagtcggcccggctgcaaagcgtttttctgcaggctgttttcccaggttccctcggcctgtacctcgcgcactcctcttgctccaggtccttcagtctccgctcgtctcaccgtaggctgtgacgacatgagcaacaaagaaggatcaggagggttcaggaaaaggaagcatgacaatttcccacataaccaaagaagagaagggaaggatgttaattcatcttcacccgtgatgttggcctttaaatcatttcagcaggaacttgatgcaaggcatgacaaatatgagagacttgtgaaacttagtc

SEQ ID NO: 620 - DNA, 283 bp, Homo sapiens
  I.620 (AA477103)
aattcggtacgaggtttttgagatggagtcttgctctgttacccaggctggagtgcagtggcgcaatctcggctcactgcaacctctgcctcccaggttcaagcgagtctcctgcctcagcctcccaagtagctgggattacaggcacataccaccatatccagctaatttttgtatttctagtagagacgaggtttcgccacgttggtcaggctggtcttgatctcttgacctcgtgatctgcctacctcggcctcccaaagtgctgggattacaggcgtga

SEQ ID NO: 621 - DNA, 424 bp, Homo sapiens
  I.621 (AA477231)
tttcaggggtggggaacactttattttaaggcatattcatatcagcatataaggcatattcatatcacaatggcacgatctcagctcactgcaacctccacctcctgggttcaagcaattctcctgcctcagcctcccaagtatctgggattacaggcatgtgccatcatgcctggctaattttgtatttttagtagagatggggtttcaccatgttagtcaggttggtcttgaactcctgacctcaggcgatccgccaccttggcctcccaaagtgctgggattacaggcgtgacgaccgcgcccggccttttaaggcatattctaaagattgcaccccaacctccaaaattaaaaaaaaaaaatctctaaaaaataaaaagtgatttcatctcctaggccccaatcaatcatctaagtaaag

SEQ ID NO: 622 - DNA, 447 bp, Homo sapiens
  I.622 (AA477230)
gaaaaaaacttcccaaaccctgggcaactgaggttctgatgtggagctctggatggaaagcgtgctgaagtcttgttaaactagcaagcttttgtttggaggtccaccgccgaagtacaggcctgtgggaacacgagcgttgagactgggggcgtctagatgatccaagggctcggacctcaggcacatgcgaatgacccggagtgtggacaacgtcagttcctgccctttctcaccacggaagtcaagctaaggtgattcaaactaaatcaacccaatgtctctcctacccactcaccattgctacccttctcacctctgcctcctggtgcctctatgggtttcgactcagagatccctatatcatggtgtccaactttccaggaatcgtcaccagctttatccgcttctggcttttctggaagtaccccaggagcaagacaggaa

SEQ ID NO: 623 - DNA, 377 bp, Homo sapiens
  I.623 (AA476704)
aattcggtacgaggctggggttcaggcgggcagcagctgcaggctgaccttgcagcttggcggaatggactggcctcacaacctgctgtttcttcttaccatttccatcttcctggggctgggccagccagcgagccccaaaagcaagaggaaggggcaagggcggcctgggccctggtccctggccctcaccaggtgccactggacctggtgtcacggatgaaaccgtatgcccgcatggaggagtatgagaggaacatcgaggagatggtggcccagctgaggaacagctcagagctggcccagagaaagtgtgaggtcaacttgcagctgtggatgtccaacaagaggagcctgtctccctggggctacagcat

SEQ ID NO: 624 - DNA, 361 bp, Homo sapiens
  I.624 (AA476663)
gttatccatttcacccttggcctatccctctcagataggtggggtaggattttcctggtgaccgagtaaagtgagaggcaggtgagacggttcacccaatcacacgggaaggggcgcgcgctgcccaaccgcgctctccgcctacctccgctgctcgggaagctgctggcctggccctcctggtctctcttcctttcctggtctctcttcctttccttgctctcacccacggataaaaccagaagcgacaggaggccagctcctggggttcctgggagccgggaacagattggctacggaacgccccaggttgtacattcagagggctctttctccatgggagctcctggtgccgcctcgg

SEQ ID NO: 625 - DNA, 344 bp, Homo sapiens
  I.625 (AA401826)
gcggccgcggggtcagcggagggcgccggcactccggtccccgccgctccccgtccccgctgctcctatcccctgccgcgtccccggcggacgggctatggcgccacccgcggcctaggccggaccgtgtgggccgtgagatgaggacggctgggagacgcgaggggaccgcaagcccggaagcccctggtggagaagaagcggcgcgcgcgattcaacgagagcctgcaggagctgcggctgctgctggcgggcgccgaggtgcaggccaagctggagaacgccgaagtgctggagctgacggtgcggcgggtccagggtgtgctgcggggccgggcgcgcga

SEQ ID NO: 626 - DNA, 297 bp, Homo sapiens
  I.626 (AA292587)
gcctggccgagctgagcagcctgagtgtcctgcgtctcagccacaattccatcagccacattgcggagggtgccttcaagggactcaggagcctgcgagtcttggatctggaccataacgagatttcgggcacaatagaggacacgagcggcgccttctcagggctcgacagcctcagcaagctgactctgtttggaaacaagatcaagtctgtggctaagagagcattctcggggctggaaggcctggagcacctgaaccttggagggaatgcgatcagatctgtccagtttgatg

SEQ ID NO: 627 - DNA, 486 bp, Homo sapiens
  I.627 (AA291608)
  misc_feature (321)..(321): n is a, c, g, or t
  misc_feature (472)..(472): n is a, c, g, or t
ggcttctgtcctgcacaacctccctcacagaacagggaagcagtgacagctgagatggcacgggcctctccccagccctgagcactgtgtcagttcctgccttttctcatcagcagaacagaatccttttcctcttttccttcctcctctttggaattttcctgggacctacagaataaagggggggatggacagggggttttcaaaaggaacatggctcactcagagctatatggttagacgtttctccccttttccctaccttccatggtcctggttggccctggctttgcctactagaaaaccaaaacttcccccctnggggttttgtgcccactctctgagaagttggggctccatcaagccccattctagtcatgtgcccctttcctgtccctaacagtccacaggcaaacaaatggtacagtcataagagcatctgtcaggacccacgccagtagaacgtgcaganaaagcagactacat

SEQ ID NO: 628 - DNA, 489 bp, Homo sapiens
  I.628 (AA291449)
caagggtaactaactccaaaattctttatttagtaaaattgtcacatttgatgtcaatggaatacacaaactcaagtgtgctacaaacaagatgtacagagcatcacagctctgggcagtgcagctcagtgcacctgcctctcatctccccgctgaagtggcaagttcaagcttttgtttagcccagggctgcctggaacactagtgcccagcaccatttctgccacctctgcccccagagcccgcacaggcgtggtgaagcctgggtgggtgaacctgggagagcgctggcagctctacaaaattcttcctcctgcccgtagctccctacctccacccactccagagctgcagggtccctaaaagtttcttaagaaacggggctggggctgactgggctggttacaggggctgccctgaagccatccatcagaggagggagggaagacctgggagacttccagggccctaccccaccacatctgaacc

SEQ ID NO: 629 - DNA, 632 bp, Homo sapiens
  I.629 (AA291398)
taaaactctaaatttattcaaaatgttaaaagattttgttctccctccaaaatattttacaattaaaaaaatcaaaactatatcctattttctcagccactgtacaagttgctgtttccatctcaggactagtctctggccctccaacactctgtccctccctcaatcccccacctcctttcaatattgctgttaagtttgtttataaaaccctccaccctctctccccaccccataccctgctctgctctgcccagagtggtgtctctttgcgattccaggccgttggctgcaggtgaagccgaatggatgggtacgatgtacacaagcaacacctgaggggcaagagtatgctttgtgcttctgggagaatcacttttttcttggtcaagtggaggatcgttctttttttgtcccatggacacctgttctgagccaaatatttggcttatagttgcccacagccatgtagctctgcttttttctgcacgttcctctgggcgtgggtccgtgacagatggctcttatgactgtaccatttgtttgcctgtggactgttagggacaggaaaggggcacatgactagaatggggcttgatggagcccaacttctcagagagtgggcacaaaac

SEQ ID NO: 630 - DNA, 418 bp, Homo sapiens
  I.630 (AA290901)
tgtgggattattttactaaatcttacttatgtttggagatctcttttaacttaaagttacatggtctgtttcttgtttattttacctctattctttaggttgaaattttatataaagtaagatactggtatcttagtatttcctgttcatgcttagtagtttattacttcacttgagggtacttgacaatatgaacaaaaagtaaatttttatttgcataattttaagcttttgaaattaaattatctattcttccccccccccaaaaaaaagtattgtaaatccttaagtaaaattgtatttctagctattggtaagagttgtttcactattgctatgtaggactgtttaaaatgtgagtatctgatattatttaatcctccaatgtctcattttgcagtaactcctacagtgtgta

SEQ ID NO: 631 - DNA, 389 bp, Homo sapiens
  I.631 (AA283794)
aacattcagcaaatatttattaagcacttataattggcacgactttttttttaaaaaaagaccatcatgttcttacatgaggctcacaaactaatgtgttgacacttcagtaaagtctatagtcacaaaaattttggattgactattatgggatactaaaatatgcataagtatgaatggctactttagtgtttagccatcattagttcttatttttagtgttacacactgtaggagttactgcaaaatgagacattggaggattaaataatatcagatactcacattttaaacagtcctacatagcaatagtgaaacaactcttaccaatagctagaaatacaattttacttaaggatttacaatacttttttttggggggggggaag

SEQ ID NO: 632 - DNA, 395 bp, Homo sapiens
  I.632 (AA235709)
gggaatgagaaaataactttatttcattgtggggagcggggcgaagggttccccgtggctttgcattggagggccactgtttctcccacagataccacacggtcttccaaggggaccaccaaggatggggtctctaggacagtcagggtggcattagctgaaatagaaccggctgagttctgagcagtacagctgtaaacccctgcgtcatctattttcacatcagtgatgaaaaacacgtcgtcatccggcatgacatgcatgcgtcgctcacgggcagcggggaaatccgtgcctccatccttctgccaggcaatctgagggtttgggtgacctgtggcagcacattcgaggcgggccacggtggtggtccggatggttatgtcgtggggcgt

SEQ ID NO: 633 - DNA, 611 bp, Homo sapiens
  I.633 (AA528169)
ttagtgttggttaagcatttatttttgcatcctaatcctaatatccactctatgaatttaggacctactattactcccattttaaagataagtacaccgaggtttaccaagattaactgacttgccaagggtcacacactggagtaagggcagaaccttagactcatgtctgacccctcgccccatgctcttaaccacataatgccatcttttatttcagtgacaagacaaaagcatttaggtcacactcttgttgttaaacaggaaaattatataaatgcaaattgtttagaataggttttggatttccttttgagcaaacccccagtcctttaaaggatatacttaaaattttttttaagcagaggaaaatagactactatttaccaatgacaagtttatagagttttaaaacgagaggttttttaaaaatctgcatccaaggtgaagacgttatctgtggtttctgccataactgcaaaacgctgatactctgaaactcgtttctcaaagaaatttgtttttccttctaaagaaatgttttcccataaatcaaaaggattttctgcctgaaaaacctttgagaatccaagttccacaagtaatctgtc

SEQ ID NO: 634 - DNA, 542 bp, Homo sapiens
  I.634 (AA528101)
gacctgtgtacacgcttatggttgttgagatatgatctctgttcaaaactttgctcacatatatcacatttgtgaggtctctgatcaggaacaggtcttgacagcaacctgaggtttcccccagactccctgctgctctccccgttggtcagtgtgactgccctggggcctctctgctccactagcttttccaggctcccctctgacttactgatgtggtcacaggcttctactggctcagatccctggggatcttcctcaccaaatgtctcctgtgaagtcaactccttgtactcagttctggtcccaagagctgggctgttgactctcaggtgctctttcccagaggtgccctgaacatccaggacccagggctcatcccctcgctccaactgcgagatcactccaggcttggggactgcaggtcctactcccagtgagactaggttcccgtaggtctccagcatcacgtccctgtaagaagccctctgagcaaggcccaggcggtccatttcatccgggaaatgtacacaagcagttct

SEQ ID NO: 635 - DNA, 452 bp, Homo sapiens
  I.635 (H10346)
  misc_feature (70)..(70): n is a, c, g, or t
  misc_feature (366)..(366): n is a, c, g, or t
  misc_feature (377)..(377): n is a, c, g, or t
  misc_feature (392)..(392): n is a, c, g, or t
  misc_feature (415)..(415): n is a, c, g, or t
  misc_feature (437)..(437): n is a, c, g, or t
tttttttttttataaacaagaaaaaaataatggttgaattttattatgattagcgacatccattcctggnaaaaacattctaagcattggagaaattcaaagtaaatgctttaatgaaagttatgaatgggatttaacatgggaactatgcatatgcaatatcatatttttcatatcaatgaaaaattccataaaaatagctatattaaatttcatatgtaaatatttaacaaatatgtttgtattcttctatttttatacaatgaatattaatacatattgcatttatttattttaatgacatttatttaagttcaattgtacaaaacccaatttgttgtcaaagtatcaggcataattttaatnttgtacggggnttatcggggctggcnaattggaaaacccctggtaaggncggctggttaggcccccggggnttttttattaatagg

SEQ ID NO: 636 - DNA, 412 bp, Homo sapiens
  I.636 (AA464784)
cttccacctcccatcttcctgtggtctgtgatccctaggttgcccagcccttcctccaccagcatctgtctctagcctaactgaattgtaggttacatctaaaagccccttcccagaccagccactgtcacctgtccccgagctccgggtggacgcagtatggctctgggccacccctccagcacatccacccttcaggcggggcctctgtggcacattccagctgccggggcccaggggtgattcctgcagctcgccctgccctggctctgctggcaaaggccccactcccacccttcttacccagggcctttgctcagaatctgcaggggctgggaacagacaggggccgagagagacccaagctcctgctcatctgtcttgaaagtgggggaggggcagataagctaca

SEQ ID NO: 637 - DNA, 218 bp, Homo sapiens
  I.637 (AA464191)
tgcggccgcagagggagccaccagagactgaagcagcgtgaggcgaggtcaccagccgctccctgtggggtgcgggcagaagagactgcacgctggggagtggggacagcctgatggggcagggggcctgcaaaaatatgtctgttggttcctgaatgtggtgtgtccttgtcctcctggatctggccgagtgcatgtgtccccccacacctgtgcca

SEQ ID NO: 638 - DNA, 431 bp, Homo sapiens
  I.638 (AA464111)
aattcggcacgacgcgagcggaaggagttgaaggagtgcctgttgatgccgtccagcttactcatcagggcgatgctgaactccaccatgacaccaatgtgggcatgctgccgctccagctcctgcgggacaggctgtgggtcagatccttgcatctccagagcccccagacctagtgggccctggcgcgccacgtcttgttgaggatccccaccactaaaatcctggctgagccctacaagtacctgtgcccctcccccaggacgagataagggcacaccctttaagtaaggtgacaggtcacctttaagtgaggacagtcagctgaatttcacctcttgggcttgagtacctggttctcgtgccctgaggcgacgctgagccctgcagctgccatgtacgtgctgccgatggtcttgatcttctccacg

SEQ ID NO: 639 - DNA, 408 bp, Homo sapiens
  I.639 (AA463976)
ctttttcattctgttttatgcagcaaataattcgttggcatcttctctgtgatgggcagcttgctaagattagactcaggccccttagcttcatttccaactaagcccacgctatcaaccaagccaaacagaggaaatcagtttgggttgaattctttgctggagacaaagaatctacattcctgtgtagataatgctgtgtttgctctgtgcagacacagatggaagggaagagggagacagtgtggggacggagacaacaggaagagcaggagccgccaagggccatgtcctcaccatgcttagtcatgcgctcagctggcagggcagccatgagacgtgtgtgcgagaggcggcgatgggtggagggaaccccacacccttcctgagaagcagggcagcctggct

SEQ ID NO: 640 - DNA, 421 bp, Homo sapiens
  I.640 (AA461263)
tgaaataaattaaagaacaaagaaaatgtatatactcctaagtctgctgtaaagaatgaagagtactttatgtttcctgagccaaagactccagttaataagaaccagcataagagagaaatactcactacgccaaatcgttacactacaccctcaaaagctagaaaccagtgcctgaaagaaactccaattaaaataccagtaaattcaacaggaacagacaagttaatgacaggtgtcattagccctgagaggcggtgcgctcagtggaattggatctcaaccaagcacatatggaggagactccaaaaagagaagggagccaaagtgtttgggagccttgaaagggggttggataaggttatcactgtgctcaccaggagcaaaaggaagggttctgccagagacgggcccagaagac

SEQ ID NO: 641 - DNA, 422 bp, Homo sapiens
  I.641 (AA461044)
tttttttttgggtagaaatcaagtattttatttaaagttctgaagataatgagcaggtaggaggccagcagtcactgctctaaatattaatcaggactctgaatcacccattaaagataaaatcagcccaaacaataacacatggtgattatccactcttcatttccatgttcaaggacaactgtcctgacctcaggctctgcactccacctgactaataaaccaattaacgccatggccctagggaacatatgcacaattttaaatctatgcaaatccctaagtatactcaacagtattaatttatgctaccgagttctaatttaacaggaaagttaaattagaaaagtttcacatatacatggtaaagcacatatatctgtctataggtaccatggaatatactttcccaagtgtggatc

SEQ ID NO: 642 - DNA, 513 bp, Homo sapiens
  I.642 (AA460956)
tttttttatattcacaaatggttttatttcagaaagaaattacacattacaaagagacatagttaagagcttacattcacatatggaagtgaatctaagaaagtcaacaattattaatatacaaaaccacatgattaaaaaagacagtaacataatgacagatgggcttgatttagattcatacacaaaataatatcttttgtttaaaaacaaagagatattggtcttaagatagctctttagaaacaagttggtagttccaatgaactttaaaatcaaagcgatcataacagtctttatgtaggctgtatcacacccacactcatccggcagatggaaagaatccatcaattataccttgcagctagataggatgtcttccactaatcttttgtaaacccaggcatcgccttaagccgctgcctcctgatacccgcacatcgggtttttgaagctggcacacttctaatgcaaattgcattgtccctttccaaaatctgactgggtttgaca

SEQ ID NO: 643 - DNA, 501 bp, Homo sapiens
  I.643 (AA460875)
atcaaataatcaggaaccagattttattgatgatatagaagaaaaaactcctattagtaatgaagtagaaatggaatcagaggagcagattgcagaaaggaaaaggaagatgacaagagaagaaagaaaaatggaagcaattttgcaagcttttgccagacttgaaaagagagagaaaagaagagaacaagctttggaaaggatcagcacagccaaaactgaagttaaaactgaatgtaaagatacacagattgtcagtgatgctgaagttattcaggaacaagcaaaagaagaaaatgctagcaagccaagccctgccaaagtgaataggacctaaccgagaaaaagtttttctcggagtaggactcacattggacagcagcgtcggagacacagaactgtcagcatgtgttcagatatccagccatcttctcctgatatagaagttacttcacaacaaaatgatattgaaaatactgtacttacaatagaaccagaaac

SEQ ID NO: 644 - DNA, 480 bp, Homo sapiens
  I.644 (AA460701)
gctgtcatttaatagtagtggacttttattttcaccattgactgcaggacttctggatctttcttgacagggtgaattaaatctatgtaaaattgctgaattttcttcttccagagcttgtttcaaccatcgcttcttgcatgaaccagaaatgttttcagtaggttcttttcttctccttttttctgaaaggaatggtgaagtaaatctaatataatgcttaggagtggagtatacatgggggctgtaagtgagacctggtaaagaattgagttgtgtagctaacacttcaggatctgtagttatgcgtagaggcctttctgaaaggccatctgaaggttttcctgtcttctcattcttctcacttaaccattcattaaccaagtgcttctttgttttggggtacttggtaggacatttattaagtgctggaacttcagtttcagtaattatttctgctagtgcagtttcagtttctgg

SEQ ID NO: 645 - DNA, 423 bp, Homo sapiens
  I.645 (AA460476)
gcagccatgagggaacagctcaaaggccacgagactcaaacaacttgctgggaccatcccaaaatgacagagctctaccagtctttagctgacctgaataatgtcagattctcagcttataggactgccatgaaactccgaagactgcagaaggccctttgcttggatctcttgagcctgtcagctgcatgtgatgccttggaccagcacaacctcaagcaaaatgaccagcccatggatatcctgcagattattaattgtttgaccactatttatgaccgcctggagcaagagcacaacaatttggtcaacgtccctctctgcgtggagatgtgtctgaactggctgctgaatagtttatgatacgggacgaacagggaggatccgtgtcctgtcttttaaaaccggcatcatttccctgtg

SEQ ID NO: 646 - DNA, 494 bp, Homo sapiens
  I.646 (AA460075)
caggaattctcaagggtctctttggaggcttaccaaggacatccagctgcacagtgaaggtggcttctcctgctctattcttggcaacacatgcataagcccctgcatctgaagctctgactacttcaaagatgagtgaatgaagacccttctcagacactatcattttgtgcaaatcatctgattgaactgttcttccatttagataccatgacacatcaggagctggcagtccactcacctagaaagaaaaacacaaggagatggcagaattttaaagtattgcatcactgaaacctatttgtccatatatgaatttaaacagttcccgtatctgagtgggtttgcgattgaaatgcaaagcaagagctcaaaagtatttataattttttaaacaaaacattggaaataagatccttgaaattaacatagtatttttagactgtctcaaaccataactcttttacatgcaacctcagtctctttatgaactc

SEQ ID NO: 647 - DNA, 480 bp, Homo sapiens
  I.647 (AA459981)
tttttctttagaagaggttatatttttattatcctcattttggagaacttttccttataaaattttttttccagattccttatgaactcaagttagtgttaaagctttggattccactgttaacagtttatgtaaaaacacttaacaaattgccatttatatgccaaactatagctcaagaacactctgttttagaaaaattacgcattagatcaggaagcctcatatatatgtgcctctgggacttcatttgcagtcacatttagccagaaaagcaatgacttctatattccttatggaaaccaatgtaacataaattaatgttctaaatatagaaattaagagttcataaagagactgaggttgcatgtaaaagagttatggtttgagacagtctaaaaatactatgttaatttcaaggatcttatttccaatgttttgtttaaaaaattataaatacttttgagctcttgctttgca

SEQ ID NO: 648 - DNA, 393 bp, Homo sapiens
  I.648 (AA459755)
acttcccactgctgcccggctccaagagcagcccctgcaccacctcctgagcctccagccctcagcaccttcacccatcaacattcggtggagggacagtgtttatgatcccggcttaaaaccactgaccatctcttatgacccagccacctgcctccacgtctggaataatgggtactctttcctcgtggaatttgaagattctacagataaatcagctgcacttagtgagttggaacgcagtcaaatttgaaaactttgaggatgcagcactggaagaaaatggtttggctgtgataggagtatttttaaagatttcggaaacttctggcagcccagtgtctactggaaggcccaagccgcttgccagaaagctgcgccccgcccaaaagc

SEQ ID NO: 649 - DNA, 479 bp, Homo sapiens
  I.649 (AA456131)
gcggccgccaggaaggattcagacaactctgcctgggagtgagggctctgctcagcggcctagacctgggcacaacggaacaggccactccgtttctcatcacagacctgaaggcagatggcctgggcgtcgggcttcctctgctctctggcggggcgattttcacggtcaccaggctgcggacaggctgtgggggtggcgggcggtccaaagccaccgcttcacgtaggccaggggagccttggagaaatcaggcctgatgttgctcagcagcggcacctgttgggaaagcacctccaggcctcggggaccatctctctcaggacgcggatgcgggcggggaccatctctctctggatgcagatgcgggtgtagtcccagctgggaggagtggtgcggaggggccggatgcggacccagtgcttcctgtggaagtaggtgaccttgcagttctcctggacctgggagctgaggaaggg

SEQ ID NO: 650 - DNA, 448 bp, Homo sapiens
  I.650 (AA456082)
tttgatgcagaagcctctttaatgattactatttgaaaatgtggttggtataacacagttgggagaaggctaacactttctggaagttctcagtgctgggctccatgccaggctttttcactggtgttatctcagcatacacaggaactttagttctctctggccctggtgacagtcctgcaccaggtccggcgtgaggcgcttggcctgcagccatttctggaacctctctgttttccgcagactacgctcaatgctgcaggtctttggggctgatgcagaggcacagattctcctgtctgagatctcgttttgatatttgctgaccagtctaaagatctccacagggcgccagattttggaatcatctgagtaatttgcaggataagaaagcaaggaatcgggaggcagtccaaggtgggaagccagccagttgtcagatcttatt

SEQ ID NO: 651 - DNA, 474 bp, Homo sapiens
  I.651 (AA455585)
gcagaccaagatggagccccagctgcgctgaggctgccgccctccgccctgctggctggcctgctgctgtgggtctcagccctgagctgttctttctccttgccagcttcttccctttcttctctggtgccccaagtcagaaccagctacaattttggaaggactttcctcggtcttgataaatgcaatgcctgcatcgggacatctatttgcaagaagttctttaaagaagaaataagatctgacaactggctggcttcccaccttggactgcctcccgattccttgctttcttatcctgcaaattactcagatgattccaaaatctggcgccctgtggagatctttagactggtcagcaaatatcaaaacgagatctcagacaggagaatctgtgcctctgcatcagccccaaagacctgcagcattgagcgtgtcctgcggaaaacagagaggttccagaaatggctgcag

SEQ ID NO: 652 - DNA, 464 bp, Homo sapiens
  I.652 (AA455096)
tttcaatttaataattttttaataagtaaaaaaatcttgtagcatgcaaaaacttaccagttccccaagttttcattaccctgtctcatatttagtatatgtgctgcatctggcaacaatgatcatcagaagcctaggacagtataatattactaccataaatcataagtaataggatgattttagcaaaactctcattttggttttctagaacctacctccaggctacttaagtacttaatttctttcaactcttaattctatgtaaatctacattactagataagataatggtactcagaaatgtattacatccattaagctacctgattggctgcaaaagctggagcagtttctttagaagtcttccaaacaaactgcctttgatattcagaatttctgaaggcattatatgaaggaacaacagtcaatccagctttcttacgcagaagtctatccaactg

SEQ ID NO: 653 - DNA, 326 bp, Homo sapiens
  I.653 (AA455012)
ttttttttttaactgatagttcattttatttttataagccttttgtaaacatactgctatgtaatatgagtatatataacatactaaagaacatatctttttagtccataaccattacttctaatggattataagtatacccagattttgaaatgtatacaaagaaaatttaacaaataataacatgtaagctatacatgtcatattttacctgttacccatcaatctgtttctgtttttaaaacacagttttcaaacactaagtctgtgattaaacaatgacactaaaattaaattgtgtatatgtcctacctagttcaataggc

SEQ ID NO: 654 - DNA, 554 bp, Homo sapiens
  I.654 (AA455011)
caaactgtttattcaacttctgataggtctgtcattgaaagagatatgtgcacttactgccgaaaacccttgggagtagaaactaaaatgattttagatgaattacaaatttgctgccattctacttgctttaagtgtgaaatatgcaagcagcctttggaaaatctgcaagcgggtgatagtatttggatttatagacagacaatacactgtgaaccttgctactctaaaattatggcaaagtggattccataactctggcacaaggaaatcaagatgaaaagcactcattaaggaattaaagttacaagttttatcttaataatatgtaatctagaaaagctttcacattgaagatcaactcttgtacaagattaacaattctgttattgcataagtaatctaattgtcttcaataaggtcacacacataaaaagagccatctggtctctggctagagttagcgataaaaagttcaaatggttccagattccagtgtcaaaggagtgatgcattacactccagccaggtccatccctgctccgtatgttggc

SEQ ID NO: 655 - DNA, 568 bp, Homo sapiens
  I.655 (AA454792)
gaaatacagtgtgagagagaacctcaccccagttataggaggctatccggttgagaaatttgtggctaccatgtatcattacttgcagtttgcctattataagttgaacgacctgaagaatgcagccccctgtgcagtcagctatctgctctttgatcagaatgacaaggtcatgcagcagaacctggtgtattaccagtaccacagggacacgtggggcctctcagatgagcacttccagcccagacctgaagcagttcagttctttaatgtgaccacactccagaaggagctgtatgactttgctaaggaaaatataatggatgatgatgagggagaagttgtggaatatgtggatgacctcttggaactggaggagaccagctagcccacagcaaccaaagagacttcctcttggcgttcaggaaacacagattctttgtccttttcccaacagcccaggctgtgatacctcagagccttctctttactctccaaagtgaaagggaagcccgcgtctctctaactgcatgtcatcaggggtgagctgcctttcctatcttcacac

SEQ ID NO: 656 - DNA, 416 bp, Homo sapiens
  I.656 (AA454741)
taggcatcttttcttctaggaatgtttttcttatttaaaaaataatactgattttctgggaaaaacaaaaaaacaagccagagaagactgcccttcaaaccaaaatggtaagaaaggcagctatgaacatggggaagacaagtgtgaacatgaggatgacagggattacggtgtactaactgatgtgaggataagaagacaggtgtaaaggtgagaaagaggccgggcatggtggctcacgcctgtaatcccaacactgtgggaggccaaggcagatggatcatctgaagtcaagagttcgagaccagcctggccaacatggcaaaaccccgtctctactaaaaatacaaaattagccgggcgtggtggcacatgcctgtaatcccaggtactcgggaggctgatgcagcagaatt

SEQ ID NO: 657 - DNA, 397 bp, Homo sapiens
  I.657 (AA454150)
acagaatccggcggggtcctcgcaggggcgagctccagctccgcggcgtcactacccggggcattatccagctcctccagaagctgcggtccggctccgcggttccaccaccacggccgccatggaggcagcagcgcccggcctcaccgcggctcagcagccgctcgaaggcagctttttcgcccggcgccacgctccacagagtcccgataggccgccgggcgccgggccggagctgaggcctgcttccccaggctcgtcctcggtctcgcgttgctgacgcagccggcgtagggcgcttgctaggcggctgggaggagcgctgcaaccgcggactctcccagcacctggtcacggtagaagttttctgcgcaggtgccatgcgtccggtagcagc

SEQ ID NO: 658 - DNA, 314 bp, Homo sapiens
  I.658 (AA453993)
tttttaacccgtgtagattcctttattacattacccgagtttatatcagcatgacttgaatttgttgtattcagtttatctgattatttttaaaattttgtcacactcagagtgataccaccaatgagatgagcaccacagttattcaagccagcccagccctgtccaaggaataggcttagatcaagtgaagatccttcctccaaaagtggagatctgttggaacccagtgaggtggattggacgtcagacctcaagaaagtggaccggatcgggctggctctcctgagcaagtcaggtctgagtcgtcagac

SEQ ID NO: 659 - DNA, 352 bp, Homo sapiens
  I.659 (AA453987)
ttttaatttcccaaattgacagagtgtgaggcagggaactactctaggaattagcaagccatctcaggaggatatttcaggatatttaagtgagagctaacactttaaagctctcaaaactgctttttccagtattggacattttaaaagttatcacatgtacttatgtgagaaaccctagtgaataccaacaaaagttaaaatgggcctctctgtcaaaccaggctgtttttcttgtcccattatttctagtgtcaaattatcaagttacccaccagaatttctggaaagaaacgatactgctccttccagagcaaaaacttaaaattttagtttccaaagttatagctaa

SEQ ID NO: 660 - DNA, 431 bp, Homo sapiens
  I.660 (AA453913)
ccacagctgcaccaccgcacccctgtcgaggaaaagccacatctggccagagtactgctccagggcactgagacagctgaaaccacccctgccagcacccctgagggcttcatccaactcatggagagcttgctgggagctacaagacattttagaaacttcctggggggttggaaacaaacatcccccagagaagtgcacctggcactttaccgaaagccggagccgcctctgcatgggctcccagaagctcctgtcgagctgtcggcatgtgatcagaatggaccagtcccccgaagagatgcagggggccgtgcgtgacaccttccagcacctggtccagctggccggcctgtgctttcagttcacagactgtagccgctgctccgcccggcacagggcgcagcggggaacctgagggatgtggtgta

SEQ ID NO: 661 - DNA, 443 bp, Homo sapiens
  I.661 (AA453573)
ccatacttgcaagcccccaagaaggcagcgttacccagacatcatgcgttcagtgggcgagggtgcccgagaatggatccgagagtgtcagcaccaattccgccaccaccgctggaactgtaccaccctggaccgggaccacaccgtctttggccgtgtcatgctcagaagtagccgagacaggcttttgtatatgccatctcatcagcaggggtagtccacgctattactcgcgcctgtagccagggtgaactgagtgtgtgcagctgtgacccctacacccgtggccgacaccatgaccagcgtggggactttgactggggtggctgcagtgacaacatccactacggtgtccgttttgccaaggccttcgtggatgccaaggagaagaggcttaaggatgcccgggccctcatgaacttacataataaccgctgtggtcg

SEQ ID NO: 662 - DNA, 329 bp, Homo sapiens
  I.662 (AA453554)
ttttttcagaaagaaacaaggtttatttgatgaatataaataaggcgatcacacaaagtacttctcatacacatgacaacaaatttatgaactgtacataccttgtacattgttctactagacacgaggttacaatgactggctaatacatgcccactggtagtttccagggttccttagttttatttatttatttttcatatcgatgtccataatcacatggtcaatatcacaacccacatgccactcacttgaagaaatattacaagaagcactatcaaacgagggtctcggggaattagatacactgaccctgggcagcattcaat

SEQ ID NO: 663 - DNA, 392 bp, Homo sapiens
  I.663 (AA453528)
tttttttgtttatagctgctgttaccttttattgagtacccacaatgtgctaggcaactgtgctagatacttttacataatctcatttaatttaaccctcacaacaaccctgtgaggtaggtatttgctccattttacaaatggagaaatcgaggcacaaaagattaaacatcttaccaaagtctgcacagccacttatatgctggagctagaatttgaacccaggtgtgcctccactttttaatactagaccaatcttttcacgggggaagtttcctagattaacaccctcacatcttttaagaccattccaaaacctgcgttctgttttgcagaagccctcactgtgtttctgctgccctgaaacagtggaggcagacaaaggtgagtgc

SEQ ID NO: 664 - DNA, 363 bp, Homo sapiens
  I.664 (AA453527)
acggagataactccctgtgtgtccttgaggtattgagctgggctggacagtccccttgagccaactctaggagtacaatgtcaggggaacccagtttgtgaaaaggacttagactggaggatatttgttatctggggatatgatgcggtggcggcggcgctcgaagataaggggctggggtttctgggtggggggccaacagagtggtgccagtaacagccccagatagaggagtacgcaggcccagcatgaggcaaccttgacccagaaggtggcccagctacccttgatgaaggtcttttccagttctgctccctcatagctgtgtaaccaaaggctctggttagagaatatgaagggcct

SEQ ID NO: 665 - DNA, 331 bp, Homo sapiens
  I.665 (AA453406)
tttcaagattaagcagcagtttatttgaatactctatatagtaaacatttgaagagggtgggtgggagagtggaaggggcttctcagggaagtgtccaaggcaggacagggcaggaggccttggcggatgacctgtttacagggccgtggatgcccggaacttctgggtcaaacagaacacggcggccgtgagggcgatgcactgacgggccaggagtttcacactcaggtcgtggtagcctctctcgcaggtcgatttagcagcctctataaactgatggtaggtgtacaccacatccctcaggttccccgctgccgccctgtgccgggc

SEQ ID NO: 666 - DNA, 496 bp, Homo sapiens
  I.666 (AA453369)
taaaccaaagcacattttgaatgagtatggaacctccatgggctcagaaaaaagatgctaatatatttatctcattgtttacataagcttttacagtttcagacctcagcagctgtaaggccagtccagggaaccctcccctgctgctggaaacccttctgagttggccctggagtggctcacgggcagagaagggtagccctggggctgggggagggattggaagcctccctggagtcacctgagccctcgtccccattcccagggcccctccaagcccagctggcaccaaagagcttgggcccgtgctgaccagcccccaagggcctctggggggaccatgctggtcctgaccagctagcctacgcggggatggccgtcagttctggccacaggacccgagtctgggcttgggtccccctgctgctctgcccgtgacccttggggatgggttgatgcgagggtcccactcaagccaaaaagccgggacctttgc

SEQ ID NO: 667 - DNA, 232 bp, Homo sapiens
  I.667 (AA453314)
ttttttttttgtgtttgtattgttatgattctttttcttctacaaaacacagtttataaacatatgagcatgtgaatggaaccttgtccactatggctaacatctcaggctctcaataatagaatgtggtagcctaagattttctttcggggtaccaggtagttctgctcaaacggacttcagagaagggacatgccattcatctttgtcccatctaactttggccaggtag

SEQ ID NO: 668 - DNA, 228 bp, Homo sapiens
  I.668 (AA453306)
ttttattttgtgcaaaagcaggcttgtgctttataccccatttgatttcgatgtacagtctcaattttgtatttaatgatttttgtgtatccagtatgcacgttaacagcgtgtcaactttcatttgaaagtgggtttcaatttactttttaaacagtgtttatgacgagacctcagatgtgttgacgtaagctctatctgcaatgtttttgtgtagagtggcggatt

SEQ ID NO: 669 - DNA, 319 bp, Homo sapiens
  I.669 (AA453267)
gtggcggaccggcctggcacccgctcactcgccccaagtctgagaaataaatacattcatcactgcacaaacatattgatacaaaaacaacactgttaagagtgtttgcaccgtctatgttggtaaggaccagacccagtcagccccttccgctgcctggggtggggttagggggccccaggagtggggacccaccagagtcgacagagctgcgcaaaggtcccggctttttggcttgagtgggaccctcgcatcaacccatccccaagggtcacgggcagagcagcagggggacccaagcccagactcgggtcctgtg

SEQ ID NO: 670 - DNA, 427 bp, Homo sapiens
  I.670 (AA453196)
  misc_feature (296)..(296): n is a, c, g, or t
  misc_feature (298)..(298): n is a, c, g, or t
  misc_feature (299)..(299): n is a, c, g, or t
  misc_feature (300)..(300): n is a, c, g, or t
gaggtccagccagcgcgttacacctgccctcgctgtaatgcgccctactgctcgctgcgctgctaccggacgcatggcacctgcgcagaaaacttctaccgtgaccaggtgctgggagagctccgcggttgcagcctcctcccagccgcctagcaagcgcctacgcggctgcgtcaaacgcgagaccgaggacgagcctggggaagcagcctcagctccggccgcgcccgcgcctatcgggactctgggagcggctggcccggcgaaaaagctgccttcgagcggctgctgagccntnnngaggccgggcggctgctgcctccatggcggccgtggtggtggaacgcggaccggaccgcagcttctggaagagctggataatgccccgggtagtgacgccccggactggagctcgcccctgcgagac

SEQ ID NO: 671 - DNA, 156 bp, Homo sapiens
  I.671 (AA453038)
ataggggcgctcgccgtgggaccccctgggagaccgaattatagaaagcttcttccccgatgggagccagcgagtggatttcccaggctttgtcagggtcttggctcattttcgccctgtagaagatgaggacacagaaacccaagaccccaagaa

SEQ ID NO: 672 - DNA, 300 bp, Homo sapiens
  I.672 (AA453019)
tttagtttccaaattttatattttaaattgatgatattcttatacaggatgtcacaccacaccagacctctttacataatgtacagtatttctggttttgtggccagatgtgagtacaaacatatggtttctgccacttctctgtcattctggtgtttagccggagtcagaaaaaaaaaatcgttactttaagtgttacttctctagcaataaaaaaaaattatacttagtgcatgcttcatcatttgtcaaaaaatgtttctgaaaatatgactcaagttacccaatggtttacaaaat

SEQ ID NO: 673 - DNA, 437 bp, Homo sapiens
  I.673 (AA452357)
catttctgaagtttaagatgccttgactttttaaatgctcttaaggctattcgatgtaattcttactcctaaaactggctgttcttagcctgaaatctaatgctttgttttttgtacctctcccaggtgggtaacactctaggatgacatgatgttataattttaggggaaatcacatttttaccttatgctgttactgggcagaaccacgttttatgtaaacataccagacatcgggtaacagacagtactttaaatgttataaatttggtgatcagaactattaatagcataaatcgaactcaaatggaagcaaaactgatttcatgcaggtcctgaattttactttgccttaagaagtgccctccccacaatgcaggagaggcacagagtgacgtgtcattgacatgttacccgactaaggatcactctgttca

SEQ ID NO: 674 - DNA, 448 bp, Homo sapiens
  I.674 (AA452345)
agtattggtccatacagagaaactgtggtcctttataaatagccagccagcgtcaccctcttctccaatttgtaggtgtattttatgctcttaaggcttcatcttctccctgtaactgagatttctaccacacctttgaacaatgttctttcccttctggttatctgaagactgtcctgaaaggaagacataagtgttgtgattagtagaagctttctagtagaccatatttcttctggattgtaataaaattgttagtagctccttttactttgttcctgtctctggaaagccatttttgaattgctgattactttggctttaatcagtggtcacctagaaaaagctttgtaatcataacacaatgagtaattcttgataaaagttcagatacaaaaggagcactgtaaaactggtaggagctatggtttaagagcattggaagtag

SEQ ID NO: 675 - DNA, 430 bp, Homo sapiens
  I.675 (AA452134)
ttttttgttttgtcttcctttattacatttttgcttttgagatacaaaccaacctctcataccacacaaagaacatccattcttgggatttttaaagtgcatttccccttgaactctgtgtacaaaaatatttatcttttaaaacatgcaaaaatttcttgacaaggcacttttaggtataaaatgaagatgagtccttggttctacattcacactgaagtaatagtgaaacatcatcacagctgcactctcaaagccctcagaggtccagcagtctctaaaaactcgtcaacaagactaaaaacattcacggctttacaatgtgggttacagagctttacaaccatgaccaggaaaaactgctcgtaacaacagctgtccttcccagttccacatgtgttgtctcactgcaggaaattaagataagctg

SEQ ID NO: 676 - DNA, 421 bp, Homo sapiens
  I.676 (AA452122)
tttcccaacagacatctcattttaatagtcctcatcttataaaagtgagattacagattaacatgttaaccaaagaaattactaaggtgttttgttaggataacatcacacagaatttggtctgaacaatgcaaaaggcaaatacgatgtataaaaacatatacaaaccgagcatttgttataggtactttagaattaatttctatcctcttcccgaggataacatcacacagaatttggtctaaacaatgtaaaaggcaaatacgatgtaaaaaacatacacagagtatttgttataggtactttagaattcatttctatcccctccccaataaacttgtccaattactttgttctaaattaatccttgggaacgagatcttgatagtagcttcagttcatccaacctaggacacttagc

SEQ ID NO: 677 - DNA, 484 bp, Homo sapiens
  I.677 (AA452051)
ttcggcagaggccgcatatttataaggtggacccaatgcctctggagccacggtaagggcaaaggagagccatgatctgacttatgttttaagatactctggcttctgggttcagaaaagactgacggggcaagagaggaagcaggtggagaccagagcggcagtgatggccatcatccagactcagactaggacaatagctgtgagagtgatgggaagtggttggatcctgactgtattttaatagcagaattgacaggatttgctgatagactgcacgtggggtgggagagggtcaagatgacttcaaggttctcatctgagtcaagattccagcccaggcagcctagacctgagagcacgctcctaaccactgcacatcactgtcttagcacctcctcagcacaaactggcccttgaggaatgaaataccgccgccggacacacgctcctgagttaagcctttgtcaatgaaatgaacacc

SEQ ID NO: 678 - DNA, 425 bp, Homo sapiens
  I.678 (AA451850)
tttgaacagagtaagactgcctcacacacacacaaaaaaaattcactctctgtaaaatcgtgctagctcaccattcagtatcccattttacagagggtcacgtagaggattaaaatggactttttggaaacagtcatgccagctgatcacaaatgtgaggttcaaatccagctggcctagatccaaagcctgtgctctgaagtctggactcagcttccccagtgtttgctgcagactatgcccgcttaagcctcaaggactttaggggaaggtcagaaaagggcaagggcatggggaaggagtcttacagggaccaggaatttagaataaggggttactcaatgttccatcgtgcctggacaggttattccttttaagtgggtgttcatttcattgacaaaggcttaactcaggagcgtgtgtgc

SEQ ID NO: 679 - DNA, 414 bp, Homo sapiens
  I.679 (AA451792)
aaagccccagtttcagaatgtgaatcagggatattcctgttactaaaatggagatgtaattccaagtttcttttttaattttttaaatttatgtcattgtattggactatgcttatatttaaaactacttaatttagagttaactacctgcttaggccccagaacattacttatgcccttcagttaccataagatttgtgcaaggttttgtaccctggtaaatgatgccaaagtttgttttctgtggtgtttgtcaaatgtctctatgtataattaactgtctgtaacatgctgtttccttcctctgcagatgtagctgctttcctaaatctgtctgtcttactttaggttagctgtatgtctgtaaaagtatggtcaattaaattactccatcagacacttgtctgtcttgca

SEQ ID NO: 680 - DNA, 478 bp, Homo sapiens
  I.680 (AA451786)
gtcatcagatgcctgcttgataatatataaacaataaaaacaactttcacttcttcctattgtaatcgtgtgccatggatctgatctgtaccatgaccctacataaggctggatggcacctcaggctgagggccccaatgtatgtgtggctgtgggtgtgggtgggagtgtgtctgctgagtaaggaacacgattttcaagattctaaagctcaattcaagtgacacattaatgataaactcagatctgatcaagagtccggatttctaacagtccttgctttggggggtgtgctgacaacttagctcaggtgccttacatcttttctaatcacagtgttgcatatgagcctgccctcactcgctctgcagaatccctttgcacctgagaccctactgaagtggctggtagaaaaaggggcctgagtggaggattatcagtatcacgatttgcaggattcccttctgggcttcattct

SEQ ID NO: 681 - DNA, 229 bp, Homo sapiens
  I.681 (AA450172)
gtggaaaacagacctttcctctcaaaactcatcttcttcaatgtctctgaacatgactatgggaactacacttgcgtggcctccaacaagctgggccacaccaatgccagcatcatgctatttggtccaggcgccgtcagcgaggtgagcaacggcacgtcgaggagggcaggctgcgtctggctgctcctcttctggtcttgcacctgcttctcaaattttgatgtga

SEQ ID NO: 682 - DNA, 389 bp, Homo sapiens
  I.682 (AA450107)
gctctttttatttcacgtttcacaacacacgccgtgttggcacagtctaccaaagtgcccgcagcgccacgcttgggccgtgaagtctcattctgttcgtctctatggactgattgaatttgggatggccagctccagaatgttccacatgggggcactctgtgggcagagaggctgagccttgcccacactggcaccaaagaggttgcacgatgcagcttgcagtgggtccaagccgggtgtgctgtgttcttcccgtttgggaaaagaaaactccattgtacctaaatatctgcaaggcaattttcaatttcttttttaaaacttttttccccccaaagtattctttgttcccctccctcaaatttctgtcccatgaggctgtgttt

SEQ ID NO: 683 - DNA, 270 bp, Homo sapiens
  I.683 (AA449378)
caaccttttccctctcaaaaatacattgtgaatgactgcatagtattcactttatgaatatttaattcatttcacagtcttctattgttggaccacttacattgtaccaaatgttttcctttggtttattctttaatgtattaatattttactgctggtcactcatggaatcctgcagctttaattaaaagcaaagatgaaaaattggttttttaatctatggcactgacaatctccaggaccttatatgtttgttgtcagtttatttgg

SEQ ID NO: 684 - DNA, 265 bp, Homo sapiens
  I.684 (AA449251)
ataattggaggaagagttgtcttaatgttacctacaattataaacaaaattttaaaaaaaatctttgcactgaataaagatgaacacataaattcttgcataaaacagataagacacctgaaggtatccccccagacataaatacttaacttttaggcttttcctctactcatatgcaaaagtttgaaaagaaaaaacaacatcaggggttggtcatagcacagtctcaatattatttccaaactaaaatgtcagtgatggggat

SEQ ID NO: 685 - DNA, 393 bp, Homo sapiens
  I.685 (AA448817)
cttcaccttcatgtcctcctgcagtttggccgactcttcctccccaatgtatctgctgaaaaccacaggatgggcctcacccatgaaatcgtgctcggcttcctctatgtccaccacatccgagtcagaatcctgcctgaggagagtccacggctctgaatcgtgggagttggggctttttgaacaactaacatataaccttccctcggtgtcttcatcggccctgcctacatgaaggaagaagccatccgtggatggtccctgggggaacggatcgaatccgccaagggcagacgaccacagacctctcctgcggtttccactgacagtggtcctgtctcggtggggtcgatgcccatggggaattctgagcatggaatcggggtaaaagta

SEQ ID NO: 686 - DNA, 324 bp, Homo sapiens
  I.686 (AA448816)
tggagcctttgatgccagcagtcttagccagcgaaagagaagcaggtgatacaagagatgaacggtgaaggagacgaggacatcgtgtctaggaggccagcgaggccccagcctttggtacgaaggaaaatgactggcagtcgcgacttgaataggacttttaccccgattccatgctcagaattcccatggcatcgacccaccgagacaggaccactgtcagtgaacgcagagaggtctgtggtgggcctctgctatggcggattcgatccgttcccccagggaccatccacggatggcttcttccttcatgtaggcagggcg

SEQ ID NO: 687 - DNA, 353 bp, Homo sapiens
  I.687 (AA448511)
gtgacggagcggcggtgcgcgcagggccggagtatcccgctttcttaggaggaaaccaccgcatcagatctgcgctgcggcagaggcaggctacaaccactagcacggctgacgatggccctttctgcggagaccgagtcacacatctaccgagctctgcgtactgcttctggcgctgccgcccaccttgtggccctgggctttaccatctttgtggctgtgcttgccaggcctggttccagcctgttctcctggcacccggtgcttatgtctttggctttctccttcctgatgaccgaggcactactggtgttttctcctgagagttcgctgctgcactccctctcacggaa

SEQ ID NO: 688 - DNA, 352 bp, Homo sapiens
  I.688 (AA448489)
tttaaaaataccatgccactttatgtattattatgttggggaggaatgataacagggaacaagaagagaagcaggggttaatccactcactttcctctttagagaagctccctcacccatcccaacacctcaagtcacactcatgaagatagagacagtcatttgggagatttaaagggatatcctcaaaacagaacaccagcctctcaccaccagagatgaccggaaatatgttttctcttcttccttccctgcatcaggggaagaggctggtgaagttggtgagcatcagctggaccagctgccctgggtagagagcatgattcactgggtcagatgtctcctgctctgg

SEQ ID NO: 689 - DNA, 456 bp, Homo sapiens
  I.689 (AA448114)
attgatatcaaataccctgacctcggcccggaaggactgcagcggctccaccaggactacttcaaagtgcagaacacaagggtcggctttgcacaaagtgactcccgatccagtttctccttcacaaacaaatctcccgtcttgcggtggagccggaaatgcattttgttgccctcggaaaccagccgcgccccgccgcagccagcttccctacctccagtcctaggtccttagctacgttggccacaaacgagccgctctccatttcctctgccactgaatagcggatagttgtcgcatcccccacagatatgcacagaaaaatgagaagagatcccacttgcctgttttgcaaagattttctgcgcgtacccgccatcagttctcacaagcgcgctctctgcaatcagagccaactgttgcggatatactttcacttttctgcaacaggttact

SEQ ID NO: 690 - DNA, 227 bp, Homo sapiens
  I.690 (AA448070)
ctgacccagctggatgttgacagccacctggcccagtgcttggccgaaagcacagaagacgtgacgtggtgagcgccatccaagagccctgcgcagagtgcagcgcccggacacgctcttccccgccagcagccccgcctctcggctcccccgccagcagccccgcctctcggctcccccgcatgcgcattaaagcagggcgtgctcctgtctgtctctgtgttgtg

SEQ ID NO: 691 - DNA, 506 bp, Homo sapiens
  I.691 (AA448020)
  misc_feature (97)..(97): n is a, c, g, or t
gccccagcgacacaggcctcgaggctgtctctgacaagtgttcacaggaggtggggacgcctctggcgaggaacgaggagctacgggcctgggctgntattgccatgggagcggctgccgcatcgaatgcatattcttcagcgagttccaccccacgctgggacccaagatcacctatcaggtccctgaagacttcatctcccgagagctgtttgacacagtccaagtgtacatcatcaccaagccagagctgcagaacaagcttatcactgtctatggaaaagaagctgatcggctgtcctgtgtgcatcgaacacaagaagtacagccgcaatgctctcctcttcaacctgggcttcgtgtgtgatgcccaggccaagacctgcgccctcgagcccattgttaaaaagctggctggctatctgaccacactagagctagagagcagcttcgtgtccatggaggagagcaagcagaagttggtgcccatcatgaccatcttgctg

SEQ ID NO: 692 - DNA, 510 bp, Homo sapiens
  I.692 (AA447620)
  misc_feature (398)..(398): n is a, c, g, or t
ttttttttttttgaaatggatgtctttatttacagaactaagagtcaacctctagacagtatgacaagcctcctagtaggagggactacccacagcaatgtgtccatccagtcactaccagcctcacttccagcagatgatgatgttggggtcattttcaagccgctcatccagctcatggtagctcatgcctgtcttgcagcagatctcgtcatagctgtggcagcctgtataaagccgggcagggtggctctgctcttcccgagtcacccgcacaggatacttctgtagtcgcctgatgaggttcttcataagcccgaactggatcagcttccgttcatcaacatgctgcagctgctgggggtggcggccaatgaggtctcgcacggtagtgcagnggctcaggctgcagtatagctggaacacatcccggagactggccctcttgtgcccttgcttggtcacgtaggatagacatgcctcttgcagggacttgtcatctaccaggtc

SEQ ID NO: 693 - DNA, 370 bp, Homo sapiens
  I.693 (AA447615)
aggtaaggagcagctttattcaaaaaagactattacagaccctctgaccatggaaatcttcaaatgtctaaaaatcaaattttaaaaaaagagtttaaaaaagaagacgtaaacagggctagcaggaactttgtgtgggagcagggcaaagggggtaggatgagcagatggcatgatcagggcactttaactggagatatgattttccctcctgtggttggccagttctcagaataaactgttaagtgggagatgttctgctttttagagcttgctcaagttttggggccagctaaagttcagggactggacctcaagtttctgaaggagaatgtctgttcccattccttttcctactgaccacttcctc

SEQ ID NO: 694 - DNA, 194 bp, Homo sapiens
  I.694 (AA447574)
cacaacacagagacagacaggagcccgccctgctttaatgcgcatggcggggagccgagacgggtgcttgctggcgggggagccgagacgggtgcctgctggcgggggagagcgtgtccgggcgctgcactctgcgcagggctcttggatggcgctcaccacgtcacgtcttctgtgctttcggccaagcactg

SEQ ID NO: 695 - DNA, 493 bp, Homo sapiens
  I.695 (AA447529)
ttttacaaattttttacttttttctctcctaaaatttctgaacatacagtacaagtatgagctgccttgcaggagaggcagtcttgcagccccagcttcatccagacacatgatgcctatgttcctctgggatgacagagaatccggaaggaaatgggaggcactccagcatgaggagcaggaattcacacacgggcctccaaatgcccaactgtcccagtgcctgaggtgtcccctgactcagctgagagagttcaacaggtccctaggcccagctcctacatggaggggcaaatccaggcttcccctaggctgggaagagctcatggttggatcctcttgcggtataggtaggcattgctcacctggttcataatgaccaagctggtgaggacagggcataatacagccaggtaccaggctgcaccagtgacagaggcagtgaaccagagtgagcacatgcccagcaagaggctggcactacccagcaggt

SEQ ID NO: 696 - DNA, 513 bp, Homo sapiens
  I.696 (AA447440)
ttgcattcataatggtttttaattccgtggcaattctactatctgctgagactgaacttctggcaacaggctggctcacaatggctactttgctctctgcttggaacgcactgttagttaatgaggtctgagctgccacagaaggcatctgcagagtcaccatgttaacagagtctttatcctgtatgagatcacgtgtatgtgataagctatgactctctgagcaaggattttccaatttgactgaacctacacatttctctcttgcatgcagcattcccttatgataaacaaggcatgacaagtgggagaaagctttcccacaatcagagcatccatacggtctctcccctgtatgagttctccgatgtctgttgagacatgatttatctctgaaagctttcccacagtcactgcatgtatagggtttctctcctgtgtgaattctctggtggttaatgagacctgacttgtgtgagcaggattttccacactcagtacatacaaagggtg

SEQ ID NO: 697 - DNA, 534 bp, Homo sapiens
  I.697 (AA447439)
atcccatcagagatttcacacaggaaagacaccctttgtatgtactgagtgtggaaaatcctgctcacacaagtcaggtctcattaaccaccagagaattcacacaggagagaaaccctatacatgcagtgactgtgggaaagctttcagagataaatcatgtctcaacagacatcggagaactcatacaggggagagaccgtatggatgctctgattgtgggaaagctttctcccacttgtcatgccttgtttatcataagggaatgctgcatgcaagagagaaatgtgtaggttcagtcaaattggaaaatccttgctcagagagtcatagcttatcacatacacgtgatctcatacaggataaagactctgttaacatggtgactctgcagatgccttctgtggcagctcagacctcattaactaacagtgcgttccaagcagagagcaaagtagccattgtgagccagcctgttgccagaagttcagtctcagcagatagtagaatttgcacagaataaaaaccatatga

SEQ ID NO: 698 - DNA, 619 bp, Homo sapiens
  I.698 (AA447250)
aaaaagttctacaagggaaaaatcattgggtgattgatttctatgctccttggtgtggaccttgccagaattttgctccagaatttgagctcttggctaggatgattaaaggaaaagtgaaagctggaaaagtagactgtcaggcttatgctcagacatgccagaaagctgggatcagggcctatccaactgttaagttttatttctacgaaagagcaaagagaaattttcaagaagagcagataaataccagagatgcaaaagcaatcgctgccttaataagtgaaaaattggaaactctccgaaatcaaggcaagaggaataaggatgaactttgataatgttgaagatgaagaaaaagtttaaaagaaattctgacagatgacatcagaagacacctatttagaatgttacatttatgatgggaatgaatgaacattatcttagacttgcagttgtactgccagaattatctacagcactggtgtaaaagaagggtctgcaaactttttctgtaaagggccggtttataaatattttagactttgcaggctataatatatggttcacacatgagaacaagaatagagtcatcatgtattctttgttatttgctttt

SEQ ID NO: 699 - DNA, 297 bp, Homo sapiens
  I.699 (AA447128)
tttttatattctccctttattaaataagaggtagcatactctattaactattctacaccttgtttttttcacttaacaatatatcctaaagatcattttatgaaagtatacaaatttcctacccctgttggagctgcttagtattccacggggtgaatgcactgtagtaggttcaaccactcctgagttggtggacatctgagtcgtttccagtctttaactattataggcaatgcttcggtgaacatgtcttttcatgtttgtgccattgtatctttagttttgtatcagttagct

SEQ ID NO: 700 - DNA, 352 bp, Homo sapiens
  I.700 (AA447045)
cagccctgttggtggggctggggatgtcagcggggctgcctctgggggcgctcccggaaatgctcctgcccttgcgtttgtcgccaccctcaccgctttcatcttcagcctctttctctacatgaaggcgcaggtagccccagtttcggccctggcacctggggggaactcaggcaatccgatttacgacttttttctgggacgagagctcaaccctcgtatctgtttcttcgacttcaaatatttctgtgaactgcgacccggcctcatcggctgggtcctcatcaacctggccctgttgatggaggaggcagagcttcgaggcagtccctcactggccatgtggctggtc

SEQ ID NO: 701 - DNA, 369 bp, Homo sapiens
  I.701 (AA446809)
cctgggaattgtgtttggaccaaccctgtttcggccagagcaggagacatctgacccagcagcccatgctctctacccagggcagctggtccagctgatgctcaccaacttcaccagcctcttcccctgatgcagggaaggaagaagagaaaacatatttccggtcatctctggtggtgagaggctggtgttctgttttgaggatatccctttaaatctcccaaatgactgtctctatcttcatgagtgtgacttgaggtgttgggatgggtgagggagcttctctaaagaggaaagtgagtggattaacccctgcttctcttcttgttccctgttatcattcctccccaacataataatacataaagt

SEQ ID NO: 702 - DNA, 447 bp, Homo sapiens
  I.702 (AA446768)
attgggcggaaggtgatggagcggcagggctgggctgagggccagggctgggctgcaggtgctcaggggtgcctgaggcctggatagtgatggccaacaccccagatgcaagcgtggattggggtacatggagagaagctacagccatttgggcaactgaagaggccccgtagaaatggcttggggctcatctccaccatctatgatgagcctctaccccaagaccagacggagtcactgctccgccgccagccacccaccagcatgaagtttcggacagacatggcctttgtgaggggttccagttgtgcttcagacagcccctcattgcctgactgaccgggttgggggcttcctttcatagctacatgatgaaaaccctctgccctggcctcatctaccactgaagcagaaaggagtctgggagcagcagtcttcgtggctggt

SEQ ID NO: 703 - DNA, 445 bp, Homo sapiens
  I.703 (AA446696)
catgactgtgcagcgaaggagcacacctgtcaatcttagctctagagtcggaggatgagtcaaccctgtaggaatgattgtgctaaattaggaaataacactttagtgcactttgcttcctaacccttttttgtcagaaatctacaacctactgggcatggaaatgatttaaaatatgatctgcattgactaagaaaactcatcctcacttatgaggtgaccaggatgcagagagggcctgaggggcagcagaacaatgcaattcacaggtgaggctccaaaaagggccatttctttctccccaaggtgcatagaacatttttaaatatcagagtacccagcaagacggaaggactgtcatgcaggaactctaacacaaaatgtgcctatgactaacacgacaaaccaaggtgtatggtttctttgcacacccagaaaggtgatg

SEQ ID NO: 704 - DNA, 355 bp, Homo sapiens
  I.704 (AA446643)
ttcggcactaggtaggacttgactgatgagctttcagtgaagaatcctctaagataaaacttctatttaaagactttaactagaaagtgtttattttggctacattgttcaccttctgctgtattggtatttgtctgttgggatttcaagggagtgtagagaagacagaaggaaagctgagagctggcccgacatggtctgggacacagagttggagctggcactgaagatctccagggacttcagagaccaataaaagcccatagggaagagagagaggatatagggaaacagaatcagatgtgtaatatacttggcacagcgaaaaaatggatttaaaagacaaaaatggagg

SEQ ID NO: 705 - DNA, 424 bp, Homo sapiens
  I.705 (AA446619)
tttttctggataccttttatttaatgtcaagaattccctttgcacggcaaaaaggggtctgaggaaagcggacgagcgtagatgagggcgagggcggaacgaggacgctcgccaaagtggtgccgggtgccggtagcccactgtgatcccggctgggaggaacgccggacccacggcaagggcagggaaagtcatttttgacacaaacaagggtcctggggcataccaccccacccggtgccaggccatgcaagacgctgaaatggagactgtggcccctcgggacgcagcgcccggagctatggagcaggtgcaccaacgtgaaggggaatcctttgggcgcttcccgaggcgcctgcagggtgtggagcacagcagggtctgtatccatgtccgtgagcacgggcagtaacagatagcacca

SEQ ID NO: 706 - DNA, 502 bp, Homo sapiens
  I.706 (AA446611)
tttgggttaaaaaaatttcatagtttttatttttctaggatgagagaaaagtcatcatactcctcttcccactttcccatagatctttaaactttacctttatagaaagggccctcatcatacactccatgccagacacttaacaacgttttccaagtaaaaaaattacacaacgaatgaaatgaaaagggcacatttatgttgccctgaaatcccccgagattcattcccagtctgatagacaagagattctttgcttcctgggcaagcaaagacacgagcaagtttcacatctgttcattttccaaagccatttgcaagcaaaaatgagttcacatcgtacagcacagattctcagtatgtaactcgactcacctagatcaggctgtatgccttaatgggggaggcagatagatctagagtgtcacagtaacagtgtgagcccctcaccatggggagataggaggcagggagaaccagtttacctagtaggatcacgatg

SEQ ID NO: 707 - DNA, 342 bp, Homo sapiens
  I.707 (AA446571)
ttttttttttaattctgatttggaaggcttcaagttcaagacagagctaactgtttgacaaagaattcaatttctaatccactctttccaaataggcttagttcccaaatgaaacaaaatatgaatagttaagatgcctaatgcacattcaattccagttttcgtttctcctctgtatcttggccatcacctttctgggtgtgcaaagaaaccatacaccttggtttgtcgtgttagtcataggcacattttgtgttagagttcctgcatgacagtccttccgtcttgctgggtactctgatatttaaaaatgttctatgcaccttggggagaaagaaatgg

SEQ ID NO: 708 - DNA, 593 bp, Homo sapiens
  I.708 (AA446498)
gcagcagcggcgcagggcagaagcgcgaggacgtctcagcgggcgaaactgcggcccgtgcctgaggcggccccgagccccgcagcgatggtgccaagccgggcccgcgcgaggctaagcgctcctactccatggagcacttccgctggggcaagccggtggcaagaagcggcgcccagtgaaggtgtaccctaacggcgccgaggacgagtcggccgagcgcttccccctggagttcaagagggagctgactggccagcgactccgggaggagatggccccgacggccctggatgacgcgcaggggcccaggcgacctggagcacagcctgctggtggcggccgagaagaaggacgagggcccctacaggatggagcacttccgctggggcagcccgcccaaggacaagcgctacggcggtttcatgacctccgagaagagccagacgcccctggtgacgctgttcaaaaacgccatcatcaagaacgcctacaagaagggcgagtgagggcacagcggggccccagggctaccctcccccaggaggtcgaccccaaagccccttgctctcccctgccctgctgccgactcc

SEQ ID NO: 709 - DNA, 550 bp, Homo sapiens
  I.709 (AA446316)
tttggtggggagggggtactgaacattccctttgttgaatatatttctaatattttccattaaacaatgaacttttttttgcacgtataccttttcttatatctctggtatttctttttttagggtagacacttagcaatggttgtcagttctttaaaaggctattttctcgagtagttgttacttattaagcttaccacaaatcaatcttgtgtttcttatttaatgagaattagttattatccccattttatggatgaggagcctgagacccagaggttcccaggccacccagccagcaagtggcagagcttttccaggcatgcatctcctccagtgcatcacgtcggaagaacttgcagtctccacttaagatctatttctgtccagcaaataagcctagtgcttgggggtgccaagagaagaaaaacaaaaacaaaacctgaaaccactcacaaatccccactctctagatctccagagtcttcctcattctttgtccagaagcttctattcctacaacatcctctctcaacatgattcagtttcc

SEQ ID NO: 710 - DNA, 518 bp, Homo sapiens
  I.710 (AA444118)
aaggaaaggggtttgcctgaagaagggaagacagtcctctaaaggtgtattggatcaccacctcttatcagatagaaactatcttcagcatttaaacagtggttctgttttagagtgtacctagcacattttgaaataccctagagtctgttttctctaagcacctggacagggctttgcaggtgtccttgacatatgccctcaacttgacccattgagtggacctagtttgaccaccatctcttatattccgcatgctctttaatgacattgaatatttacttgtctttgccttattttcttaattcattcgtagcttgctcctgagccttaaattactttgaagtgtattacacatcctttgtatcctctatggaatctcattcatagtagggtctgtgataaacaattgattggatagtgaatatctcttacaggcatgtaaggaggaatcaagaagctgtgacatattctgaggacctccaagaacaacttgctactgactggacttctctcat

SEQ ID NO: 711 - DNA, 411 bp, Homo sapiens
  I.711 (AA443939)
tttttttttttttttaagagaaagtaacaatatcattttattgcagggtggcataggtagttgtacttattaaatacatgacaaataggtaccagcagatgagttagatgtagggatacagatggaaataaacttccatggtccccattcatcaaatttattgtcctctgagaaagacatgagttcatctgatcattacagaggagatgagtgttttgaaggagaagcagagggttttgtggatgtgattagcaggtggacctaaccagcacagtgggtcagggagggattttctcaggaaataacattcaggctggagtctgaatcttgagctctgaagcaggtgtcaggacattcagagcaaagtggattatatttgcaaaacttcacatgctaaaagatgagagaagt

SEQ ID NO: 712 - DNA, 336 bp, Homo sapiens
  I.712 (AA443853)
tttttttttttttttaaagcaataaaaatttctattttccaaaaaagtatttacagactgaaattcaaactctacattgccatcaatgtaattatacaagtgcatacaaagccctggaaaagaggaagtatttcattacaaaatatttatgatcaagaaaatattgcttgcctttaaataaagtggcagaaaataaatatgcttaaagatggccattttcacaagtaaacaaaaaagtacacatgtaagaaacaaagtgaaaatgcttgagcttcaaaatgactctagcagtgtttgcacaaatttgttttaaagcgaggtcttctgaagacttcc

SEQ ID NO: 713 - DNA, 458 bp, Homo sapiens
  I.713 (AA443658)
ttttggtcactggtttcattttttttcttgctctaaaccacctcttctctgaggttgttcatcctcagggctgggtggggtgcaagcccttgagtcccaagtgtgtcgaggctcctggtcctgggtgtgctggtggatgagtgggcacatgccccacctggggtggtggagccgcttcagtagatgtagggcatgatgcggtaaggcacacgccggcagtactcctgccaggccaggccgtacttctgcaggcactgccgctcatcccgggcctcacggtgcaccagcagcgcggtgaagtagaggaggtagaagtagggcagcaggtgtgacaccccgcagggcaaggaccaagccagagccatgatgaggtctccaagatagttgggatggcggaccataccccaccacccagacaccagcagtttccgccctgtggctgtagagatggtctcaag

SEQ ID NO: 714 - DNA, 466 bp, Homo sapiens
  I.714 (AA443648)
aaaagatattactcctgtgtgttggagaggctggagacactgtacagtttgcagaatatattcagaaaaacgtgcaactttataagatgcgaaatggatatgaattgtctcccacggcagcagctaacttcacacgccgaaacctggctgactgtcttcggagtcggaccccatatcatgtgaacctcctcctggctggctatgatgagcatgaagggccagcgctgtattacatggactacctggcagccttggcaaggcccttttgcagcccacgctagtggtgccttcctgactctcagtatcctcgaccgatactacacaccgactatctcacgtgagagggcagtggaactccttaggaaatgtctggaggagctccagaaacgcttcatcctgaatctgccaaccttcagtgttcgaatcattgacaaaaatggcatccatgacctggataacatttcct

SEQ ID NO: 715 - DNA, 512 bp, Homo sapiens
  I.715 (AA443583)
tcaattatatccatagtcacctttattctgaattaaccatttatcaagagtgcgcctgaaaagagtagaaaaaaataaaggagcccatcaaaaaaaagttccctggcaagtgggagggaggacatgatgttaggagccctgtttggggaaggaaatgttatccaggtcatggatgccatttttgtcaatgattcgaacactgaaggttggcagattcaggatgaagcgtttctggagctcctccagacatttcctaaggagttccactgccctctcacgtgagatagtcggtgtgtagtatcggtcgaggatactgagagtcaggaaggcaccatagccgtgggctgcaaaaggggccttggcaaggctgccaggtagtccatgtaatacagcgctggcccttcatgctcatcatagccagccaggaggaggttcacatgatatggggtccgactccgaagacagtcagccaggtttcggcgtgtgaagttagctgctgccgtgggagacaa

SEQ ID NO: 716 - DNA, 370 bp, Homo sapiens
  I.716 (AA443545)
ggctttttattctaacagcactggggggcccagcctacctgccagacagttcccaggagtgaggctggtctttcctggcagataagacacagttttgttgggtgaatgagcggctcctcccttggtccaggaagagctccccctgcattgggtgatgaaattctgtctttctgaaggccgggcagtgcacagcggcccttcctctctgggaatgccccggctcacacagtccacttcagacacctggtctcctggtgggtccccagacagcgcacagtgcagtaccgggcaccgcagctgacacaggtgtagggggatgggaagccacagacagcacagaaggggcgctggggcgcgatgggggtccgca

SEQ ID NO: 717 - DNA, 402 bp, Homo sapiens
  I.717 (AA443544)
tggcatagtcatagctcactgcagcctcgatttcctgggatcaaaccatcctcccacctcagcctccggagtggctggaactgcaagcatgaggccccacgcctggttaatttttaatttgttatgtggtgacgggctctcgctatgttgcccagttcgctcccaggaccccgggcagcggcgggtgctggaccgggctgccgcagcgtcgcatcaaccggcagctggaggcctggagaatgacaacttccaggatgacccccacgcgggactccctcagctcggcaagagactgcctcagtttgatgacgatgcggacactggaaagaaaaagaagaaaacccgaggtgatcattttaaacttcgcttccgaaaaaactttcaggccctgttggaggagca

SEQ ID NO: 718 - DNA, 597 bp, Homo sapiens
  I.718 (AA443466)
gttaccaatctgaagtcttcttaacatcttctgcactttgcttcacagtatatactactttttcaatatattctgcctccccggagttttgggcagctttccgcttaagttcttccacattcctctctaactcgctgatgcgctgggacgcgttgaacaaggtttcctcagaagctgctgtttcagactcaatcgaagttagcaggttctgggttccttgaatgtcttcatctgcttgtttaattgccttctctgctgcgacctgggccttttctgcttcttccagagcttcctttaccatatctgcagtgactttaacatctgttgcacttttgcttgctcttttagcttcttctaacaacatctcagctctggcaatgtcagcagcactatgctgaagaataacctctacttgagaaaggctttcaactcgttcacgtatatcttctgtcaagttctgtaactgctgtggggtgctaggcatctccattttcaatactcattagcaactgcttcaatgctgtccaaatcagcactatcctgggtcaaaagtttccgatttgcttgattagattctcagctcctcattgctcttgt

SEQ ID NO: 719 - DNA, 397 bp, Homo sapiens
  I.719 (AA443286)
tttttttgctttcaaaagtcagtgtttacttttcataggcctttcttggcacaaaggtgcaaggaggatggtctcgggctgctggcctggcttctgggccaggtgattcagaagatgcaggtgcagcccacagcgatggtctccatgactgcgcgctggcggcaaggccctgtgcggggcggtggcgggcagaggcggcggcgcacaggaacctggctgaacaccggcacgctcaccatgctgcggtcctcctgcatggtgaaggggttcacacagcccagacacaggcaccgtgcctccggaggtccacggggatacggctggggtcgtggttgatgctgtagccccagggagacaggctcctcttgttggacatccacagctgcaagttgacctc

SEQ ID NO: 720 - DNA, 418 bp, Homo sapiens
  I.720 (AA442868)
tttttttaaaattccactgataatttatttcagcttttaatatattttctactataaaaccaagctgtcaagacaggaaaatattactagctttgttattacaaaacaagtgagaatttttaattcacaaaggatgaaaacgcaagacattaatctcactgtacatacaatattacaataaactgattagctgtagactaataaaacatttaagacttcacacacacacacacacacacacacacacacacacacacgtaccttgaaacaagaaacacaggacaattttaatctttgatatatgttcatgaacaccaagaacaagaacatcactgatttgagtctaattgttttcctggtatacaatcactaaataagcaagatctaaagcatattgtattattaaggacatctttag

SEQ ID NO: 721 - DNA, 315 bp, Homo sapiens
  I.721 (AA442837)
tttataattttacaggaaatttatttatctgattattgctgaaggattgaagtacattttgaaaacatcactcgtttcctttgggataatggctaaaaaattattatcattgcgattgctgacatttctcaaaaatcaattgctatttcagtcaaaattttactttaaattggttgttaaaggacaaaaagtagcaaccacagtagcaattttctgaattaacctcttgcgagtatatataaaatatatataatatataattatatataatactacataatatataattatatataatatatatattatatatac

SEQ ID NO: 722 - DNA, 498 bp, Homo sapiens
  I.722 (AA442720)
gcgcctgctctccatccaggccccattccggctcccacccgacgctgcttttgttcccacgtttcggggggcagctggcactgtgattcctgccccatgagtgcctagaggaggacgccaccagggatcaccccacgtgggacacagggcttggggaggatggggcaggaccagaccaagcagcagatcgagaaggggctccagctgtaccagtccaaccagacagagaaggcattgcaggtgtggacaaaggtgctggagaagagctcggacctcatggggcgcttccgcgtgctgggctgcctggtcacagcccactcggagatgggccgctacaaggagatgctgaagttcgctgtggtccagatcgacacggccccggagcttgaggatgccgactttctcctggagagctacctgaacctggcacgcagcaacgagaaactgtggaggtttcacaagaccatctcctactggaagacctgcctttgggtgccc

SEQ ID NO: 723 - DNA, 436 bp, Homo sapiens
  I.723 (AA442622)
gacgggcggggcaagccgagcctcacggggtccccggagctgggccgggcctccagatggagaaggcgcaacggggagttcttgagtaagccagagcggtgtccagcgcggtgtagcgagccgccgctgtcaggcgcagcaacgggcaaccccgtagaagtcggtcggcaggtcctctccaacccgccgctaccgcgccgctgtgggagagaccccagcaggagccaaggcagctacgggggcgcgaggcgctggcgcgctcggcagcccttcccgcgcggttccactgccttaaggatgacagtcgtagggaaccctcgaagttggagctgccagtggttgccaatcctgatactgttgctgggcacaggccatgggccaggggtggaaggcgtgacacactacaaggccggcgaccctgttattctgtatgtca

SEQ ID NO: 724 - DNA, 382 bp, Homo sapiens
  I.724 (AA442288)
ctggggagatgcgtgcctccagctagctggctgcagctgaccctggctgttcccctgcaggatctgagtggcatagagctgggcctggcaggcagagcctcgggctagagtgggcagctggggcgggccgctgatgtgctgctgccccgagatgccaggattgccgggccttcctagaggagctccttgatgtcttgcagtctctgccccctgcctggaggaactgtgtcagtgccacagaggaggaggtcaccccccagcaccggctctggccattgctggaaaaagactcatccttggaggctcgccagttcttctaccttcgggcgttcctggttgaaggcccttccacctgcctcgtatccctgttgctgactccgtc

SEQ ID NO: 725 - DNA, 456 bp, Homo sapiens
  I.725 (AA442287)
attaaatcccaaatcctatttaaagacctgacagcttgagaaggtcactactgcatttataggaccttctggtggttctgctgttacgtttgaagtctgacaatccttgagaatctttgcatgcagaggaggtaagaggtattggattttcacagaggaagaacacagcgcagaatgaagggccaggcttactgagctgtccagtggagggctcatgggtgggacatggaaaagaaggcagcctaggccctggggagcccagtccactgagcaagcaagggactgagtgagccttttgcaggaaaaggctaagaaaaaggaaaaccattctaaaacacaacaagaaactgtccaaatgctttgggaactgtgtttattgcctataatgggtccccaaaatgggtaacctagacttcagagagaatgagcagagagcaaaggagaaatctggctgtc

SEQ ID NO: 726 - DNA, 442 bp, Homo sapiens
  I.726 (AA442025)
ctgggactccttttccagtggccaaagacgcagttattctaggataggctggccatctaactaaagtcagcaaacgatgtcttagcagaaaaggggatgcagaatgctttgcagcaagaactcacctgtttcctttggaatatattaaacacaggtttcgagccactgtctacccttgcccagagcctgcggtggagcgcagagagatgttggagagcgtcaatgtgaggctggaagatttaatcaccgtcataacacaaacagagtctcaccgccagcgcctgctgcaggaagccgctgccaactggcactcctggctcatcaaggtgcagaagatgaaagctgtctaccacatcctgaacatgtgcaacatcgacgtcacccagcagtgtgtcatcgccgagatctggttcccggtggcagatgcacacgtatcaagagg

SEQ ID NO: 727 - DNA, 428 bp, Homo sapiens
  I.727 (AA441916)
gaatgactcagatgtttattttctcaaatacaatatttaaaatattgcaagaagacatctgtttagcattctcccctcatttgtcaattactttattatttgagaattaataccccacatgaagacaatatcacttgccaaagtccttcctctgacgtggttaagtcgtatcaaatccacaggctgacgtccaaataatacacagtttcatgcttcaggtgagccaagaacaaccttcccattgagcgccttgcaggggctgatatcaaagacaagactgaacttccttcattggcatggtgaccaccgtgggaggtgcagccctcagcctactcctcggctgtgcaatccaggatgtgtttaaaggagaatggagaaaacttgtaaccatccccgacatagaacttgttctggaactcaacccagtg

SEQ ID NO: 728 - DNA, 425 bp, Homo sapiens
  I.728 (AA441848)
tcagtgtttatccattttttcattcattccttccttggacaaataatatttattgagagcccactttgtggcaagcactgtgctaggtgcagggaatcagcagtgggtccagtccaagctcacgccctcacggatctacattctagaagccggctacctaagcaaacctatgccaacaaaacttctctctccctgctcaggggctgggatcggagcaagggatgggaggaggatgtgtggcttggggaaggtgaggacgctatggactaagttaaggcctatctaccctcgacctttgcccctccaggcagctgggggagagcggaggcagggtcgctcagggttctacccacacgctgctgttggtcacccgggccccgaaccagcccttccagtagacggagtctgccccccgtgctcgagcg

SEQ ID NO: 729 - DNA, 170 bp, Homo sapiens
  I.729 (AA441793)
gcggccgccgcgtacgctggacgagctgcccgagccgctgctgctgcgcgtgctggccgcactgccggcgccgagctggtgcaggcctgcgcctggtgtgcctgcgctggaaggagctggtggacggcgccccgctgtggctgctcaagtgccagcaggaggggctggtg

SEQ ID NO: 730 - DNA, 386 bp, Homo sapiens
  I.730 (AA437225)
ttttttttgagttggaaacaactttattgatacctgagaaaaagtgcaggaaaaatattcctcctgaccaggtggcctgtcccctgaggccagatcattctctcgcctctcccttaagccctgggtcatttgggacctcactggccagcacccagaggctgaagacatccacagccagagcctggaagccagacccagagaccaggagagggaatgtctacagcgtggctcctgaggtcagggccaaggtcagcgtgggaccctcatcggtcaagggccagcgcctcttggatcactgtccggagtccgatggaaaacagctcctcccatggttcccggatccaggcaagcagggctgtcagctgctcctgacacaccacacggag

SEQ ID NO: 731 - DNA, 490 bp, Homo sapiens
  I.731 (AA437224)
tttaataaagacatgggtactttattttcaaaacactcatatgttgcaaaaaacacatagaaaaataaagtttggtgggggtgctgactaaacttcaagtcacagacttttatgtgacagattggagcagggtttgttatgcatgtagagaacccaaactaatttattaaacaggatagaaacaggctgtctgggtgaaatggttctgagaaccatccaattcacctgtcagatgctgatagactagctcttcagatgtttttctaccagttcagagatgggttaatgactagttccaatggggaaaaagcaagatggattcacaaaccaagtaattttaaacaaagacactttttttttttttttgcaacacaatatacatcacagtgaaatgtgtaatccttgcaaattgcaagttgaaagaattaaattcagaggaggggagagaaagagtactcagtagggactgagcactaaatgcttattttaa

SEQ ID NO: 732 - DNA, 393 bp, Homo sapiens
  I.732 (AA437006)
atgagctgccccatctggtaaataggtggagagaacagagccggcagggcctccagcagatactccagcccacagtctttgtccctgggtggctcactagagcagaagagaaggctcactaggacttgaatcctggcctggtcaccttccagctttgagaccttggacaatgcacttcatctcccacagtttccgaaagccgaattcatgagacggttgtgaggatttggggtccccagtctatgtgaggatctcctgtcatctgttgaccagccactgaaaattgccagagactatgtggtgggaaaggattaccttttgtgtgactacaacagagatggggactcctataggtcaccatggagtaacaagtatgaccctcccgtggaggat

SEQ ID NO: 733 - DNA, 550 bp, Homo sapiens
  I.733 (AA436933)
attctacccttattgccccaagagacctagctaaggtctataaacatgaagggaaaattagcttttagttttaaaactctttatcccatcttgattggggcagttgactttttttttgcccagagtgccgtagtcctttttgtaactaccctctcaaatggacaataccagaagtgaattatccctgctggctttcttttctctatgaaaagcaactgagtacaattgttatgatctactcatttgctgacacatcagttatatcttgtggcatatccattgtggaaactggatgaacaggatgtataatatgcaatcctacttctatatcattaggaaaacatcttagttgatgctacaaaacaccttgtcaacctcttcctgtcttaccaaacagtgggagggaattcctagctgtaaatataaattttgtcccttccatttctactgtataaacaaattagcaatcattttatataaagaaaatcaatgaaggatttcttattttcttggaattttgtaaaaagaaattgtgaaaaatgagcttgta

SEQ ID NO: 734 - DNA, 474 bp, Homo sapiens
  I.734 (AA436902)
gctgcttcccgcttacccccagcgacgctaacgttaaagcagttcgtaagaaggcaacaagttcttctcctctacagaaggattttgcaaacaattcggcaagttccaaatgattctgatcgcaaatacctgaaagattgggcaagagaagaattcagaagaaacaaaagtgccaccgaagaggtgagaacaaaatcatccgctccccccccctgcccccactcaaggccctcctcagctcacggagttagaaaaaacacttgctttagaaaatcttaactatagcattattctgaaggattttcaaagtctccatgtgttttgttgcatttaggattaacaatggacaacacaaagcccagtcttactatttatatgtacagtatttggtgatagagagcaaaggaaaaacacatcagaacagttgccttaacactgaaaaacataccctgcattttgaaaatgtttatggat

SEQ ID NO: 735 - DNA, 254 bp, Homo sapiens
  I.735 (AA436865)
tttttttttttttggggggaagcggaagacatctgtatggataattttccagccattgtcaccctggtcaaagtcatcaccagaacctgcagaggtggtctcctcatctaagttgtaccgagccaggtcattccgaagcacacgcattagaatgacagccacaaaacccaccagtaaaaacacaagcaccatggagttgatgatggacaaccaatggatttccagtgttcgaggaaagaaaccaccatcgtcac

SEQ ID NO: 736 - DNA, 418 bp, Homo sapiens
  I.736 (AA436297)
gtggtcatgaggaggaaacatttagggaaattagattataagtaaaagtgtgggcatattctcctcttttctacaaaggttttcaaatggttcctgaggttttttgttgttgtccgtgttgttactgttgttcttgtcatcaggtttgattttggtccttgccctttccttctagttctccttttattaataggaaggcaggcaaaagcccgatttatgtgtgtgttttccctcagacagctttcatccactgctctgcactagaattgcacaaatcttcatggtgagcaattttaagaaatgttagtgaaaggtagaaattatttcacaaatcagtttctctgctccttcatattaataataatatttggcttcccattgctctttggagttgtttattaaatatgtgtttttgaca

SEQ ID NO: 737 - DNA, 464 bp, Homo sapiens
  I.737 (AA436170)
ccagaaaacaatgttatgtaaattttaatatataaatggcatccttttataaccacttgatattttacaacatgtgactatttggtaaatacttcaaaatagcttatgctgcggtcttgtaaggcagtttctgaagctcttgagattttacaacagttttcttcatactagtgtgtttctatgtggttaacaacctacgacatttagtctaacagcagcactgtgtatttcaatgtggtaacacactctgctgcctaacggctcttggattcggttataagttacatgatgcctcaaattgtttcaagaaaatgttagcttgcaaaatatatttttttctttcaaaattcaagacacacttaacatgtggattttacaatacagtttattagctgttctcctcttcttcataaatggaatggataatgttgataattctttacaaaccagtactcatttaagaa

SEQ ID NO: 738 - DNA, 456 bp, Homo sapiens
  I.738 (AA434504)
cgctgggcgaccagagcagggtcgagatgtcctacatcccgggccagccggtcaccgccgtggtgcaaagagttgaaattcacaagctgcgtcaaggtgagaacttaatcctgggtttcagcattggaggtggaatcgaccaggatccttcccagaatcccttctctgaagacaagacggacaagggtatttatgtcacacgggtgtctgaaggaggccctgctgaaatcgctgggctgcagattggagacaagatcatgcaggtgaacggctgggacatgaccatggtcacacacgaccaggcccgcaagcggctcaccaagcgctcggaggaggtggtgcgtctgctggtgacgcggcagtcgctgcagaaggccgtgcagcagtccatgctgtcctagcagccaccaccatctgcgactcctgcctgccgcctctctgtacagtaacgccact

SEQ ID NO: 739 - DNA, 408 bp, Homo sapiens
  I.739 (AA434406)
ttttttttgaattccagcatttttattcagcacaccacatcggggaggggcggcagtggtttccacggtaaccaaagtaaggcttgtgcacttgctgagcttccagatgcgaattagtaaaagctaaattcaaaagtagaatgggcatctccaaagagtacgataaaaacattttgtatcaaacttgtgattaaaaaaatacaaaagttaaacccacaggcaaagaggaaaatgacaatcctgagagctgccctgataggtgagcctcgaacctcgtctaaatccgtaagaaggcaaaccctggggaggccagcacccctcgggagagtgggagtgaacgcggacccacctggcttcatctgggcaaagcttcgtagcgcctctggcaggatgtgtgtccagtccccc

SEQ ID NO: 740 - DNA, 390 bp, Homo sapiens
  I.740 (AA434313)
cgggccctgtacgaggggtatatcaacggtcactgatgcgccccccaagtgcttcctcaccctcagggacacggtgctgctgcgtaaggaatctcggaagctcattgttcagcccaacactcgccttgaaggtaatgaggctcagacgtgcagcttctggaatacgaggcgtcacgtgctggcctcatccgatccttctctgagcgtttcccagaggatggacccgagttggaggagatcctcacacagctggccacagcgatgcccgattctggaagggccccagtgaggccccatctggccaagcttgaggaagatgtgtggccttgccccaattccatcagaccaaggctgcaagtggccctccattcgtgtgtgtatttaggggct

SEQ ID NO: 741 - DNA, 436 bp, Homo sapiens
  I.741 (AA434227)
tgtggttgtctctaatatttatttgtctggttataaaattaatatgtgaggagcattggatttggtgagaacgttttgaaccctagctgtcacgtgccacctgcgggatctagaccagtgacttctcagaactgccatttcctcatctggtagacaggatggtaagccctgtcttgctcactccacgtatggcagtgcagatgaaatgagatcacagaggggaagcaattggcaggctggaaagtgctgacaaatggaaggggttgtgtcaccaccctcagctgaggtagtaccaaggtccaagctcctgcccctccccctccccagcccctaaatacacacacgaatggagggccacttgcagccttggtctgatggaattgggggcaaggcacacatcttcctcaagcttggccagattgggcctcactggggc

SEQ ID NO: 742 - DNA, 389 bp, Homo sapiens
  I.742 (AA432083)
ttttttccagtagtaaacgtctttattcttccgtgacgtcgcacacccaagccacctcccgcggactctccgctggcagtcccacccagtgagggtagaggcggtggagggcccacccaaggccggctcttccaagcaccacaaatcctctcctcgcccaggtccctttccccctttctggccttcgtggggacaccttcagagtccccaaggaaggctgtgctgatagcctcactcaacccagcttttcaaagttctgcaggaggcaaagggcaagcccagagattagggttagagaccaaagacaagcggtcgttacccctaatatccaaggggaggggacgggagggggctttttgtaaaaatgcccctgaggtatagaaccggca

SEQ ID NO: 743 - DNA, 302 bp, Homo sapiens
  I.743 (AA431750)
ttttactagatattcagaaaaaagattttattcttctgctgaaatgtttgaaagtgaaattattttgtagagcattttccctttaaactgcaaagaagccccaaggtcattggtacttggaagtccagggagaaagagcgctgggttaatgatggagaaaagataggtgggcagactggggcgtagtcccttggtgtggacgccccagcgtgctcttatttcagtgctcaccctgttacgtgtgtctggggccactgactttctcctgcaagctgtggatctgaatttaactcaaatgggga

SEQ ID NO: 744 - DNA, 243 bp, Homo sapiens
  I.744 (AA431119)
gagaagacaggcatggtggaccttccgcaaagctgacggcctgaatagaacaaaaaggctcaccgtcccatgaatagagagaactcctcctgcctgactggtgtgagctgggacatccattgttttctgttttttggatttgaactgaaacatcagctcttccttgatcctgaacctgctggctttctgaccggaacttgcaccaacagctctcctagttctcaggcctttggacttggactg

SEQ ID NO: 745 - DNA, 393 bp, Homo sapiens
  I.745 (AA432135)
tttgaaggcttctggagttaatttcattgctgttgcacatacagttaagtcaggcttcatgtgtaagcacaagcttggagatttttatagtccgtgtctgtaccagtgttggccatttcaacaacctgtggtttaaagaagtcactctgatttgctaaagaaagaagagaactgagaaaatgattcttgttaaaattcatgaagaattcctatgctttctaattaataactgcacaggtccttctgggacagacttcataatattccaggcatcaaagtgcatgagcccaaccagaggtttcccattaatagcaagaatttcatctccagcttctattattccagcttgttcagccgcaccacctcagccttcagagtagctgctaccacagg

SEQ ID NO: 746 - DNA, 408 bp, Homo sapiens
  I.746 (AA155745)
caaatacatgagaaaacaatccaagaatcactgcaggaagaaatgatcatttaagctcaatcatgttcttttgccttttaatttcatttaagagattaatattagagtcataaaagctttacagtttcaacacacatacacacaatcacagaattaaatatctttactccttaaaaaaaaatgagttccattttgttcaatgtatcacaatcaaattttagtctaacaaaatccggtaaaactgctttcattaaatagagcagctgccacttacctttacatattttacggatggaactgagttcagtactgatccaaggatgctggcatcaaagcccttacacggaactatccctaaaggttccgtatttcccgtaatataccaccatccctctaaatttataatac

SEQ ID NO: 747 - DNA, 391 bp, Homo sapiens
  I.747 (AA151104)
  misc_feature (243)..(243): n is a, c, g, or t
  misc_feature (309)..(309): n is a, c, g, or t
gggggttctgcagctttattcacaggccccaggggattgaaggcagcaaggacacagacgcgggggacgcccgggtattggcctctccacccccaggactgtgagggagcccctgacaggattgtgggggctggaggatgtggagtcccacgagcggccctggtgtgcaagagggcggagggtctctgcctcgaggggcctttctggcgctctacttccagcgcccgccgactttgcccttgnttggggtcccagctttcttgctgctgaaatgggaagcaagtgatccttcagggtcagggcctctgnaatgcccctcctggtcccccaccctgggcggactctcagcccgaccccaggctgctctcagggcacaggccggcccaagttt

SEQ ID NO: 748 - DNA, 455 bp, Homo sapiens
  I.748 (AA150859)
  misc_feature (2)..(2): n is a, c, g, or t
  misc_feature (6)..(6): n is a, c, g, or t
  misc_feature (14)..(14): n is a, c, g, or t
  misc_feature (56)..(56): n is a, c, g, or t
  misc_feature (225)..(225): n is a, c, g, or t
  misc_feature (228)..(228): n is a, c, g, or t
  misc_feature (455)..(455): n is a, c, g, or t
tnttgncctgagancggccattgcagcccccatcctgcatgtcaacagcaagggcngtgtggagtacgagcccaacttcagccaggaggtgcagaggggactccaagaccgtggccagaaccagacccagaggcccttcttcctgaacgtggtccaggctgtgtcccaggagggggcctgtgtgtacgccgtctcggacctgaggaagagtggggaggccgcacnacntaagacactgctctgcccagagctgaagtctggccccaccatgagtcctgtgtccaggccggacatggctgggggaccaactactctggcaggatctggacccctggcagggaagtccagcttgagagtggaagaggtggcggggaccagctgggcagatgagaggctgagctcatcccctaaccccctttcccagagcccctggtggtcctgaaccgggcccctcn

SEQ ID NO: 749 - DNA, 433 bp, Homo sapiens
  I.749 (AA150797)
  misc_feature (96)..(96): n is a, c, g, or t
gcccagggctctcggatgcagggagcctgggcccaaacagcagcttccggagtcggaaggagctgaggaagaagactgactgaaggagcttgcgcnttttccgcctcggcaaccggacccagcagcaagcaggacgggcggcgctctgctactggtcccgttaagccagagtagcccaagccctgaagtcactgctcatccggaatggaaatcccgccgaccaactacccagcctccagggcggccttggtggcacagaactacatcaactaccagcaggggaccccgcacagggtgtttgaggtgcagaaggtcatacaagccagcatggaaggatattccaggaagaaggacataagtatcaccttaaatttgctgttgaagaaattatacaaaaacaagttaaggtgaacttgcacagctgaagtacttt

SEQ ID NO: 750 - DNA, 449 bp, Homo sapiens
  I.750 (AA150687)
  misc_feature (72)..(72): n is a, c, g, or t
  misc_feature (329)..(329): n is a, c, g, or t
ttttcacagtccgcctctttaatcttggactggaggatatacagatcgagagggtgggagagtggccccagncaagaggcctgcggagggatagaggggccggttcaggaccaccaggggctctgggaaagggggttagggatgaggctcagcctctcatctgcccagctggtccccgccacctcttccactctcagctggactcccctgccaggggtccagatcctgccagagtagttggtcccccagccatgtccggcctggacacaggactcatggtggggccagacttcagctctgggcagagaagtgtcttagtagcctgcggnctccccactcttcctcaggtccgagacggcgttacacacaggccccctcctggggacacagccttggaccacgttcaggaagaagggccttctgggtctggttctggccacggtcttgga

SEQ ID NO: 751 - DNA, 433 bp, Homo sapiens
  I.751 (AA150673)
gaaattgaagctttttattttggatatacataccactattactgttttaaagacatttttatgtagtgatactttgtattatggactctataaagttctatactgtaatcaagacatttatataaagtgacactttgggattatttggcctcataagctagatgccagtgaaattggcatacacatcaatagacatgtttacacttccagtgttagggtttttgtttattccagttgtacttcctttggcagacggctattatgttttactttagtgccgtattgtggatgccagagaacttgcatttgccagggaataatctcctgagatgctatattatgaagtagaatggtgtagtctaattcaataaagtcatcatttctttgcacttgcttgacagtttgaatttttaccattttataccatgtggtc

SEQ ID NO: 752 - DNA, 439 bp, Homo sapiens
  I.752 (AA152132)
  misc_feature (405)..(405): n is a, c, g, or t
cgaaaaagaagaggctcggaagatgaaacgaaaagaatctgcatttaagagtatgttaaaacaagctgctcctccgatagaattggatgctgtctgggaagatatccgtgagagatttgtaaaagagccagcatttgaggacataactctagaatctgaaagaaaacgaatatttaaagattttatgcatgtgcttgagcatgaatgtcagcatcatcattcaaagaacaagaaacattcctaagaaatctaaaaaacatcataggaaacgttcccgctctcgatcggggtcagattcagatgatgatgatagccattcaaagaaaagaagacagcgatcagagtctcgttcctgcttcagaacattcttctagtgcagagtctgagagaagttataaaaagtcnaaaaagccataagaagaaaagttaagaagaggga

SEQ ID NO: 753 - DNA, 433 bp, Homo sapiens
  I.753 (AA150028)
  misc_feature (278)..(278): n is a, c, g, or t
  misc_feature (293)..(293): n is a, c, g, or t
  misc_feature (298)..(298): n is a, c, g, or t
  misc_feature (299)..(299): n is a, c, g, or t
  misc_feature (348)..(348): n is a, c, g, or t
  misc_feature (361)..(361): n is a, c, g, or t
  misc_feature (381)..(381): n is a, c, g, or t
  misc_feature (433)..(433): n is a, c, g, or t
tccgcctactaaatatcagttgggcatgccagtcgtgtgacagccaaaaatgaagtggggggtacagcttctgttattaataccctcaggcctgtgatctcctggctccttacagctcttaggaagggaacagtagtctttccctgcacattgttctgtgcagttagtagcgacatacactgacgccccaggccaaagttcctactgtgtcctacttgaaggatgattttgttttcttgagaccctgtctgaaagaaagagagaaagaaagaaagaanagagagagaaagaanagaanngaaagaaaagggaaagatggaaggaaggaaggaaaaagaaagagaaagngagagagataggngagggaaagaaagaaaagtnaagaaagaaaaaagaaaaagaaagaaaagttagaaagaaaaaaaaaaaaagn

SEQ ID NO: 754 - DNA, 162 bp, Homo sapiens
  I.754 (AA150160)
ttagcacaaatacttccctcctccggcacctccaaacctaccccacagtcagtgtacttgttttatatatatttaatcttattcaatggaaaccatgcttttgtcgttttatactttgctaggtagactttattacccccccactatgccctcattttttta

SEQ ID NO: 755 - DNA, 443 bp, Homo sapiens
  I.755 (AA150125)
  misc_feature (432)..(432): n is a, c, g, or t
agacaaggatattgcaactatcacttaaagtctggtggcacattctttagtaggtccttaaggcaatatatttaaattaatttacaatttgatttgatgttaaagtttttttaaacatcacctcaaaatagatgctcaaaataatgccctcacaatagcctttgtaaaatgtattcagatgtttgataaaaaataatggtggctttatattacagtagtgctcattagcaccactataattaaaagtctaccaagtttccagcaaaaccacctgtttcttaggagtttcaccataaaagatcacattggctttaaccagttgggtagcgcacaaaaaagcaatttttatcagttgctggtgctttttttgtactactatattatcaaaaaatttttcattagatcttcaaaatccagcttctataaaggtanatccaatcacc

SEQ ID NO: 756 - DNA, 436 bp, Homo sapiens
  I.756 (AA150120)
  misc_feature (224)..(224): n is a, c, g, or t
cttacttttctttctttttcttttttctttcttacttttctttctttttctttctctctctctctctttctctttctttttccttccttccttccatctttccctttctttctttctttctttctctctctttctttctttctttctctctttctttcagacagggtctcaagaaaacaaaatcatccttcaagtaggacacagtaggaactttggcctggggngtcagtgtatgtcgctactaactgcacagaacaatgtgcagggaaagactactgttcccttcctaagagctgtaaggagccaggagatcacaggcctgagggtattaataacagaagctggtaccccccacttcatttttggctgtcacacgactggcatgcccaactgatatttagtaggcggaaaccaaaaatgctgaacatcctacaat

SEQ ID NO: 757 - DNA, 410 bp, Homo sapiens
  I.757 (AA150092)
  misc_feature (54)..(54): n is a, c, g, or t
  misc_feature (78)..(78): n is a, c, g, or t
  misc_feature (321)..(321): n is a, c, g, or t
  misc_feature (403)..(403): n is a, c, g, or t
atttatttttttatttttattttttttgcttctgcttcttcccgcaccagagtnatgtgaagtatgggaccggagggnggaaagaaaagaaaaccaaacaactaaaaacaacaacaaaaaacaaaacacaaaacagaacacactcacacacacacgaaataaaacctggcacggaaaatgaattaagactggaacccagtttcttttttttttccttttttaaaaaaatgagggcatagtgggggggtaataaagtctacctagcaaagtataaaacgacaaaagcatggtttccattgaataagattaaatatatataanacaagtacactgactgtggggtaggtttggaggtgccggaggagggaagtatttgtgctaaaccaacaaaaaaaaaggcccntcgtgcc

SEQ ID NO: 758 - DNA, 394 bp, Homo sapiens
  I.758 (AA150077)
  misc_feature (107)..(107): n is a, c, g, or t
  misc_feature (232)..(232): n is a, c, g, or t
  misc_feature (251)..(251): n is a, c, g, or t
  misc_feature (252)..(252): n is a, c, g, or t
  misc_feature (255)..(255): n is a, c, g, or t
  misc_feature (348)..(348): n is a, c, g, or t
  misc_feature (363)..(363): n is a, c, g, or t
atgtgtcagccatgcctctgtggggagtctgcctcccagactggctactgtatgtaatgtatttatgtatgtatttgtaaatgtgatagaagtctgggggggagttnggggatggcggcagatgttagccaggtctgccctccccattcaagccccttctccactgtagcaaaataagcacccccaccccatctgccttcaggtcttcttcacagcctgcactgcccagtgngcacctaggggcagtctanntgngtgctggttcaaggcttgtttggggtataggggtcaggtaccaatgaagaatcacgacttgtctcactcctttggaaattgttttctttcctngtgtaattacttcantacctctgtttttgagaaactgttccgtttg

SEQ ID NO: 759 - DNA, 269 bp, Homo sapiens
  I.759 (AA149968)
gctctcagaactttattaggtggggattgggcaagagaaaacccctgaaacagttgcccacgtggttcaagacaactagaatggagatgtgttgcttggagataccttagatttttaaaggggagctgactggctgaataactcagatttatttttttttttttccatggtccagcccagtctctagtaagtctctagggacatgaccagaccagaagccccctgttctatatgaagacaaacaggtggccatacttgggtggagggat

SEQ ID NO: 760 - DNA, 473 bp, Homo sapiens
  I.760 (AA147250)
  misc_feature (6)..(6): n is a, c, g, or t
  misc_feature (450)..(450): n is a, c, g, or t
ctagtntgcagaactggaccaggatgaaaaggaccagcaaaatacatctcgcctggtacaggaacataaaaagcttttagatgaaaacaaaagcctttctacttactaccagcaatgcaaaaaacaactagaggtcatcagaagtcagcagcagaaacgacaaggcacttcatgattctctgggaccgttacattttgaaatatgcaaagaaagactttttttttaaggaaaggaaaaccttataatgacgattcatgagtgttagctttttggccgtgttctgaatgccaactgcctatatttgctgcatttttttcattgtttattttccttttctcatggtggacatacaattttactggtttcattgcataacatgggtagcatctgtgacttgaatggagcagcactttgcaacttcaaaacagatgcagtgaactgtggctgtntatgcatgcccattgtgtgaaag

SEQ ID NO: 761 - DNA, 345 bp, Homo sapiens
  I.761 (AA143006)
  misc_feature (144)..(144): n is a, c, g, or t
  misc_feature (158)..(158): n is a, c, g, or t
  misc_feature (231)..(231): n is a, c, g, or t
  misc_feature (245)..(245): n is a, c, g, or t
ggccgggcctgtgcctgagagcagcctggggtcgggctgagagtccgcccagggtgggggaccaggaggggcatggcagagcctgaccctgaaggatcacttgcttcccatttgcagcagaagaaggtgggaccccagcaaggnaaagtcggcgggcntggaagtagagcggccagaaaggcccctcgaggcagagaccctccgccctcttgcacaccagggccgctcgtnggactccacatctnagcccccaaatctgtcaggggctcctcaagttctgggttgaaaggcatccgggctccccgcttgttccttgtgcttatcctgggctgtgaataagtgaga

SEQ ID NO: 762 - DNA, 379 bp, Homo sapiens
  I.762 (AA053750)
  misc_feature (270)..(270): n is a, c, g, or t
aactacagggccggcgtggtgaccccagggatcaccgaggaccagctgtggagggccaagtatgtgtatgactccgccttccatccggacacaggggagaaggtggtcctgattggccgcatgtcagcccaggtgcccatgaacatgaccatcactggctgcatgctcacattctacaggaagaccccaaccgtggtgttctggcagtgggtgaatcaagtccttcaatgccattgttaactactccaaccgcagtggtgacactcccantcactgtgaggcagctggggacaacctaatgtgaagtgccaccacttggagcttgttggccacggccttggggactcaaatccctcaccaagcacctgccccccttggt

SEQ ID NO: 763 - DNA, 466 bp, Homo sapiens
  I.763 (AA053586)
  misc_feature (380)..(380): n is a, c, g, or t
tacactttctaagaatgtatttattgggtgcctccttgtttattggtttctgcatcagactataaacttcatgaggacaggggccataaccattgtgttcagtgccatctcctcagccctaaaacatgcctggtgcatggcactcaatacatttggtgaataaatgattctgtgaatgagccagagcttgttcctgtgctttgctttcgtgtcctgttcatgtctgtgtgtgcgtgttcacccgtgtgtacctctcagtatggaggcactagggggtaaaagaatgagcatgagatcaagcatgactatgacagtccccttctgtgtgtcagaagccactgggagtaacactgatgaagttgggttttccttccttttgncctctcctcctgcccctgcagagttccttcaccccagcccagttcattcttgctgaatgaacgaaggtggaggaggcggtgcaggg

SEQ ID NO: 764 - DNA, 533 bp, Homo sapiens
  I.764 (AA410933)
acctctttgcatgatctgtcaaagtgagatatttttacctgcctaaaatatgatgtttaaaagcatactctatgtgatttatttatttctacctttctgagtctcttggactaagaagatgttttgaaatgtaccatcaaatgttaacagagtttgatatgggctttctctttggtttctcatcacatttgtaaatgtcttttcaaaaggatttagtttttgtaaaaagcttcattctcactctgctttgcatcccccaaacttcttgttcaaaacgaggggagtttaggagactttaatcccggtttcagaagctgcagctggtctgtttccaggtcagaaaccattgttcagaagacctccctgtgagagagttgctcctcagggtccctcaggcccaaagaacactcgaaaagagcacttcacacagacaagtggctaagtgtccattatttaccttgaacaatcaaggcaactagtggagagaactgattgtgagctctgctctgggtcagagagacctggatttgagt

SEQ ID NO: 765 - DNA, 393 bp, Homo sapiens
  I.765 (AA410590)
tgcttcctgtaatgcttggttttccatgcgtgcaaagataacatttagcatctgagtgagagtagctttggctgttgtctgattgatgagatttttgcttgctaagtagatattgtaacatgttctcacagcttgcagtacagtcccttcatgaatttctatgtgttgtgatgttactgcagtaagtaaagcctttattatctgcagctgaactccttcatctgtctgagggccctgaaagcagccacatattgtttcaataattctatcaattaattttttgcctggtgttgtactatctggagcattgccagtcaagtgcccataagcaataagtttctgtaagcaatctagagatgtactaactatgcgaggacatttggactggcatgc

SEQ ID NO: 766 - DNA, 454 bp, Homo sapiens
  I.766 (AA410363)
aaacacaaacaagataaatttaattgaaaatgttcattacagaaattaacaatgcttaccattctttaaacaccatgtacattattaatatatactgtatatttccaattaactccattcttaggctcaatttaagaaacacaattgtaacattttatacaaaaaatacttcactaagaaagtagacaaactgcacaaaacagtacaagtataatgtgcatagcaagatagcttgaagcattctatgtatggctttctttaaaaataaaactattaggggaatgggcccatttgggacctactgttacagttgacatatgtaaactgtttcacatcttttttaggcacttgctaacaatagtgttcaatccctgaagaacgaatttacctcaaaaacaaaatctacatctgaaataaaaaccaagaaaataacatgggtaaagtcttatatatt

SEQ ID NO: 767 - DNA, 275 bp, Homo sapiens
  I.767 (AA411669)
ccaatgacctagtattttatttttagtgcctaggcaaggtctgagaaacaaatacattggacaaaacttgttggtcttcttcatccagaaattaagggactcagctcaggaacctctcctggagttgtggctctccccattggttgacattagatattgaattcatgtcatttcctagacaactgtggtgagggatggagttggggggctggagaggaagataatagcacaaattccagtattaggctggattcttctgaaggtgcctggcggtt

SEQ ID NO: 768 - DNA, 297 bp, Homo sapiens
  I.768 (AA411668)
aaaagaaacactgggtcccatagctaaattctcaaccgccagcaccttcagaagaatccagcctaatactggaatttgtgctattatcttcctctccagccccccaactccatccctcaccacagttgtctaggaaatgacatgaattcaatatctaatgtcaaccaatggggagagccacaactccaggagaggttcctgagctgagtcccttaatttctggatgaagaagaccaacaagttttgtccaatgtatttgtttctcagaccttgcctaggcactaaaaataaaatact

SEQ ID NO: 769 - DNA, 182 bp, Homo sapiens
  I.769 (AA411624)
gcggtgcctctgagagccgccgccacctcgtccctcagttcccggcagacagccgcccgggccgcgtccctcaccgccaccagggccggagtgacgagtgagaggggcggccgggacgcgacccccgggccaggagaagcggaggcccgacggcggcggccctccgaggtacggcttcttgg

SEQ ID NO: 770 - DNA, 246 bp, Homo sapiens
  I.770 (AA411584)
agcctgagtgttatactagagatctaaagggttaacaggatagggtggaaaggttagagactcctagaaatctctggtcaccgtgatcttcggcctcattctaatacctgttctttggacagtctttttcctttggtgctctcttgcctttagctaccttctctaatatgtatgctaccatcactaataaagtgatgggaatgggtttgagagtcgtaatttatattaaaaagttgttggactttt

SEQ ID NO: 771 - DNA, 260 bp, Homo sapiens
  I.771 (AA411456)
gcaactattttgcttaattttttatttgaaaaaatgtatttaaaagtccaacaactttttaatataaattacgactctcaaacccattcccatcactttattagtgatggtagcatacatattagagaaggtagctaaaggcaagagagcaccaaaggaaaaagactgtccaaagaacaggtattagaatgaggccgaagatcacggtgaccagagatttctaggagtctctaacctttccaccctatcctgttaaccct

SEQ ID NO: 772 - DNA, 514 bp, Homo sapiens
  I.772 (AA411229)
gctttttaagttttactacaaatgagtgacagctgtatagtcacagtccttagtttctatatctagaaatttcctttaaatggtttaaagcaatttccaaagttttattaataagagaaactgggactggacagattaaagaatttaattgagaaccttatagtaacctattaaaatattcacctgcatgtccggtttgcacatcttgttgaatttagagttgagtttctgttataaagaaaggtcgtaagttcttttccttctccggatactctacttacacaaataactctttcagtggaatgcaagcttcagtgagtgctccgacatagttctactgttagacaaattattttaaatatggcacttatatatatgtaatatttcatattaatgggaaaaccttttgtgttgatttatgcattaaatgataaatgtgtgtgtttgtgtgtgtgtatggcatttctgagcataagctttattagtgtgaacaaaatatagtaatcattcatgt

SEQ ID NO: 773 - DNA, 452 bp, Homo sapiens
  I.773 (AA411226)
ccatttctacttttaaaaagagaaggagacacaaagtacttgttacattgcttaataattgagttcacttaacttctaatgtgcatgatgtcctctaccaaatagaagtaaaatgtgtatgtgtgaagattagtgtagaaatgaaaatttacaatactttacagagacaaaagcatttaaaaatcataaacttcaaatagtgtgttttcttcactagtctgcaaggtgttaatcttgttcatttgctgaagcctgttagtttctgttagatcaggtgtcgacttaaggcaataaatcagtattcattaatttcttagaagtgtgatagctttaattccaattaaaagtccctacctgggaccttacagtgtttccactaacaggaaccaaggtctgcatcttccagtcttttccttcttctcaattcgtatttttccagtgatagtgtaatc

SEQ ID NO: 774 - DNA, 433 bp, Homo sapiens
  I.774 (AA406470)
ccatgttttgcctccagtattagtgccccgacacaccgagatcctaacagaacttccgcctctggatgactatactcactccattccagaaaacactaacttcccagcaggaattgagccacagagtaattatattccagaaacgccacctcctggatatatcagtgaagatggagaaacaagtgaccaacagttgaatcaaagtatggacacaggctctccagcagaactatctcctactactctttcccctgttaatcatagcttggatttacagccagttacttactcagaacctgcattttggtgttcgatagcatattatgaattaaatcagagggttggagaaaccttccatgcatcacagccctcactcactgtagatggctttacagacccatcaaattcagagaggttctgcttaggtttactc

SEQ ID NO: 775 - DNA, 335 bp, Homo sapiens
  I.775 (AA406417)
tgagactattttaactgggattggttatcacttttctgtaacgcctgcttgtccctgcccagaattcccagctgcctgtgtcagcctgtccccctgagatcagagtcctacagtggctgtcacgcagcaccaggtcatctcctttcatccccacctcgaggctgatggctgtgaccctgcttcctgcacttacccagagcctctgcctgtgcacggccagctgcgtctactgaggccccaaggggtttctgtttctattctctcctcagactgctcaagagaagcacatgaaaaccattacctgactttagagcttttttacataattaaacatg

SEQ ID NO: 776 - DNA, 504 bp, Homo sapiens
  I.776 (AA406390)
caaaaagtcaatatagtctatatttaaacagtatttctaatcagccaaaggatgagaacattatgggattattcaaaaaaactgaaatgctttcatctgtcccagctgaaaataaatctgtcttaaatgaacatcaggagacatctaaacagtgtgagcaaaaaattgccatagagaatgaatggaaaccagctgatatattcagtactctgggggaaagggaatgtgatagaagttcgttggaagcaaaaaaagcccagtggaggaaagagctagatgaacaggttgctttaaagaagaaagaaaaagaagtttctgaaaaatggaatgatccttggaaaaaatctgaaagtgataaaataatatgggaaaaacatcaaattcttgaccaatctaggggtaaaggagctggaagtgcgaaaattgatgcatgtgagaggagatggaccctggtattactatgagacaattgacaaggaacttattgatcattctccgaaagca

SEQ ID NO: 777 - DNA, 434 bp, Homo sapiens
  I.777 (AA406375)
tcttcccccaagagtttatttttggtaaaaggcagaaaaattagtttttctacaggaaaatctgcttctaaataatttgaaaatcttgatatatattatatattaaaaaagacacacaaaaataacagagaagtgggaataacagattaggtactgcaactttataaaggtttgcctagatcaagaagcagcgcacacacacacctcatctatgcaaactaaaaatgtatataaacagcacaatactgtgatactggatcatgatacattacctgtacacataactactactgttattaataaacctttgggacactcagttttatgcccaataagacatcattaagtctttaaaatcttctcttcctctttaatgggagagtatttctagacactaattttcccatctaatattcaaatataggaaacagatt

SEQ ID NO: 778 - DNA, 319 bp, Homo sapiens
  I.778 (AA406361)
tattttttactcaggatcatgtttaattatgtaaaaaagctctaaagtcaggtaatggttttcatgtgcttctcttgagcagtctgaggagagaatagaaacagaaaccccttgtgtcctcagtagacgcagctggccgtgcacaggcagaggctctgggtaagtgcaggaagcagggtcacagccatcagcctcgaggtggggatgaaaggagatgacctggtggctgcgtgacagcactgttaggactctgatctcagggggacaggctgacacaggcagctgggaattctgggcagggacaagcaggcgttacaga

SEQ ID NO: 779 - DNA, 379 bp, Homo sapiens
  I.779 (AA406292)
tttttttttttaagcgaacaatttgttataatgaaccagaaatacaagattccactgaaactgaacagttgacagaatatggttgaacttaaaccttcaagggaaacaagggcaaaacaaagctaatgagtggaaaagtccaagattagtttgggataaacatgaggatataattgcattttagcatggctatcttctgacctcttccagcagttcgtctgccatcattctcccttctgacacacctaccaaatcaaatggcttctgatcctctatattgcagtataaaccaaccctatagtacccctctggtcatgatacaaacccagaaggaaagtctgtaaatctcatacaaaggtagaaagtgcaattcaaccca

SEQ ID NO: 780 - DNA, 424 bp, Homo sapiens
  I.780 (AA406185)
tttctgttagctgcttctcagtgtgactgacaacccaaaacatatatacagattgttggcatttgcaaaaggaagcatcaatagtggacccagaggcagtgcataaaaccttaggatagattcctaagggacatgcccaacagagttttaaaatggatgttttcatgatgacaacagaatcatagatttagatttttcaccttgtaagtttggatcaaattttgctggttctttggataatggagttcttgtgttaacaaattacgtgctatatgattttttgttacattgttacaagtgttaatgacattttcattaatggatgaaaacttcagggcttcttttctgtatataacaaattaagtctgtacatatttttgtaccttttatgtaaattttgcacagaaatttttggcataagttt

SEQ ID NO: 781 - DNA, 526 bp, Homo sapiens
  I.781 (AA404342)
ttttattctttcttgaggcttcattttgttcaaggtcactaccttgtgatgctttagacttttgggtaggatgaataatgtgtttttctttgttgtaggaaggatccgaagataaagcttcagaagatggtatactaacatttttaggatctgctgatgaagcaatggtctttaagtttatcatagaagtaacatttttaggggctgctgacagttctgtagataatgtctgtcgaacaacataacccattggtgtccaagataactctcttgtacatgaaggagaattggtagcggcattagcagttacagattcatttgggttatttttcaccactatttcaccctttgataacactgcagctggttttactacttctcttagaagagaaatgtcggtagagacagagtggacaggtccccacttgggttgcttctgtatctctgacatattgttctctgcaccttgcagttcaggaaagtccagtgtggtaaattcaaactcaggtttggaggtagatacatt

SEQ ID NO: 782 - DNA, 532 bp, Homo sapiens
  I.782 (AA404694)
atctctctaaaaaagaaaaaaaaaatcactgaaaacagttctcctgacctatctcttgtctttcagattgagatggcacagaagctattgaactctgacctgggtgagctcatcaacaagatgaaactggcccagcagtatgtcatgaccagcctccagcaagagtacaaaaagcaaatgctgactgctgctcacgccctggctgtggatgccaaaaacttactcgatgtcattgaccaagcaagactgaaaatgcttgggcagacgagaccacactgagcctcccctaggagcacgtcttgctaccctcttttgaagatgttctctagccttccaccagcagcgaggaattaaccctgtgtcctcagtcgccagcacttacagctccaacttttttgaatgaccatctggttgaaaaatctttctccatatagttttaccacaccttgaattggggttcaatatttggtgtggttttttcaatcatgatgttcggaaaaatccgggttcaaaagtggcggtttctagaatg

SEQ ID NO: 783 - DNA, 297 bp, Homo sapiens
  I.783 (AA402507)
  misc_feature (214)..(214): n is a, c, g, or t
ctctcttacagctgttgccagtatctaacgtggtgagcgtaatggtgctcacagttctgtgcaatgttgcagaaaagggcctgcttactgccagcggtgtggccagggccctgcttcccgccttgctgcacacactagccttttctgacactgaagtagtaggccagagtttggagctgctgcatctgctgttcctgtatcagccagagctgtntcaggtcttcctgcagcagtcagggctgcaagctggtataaggcatcaggaagaggcccagctccaggatcgtgtgtatgctc

SEQ ID NO: 784 - DNA, 436 bp, Homo sapiens
  I.784 (AA403044)
gctgatggaactatatcatctgagataaaatcagctagaggttcacatcatttgtccatttacgctgagaatagtttgaaatcagatggttaccataagcgaacagacaggaaatccagaatcattgcaaaaaatgtatctacctccaaacctgagtttgaatttaccacactggactttcctgaactgcaaggtgcagagaacaatatgtcagagatacagaagcaacccaagtggggacctgtccactctgtctctaccgacatttctcttctaagagaagtagtaaaaccagctgcagtgttatcaaagggtgaaatagtggtgaaaaataacccaaatgaatctgtaactgctaatgccgctaccaattctccttcatgtacaagagagttatcttggacaccaatgggttatgttgttcgacagacattat

SEQ ID NO: 785 - DNA, 206 bp, Homo sapiens
  I.785 (AA401030)
cctcgtgagatgggttcttcctgcagggcagaagggcagattgttaaaggggctgcggcgagaccaccctggtccctcctccggcagtgactcagacccacactgtgccgtgcagctgtgtgcttgcaaccgcttgacggcgcactgctcacttctggggggccctttcagaggcacttttaaagcaaataaaacatttattgttc

SEQ ID NO: 786 - DNA, 459 bp, Homo sapiens
  I.786 (AA400883)
ccgatccctagtgtcgactatgcgagatctgattccggagctgccatgattgaagtggtagcagactcagccggggtcctgtatttttggctggggaggcgctggagtgtgtagtgaccgtcaccaacccccttccgcccacggcacttctgcatccagtgaggccctggctgggcagtgcccaaatccactgccagttccatgccagtgagagtcgagtagcactgcctcctcctgactctagtcagccagatgtccagcccgacagccagactgtctttctgccacaccgaggtgagaggggccagtgtatcctttctactccaccgaaaattctattctgtgacctgaggcttgatcctggagagtccaaatcatactcctacagtgaagtgctgcccatagagggaccacctcctttcggggtcagtcagtcaagtacgtctacaaactgaccat

SEQ ID NO: 787 - DNA, 176 bp, Homo sapiens
  I.787 (AA400951)
tgaacaataaatgttttatttgctttaaaagtgcctctgaaagggccccccagaagtgagcagtgcgccgtcaagcgggtgtgcaaggcaacagctgcacggcacagtgtgggtctgagtcactgccggagagggaccagggtggtctgggccgcagccctttaacaatctgccct

SEQ ID NO: 788 - DNA, 418 bp, Homo sapiens
  I.788 (AA400967)
tgagggatgaccagggagtgactagattgctgtgatgtaagaatgaacagaagagcaatacaagatgggccaaacctgaagggaccaacactagtgtgaaagataaggcttcaggctataaatcaggggaggttggggtggacctggagagaaaatactcctgttataaaacaaaaaggcccacatatggtaggtgacagcttagttaggaggaccaaggggccactgaaaggggctctgtggggggaaaactgtgagagagggaacatgtgggcagggataaaggcagcctttcactgtgctgactgaaaactgcaaacaagctacggttccttcccctaagtttaaggtccccaccacgtcctcgccaagtctgtacacagatttgaagatgccaaacgtcccaactttccctcgg

SEQ ID NO: 789 - DNA, 423 bp, Homo sapiens
  I.789 (AA400732)
gaaaaaagaaagtggtaccagtgttaccagctcaactaaaacctgcaattctgcatttcaactcttcacttcctcagcctacaaatagctcattagatgacattcacgcatgctgggtataggcaaggaaagtaattttcaaagtacatttgcagttctctttttcagagatgattctatgatagtgcctctgaaagttgatgcagcatttttgcctttccaaaaagtatttatcctcactgctttttgcagtacttgtattttcacagatggattatctggggtaattttcttcaaagggagtttgttatacacagtgaaaatgtattatagagtagaatagtaaagctctaggggtttcagaaagctttgatgaacagatgacaaacatctgaaaccccctccgcactgttacccagtgtg

SEQ ID NO: 790 - DNA, 393 bp, Homo sapiens
  I.790 (AA400457)
tttcattttcaaaagaaaatattgtatccaagtcagcttaatctctgaacaccataatataactcttaatgttgattctaaacatccaggataaagtttactttaaactgaataaaagaaagaaaaggtttctttccgaacttccccaacagattccttggctaccatcggtgcatcactcccataaagtaattgtcatcaacagaccgtaaaaagaaaaaacccctcctacaaatagagaaattctcaggaaatccaagcaacaaatcaattagtagcccccaattgaatggggcagacagaatcagcattttctagaacttagaagttacattaactttattaataagattttattgtcttttaagaaactgtatggattcaagggcacac

SEQ ID NO: 791 - DNA, 297 bp, Homo sapiens
  I.791 (AA399521)
agtgggagggcaggcaaagaaaggattagaccagaggatttaggatgcctccttctaagaaccagaagttctcattccccattatgggctgagctataatatggagctgtcataaaaatgggatgcattgaggacagaactagtgatgggagtatgcgtctttgagtttggatgattaggtctttaatagtgttgagtggcacaaccttgtaaatgtgaaagtacaactcgtatttatctctgatgtgccgctgctgaactttgggttcatttggggtcaaagccagtttttctttt

SEQ ID NO: 792 - DNA, 398 bp, Homo sapiens
  I.792 (AA398902)
tttttttttaatataaaaataaaactttattctgtctcatcaaaagctaccagctgctgaagcaaacatgaagggtggcgggggggcagggattctagggccccagagtaagtagaccacactgagtcccttttggtcctcctgcctggatagtgctgagtggaaggggaggagctgggacccaaaggtcttggcttaggtgtgggagcagagaacatgagacctcattatggtcctaaatctccaaaggctctactggacaaacaagcttgatgttaagagagaggggaatgagtgacattgagaaacaagatcacccttgaagagctgtctgctggagagcatacacacgatcctggagctgggcctcttcctgatgcctttccagggcttgcagc

SEQ ID NO: 793 - DNA, 350 bp, Homo sapiens
  I.793 (AA398402)
cattttgaaaaagctatttactttttttccaaatattatcccaaataggtgttttacagataagggtcaatacgaagtcaaacattctacagaagaaaatcgtttttacagacattaagaataattttaacagaagaaaaagctcacatctatctagatgtggctatgttccatgggaaaaatttcagcatccaaagtgcaaagaaaaaatgactgtagcttttcttaccacaaaatattgacaatcttcccttatagcctactctttattgttagttgggatgccaaaggatgatatattgacctttagaagttgggctccactggacaaggttgggggtatgggggcc

SEQ ID NO: 794 - DNA, 400 bp, Homo sapiens
  I.794 (AA394044)
aaacaaaagaattaaataaaacatgcctgtgaaataaatccacctatgggccatcagtttgcaacagctgcggtaaatcatattcaatgttcctgtcggaatcaatccggtctaaccaccagcttccttcctgtgggctgactggcttagctgaggtcagaaggatggaacagaggtttcctgaagtcactgtttcctgatttggcaatacagggcattattttctttccccttaggttggagttcaatttctagagaagatatttgaaaaggatgatctgaagatgatcagtttctctactgagagacgagaaggaagagcttgctccttatcattctggcttgttcacctgattccttcctcctaaccggggctggtttccatgctcgctcctgctgg

SEQ ID NO: 795 - DNA, 397 bp, Homo sapiens
  I.795 (AA292759)
aacacaagcataatattcggcccaaacctttcgtgatcccgggccgaagcaggtcataagcgctgagactgtggagtttgcagtgcatgcttcttaaatcagttcttactaatcatcaagaaaagtaactggtagatgtttggagtggcttttctcattgcgaacgttatttcaaaagcaaaaagaaacaaactcacttggcagagaacagaagccaaataacttgcatttccaagagtaaatattgacaagatgacagagctgtgaaattgtatgcaatcaccacgtgtatttatagcgaacacccctgaggctctggggatcccatccagaacactgtgacctttgagtcgggcagtcagtatgtctatcccaggtcaggaaagccctgccagca

SEQ ID NO: 796 - DNA, 292 bp, Homo sapiens
  I.796 (AA291486)
ttacttggtaacacctttttaataggtcaaagtaactgtacagttcattatattcttcctgagaataatttatatcccccaacaaactaaagggagggtatattttttcaaaattaacagaatggatggtgtaactggacatcaaaagaaaaccaaattcctgttttgcttcattctctcctgggaagacagatacaaggaagggttagttaactccagtggctgtaaaatagtcaacatggctttaatctttctttataaattatataaaaatggaaaaaggggatggttc

SEQ ID NO: 797 - DNA, 159 bp, Homo sapiens
  I.797 (AA157015)
  misc_feature (107)..(107): n is a, c, g, or t
  misc_feature (141)..(141): n is a, c, g, or t
  misc_feature (151)..(151): n is a, c, g, or t
catctaaaagtggttttttaatatatatattttttccaaaggaagaaatttcttgcttttactcagggaaaaaaaaaaaattaaggtacatttgagtagaatgattncatctaaaagagttctttcaggagacatctgtgnttcctgcatngtttttat

SEQ ID NO: 798 - DNA, 311 bp, Homo sapiens
  I.798 (AA156695)
  misc_feature (1)..(1): n is a, c, g, or t
  misc_feature (41)..(41): n is a, c, g, or t
  misc_feature (42)..(42): n is a, c, g, or t
nttgttgctggaggctcttgcccttgcgtatatgtgcggcnntgtgaagaccttgtgattgaggctgtgtatgctgacgtgcttcgtggctccctggaccagcgcaaccagcggctcgaggttgactacagcatcgggcgggacatccagcgccaggacctcagtgccattgcccgaaccctgcaggaatggtgtgtgggctgtgaggtcgtgctgtcaggcattgaggagcaggtgagccgtgccaaccaacacaaggagcagcagctgtggcctgaagcatcagattgagagtgaggttgccaacctta

SEQ ID NO: 799 - DNA, 218 bp, Homo sapiens
  I.799 (AA156623)
gaaaaaccctcatgggtccacatggtgagaagttaagtttcctgtaagtgggcctctcaccctggaaaggagttgagggacatcagatgctggaaccctcactgaaagtccagaatgtctaagccagtgttagattttgtaaacaagtggaacaggtgttaaatttctatgatgttggagccatccagagactacctggaattgtcgagacttttgga

SEQ ID NO: 800 - DNA, 576 bp, Homo sapiens
  I.800 (AA150492)
  misc_feature (406)..(406): n is a, c, g, or t
  misc_feature (418)..(418): n is a, c, g, or t
  misc_feature (443)..(443): n is a, c, g, or t
  misc_feature (559)..(559): n is a, c, g, or t
  misc_feature (566)..(566): n is a, c, g, or t
agatttctcatagatttatttctgcgtcatattatatatagatatatgcatatatacctttttttttttaatacaatctatatacccttcccttccccaccaaactcacaaaaggagattaaacccttccaggattgccatcaagcttcccgagatggccagggccaagaaagaatcatctctcaacatgttaagaaacggctgccattcttaggctctggggttgaagcagcagcattcccaggacccaagggccagagagaggaaaagaaatgactgtagtgtgacaggattctaggatgaacatgtccagtgactcctggcatggcagactgggctcccagaattctcagggtgtgagtaaaaggtgggggccctatggctccttcagaggctggctcaatanggtcaggggtangggtataggaactggggatcaggcntgcagggatggggtggcagaaaaaacgcctgtgggttatgctccagacagagcgacccccatcaggctacccacctactcaatgacatgtaatgaccagggacagatgctgggctnttaaggnaccaagggga

SEQ ID NO: 801 - DNA, 364 bp, Homo sapiens
  I.801 (AA150435)
  misc_feature (126)..(126): n is a, c, g, or t
  misc_feature (317)..(317): n is a, c, g, or t
  misc_feature (348)..(348): n is a, c, g, or t
tgtaaaatttttacttccttttttatttttttaaattctcagtgatccttattctgattccttttggttttgacaattaaaaattatgaaagctggttgttttgtctcctattgctgaaataattnagttgatttaacactacagatggtgttaggataatgaatacagaacatcaatgagaatctaaattatatctcttgagacctccctcattccaagggaggtctcataagtatacatgcatacatgtataacttataaaaaaaaaaaagccacataaatcaccatgacattatagaagcagattcaagagaanatggaaaaatggtgttcaccattaaactcantactaatttttagaag

SEQ ID NO: 802 - DNA, 310 bp, Homo sapiens
  I.802 (AA128076)
  misc_feature (280)..(280): n is a, c, g, or t
  misc_feature (301)..(301): n is a, c, g, or t
gtgaaagtgacgagactcctccagcagctcctcagttgatcaagaaggaaaagaagaagagtaagaaggacaagaaggccaaagctggtctggagagcggggccgagcctggagatggggacagtgataccaccaagaagaagaagaagaagaagaaagcaaaagaggtagaattggtttctgagtagtgaaggccacttgaagctggaggagaaactaaagccttattgagaaaacatgttatagatccttttgttgctgagagagtggaacataggtnctagacagggttaagagttcntgcacattt

SEQ ID NO: 803 - DNA, 297 bp, Homo sapiens
  I.803 (AA126900)
  misc_feature (283)..(283): n is a, c, g, or t
  misc_feature (289)..(289): n is a, c, g, or t
  misc_feature (295)..(295): n is a, c, g, or t
tttttttttttttcaaataggacataaaggtccctagatttttaatcaaaatattttacaatttttgctctgctagcatgagatcaacaagaaaacccaacaggaatacataaaaaacttaacaagttgactttaataagtaaaaattacaacattcttctcccagcaatgaacaatttcattttttaaaagtaaacgaggcctaaaacaagagggcacaggaaccaagtagtcaagatggatttaggtgagccctgtacacaaagcctttgagggaagtgcnaaaggnattggncc

SEQ ID NO: 804 - DNA, 244 bp, Homo sapiens
  I.804 (AA126597)
  misc_feature (5)..(5): n is a, c, g, or t
  misc_feature (179)..(179): n is a, c, g, or t
caganatcatgttattgtttcagcatcgagtgatggtttcatcaaaatgtggaagcttaagcaggataagaaagttcccccatctttactctgtgaaataaacactcaggctgacgtgtcttggagtgtggctagacaaagtggcagacatgaaagaaagccttcctccagctgcagancttctcctgtaagtaaagaacagtccaaaattggcaaaaaggagccctggtgacacagtgcacaa

SEQ ID NO: 805 - DNA, 225 bp, Homo sapiens
  I.805 (AA115072)
  misc_feature (43)..(43): n is a, c, g, or t
  misc_feature (189)..(189): n is a, c, g, or t
  misc_feature (194)..(194): n is a, c, g, or t
  misc_feature (203)..(203): n is a, c, g, or t
  misc_feature (209)..(209): n is a, c, g, or t
tccagcaacaaatttgtatttggccagaacatgagcgagcgangttttgagccccccaaaattaaacgaggtcagttcagatgccaacagggaaaatgcagctgccgagtcagggtctgagtcctcgtcccaggaggccacccctgagaaagagtccctggctgagtcggcagccgcctacaccaaggnaaaanggcgggaantgtttnttggaaaaagtggaag

SEQ ID NO: 806 - DNA, 500 bp, Homo sapiens
  I.806 (AA115467)
  misc_feature (44)..(44): n is a, c, g, or t
  misc_feature (222)..(222): n is a, c, g, or t
  misc_feature (223)..(223): n is a, c, g, or t
  misc_feature (312)..(312): n is a, c, g, or t
  misc_feature (377)..(377): n is a, c, g, or t
  misc_feature (386)..(386): n is a, c, g, or t
  misc_feature (431)..(431): n is a, c, g, or t
  misc_feature (457)..(457): n is a, c, g, or t
  misc_feature (464)..(464): n is a, c, g, or t
gagaagccgtgacaagtcttaatgtgccatttcaattcaaaggnggggagggaggaaatgttcttgtttgttcgctcatcaatatgatgaggtctcgtgtcccaaaccacattcaggcagttcccgagtctgcttttgaacaggacgtgcgggtccagactgtggccggcccagtggggtgtgtggttcccggccccgcacctggacgctgccggtggggtnngggcgggtgggcgggtggatagacggacaaagcagcagcctggtgtgcagccgggctcccggcagctaatgtgctcccggtcgtctgcncgtccccttcgtcaccagcaccaactgcggtggcccctgaaggaaccaggacatcgtcatcgtcncttgtcgtncctcctcgttggatgggggctgcccaagctcaaggcgcgggcatntttgggcttctggctcctgcttccangcggctngcaaggggccaagaatgccgttggtgcaagggcttg

SEQ ID NO: 807 - DNA, 411 bp, Homo sapiens
  I.807 (AA099523)
  misc_feature (302)..(302): n is a, c, g, or t
  misc_feature (383)..(383): n is a, c, g, or t
  misc_feature (390)..(390): n is a, c, g, or t
tttaaaaacaatttatttttttccaatgtaagaataacaagtttaatattgaaaatctgaaaaaggcaggaagataggaagaagaaaaatatcaaccatagtcctaccacctaaagaacactcactgacagtgtggccatgctcattctttaagccttaatttaggtcccatttctggtgtggtgccttccttgaacttcctcccccagatcttccatgtcatatctgtaccactcagttgtacatatcatacacttttgtgtataatgtgatgtatgtcttatgtttccaacgagattgtnacatcttcgaaggctgcaaacatgagttggtacttgttagcttaccccaaaaataatacctgggtataccgggaccccaanatctgcngattgatctaaccctaaaatg

SEQ ID NO: 808 - DNA, 455 bp, Homo sapiens
  I.808 (AA099522)
agagaatctctgtgtaaatcctggctcataatcagtctcctttttatcagttttggtgtggagaaagaggccagtttaaataggctttcaagagtctagggtcagaaaagcaatagtcactaagctaggtgacctgaaagctttaattttcatgacctggatatgtggtctattgtatatctttttctgaaatggtttgtattcatttaggttagatcaatcagcagatattgggtccggtataccaggtattattttggggtaagctaacaagtacaactcatgtttgcagccttcgaagatgtaacaatctcgttggaaacataagacatacatcacattatacacaaaagtgtatgatatgtacaactgagtggtacagatatgacatgggaagatctgggggaggaagttcaaggaaggcaccacaccagaaaatgggaccctaaattaaa

SEQ ID NO: 809 - DNA, 451 bp, Homo sapiens
  I.809 (AA101850)
ccttgccaaactttattgtgattaaaattccagagacagtaccagctccacatacctctagccctgtctttgccctagttcccgagtgtccttcacccccatcttccaaatcatctctggtttcacggggaagaaaaaacctagggctgctgtgaatgtgccctctcaggtccctgagttggccccaggtagagctgtaagagatcaggaagagggcctccctgcctgacggctatgatcctggaggcaacgtgtggagcagaaagagaagtcgaggtagtgaaagggagtcaggccttggagggatgccccacaactccagcagcgtcgagtattgacgatttgcagagtcagggattggagaggtaggggctcccaactgggcagcgagtcggcgctctgcagccagagctctcttctctcggtcactgaaggcggcaaatcgccttgg

SEQ ID NO: 810 - DNA, 451 bp, Homo sapiens
  I.810 (AA101849)
  misc_feature (14)..(14): n is a, c, g, or t
  misc_feature (77)..(77): n is a, c, g, or t
  misc_feature (79)..(79): n is a, c, g, or t
  misc_feature (156)..(156): n is a, c, g, or t
  misc_feature (282)..(282): n is a, c, g, or t
  misc_feature (293)..(293): n is a, c, g, or t
  misc_feature (307)..(307): n is a, c, g, or t
  misc_feature (333)..(333): n is a, c, g, or t
  misc_feature (337)..(337): n is a, c, g, or t
gctgcctggaaggnttgctgaccccactgtgcagactctctcgggcccggccaccttatactgttgcggctgacaantnaacacgtaatgagttccgaagttcatggagaagaatccagatgcctacgattacaacaaggctcaggtgccaggacnattgacaccagaaatggaggcacggcaggctacacggaaaagggagcagaaggcagcccggcggcaacgggaggaacagcagcagaggcagcaggagcaggaggagcgtgaacgagaagagcagcngcgaatttgcnccatcaagtgaccngagagaagagagctctggctgcagangccngactcgctgccccagttgggaagcccctacctctccaatcccctgactctgcaatcgtcaatactcgaccgctgctggagttgtggggcatcctccaaggcctgacttcctttc

SEQ ID NO: 811 - DNA, 458 bp, Homo sapiens
  I.811 (AA099277)
atgttaggactttaacactttatctatggctactgttattagaacaatgtaaatgtatttgctgaaagagagcacaaaaatgggagaaaatgcaaacatgagcagaaaatattttcccactggtgtgtagcctgctacaaggagttgttgggttaaatgttcatggtcaactccaaggaatactgagatgaaatgtggtaaatcaactccacagaaccaccaaaaagaaaatgagggtaattcagcttattctgagacagacattcctggcaatgtaccatacaaaaaataagccaactctgacatttggattctaccatagactctgtcattttgtagccatttcagctgtcttttgattaatgttttcgtggcacacatatttccatccttttatgtttaatctgtttaaaacaagttcctagtagacaccaaaaaaaaaaaaaaaaaagcctcgt

SEQ ID NO: 812 - DNA, 174 bp, Homo sapiens
  I.812 (AA099276)
tgtctactaggaacttgttttaaacagattaaacataaaaggatggaaatatgtgtgccacgaaaacattaatcaaaagacagctgaaatggctacaaaatgacagagtctatggtagaatccaaatgtcagagttggcttattttttgtatggtacattgccaggaatgtctg

SEQ ID NO: 813 - DNA, 449 bp, Homo sapiens
  I.813 (AA045937)
  misc_feature (54)..(54): n is a, c, g, or t
gaaggaagctcatcgagtcaagactgccaaactacagctggtggaacagcaagnctaagtcttctctgagaggagtttcgtgagctgaagaacaagctgctcatggcaagggctggccccagaaccctgcaagagaggccttctgtggatggagaactaggccttctcaaagctcaaggacaaaatccagctaacccagtccctcggcccaggcctcctttcgtgctttgtgcttggtgggggggatttcgagggactttgcactggactctgggaacctttcatcattaaaaaaagggggaccattggggcctgagccaaggaactttccttctactgccttatagtgcttaaacattctccgcctccagggtgcagattcagagctggccagagtttcagtgatagccgtatgttaaacagaatctcacctcagtctcctggaggga

SEQ ID NO: 814 - DNA, 424 bp, Homo sapiens
  I.814 (AA045822)
  misc_feature (345)..(345): n is a, c, g, or t
  misc_feature (396)..(396): n is a, c, g, or t
cggagaagtgccaagtttattagagtgagagagtatcaccctcacattgccaccaacagacatagatctcagagacacactgaccttgcaccataattatggtgaatttctaggttagaagataccttagaggtcaccgggctgaccctcccatctgatgtgttaacccctcttaaacatctccctccaggagactgaggtgagattctgtttaacatacggctatcactgaaactctggccagctctgaatctgcaccctggaggcggagaatgtttaagcactataaggcagtagaaggaaagttccttggctcaggccccaatggtccccctttttttaatngatgaaaggttcccagagtccagtgcaaagtccctcggaaatcccccccancaagcacaaagcacgaaaggaggcctgg

SEQ ID NO: 815 - DNA, 415 bp, Homo sapiens
  I.815 (AA047423)
  misc_feature (188)..(188): n is a, c, g, or t
  misc_feature (407)..(407): n is a, c, g, or t
gggcttggggggtttattaagtgatgctttagtctcagtctctgccagcaactgggagtggggtgactccactcaccccaggatttcccagacttgctattttagaggagagaggcaggaagccaactatcctctaagccacagcttgggaagctaggctagtactggggtgggggcagcagagtgangaccctccaccccgagcccctagcctgtgctatcctcccagcctgatgggggaggagctgaggcaatcctggctgcagctcccacacacagccctgctcttggtgcgccattcactgccctgagctattcattgatctctgctcccagatattcacctcaacactcctaaagccagcccctttccaggtcttcaagtcctggcggaaggcaaaaggagnctcgtgcc

SEQ ID NO: 816 - DNA, 347 bp, Homo sapiens
  I.816 (AA047422)
  misc_feature (267)..(267): n is a, c, g, or t
  misc_feature (338)..(338): n is a, c, g, or t
ctccttttgccttccgcagactcgaagacctgaaggggctggctttaggagtgttgaggtgaatatctgggagcagagatcatgaatagctcagggcagtgaatggcgcaccaagagcagggctgtgtgtgggaggctgcagcaggattgcctcagctcctccccctcaggctgggaggatagcacaggctaggggctcggggtggagggtctcagctctgctgcccccaccccagtactagcctagcttcccaagctgtggcttanaggatagttggcttcctgcctctctcctctaaaaatagcaagtctggggaaatcctggggttaagtggagncacccaaat

SEQ ID NO: 817 - DNA, 578 bp, Homo sapiens
  I.817 (AA046759)
  misc_feature (366)..(366): n is a, c, g, or t
  misc_feature (474)..(474): n is a, c, g, or t
  misc_feature (542)..(542): n is a, c, g, or t
gaatgaggcctacagggttcaccaggatgtaagaggagagaggaatccacaggaccaccagagaggagagggaaccagatatgcagatcagagatagaggaagtggaaccagagagctgggagggaccaaggttgtaagggtggctaagtcccaccataacagctaaggggacctgggagatgatgggctcatttccacccagccccaggatttccagagcgcacatccacaggcctggacctgggatgaagatgaatgaagaacatggatgcacgtggatgtagtttggctcaggtgtccctgcagttggcaaggaagtcagtactcagtccctgagtgtgggctgaaatttgaggtcctggctngagccaaagggaagtaatggaccagatcttacctcagtattcaagttcagtgggggacaccaggtgggctttcaaactttccctggtttcatgatatcttggagacgncctttacaaattgatggagggattccaaagaagttttttggttaatttggggttaataattgttgggnaatttatggcatttgagattggaacctaagaaatgt

SEQ ID NO: 818 - DNA, 380 bp, Homo sapiens
  I.818 (AA046520)
  misc_feature (361)..(361): n is a, c, g, or t
cacgttatgaagatattttcctttaatttatcaaacatttcacattcatgaagtcatttacttcagagcaaatgtaagcttataatattaaaaattaaagtattacaatatttacaagatggttggcaggggacacttactagtataaaaataatacaaatattgtattttcctcttatctgccagtaaaaatggcaaacagttttgtctttctgaagtttctagtcaataaccaaagatgaggagcccctaataaagtgccttgccctgtatgctccactgtctatagctttagaccctcaacattcttcttcaagttcagcagctctttttcttgccttcttttctccagtttaaatgntaatttgttagctttcttc

SEQ ID NO: 819 - DNA, 515 bp, Homo sapiens
  I.819 (AA046647)
  misc_feature (440)..(440): n is a, c, g, or t
tttttcacaataaaatttattttgctttggataccatacttatttttcacaaacattctacttatattaacctataattggcttattcatgctattttaatataaattaataaatgttgtaaatgtatgtatgtaatgtaaataaatgttgtaaaggtaataaattaaaacatttcttagtttcaatctcaaatgccataaataccaacaaatattaacccaaataaacaaaaactctttggaatcctccatcatttgtaaggcgtctcaagatatcatgaaaccaggaagtttgaagccactggtgtccccactggaacttgaatactgaggtagatctggtccatttactccttgggctcagccagggacctcaaatttcagccacactcagggactgagtactggactccttggccaactgcaggggacacctggangccaaactacatccacgtggcatccatggttcctcatcatccttcatcccagggtccagggcctgtggatgtgcg

SEQ ID NO: 820 - DNA, 462 bp, Homo sapiens
  I.820 (AA046612)
  misc_feature (447)..(447): n is a, c, g, or t
  misc_feature (462)..(462): n is a, c, g, or t
agcaaactgaaagaatacagatgattaatggcagtgatcttcctaaagtatcaactcagccacgttctaaaaatgaaagcaaagaagataaaagagcaagaaagcaagctataaaagaagagcgcaaggaacgaagagtggagaagaaagctaacaaattagcatttaaactggagaaaagaaggcaagaaaaagagctgctgaacttgaagaagaatgttgagggtctaaagctatagacagtggagcatacagggcaaggcactttattaggggctcctcatctttggttattgactagaaacttcagaaagacaaaacctgtttgccattttttactggcagataagaggaaaatacaatatttgtattatttttatactagtaagtgtcccctgcccaaccatcttggtaaatattgtaatacctttaatttttaatattatnagccttaccatttgn

SEQ ID NO: 821 - DNA, 156 bp, Homo sapiens
  I.821 (AA045444)
tttttttgcaaattatctagtcatctttattagctataatttggaatttgcaagtgacagaaaaggagaaaggcttcagacgcaaaggacttttaataagttaccttttgaagatgagacaagacaggttctaagctaatcagacgtgtccaccca

SEQ ID NO: 822 - DNA, 408 bp, Homo sapiens
  I.822 (AA045359)
  misc_feature (63)..(63): n is a, c, g, or t
  misc_feature (118)..(118): n is a, c, g, or t
  misc_feature (184)..(184): n is a, c, g, or t
  misc_feature (250)..(250): n is a, c, g, or t
  misc_feature (299)..(299): n is a, c, g, or t
  misc_feature (331)..(331): n is a, c, g, or t
  misc_feature (359)..(359): n is a, c, g, or t
taaatcaaagtaactgaaaagtaaaattatagctaaattcataagtcaataactttgtataanaacacattcttatcatatatagaaattttaaacactgatcaaaatattagaaaanattatgttttcaattaatgtagtaaactggtgcttggcagttaaagacatctggagcaaaaaagcnttttcctgtttcttcagcaatcaaggcatagtccacgtggctgagtccgctgacagctggcaaaancaagttccagagaccctcgacgtttggccagtttccttgagtttatcantcactaaaggttttccccacttgtccactganttttcattttgaacatagaactcagttncctccttttcagctggaagaatgtgttgtttcatgaaatgcttcacctt

SEQ ID NO: 823 - DNA, 556 bp, Homo sapiens
  I.823 (AA045139)
  misc_feature (324)..(324): n is a, c, g, or t
  misc_feature (528)..(528): n is a, c, g, or t
cggatcgaatcttccgtgatttaacaattcctggacttagcccagcagaacgttcagccatatatgtggccacggtagaaacattggctcagttacattccttgaatatacagtcactgcagctggaaggatatggtataggtgctgggtactgcaaaagacaggtatcaacctggacaaagcaatatcaagctgcagctcatcaggacatccctgccatgcaacagctatcggagtggctaatgaagaacttgcccgataatgacaatgaagagaatttgattcatggagatttcagactagataacatagttttccaccctnaaagagtgtcgagttatagcagtgctggattgggagctgtcaaccattgggtccatcctttgtccagacttaagctcatttttccctgttctacttttggccaaggacagttccaatgataaatcaaggttcttatagtgaaaactcagggataccatcaatggaagaactgatttcaataatattgccgctgcagggggaatnatccaatcctcccaactggaatttcctt

SEQ ID NO: 824 - DNA, 622 bp, Homo sapiens
  I.824 (AA044905)
  misc_feature (580)..(580): n is a, c, g, or t
  misc_feature (591)..(591): n is a, c, g, or t
gattattgaagtgcatttaatattgtgagaggtctttgaaaaccccatcttgagcagcttgattatatatcagatttcagtctatcttggttaagatcatttggtaacatttgtatgtcaaatacatagtgaatatatctatagatctcctcagccttctgatgagttacttgtgcatacatggagatttcttgaagtgagctgttagccatccttttcacagatgaaaactggtgacacatatttaatgcagttatataacttatattgggaatacttaaataaaactggagtgcctcacttttattactattcaccactgttggaacatgaataccaacattctttctttgttccactaaagacagttcctttagcaaatctgcggtttcttcttggcaggaactgaaaagaattcggattccagcgccaattaaggtagtcagcaggctgtcatagctctttgttctcctaaacatccttgatgtgtctcctgtttttctctgtccttttccacaatcacacatattctttcaaacatactctgcaggtgtggactgctcaatgacttgtcctatgncactattacanccagatgagacccccttccacaccatgggat

SEQ ID NO: 825 - DNA, 668 bp, Homo sapiens
  I.825 (AA044695)
  misc_feature (208)..(208): n is a, c, g, or t
  misc_feature (466)..(466): n is a, c, g, or t
  misc_feature (557)..(557): n is a, c, g, or t
  misc_feature (586)..(586): n is a, c, g, or t
  misc_feature (594)..(594): n is a, c, g, or t
  misc_feature (604)..(604): n is a, c, g, or t
  misc_feature (626)..(626): n is a, c, g, or t
cagacttcaaacctcagaatcataatgaagtccagtctaccacaccacccttcactactgttgattcacagaaagactgtagaaaatttccagttccacagaaggatggtagtgctttggaggattctagcacttcaggggcatcctgttccaagtcaagaccacatttagctgggacacatacttctcttagacttccgcagaaggnaaaaggaacctgtattcttgtaggtggtcatgaaatcacttctggattagaagtaatttcttccctaagagcaattcatgggttgcaagtagaagtttgtcctcttaatggctgtgattacatcgtgagtaatcgcatggtggtggaaaggaggtctcaatctgagatgttaaatagtgtcaataagaacaagttcattgagcagatccagcacctgcagagtatgtttgaaagaatatgtgtgattgtggaaaaggncagagaaaaaaccaggagacacatcaagggatgtttaggagaacaaagacctatgacagctgctgactaccttaattggcgctggaatccnaatctttcaggtcctgccaagaagaaccncagattgntaaggaccgncttagtgacaagaagatgtggnatcaggtccacagggtgatgtataaagtgggccccagtttat

SEQ ID NO: 826 - DNA, 562 bp, Homo sapiens
  I.826 (AA044656)
  misc_feature (469)..(469): n is a, c, g, or t
aatcgtctatttattaatgcatttcaagtttcaaaaaaccttacatctttgcacaatactttattttttgcaatttttagtaaaaatttccaaagtgaacaaaaaaagatactgtataaaacacagtggacattaaaactgacagtagtattagatctcatttgtcttgatccttttatattaccacatcttgattcgcagtggaaagagttcagtgcatgtatctcttttcagaaaacatttaacttagactcaaaataaaatagggcagtgtgtgtacctgccaaaatcctaccacaggataacattacaagcaaaaaatttacatgttccaaagtctaccacactcaagaagttactaagaactcttgcagaataaaagtcaccattttagaaatgcaaacccacttccaacctttgcacagtccaaaaacaaaggcatttaaatgatttaaaagcaattacatcnatatctacctacttgtttgtttagaattatttatagtcttctggggttcatgtcaaaatttggctctaaatcatgtccaaaagtgtatttgaa

SEQ ID NO: 827 - DNA, 530 bp, Homo sapiens
  I.827 (AA043347)
  misc_feature (461)..(461): n is a, c, g, or t
  misc_feature (525)..(525): n is a, c, g, or t
agcctacttatttgtgtttttcatatatctgaaatatgctaattatgttttctgtctgatatggaaaagaaaagctgtgtctttatcaaaatatttaaacggttttttcagcatatcatcactgatcattggtaaccactaaagatgagtaatttgcttaagtagtagttaaaattgtagataggccttctgacattttttttcctaaaatttttaacagcattgaaggtgaaacagcacaatgtcccattccaaatttatttttgaaacagatgtaaataattggcattttaaagagaaagcaaaaacatttaatgtattaacaggcttattgctatgcaggaaatagaaggggcattacaaaaattgaagcttgtgacatatttattgcttctgttttccaactacatcacttcaactagaagtaaagctatgattttcctgacttcacataggaggcnaatttagagaaagttgtaaagattccaaggtttgggtttttttttcctttttttttttaagagntaagg

SEQ ID NO: 828 - DNA, 279 bp, Homo sapiens
  I.828 (AA040664)
  misc_feature (108)..(108): n is a, c, g, or t
  misc_feature (127)..(127): n is a, c, g, or t
  misc_feature (239)..(239): n is a, c, g, or t
  misc_feature (259)..(259): n is a, c, g, or t
gaccgttggaattgatccaagtccatttactgtgcgtaaaccagatgaaactggaaaatcagtattgggaaacaaaagcaatagagaagaagctgtattacacggcanaacggcagccagcgccccngcgccccccagcgaggaggctgtgtccagcagctctgaggatgactctgggactgatcgggaagaagagggctctgtgtctcagcgctccactcccgtgaagatgactgatncaggagacagtgccaaagtnaccgagaatgtggtccaacc

SEQ ID NO: 829 - DNA, 381 bp, Homo sapiens
  I.829 (AA045447)
  misc_feature (300)..(300): n is a, c, g, or t
  misc_feature (327)..(327): n is a, c, g, or t
  misc_feature (337)..(337): n is a, c, g, or t
  misc_feature (363)..(363): n is a, c, g, or t
  misc_feature (368)..(368): n is a, c, g, or t
atttaacaataacgtctattgagtacatataccaggcactgaaagttagtgtattatctcattttgtctttcctaacagacccaagaggtataggtcctattattttccatatcttacaaataaagaggatgagagattatttgtaaagccaggattcaaacccagtttatttatgtgaatcagtcctttgctccttccccagaccaagaagttggaactctctatgagtgttttggcagtgatggtaaactggttttacattactgcaagtctcaggcgtggggatgaaccacaaaganaatcaacttgctactacatgaaatggngtttcacggnagagacagctctggaaagtttttganagccngtggcaagaggat

SEQ ID NO: 830 - DNA, 395 bp, Homo sapiens
  I.830 (AA045066)
  misc_feature (395)..(395): n is a, c, g, or t
aaaaaggaaccctttagtatattaacttttaccatgaaaacaatttcagtcattttgagaactgacaatgaagatgtttatacagtcttagtctccttttcaaccttggaggcagatctgcagcaataatagtaacaagtaggagcaatgggtgtactatcatgaccatcttttatgatgactggtgcattaatacaaatcacatttttctgagtccattcatgctatggatgttttcttatgcataaacatagagtagacacatactaaatagatcacatctgttaattctcttgccacaagcatcaaaacttttcagagctgtctcttccgtgaaaatccatttcatgtagtagcaagttgattttctttgtggttcatccccacgcctgagn

SEQ ID NO: 831 - DNA, 383 bp, Homo sapiens
  I.831 (AA042851)
atgaaattgttgatactttaggtgaaggagcttttggaaaagttgtggagtgcatcgatcataaagcgggaggtagacatgtagcagtaaaaatagttaaaaatgtggatagatactgtgaagctgctcgctcagaaatacaagttctggaacatctgaatacaacagaccccaacagtactttccgctgtgtccagatgttggaatggtttgagcatcatggtcacatttgcattgtttttgaactattgggacttagtacttacgacttcattaaagaaaatggttttctaccatttcgacctggatcatatcagaaagatggcatatcagatatgcaagtctgtgaattttttgcacagtaataagttgactcacacaga

SEQ ID NO: 832 - DNA, 535 bp, Homo sapiens
  I.832 (AA042842)
tgaaaatctacactttcaatcaaagcaggtacccgaggattaataaagaatctttacttcctgtagcaaaggacgtgtcttactcaggggaaaatacagaagcttggtaccctccaggtcatggtgatatttacgccagtttctacaactctggattgcttgatacctttataggagaaggcaaagagtatatttttgtgtctaacatagataatctgggtgccacagtggatctgtatattcttaatcatctaatgaacccacccaatggaaaacgctgtgaatttgtcatggaagtcacaaataaaacaccgtgcagatgtaaagggcgggacactcactcaatatgaaggcaaactgagactggtggaaattgctcaagtgccaaaagcacatgtagacgagttcaagtctgtatcaaagttcaaaatatttaataccaaacaacctatggatttctcttggcagcagttaaaagactgcaggagcaaaatgccattgacatggaaatcattgtgaatgcaaagactttggg

SEQ ID NO: 833 - DNA, 404 bp, Homo sapiens
  I.833 (AA044401)
cataagcacaaaaaatttattctgaataaatcactttacaattactgaaaaagatgttcattaccttagctatgtacttaatgaaccaaattacccaaacaaaataaacatggcaatataaaaatgttaagaatttacaaagctgtacaaaataacttaaaatttaaaaattagactgatacagtctgtaagatctcttcgagagagctgtccaattacagatctatatacttttcttcagaaggtcaaagaaaggatgctttaaggcttctctgagagtaattcttttggctggatcatactccaacattttctgaatgaggtcaaagagacgctcatgttccaacatcttggagaaagcataaattcccttccagagggtttacagcgtctttggaaaacat

SEQ ID NO: 834 - DNA, 426 bp, Homo sapiens
  I.834 (AA044390)
  misc_feature (415)..(415): n is a, c, g, or t
gcttcactgctttatttttgaaatcacaagcaattcaaagtgatcatcattgaggcttctgttaaaagttcttccaaagttgcccagttttaagattaaacaatattgcactttaagatgaactaacttttgggattctcttcaaagaaggaaagtattgctccatctgtgcttttcttagactaaaagcatactgcagaaaactctattttaaaaatcaacactgcagggtacagtaacataggtaaagtacctgcctattttagaatcctagagaacatttcattggtaagaaactagcccattatttaagtgtccacagtatttttcatttcagtggtccaagatgccgaaggtttccagacaccaatcttggttctctaaatactggctccaggtggggatatccaattcnggtcaccatgg

SEQ ID NO: 835 - DNA, 482 bp, Homo sapiens
  I.835 (AA043903)
  misc_feature (242)..(242): n is a, c, g, or t
gcttgtaccagtacttcctctcctacctacagtccctgctcctattcccacctcagcaactgaagccgcccccagagctctgccctgaggatataaacacatttaaattactgtcatatgcttcctattgcattgagcatggtgatctggagctagcagcaaagtttgtcaatcagctgaagggggaatccagacgagtggcacaggactggctgaaggaagcccgaatgaccctagaaacngaaacagatagtggaaatcctgacagcatatgccagcgccgtaggaataggaaccactcaggtgcagccagaagtgaaggtttaggaagattttcataaagtcatatttcatgtcaaaggaaatcagcagtgatagatgaagggttcgcagccgagagtcccggacttgtctaagaaattgagcaggtttacaagtactgttctaaatgttaacacctgttgcatttatattctttccat

SEQ ID NO: 836 - DNA, 328 bp, Homo sapiens
  I.836 (AA043611)
  misc_feature (291)..(291): n is a, c, g, or t
  misc_feature (309)..(309): n is a, c, g, or t
  misc_feature (319)..(319): n is a, c, g, or t
ggactctgatccggctcagctttccaatcagctgcggaaggagccacgctttcgggggttgcaagatggcggccaccagtggaactgatgagccggtttccggggagttggtgtctgtggcacatgcgctttctctcccagcagagtcgtatggcaacgatcctgacattgagatggcttgggcatgagagcaatgcagcatgctgaagtctattacaagctgatttcatcagttgacccacagttcctgaaactcaccaaagtagatgaccaaatttactctgagttccngaaaaattttgagacccntagggtaganatgttttga

SEQ ID NO: 837 - DNA, 458 bp, Homo sapiens
  I.837 (AA043134)
  misc_feature (397)..(397): n is a, c, g, or t
  misc_feature (426)..(426): n is a, c, g, or t
  misc_feature (432)..(432): n is a, c, g, or t
  misc_feature (457)..(457): n is a, c, g, or t
ctcctccattgttgactcctttctctccttctttgtcctgaacactgatataaacagctttgttatagccttcccggttccgagcaatttcaatggcaaagaattgtatcctgggggcaaagatggtgttttcctcagtgtagccctgagaacaatctagtcgcagcaaagtaccatagttgaagtcttcaacaatcccattaaacttcaagcagaatggcctccacttctctttggctgattctgacttgagttcttctgggtccaacacatctatcctaagggtctcaaaatttttccggaactcagagtaaatttggtcatctactttggtgagtttcaggaactgtgggtcaactgaatgaatcagcttggtaataggacttcaggcatgctngcatttgctcctcaatgggcccaaggcantcctcnatggtcaggaatcggttggcaatang

SEQ ID NO: 838 - DNA, 403 bp, Homo sapiens
  I.838 (AA040043)
  misc_feature (363)..(363): n is a, c, g, or t
tatattcttcattacaggaaatgtaactagatattgtgcccaagaaaaacagccagaagcaaagaaatgcttcaatctttagttgcttcataggcattcatgacattttagtgctttcacaacttgttggtcgtactttatacttgggttatatattagacttttataggcttgaaatcatccatcacataagaaaatagaaatcatattaaaagtgaattcttctagaggcttgtgtacactactggttgttttagttgggccttttatatgaaagttatactgtacttatctttttgttgttgtttaggtttgttgactaccatttctggcttcctttctttggttttcggattaaatccnacagtttatttgtaagccctgcagcagatttctttgataa

SEQ ID NO: 839 - DNA, 460 bp, Homo sapiens
  I.839 (AA040057)
  misc_feature (424)..(424): n is a, c, g, or t
  misc_feature (452)..(452): n is a, c, g, or t
tttttttttttaataatttacccaatgtttaattgagtaatgaattcatttaatataaactttagtatagcagaatactacaggttacccacatttaaccctaaaaacaaacaaatgacaggcacttcagtgaaataacaagcccatgttcaaatataaaatgctaaaagtgagaaagaaattatgaaaatatatacctttaatttgcagacatataaacacttttggtacagtacagatgcatgatgccaaaaagtaaaatgatccagtttaagctaacacattccttgtttatacagattattttgctatagctctcatataaaataatatttccagctcccacaatgaattgaaagtgataaatcactggatgaaataagctttcttcattgcaagagattcagtaaaagctaaattatcnaagaaatctgctgcagggcttaccaatnaactgttt

SEQ ID NO: 840 - DNA, 422 bp, Homo sapiens
  I.840 (AA035763)
  misc_feature (177)..(177): n is a, c, g, or t
  misc_feature (271)..(271): n is a, c, g, or t
  misc_feature (362)..(362): n is a, c, g, or t
  misc_feature (368)..(368): n is a, c, g, or t
  misc_feature (407)..(407): n is a, c, g, or t
cgaagtttaagattttgcagatttatcaatttgggtttttgtactgaagttgtcttgcggctttgaagtgtccctttatatttaaatttgaaagttgtaagcactgatgttaatgtgattgatcagcatgggcatatgtaaaatgtccttttctggttgcctctctatgctattgtnttcagatacttacaccataattaaacagtaagttatagacttgctgagtttggcatagatagtgcactcatttaatctgtgcctctcaaaactncagaatattagcatattaccacaaataatttttggtgaaactattgagatattaaaattttttgaaatcactactgttacctgttataganaatagngttggcttagtctagtctctgtgtaactggttacatttngatggcgtgtctata

SEQ ID NO: 841 - DNA, 430 bp, Homo sapiens
  I.841 (AA035170)
  misc_feature (314)..(314): n is a, c, g, or t
  misc_feature (398)..(398): n is a, c, g, or t
ttgttgaaagatttttttttattctacaagaaattgataggtgcaatcctgttaaagaaatttcttttcaaaagtaaatgaaaaacccctctgaattatttatatattaattttttgaaaacaatagtcatagggcctgctttgtcctatttaactataaatgttacacatttacaaactgaaacaaaaatgcatagtacagagatttaaatgaaatcttcgaaagaataaatttgcttttcagtccactgtattttcaaaattgattatcaccaagcttggatgaaagctgtgaaccacaaaccatttgtttntttaatagaaaaaagaatgtgtagatttattagcaaagtaatgccttaaaatgtatcttcacacagttgaaattttagtataancttgtatatcagttgctttccattatttattc

SEQ ID NO: 842 - DNA, 426 bp, Homo sapiens
  I.842 (AA035159)
ggtaataagatttaattttccagtagcctgcatgaattgttccccacataaaactgtacagttagtgactgaattgtatacttaagtcccagtattttacattagtgagactgaaattagaggtaaatttctttaacaagtgtaaggcttacctatttataaagaattattctgttagtgtttaagaaaaacagatctagagacaatccagtaggctgcattgtaaacattatgattataaatctcttagtactgccattattattgacagttttgtaaagacttgtaaaaagtccagtttctcaggaatatgaaaattatcttcagaaacctggttggggcctttctccaattcctccagccagctgaaatactgccaagctcacttcatgtggcaagggtgatctggcaccttcctgtgaggct

SEQ ID NO: 843 - DNA, 439 bp, Homo sapiens
  I.843 (AA035158)
ggttcaacacggtatcttgaagaagttatgaaggtacctgtctattgcactaagactggtgtaaaacatttgcaccacaaggctcaagagtttgacattggagtttattttgaagcaaatgggcatggcactgcactgtttagtacagctgttgaaatgaagataaaacaatcagcagaacaactggaagataagaaaagaaaagctgctaagatgcttgaaaacattattgacttgtttaaccaggcagctggtgatgctatttctgacatgctggtgattgaggcaatcttggctctgaagggcttgactgtacaacagtgggatgctctcttatacagatcttccaaacagacaacttaaagttcaggttgcagacaggagagttattagcactaccaatgctgaaagacaagcagttacacccccaggattacag

SEQ ID NO: 844 - DNA, 202 bp, Homo sapiens
  I.844 (AA035016)
agcaatttaccatagtttgggctttagtattgtaaaataaacatgagaacaaataatcagacatatactttaatgttaaaggtgctctatttttttggatgtacagtagttttatttccacagccacattaccatagcaataagaaaggaggcatagtacatagttggaaaagctttgtggggggattaaaaaaaaaaaaaa

SEQ ID NO: 845 - DNA, 416 bp, Homo sapiens
  I.845 (AA035484)
ggacttcttttaaacatttattaaaaaagcaaaatgtatgttcatctcaaatctaacagttaaaaaatggtaaagcaatacaaacaatgtgttactagcagcatccagtcgttagaatctctcaccctgcttctcggtctgatctgtgcaagctcagtctcttctgagcctgcagctacctccatccctcatcgtagtgcaggccaaaccaaattttataaaattaacaatttaaggttaaataagcttaaataagggtgttaaatacaagacacttcatcaaagcttctgtacaaagataaacaaatctggcattgtacaagtggttccgctggctcacagcacacagggaagttctagtgagtaagcagattcactctcatttctttccagcagagcaaactatacaaaagtgg

SEQ ID NO: 846 - DNA, 282 bp, Homo sapiens
  I.846 (AA034477)
  misc_feature (105)..(105): n is a, c, g, or t
  misc_feature (151)..(151): n is a, c, g, or t
  misc_feature (234)..(234): n is a, c, g, or t
  misc_feature (263)..(263): n is a, c, g, or t
gtcaccacgaggctgaatttcagcacttggttttacttttgcaagcttggccacctatgaaaagtgaatatgtcataaccaataatccatgggtgagactagctncagtgatgctaaccagatgtacgatggagaacaaggaaggatttgnggaatgaagttttgaaaatgtgtcgctctttgtataacaccaagcagatgctgcctgcagagggtgtgaaggagctgtgtctnctgctgcttaaccagtccctcctgcttcnatcgctgaaacttcgtcct

SEQ ID NO: 847 - DNA, 229 bp, Homo sapiens
  I.847 (AA033646)
  misc_feature (131)..(131): n is a, c, g, or t
  misc_feature (135)..(135): n is a, c, g, or t
  misc_feature (213)..(213): n is a, c, g, or t
tcgtttccatacagttttatttgcaatttgttggaaccatggagaacaatcggcagatacacatgttgcttctgggaacagcattcaactccagatgctttttctgctaaggagcagggccacaggtgctnaagnacccagtgctgtgctggcgcggagggctgtactgaaggttctgaaggcctggtgagtccccctcacggccagaagganagacccggcttcggct

SEQ ID NO: 848 - DNA, 411 bp, Homo sapiens
  I.848 (AA031894)
ctagaaatgaggaaggacagttacgctaactccaaaaggctgtctaggatgagctgctttatcagggagctccttgtacccattttacagaaatcatttttaggtctttgtgccaccaccacgaggggcatctgcaaagagggcaacgctagacacagaatccgtggaaggtgcagcagtgcctcaggggtcctcagggtcagggaacccccctccaccctcttggcccgttaccctttgtgactttccaccatggtgtcgtgtgaccctcagtcaggttggtgggggctgagtcctcacttgagcagccactttccacatctgctagaaggaacagttgacattggacaccttgtgacagagagagggacagttaggagggacagacagctcttcctttcggagccttgg

SEQ ID NO: 849 - DNA, 495 bp, Homo sapiens
  I.849 (AA031813)
  misc_feature (386)..(386): n is a, c, g, or t
  misc_feature (430)..(430): n is a, c, g, or t
aaaggtaggtcaaaaccagatttacttaaccacagaaatacctataattaagcatgtttcacatgcaaatgagaaatacagaaccatccaaaatgtacactattgttgacatccaagaaatagactggtccattgattcaagactcaaattttgttttaaatctataaaactaaagattactgggatagatgaaaaggcatcttttatgaatttaagccaaggtttaggacctgtaaacaatgaagaaaatggagaattaaaacaggaggatgtgttaccatccatgcttcttcagagaaagcaaactcctctgtctacctttcaagacctaaggaagaaaaaccaaaccaaaacccaaaaaactcagactcttctaccattatgnaatacaagacacggtagggacaggtagcctctaaggcatatggnccaattccattttggtgaggctaaatctttaaatggggatggaagtgacgctcatgtaatgaacc

SEQ ID NO: 850 - DNA, 316 bp, Homo sapiens
  I.850 (AA031880)
  misc_feature (310)..(310): n is a, c, g, or t
gataactatatatatgtatcccctagtattggatcatgaagagctcttcatgcattctttgcaaaggaggttataaagttacgccctcagaacatttataactataagaatgtgccagttaaagtgctcaacaggaaatatgacagtttaaaagcattgtaaaactcacatagcttacttctctctctaaagtgcaacaaggatgaatagaatgggccaaggtatgacaattaatggttctgcatgacctagccactgctgggggttttcttctataacgttgtccttgtgaaaacttttgtgaaattanaaaaaa

SEQ ID NO: 851 - DNA, 271 bp, Homo sapiens
  I.851 (AA031781)
ttcacaaaagttttcacaaggacaacgttatagaagaaaacccccagcagtggctaggtcatgcagaaccattaattgtcataccttggcccattctattcatccttgttgcactttagagagagaagtaagctatgtgagttttacaatgcttttaaactgtcatatttcctgttgagcactttaactggcacattcttatagttataaatgttctgagggcgtaactttataacctcctttgcaaagaatgcatgaagagctcttcatg

SEQ ID NO: 852 - DNA, 462 bp, Homo sapiens
  I.852 (AA031464)
  misc_feature (116)..(116): n is a, c, g, or t
  misc_feature (345)..(345): n is a, c, g, or t
gtgaaattcagtttctctccgaagcccaggatgacccacagaaaagaaaaccagacatcaaaaaagcaaagctgatgctggggtgggagcccgtggtcccgctggaggaaggtttnaacaaagcaattcactacttccgtaaagaactcgagtaccaggcaaataatcagtacatccccaaaccaaagcctgccagaataaagaaaggacggactcgccacagctgaactcctcacttttaggacacaagactaccattgtacacttgatgggatgtatttttggcttttttttgttgtcgtttaaagaaagactttaacaggtgtcatgaagaacaaacttggnatttcattctgaagcttgctttaatgaaatggatgtgcctaaaagctcccctcaaaaaactgcagattttgccttgcactttttgaatctctctttttatgtaaaatagcgtagatg

SEQ ID NO: 853 - DNA, 524 bp, Homo sapiens
  I.853 (AA031485)
  misc_feature (343)..(343): n is a, c, g, or t
  misc_feature (497)..(497): n is a, c, g, or t
  misc_feature (512)..(512): n is a, c, g, or t
gcatagtataacgactcatttattaagtacccacttttataaataaaatcggcattttttgtcccgcttaatgttccttttcagcttcacaaagaaaccagtaaataaaactgtcaacgacagtcacaacatatgctctcacagcaagataaaaaaacttgaaaatacgcagagatgcatctacgctattttacataaaaagagagattcaaaaagtgcaaggcaaaatctgcagttttttgaggggagcttttaggcacatccatttcattaaagcaagcttcagaatgaaattccagtttgttcttcatgacacctgttaaaagtctttcttttaaaccgncaaccaaaaaaagcccaaaaatacatccccattcaagtggtacaatgggtagtcttggtgtcctaaaaagtggaggagttcagctgtggcgaagtccggtcctttccttattctgggcaggctttgggtttgggggatggtactgattatttgnccgggtactccgagntctttacgggag

SEQ ID NO: 854 - DNA, 377 bp, Homo sapiens
  I.854 (AA031443)
gaggacaagggaggcattaatctcacagccacttgcccccagagtgagctggatgctgaaactgtgaagagcattctggctgaatacaagattcataatgccgatgtgactctacgtagtgatgctacagctgatgacctcattgatgtggtggaaggaaacagagtttatatcccctgtatctatgtgttaaataagattgaccaaatctccattgaggaattggatatcatctataaggtgcctcactgtgtacccatctctgcccatcaccgctggaattttgatgacctattggaaaagatctgggactatctgaaacctagtgagaatttacaccaaacccaaaggccagttaccagattacacatccccag

SEQ ID NO: 855 - DNA, 209 bp, Homo sapiens
  I.855 (AA031306)
  misc_feature (198)..(198): n is a, c, g, or t
gcatgtagctgaccagcctaccagatcttttatgcagttcgacatacaaggtgacaccaaggtaagacaaatgaagttccagtttgggtgcctccatctccctcccctggatcctgatccagtgactgccaaaaccagaaagaactggggtagggtgcttgatcatggggaacgctgttgtggttcgtccggcagatnggaaaagggaa

SEQ ID NO: 856 - DNA, 424 bp, Homo sapiens
  I.856 (AA029215)
gacagtagacaatgttgtttatttaaaatgtttactccaagaaatatatatataaaaaaaataataagacaattacagcactaaaccaggcaccttcgaccaaatcacaacctcctctttgattccccttcacgctaagcctctttcaaattctttttcctgagctggaagaccagtcagatgcccgcagtcaagcgccaagcacattcccaaccgggcaactgtgtacctttctctaggagtgcacgacacccttcccccacaactccttattttaaaggatttaacccattaggaagcccatgtttcaatctaagccagaaggagctgcgggacaaggcagtcttcactttgaaggtccctttcctgctccagtccctggggctagggttctagaagaggctggctgccacgtttacatgag

SEQ ID NO: 857 - DNA, 176 bp, Homo sapiens
  I.857 (AA029214)
cttgggtggatgggaaagttaaatattggtctcttcaagttttttttttcttttgctttgttaccacttgtcactgtctccatgttaaaatgccaaaaatgatgtagttgttgttgcttttttccctattttccaccccagtcgctccttaccgtgactcctgcccttggagggat

SEQ ID NO: 858 - DNA, 447 bp, Homo sapiens
  I.858 (AA029101)
  misc_feature (212)..(212): n is a, c, g, or t
  misc_feature (216)..(216): n is a, c, g, or t
  misc_feature (304)..(304): n is a, c, g, or t
  misc_feature (341)..(341): n is a, c, g, or t
  misc_feature (426)..(426): n is a, c, g, or t
ggcttctgcattcacagcgcctcctggacctgaaggcatctgagtgtgagaccctgttctaactcttagaagtgacattgtaagaggtggtggggaccagctaattggtccaacccagcctgagtgcaccaccctttgaacaaatgtatcagtgatgaaaatttgcctttgccccggcttgcttggctcccaaagtgctaggattacaggcnatangcaccatgcccggcctaaactttgtttttaaaatgaactttttttccccccaattgctgccaatagtggataacatgtatcactcacntgccaaaaatagaaagtgaccatgaaaaataaatttnctggggaagggggctccatgctggtgtggccaaggctgagagctctctcttctctgtttacaaaacgagataagcaagtgttagnatttgccttaaggccacactg

SEQ ID NO: 859 - DNA, 310 bp, Homo sapiens
  I.859 (AA029020)
  misc_feature (186)..(186): n is a, c, g, or t
  misc_feature (226)..(226): n is a, c, g, or t
  misc_feature (256)..(256): n is a, c, g, or t
  misc_feature (300)..(300): n is a, c, g, or t
ccacaaacaaagatggtttaatagatttcagcatgtttccacttgacaatgttatacgaaaattagaatctttattaaaatagcaaggcataacaatcactgctactcaggaaacactgtgtttattctttttaatcatcaaaatcaatcgactttcgggcaagacctgtgaaatctcagagcctngtttctccatctggagaacaggcaggtagggcattgccangctccctcgtgagttcgtgggccactggtngggagcagattggccctggtccgcccatgggattgagaaaactntacttcctgg

SEQ ID NO: 860 - DNA, 420 bp, Homo sapiens
  I.860 (AA028941)
aaaaaaatgcaacatgcatgtaattgctttagtaatgtgctgctcacgctatgtcaaagcacatgtctaccaaatgttaacatttttttcatttgccatcacagaattcccctttcctgtgttttatgattgcagaatcccacaggatgagatgaagaatatcatgtagccatctcagcttatttcacatcgtttgaagcctgctcttagccagaggtcttctgtctttgtgattcttcagaatggcccactgcagtccccacaaggctggttacatgttataagccacgtagatggggtctaactggtcagctaggaagctatcacggaggtgcatcctctgcttctctcctctggagttgatcgggatgacacctgggtccaccacaaccacgacgccaacgatgaggtaatgctctt

SEQ ID NO: 861 - DNA, 440 bp, Homo sapiens
  I.861 (AA028940)
  misc_feature (173)..(173): n is a, c, g, or t
  misc_feature (381)..(381): n is a, c, g, or t
  misc_feature (435)..(435): n is a, c, g, or t
tgttcacatggaccaacttgcttgtggtggttgtggaactgtgcggctctgaacaggaagccctagatctggtcccattagtgaccaacgtggtcctggaagagcattacctcatcgttggcgtcgtggttgtggtggacccaggtgtcatcccgatcaactccagaggagangaagcagaggatgcacctccgtgatagcttcctagctgaccagttagaccccatctacgtggcttataacatgtaaccagccttgtggggactgcagtgggccattctgaagaatcacaaagacagaagacctctggctaagagcaggcttcaaacgatgtgaaataagctgaagattggctacatgatattcttcatctcatcctgntgggattctgcaatcataaaacacaggaaaggggaattctgtgatgggcaaatngaaaa

SEQ ID NO: 862 - DNA, 327 bp, Homo sapiens
  I.862 (AA011353)
  misc_feature (36)..(36): n is a, c, g, or t
  misc_feature (56)..(56): n is a, c, g, or t
  misc_feature (57)..(57): n is a, c, g, or t
  misc_feature (199)..(199): n is a, c, g, or t
  misc_feature (208)..(208): n is a, c, g, or t
  misc_feature (216)..(216): n is a, c, g, or t
  misc_feature (223)..(223): n is a, c, g, or t
  misc_feature (304)..(304): n is a, c, g, or t
  misc_feature (318)..(318): n is a, c, g, or t
aacagctgcgacagattggttctaggtcttatagcnggaagaggcagaggtcgtcnngggacctaattacacctccggttatggtacaaattctgagctgtctaacccctctgaaaccggaatctgagcgtaaagacgagctgagtgattggtcattggcaggagaagatgatcgagacagccgacatcagcgtgacancaggagacncccagtangaagatngcagaagtgtttcaggcgggtcgaggtccgtggttagaccacgtggtggcaaggtcctccatcagttctgtgcctcaaatnatccaggacagcanatccataca

SEQ ID NO: 863 - DNA, 293 bp, Homo sapiens
  I.863 (AA011511)
  misc_feature (18)..(18): n is a, c, g, or t
  misc_feature (291)..(291): n is a, c, g, or t
atagccagcaactttttnttaatgttacatatactattctcaaggcacatctgatgatatattttataacacagtaggtgtcaaagtatgtttaacatatgatttcttcaggatccctcccctttttgaattccaaatggaggaactgaaagtgcgatgtaaagactggcgatccatattctatctttggcaagcttgtacaagcactattgtaaatgtaatgtaaaagaactgtaaactaggaacttcttcagtttatgaaacaccattcaggactgctgcttcttgagngt

SEQ ID NO: 864 - DNA, 159 bp, Homo sapiens
  I.864 (AA007392)
  misc_feature (53)..(53): n is a, c, g, or t
  misc_feature (73)..(73): n is a, c, g, or t
  misc_feature (114)..(114): n is a, c, g, or t
  misc_feature (119)..(119): n is a, c, g, or t
tcggcacagccagaatgtttcttttctcaccaggttactgagatccggctcanatattttgatactgtacccngttgctgctgccatgtgtgtgcttaaaacagggttcctttntgtancatcagaatttgggaaaccagtgagtaatcctcctgtacc

SEQ ID NO: 865 - DNA, 515 bp, Homo sapiens
  I.865 (AA007595)
ttttaaacatgaattttctaaatattatgccaagtaaaatgagctagacacaaagggacaaatatcagccaggcgctatggctcaagcctgtaatctcagcacattgggagactgaggcaggtggattgcttggattgcttaagtccagaagtttgagactttacaagaaatacatatattagccaggcatgcaccttgctaatagtcccagctacttgggaggctgagatggaaggatcaccttgagcctgggaggtcgaggatgcagtgagccgagattgcacccctgcactccagcatcctgggaaacagagtaagactctgtcttaaacaaacaaacaaccaaaaaaaaccccaaaaagctaagaaggctcggctgggcacggtggcacacgcctgtaagtcccaacacttcgggaaggccaaggtggatggatcacttgaggtcaggagtttgagaccagcttggccagctggtttgagaccagctcattttgtacttttaggtagagat

SEQ ID NO: 866 - DNA, 531 bp, Homo sapiens
  I.866 (AA007465)
  misc_feature (389)..(389): n is a, c, g, or t
  misc_feature (390)..(390): n is a, c, g, or t
  misc_feature (531)..(531): n is a, c, g, or t
aatgtgcacaaacccatcagtttaggttgttcacacactgtttgcaagacctgcttgaataaacttcatcgaaaagcttgtccttttgaccagactgccatcaacacagatattgatgtacttcctgtcaacttcgcacttctccagttagttggagcccaggtaccagatcatcagtcaattaagttaagtaatctaggtgagaataaacactatgaggttgcaaagaaatgcgttgaggatttggcactctacttaaaaccactaagtggaggtaaaggtgtagctagcttgaaccagagtgcactgagccgtccaatgcaaaggaaactggtgacacttgtaaactgtcaactggtggaggaagaaggtcgtgtaagagccatgcnngcagctccgttcccttggagaaagaactgtaacagaactgatattacagcaccagaaccctcagcagttgtctgccaatctatgggccgctgtcagggctcgaggatgccagtttttagggccaggtaagataggttactn

SEQ ID NO: 867 - DNA, 465 bp, Homo sapiens
  I.867 (AA007369)
acaaaaacaaatttatctttaattatatcaagatttgtacatataaagacgggttgagtctcaggattcaccgagctccagaaattggcatcctcaagccccaatagctaataaaaaaggtaagatagtaacctatcttacctggccctaaaaactggcatcctcgagccctgacagcggcccatagattggcagacaactgctgagggttctggtgctgtaatatcagttctgttacagttctttctccaagggaacgagctgctcgcatggctcttacacgaccttcttcctccaccagttgacagtttacaagtgtcaccagtttcctttgcattggacggctcagtgcactctggttcaagctagctacacctttacctccacttagtggttttaagtagagtgccaaatcctcaacgcatttctttgcaacctcatagtggtttaattctcacctagatt

SEQ ID NO: 868 - DNA, 301 bp, Homo sapiens
  I.868 (AA005339)
  misc_feature (246)..(246): n is a, c, g, or t
acttaaaaatagttgtatttatattccacaatttgttcaaatactggttttcttataaactttctacaggatgtttttaaacaaattcttcacatatgtgttttgactatgtacttacggaatttcagggaaatagttctgtgtatttttaatagcttaatttgtactaaagggatggtaggtggtcacatgcagtccatgtgggattctaacatgacatttagtgagttttctgatgtggaccanccctttgatgctgaaagggaatgcatctgttgaaagaagtgactgtagatttgga

SEQ ID NO: 869 - DNA, 517 bp, Homo sapiens
  I.869 (AA005338)
  misc_feature (60)..(60): n is a, c, g, or t
  misc_feature (94)..(94): n is a, c, g, or t
  misc_feature (336)..(336): n is a, c, g, or t
  misc_feature (338)..(338): n is a, c, g, or t
  misc_feature (396)..(396): n is a, c, g, or t
taaataaaaagaggaaaaaagtttctcaagtcgccgctgcacgacgtctggccggcgctngagcgggggtctgcgctctcccgagcggccgcgngcttggactttattgtgccgcaaccagccccagttcccattgtttgtgtttttttcaaaatatggcaaaggttcaggtgaacaatgtagtggtgctggataacccttctcctttctacaacccgttccagttcgagatcaccttcgagtgcatcgaggacctgtctgaagacttggaatggaaaattatctatgtgggctctgcagaaacgtgaagaatacgatcaagttttagactctgtntnagtgggtcctgttcccgcagaaggcatatgtttgtattgcaggctgatgcacctaatncaggactcattccagatgcagatgcagtaggcgtaactggttggtgctaattacttgtacctatcgaggacaagaatttattagagttggctattatgtaaataatgaatatactgagact

SEQ ID NO: 870 - DNA, 357 bp, Homo sapiens
  I.870 (AA004338)
  misc_feature (188)..(188): n is a, c, g, or t
  misc_feature (201)..(201): n is a, c, g, or t
  misc_feature (258)..(258): n is a, c, g, or t
  misc_feature (294)..(294): n is a, c, g, or t
  misc_feature (301)..(301): n is a, c, g, or t
  misc_feature (312)..(312): n is a, c, g, or t
  misc_feature (318)..(318): n is a, c, g, or t
ttctctgctgcctcttcatacgttttctcaagaacttcagtttataattggaagagaaatttttgctgttaatgccagaatgagcaacctcaaggaattgaacacttcttggaaaatctaggtaattcaagccctcatcaggtttacaagatcatcagagaaacagaggattttaatttttagttctnggccggctacagnctccatttctctgccttcccattggaaatagtttattttccacatttctccactgcntgtggtcaaaagttcctcacccagcaagggacctantggatanctcgtgtcccnatttcnaaaacacaatgcaccaaggctggaaccttggggcttgaa

SEQ ID NO: 871 - DNA, 403 bp, Homo sapiens
  I.871 (AA004302)
  misc_feature (268)..(268): n is a, c, g, or t
  misc_feature (302)..(302): n is a, c, g, or t
  misc_feature (311)..(311): n is a, c, g, or t
  misc_feature (342)..(342): n is a, c, g, or t
  misc_feature (364)..(364): n is a, c, g, or t
  misc_feature (385)..(385): n is a, c, g, or t
  misc_feature (401)..(401): n is a, c, g, or t
aagaagcagaattacaccacatgttattcacatgcataggagtgcataagaaaaatcccttgttgtaattatggttggtgtggaatagtaaaatatgtactgaaaatgacaagttaattggcagagaaattaatctataaaagggttgtgtccagagcggaggagcctcattagcaactgaacagaacccactcagaagacgcactcacccacacgtgcgcgtacacacacacacacgcgcgcactgtactgcaaataaatatacacncacactgaagtgatctctccctaaagcatccttngccgctcangggccatgattttcccttgcttggcgggctngcttccccagttgcccgggctnttaggaggaaagggttggggngacctgttcccctggnca

SEQ ID NO: 872 - DNA, 442 bp, Homo sapiens
  I.872 (AA004952)
  misc_feature (419)..(419): n is a, c, g, or t
  misc_feature (424)..(424): n is a, c, g, or t
  misc_feature (432)..(432): n is a, c, g, or t
  misc_feature (438)..(438): n is a, c, g, or t
ttcacagcctactatcagcaatagtccttgtttattagaatctgcagatgtccatattacatcaaatataaatatatattatatttacatttccttcttagctttcaatttaggtgagtgtatttatagataatgccactaacgcaccactattctaatcctcagtgcaactcataccttctttccattagatgctcattaatgtaagacagcatcttaaaagaggggtactgttcttttttaaaataaaaggaaagaaagggaatccaagaatggaggtctagacatttcctaagagatttttgttttgttttttatacttagaaatacttgaaaaatgtggtccctttttggtagtactagtctctacttggggacaagaaaatagaatatgcaactcagaaaggaaagagcccaangacgngagaaccnggcttngtta

SEQ ID NO: 873 - DNA, 452 bp, Homo sapiens
  I.873 (AA004951)
  misc_feature (255)..(255): n is a, c, g, or t
  misc_feature (433)..(433): n is a, c, g, or t
tcagataccagaggtttatcttcgagaagcaccatggccatctgcacaatcagaaatcaggacaataagtgcttataaaaccccccgggacaaagtgcagtgcatcctgagaatgtgctctacgattatgaacctcctgagcctggccaatgaggactctgtccctggagcggatgactttgttcctgtgttggtgtttgtgttgataaaggcaaatccaccctgtttgctgtctactgtgcagtatatcagtangcttttatgctagctgtctgtctggagaggagtcctattggtggatgcaagttcacagcagcagtagaattcattaaaaccatcgatgaccgaaagtgaccaagaccaaggcccaccaaggcagcagactgttaatcagacaaacagatctctgagaaggtgcatcagctgctttganggctgaaggattgtttttg

SEQ ID NO: 874 - DNA, 471 bp, Homo sapiens
  I.874 (AA002077)
  misc_feature (212)..(212): n is a, c, g, or t
  misc_feature (249)..(249): n is a, c, g, or t
  misc_feature (312)..(312): n is a, c, g, or t
  misc_feature (322)..(322): n is a, c, g, or t
  misc_feature (431)..(431): n is a, c, g, or t
  misc_feature (464)..(464): n is a, c, g, or t
atcctctcacaggaccaacttttattttatttattcatttaaggacaaatttttaaaagtaaagtgaatgaaaccatttgtgattaagatacatagacagaacttcaatgtagaaaaaaaaaagaccttgctgggaaacagatgatgagaaacactgtaaaacatttcacagacgcacaaaaagctcacattgtaaacaggattaagctgcncttgatttagcccgtaacatcaaggtttcattttgcncagcctgagatctcgctcaatttcaaactgcctgtgatccactcggtcgaggaaggctttccngttcaatggnacctgttctaggactcttggattcagcagctctgtacagaggtgggtcacctggaactttggaaaatggtcaccagaggattctcatgctccggccaaggttgaagaanaagagctccagtcccttcactgggcctaggggntggggct

SEQ ID NO: 875 - DNA, 443 bp, Homo sapiens
  I.875 (AA001945)
  misc_feature (3)..(3): n is a, c, g, or t
ganactgcatagggtcggcgtggtgagggccgctgggttcgaagtacatcctgctctggcccagctccccatagcaggcctccagggggccactgcgctgttgccgcagcatcctgctcagtacgtcgacttcatcagccaggagggagagcttgtgaaaggctgtgatggagccacccaggctgatctgggcctcgggaacccagcggaagtagcacagtttccacagttttatgtgtgttccagagacacgtggcagaataacaccgtgcaggttggcgggtttggaaaaccattctctaaaatactgctccgtatcactgttctggctgtcggtttgctgagctggatctggctttggttttaatatcaatgaatttctccttggaagtaattcttggtcactgatgattccattctttaaggcagacggcattcctctt

SEQ ID NO: 876 - DNA, 435 bp, Homo sapiens
  I.876 (AA002267)
  misc_feature (2)..(2): n is a, c, g, or t
tntttagaaaagctgttctttaatgaagaggaaatgatataccatgggtatcaaatgttcttttctgataaaggaagcaactacagaaagcttttatttatttgttcaaagtaaccagtgctatggatgcaaaaaacccccaacaactcttccaacgctactttcaaaacaaacatatcaaacttgattttcattaggatgtagttattttgtcacactagtaaatcaaaatctaagacccaatttttatatatatatataaatatatataaaagaacaatgtgaacaattattgagcttcatcttctcggacaagaatgccaagttagtctctcttcataaaaagcaattacaatttcgaggacacttcatatttgcctctttcgccagcaccaagtctgcctcatctgaatctttccatttcatgagaaacat

SEQ ID NO: 877 - DNA, 492 bp, Homo sapiens
  I.877 (AA002238)
  misc_feature (120)..(120): n is a, c, g, or t
  misc_feature (422)..(422): n is a, c, g, or t
  misc_feature (437)..(437): n is a, c, g, or t
agaggtctgaagaaggcaggatttcctgttcgtagctcaggagagcagacagtggtgttaagcaggaaaagcacattagaattccagtttacttacagtgctctccacaccaggaagganatgccccaaatatgaacatggcttccactaagataaatggccccaatctaggggattcccatttgcatcagaaaaactgttaatctagagatcagagtttttacctgctacatctttcatattttctttccttaggttaaaaagatcaagtggcatgagcagccttttggggaaaattggtgccaagaagcagaaaatgagcacccttgagaagtccaaactgggactgggagagcttcaaggaggaagaggggattggtgaagaactggccatccataatccgagggaaaagagggatggnttaaaggagcccagnccctaggccagtgaagggactggagctctgttcttcaccttggctgagcatgaga

SEQ ID NO: 878 - DNA, 624 bp, Homo sapiens
  I.878 (AA001140)
  misc_feature (128)..(128): n is a, c, g, or t
  misc_feature (254)..(254): n is a, c, g, or t
  misc_feature (386)..(386): n is a, c, g, or t
  misc_feature (538)..(538): n is a, c, g, or t
  misc_feature (545)..(545): n is a, c, g, or t
  misc_feature (568)..(568): n is a, c, g, or t
ttttttctagcccgtcttagaacttatccttaagcaaattagtggataggaggtactctcatcccgcccccattcaggctgatagtaacagcctaggtagagtcaacacataaaaaagtgtaattccnggggaggaggattagaataaggacacaaaggaagggaggaaaatgttctttgaggctgaaattccattaatttttcatagtattgagtttatatttgccattgcatccttcaatctttctaaaaangggaatccccggaacataataaaatctcttctgtatagaaaagctacagctccacactaagaggaatgccgtctgccttaaagaatcggaatcatcagtgaccaagaattacttccaaggagaaattcattngatattaaaaccaaagccagatccagctcagcaaaccgacagccagaacagtgatacggagcagtattttagagaatgggttttccaaacccgccaacctgcacgggggttattctgccacgtgtctctgggaacacacataaaactgtggnaactggngctacctccgctgggttcccgangcccagatcagcctgggtggctccatcacagcctttcacaagctctccctccctgg

SEQ ID NO: 879 - DNA, 588 bp, Homo sapiens
  I.879 (AA001262)
  misc_feature (151)..(151): n is a, c, g, or t
ctgcagacccgcgacccggagcagctcggaggcggtgaataatagctcttcaagtctgcaataaaaaatggcctccaacaaaactacattgcaaaaaatgggaaaaaaacagaatggaaagagtaaaaaagttgaagaggcagactcgaangaatttgtcgtggaaaaagtactagatcgacgtgtagtgaatgggaaagtggaatatttcctgaagtggaagggatttacagatgctgacaatacttgggaacctgaagaaaatttagattgtccagaattgattgaagcgtttcttaactctcagaaagctggcaaagaaaaagatggtacaaaaagaaaatctttatctgacagtgaatctgatgacagcaaatcaaagaagaaaagagatgctgctgacaaaccaagaggatttgccagaggtcttgatcctgaaagaataattggtgccacagacagcagtggagaattgatgtttctcatgaaatggaaagattcagatgaggcagacttggtgctggcgaaagaggcaaatatgaagtgtcctccaattgtaattgctttttatgaagagagactactttt

SEQ ID NO: 880 - DNA, 222 bp, Homo sapiens
  I.880 (W90642)
  misc_feature (1)..(1): n is a, c, g, or t
  misc_feature (7)..(7): n is a, c, g, or t
  misc_feature (16)..(16): n is a, c, g, or t
  misc_feature (18)..(18): n is a, c, g, or t
  misc_feature (21)..(21): n is a, c, g, or t
  misc_feature (65)..(65): n is a, c, g, or t
ntgagcnaacagtgtngnaangtgccccggacccacctgacccactatggcatctacctaggagncaaccgtgttgcccacatgatgcccgacatcctgttggccctgacagacgacatggggcgcacacagaaggtggtctccaacaagcgtctcatcctgggcgttattgtcaaagtggccagcatccgcgtaggacacagtggaggacttcgcctacgg

SEQ ID NO: 881 - DNA, 400 bp, Homo sapiens
  I.881 (W90617)
  misc_feature (371)..(371): n is a, c, g, or t
aaataattttatttgcttgggttctacttgtttgggttttacatactactgtggcatccttcttttaaggatataaactataattagaaatgatatggaaaaaagtgactagaaaacaaatctgaaggcttttaaaaatttcagagtacattagtaaatgctttaaaagacaacccatccaataacatatatgcaagttaacactacaaattcaatgacataagaaaatagattggacttacttttacattcacctctacagatactctataatgaacacactagtatgatgataataaagcaatcaagaacaatttatctctcagtctgtgtatatgtgactatctacatatttatttcacacacacatngccaaatacccaccataacttcaatccta

SEQ ID NO: 882 - DNA, 406 bp, Homo sapiens
  I.882 (W90409)
  misc_feature (68)..(68): n is a, c, g, or t
  misc_feature (239)..(239): n is a, c, g, or t
  misc_feature (253)..(253): n is a, c, g, or t
  misc_feature (295)..(295): n is a, c, g, or t
  misc_feature (298)..(298): n is a, c, g, or t
tattgtgtgctccctgacggtaaccacatctcccacagtatctgacagttctgtggcctgagaggcanagtccatggcttccagaacatgtgtcccaattggttcctctcctttcccacctggactggctgcttttgacctctaactctttgtcttccagaaaacaataagcctcctcaggcagatgcaggcccagataaagagctgacccttcctgtggatagcacaaccctggatgncagcaagagctcanatgatcagaaaattatctcatatctcctgggaaaaaacacangtnatgtattgacacaaaatccttattttttgcaaagcctccagacctttggaagagcaaggttttatttgctattatgagttgagttgctcttaatggcttatcagtggg

SEQ ID NO: 883 - DNA, 411 bp, Homo sapiens
  I.883 (W90382)
  misc_feature (314)..(314): n is a, c, g, or t
  misc_feature (348)..(348): n is a, c, g, or t
cttacaaaaattatgattataatatcattttcttggagttgaagtttggaattgcaaacatttcttcctcagtcaccccactggataagccaataagagcaactcaactcataatagcaaataaaaccttgctcttccaaggtctggaggctttgcaaaaataaggattttgtgtcaatactcactgtgttttttcccagagatatgagataattttctgatcatctgagctcttgctgccatccagggttgtgctatccacaggaagggtcagctctttatctgggcctgcatctgcctgaggaggcttattngttttctggaagacaaagagttagaggtcaaaancagccagtcccaggtgggaaaggagaggaaccaattggggacacatggttctggaagccatgg

SEQ ID NO: 884 - DNA, 593 bp, Homo sapiens
  I.884 (W89198)
  misc_feature (56)..(56): n is a, c, g, or t
  misc_feature (482)..(482): n is a, c, g, or t
  misc_feature (547)..(547): n is a, c, g, or t
  misc_feature (572)..(572): n is a, c, g, or t
aaagggtaaaaagacatgaaccctagtctgccttaatggaaagtagcacttattangttctctgacagaaccaaggaataggaaaatcttttatcaaaactacggataaaacttaaaaataatctgatacaatgatttggtcttgctggaatcagtaaattaaaatacggaagcagaatgataaaatcaggggcattaaacattcctaatgacatgccaagctattttagagacagcggcaaaagcttctctacaggtgggtttgatgtaacgctccggcagcaagaatccgtatgtgcccgtatctcgaagttcaattgtaaacgaatatttgatgcccaaatcatagatccaatcgtccccacctccaggagctaggtataaggtttctgagccatggccatgtgtatacctggtatttttactagttttctcaatagcacgaactgcttcactggctactagagacagttcctcatggnctttgcttttacctcgtgtataggaatatgggaacactatatgccggggagtatggatgcatgcngatggtatgccttaatccgggtganattcctccccaagaaactagc

SEQ ID NO: 885 - DNA, 557 bp, Homo sapiens
  I.885 (W89126)
  misc_feature (88)..(88): n is a, c, g, or t
  misc_feature (113)..(113): n is a, c, g, or t
  misc_feature (172)..(172): n is a, c, g, or t
  misc_feature (462)..(462): n is a, c, g, or t
gtcactctgttcttccatgcctttattggtgacagcaatggacaagaacaataccaggcatagcagacaccctagcccagtacctgangtgccaggcaggccctgaagcactntcggcacatccagtcccagcccaagatccagtctacccaggccatgtccccgaatggcnaggaggcgtctgtccagtttgtatgtgtggatcagtctctctgagtgtctgagccgctgcctgcagggccccccattctccgcacatggtaggggctgttaggaacatagcgtggcatcccccggtggaccacttgggccccagtgctgaccatggggattagggccagggattggaggtggcagagggccaggcacaaagttcactccagggccacatcctaagtggggtggcatcgagaagtcctccactggattatagttgaagaattcatggggtgggaaaggctngcctggggaaaaaaaggggtatcctgggggcaagggttggaaaagggaagtggcgaaggcttgaagaaaccgggtaagggaaaaggcattggaag

SEQ ID NO: 886 - DNA, 499 bp, Homo sapiens
  I.886 (W89109)
  misc_feature (476)..(476): n is a, c, g, or t
gaattagagcgctcatttttgtcagaaccatcatctccaggaagaaccaagactactaaaggattcaaacttgggaagcacaagcatgagacctttataacgtcaaggaaactacagtcgtcgggaaggaacaagaggctccagttggagtgctcagaatactcctcgaggaaattacaatgaaagtcgtggaggccagagcaattttaacagaggccctcttccaccattacgaccccttagttctacaggttaccgcccaagtcctcgggccgtgcttctagaggtcgtgggggacttggaccttcctgggctagtgcaaatagcggcagtggaggctcaagaggaaagtttgttagtggaggcagtggtagaggtcgtcatgtacgctcctttacacgataaaaatcctttcgggaacatcttaactgtatatgaacatttcacgaggacaataaaaatgagacattgaaggnccaatttagacttagcagtttaa

SEQ ID NO: 887 - DNA, 401 bp, Homo sapiens
  I.887 (W88540)
ttacatacaaagtttggatttttattgaaatcttgttaggtatcaaacaaattctgctttcttcagataaaaatattctctcagatgtctccagataactgctaagtctaaattggtccttcaatgtcttatttttattgtcctcgtgaaatgttcatatacagttaagatgttcccgaaaggatttttatcgtgtaaaggagcgtacatgacgacctctaccactgcctccactaacaaactttcctcttgagcctccactgccgctatttgcactagcccaggaaggtccaagtcccccacgacctctagaagcacggtcccgaggacttgggcggtaacctgtagaactaaggggtcgtaatggtggaagagggcctctgttaaaattgctctggcct

SEQ ID NO: 888 - DNA, 430 bp, Homo sapiens
  I.888 (W88550)
  misc_feature (108)..(108): n is a, c, g, or t
gcagagtagtgttagaatagatggcctacagaaaaaaaaggttctgggatctacatggcagggagggctgcactgacattgatgcctgggggaccttttgcctcgagnctgagctggaaaatcttgaaaatattttttttttcctgtggcacattcaggttgaatacaagaactatttttgtgactagtttttgatgacctaagggaactgaccattgtaatttttgtaccagtgaaccaggagatttagtgcttttatattcatttccttgcatttaagaaaatatgaaagcttaaggaattatgtgagcttaaaactagtcaagcagtttagaaccaaaggcctatattaataaccgcaactatgctgaaaagtacaaagtagtacagtatattgttatgtacatatcattgttaatacagtcctggg

SEQ ID NO: 889 - DNA, 399 bp, Homo sapiens
  I.889 (W88496)
  misc_feature (78)..(78): n is a, c, g, or t
  misc_feature (367)..(367): n is a, c, g, or t
  misc_feature (378)..(378): n is a, c, g, or t
ttaatcggtcagcaatgtctttttaatacagatgtggtacagaatgtttaattacagcagggcagtgattccagttanataaaattaaaaacctttattttcccaaatataaaattactaaattaaagtcttaaaagaaaatataacatggtgacagctttaaagtacaccaccattcaccacaggatttatgatttaccaattacatactccaccattttggcaaaaggatgaaattcttaaaactgtttataaacctaatatagtaaagactgtatacatctccatattgcacatttttatgtacaagaataaaacattaaagtgtatttgcatatactggaacagcacaaatttatcacaattnaacttaatgcntaagcccatgtgagtattaaa

SEQ ID NO: 890 - DNA, 455 bp, Homo sapiens
  I.890 (W88434)
  misc_feature (317)..(317): n is a, c, g, or t
  misc_feature (448)..(448): n is a, c, g, or t
cttgtacccattgttctcttctgtgagcagcatgtcttcgcgtttcagagtggccaagttctagctgctcttcctagaacctctaggcaagttcaagttctacagaatcttactacaacatatgagattgttctctggcagccggtaacagctgaccttattgtgaagaaaaaacaagtccatttttttgtaaatgcatctgatgtcgacaatgtgaaagcccatttaaatgtgagcggaattccatgcagtgtcttgctggcagacgtggaagatcttattcaacagcagatttccaacgacacagtcagcccccngagcctccgcatccgtactatgaacagtatcactcactaaatgaaatctattcttggatagaatttataactgagaggcatcctgatatgcttacaaaaatccacattggatcctcatttgagaagtaccnactctaa

SEQ ID NO: 891 - DNA, 458 bp, Homo sapiens
  I.891 (W88920)
  misc_feature (177)..(177): n is a, c, g, or t
  misc_feature (223)..(223): n is a, c, g, or t
  misc_feature (224)..(224): n is a, c, g, or t
  misc_feature (426)..(426): n is a, c, g, or t
  misc_feature (427)..(427): n is a, c, g, or t
gacatatggacctgccccggacctggtgatcatcaactcctgcctctgggatctctccagatatggtcgctgctcaatggagagctaccgggagaacctggagcgggtgtttgtgcgcatggaccaagtattgccagactcctgcctgctggtgtggaacatggcgatgccctcggngaacgtatcactgggggtttcctcctgccagagctccagcccctgnnaggctccctgcggcgggatgtggttgaagggaacttctacagtgctacgctggccggggaccactgctttgatgtcctagacctccactttcacttccggcatgcagtacagcaccgtcatcgggatggtgtccactgggaccagcatgcacaccgccacctctcacacctgcttctgacccatgtggctgacgcctggggnngggaagctgcccaagcgtggctatccccctt

SEQ ID NO: 892 - DNA, 613 bp, Homo sapiens
  I.892 (W87857)
  misc_feature (130)..(130): n is a, c, g, or t
  misc_feature (164)..(164): n is a, c, g, or t
  misc_feature (175)..(175): n is a, c, g, or t
  misc_feature (376)..(376): n is a, c, g, or t
  misc_feature (379)..(379): n is a, c, g, or t
  misc_feature (387)..(387): n is a, c, g, or t
  misc_feature (483)..(483): n is a, c, g, or t
  misc_feature (517)..(517): n is a, c, g, or t
  misc_feature (523)..(523): n is a, c, g, or t
  misc_feature (557)..(557): n is a, c, g, or t
  misc_feature (566)..(566): n is a, c, g, or t
  misc_feature (573)..(573): n is a, c, g, or t
  misc_feature (586)..(586): n is a, c, g, or t
ccacacttctcagagctgcccctggacgaccaggtcatcctgctgcgggcaggcttggaatgagctgctcatcgcctccttctcccaccgctccatcgccgtgaaggacgggatcctcctggccaccggnctgcacgtccaccggaacagcgcccacagcgagngggtggcctantctttgacagggtgctgacggagcttgtgtccaagatgcgggacatgcagatggacaagacggagctgggctgcctgcgcgccatcgtcctctttaaccctgactccaaggggctctcgaacccggccgaggtggaaggcgctgagggagaaggtctatgcgtcctttggaggcctacttgcaaagcacaagtacccagancanccgggaangttcgctaagctcttgctccgcctgccggctctgcgctccatcgggctcaaatgcctggaacatctcttcttcttcaagctcaatcggggacacanccattgacaccttccttatggagatgctggaagngccgancaaatgaattaggcctggggccaatcctttgtgncaaccgttntggcaanctgcctggaagcnagtgttcttttaagcctaagcctgtcc

SEQ ID NO: 893 - DNA, 209 bp, Homo sapiens
  I.893 (W87687)
  misc_feature (49)..(49): n is a, c, g, or t
  misc_feature (186)..(186): n is a, c, g, or t
  misc_feature (189)..(189): n is a, c, g, or t
  misc_feature (195)..(195): n is a, c, g, or t
  misc_feature (199)..(199): n is a, c, g, or t
ggagggtgacaacacatctcttaggcagagcagtgacaggctgtgcccnaaagtccaaacaggccaggcagagaagggcagggacagggctcaggctgagaagaacagctggcgtccaggcagggtggccagaacgggttgggcacaaaggatgggcccgcagctaaagtcatttggtgcggcgcntcnagcatntccntagggaaggt

SEQ ID NO: 894 - DNA, 675 bp, Homo sapiens
  I.894 (U55966)
  misc_feature (4)..(4): n is a, c, g, or t
  misc_feature (45)..(45): n is a, c, g, or t
  misc_feature (492)..(492): n is a, c, g, or t
  misc_feature (547)..(547): n is a, c, g, or t
  misc_feature (563)..(563): n is a, c, g, or t
  misc_feature (575)..(575): n is a, c, g, or t
  misc_feature (582)..(582): n is a, c, g, or t
  misc_feature (639)..(639): n is a, c, g, or t
tttnttttacatgagaggaagaggtctttataaataactcctggnttaaatggagctgaaaataggaagacaaaagaggaagccaattgctaagcacttattgagtcaataacattggcttggaagccatagtgcaagtggctggtttggtttatttccttctcatcaaaagagctaacgcaggattgaacctgggggcaccaaggaccgcatgtgtgtccgaggatgtgtctgaaaggatgtggtgcttctcagatgatgatgtctcgactaagacataacccagggcttgggttagatctctcggtgtcacagaagaacctgtcgggtggtgtggcttggctgttaagtccctggacctcttgagatcactttcttcactggaaggtctagtcactgggttggcttctaagctctgagatttagatagcaattcatagctaagtcttcgatataaaacacaggaaccaaaagtgtgaataaaatcttgantgtgctcaagtgtcctgtgaagtgtcctgtctccactctcaattccattctctgnagggtcttccttcagntgcaacaagggnctgcagnttgtgctctctctcggatgacaaaattgggtggaaatgtgctttattcacttgccgnccccagggcccctgatcttggggtgtgggccagcag

SEQ ID NO: 895 - DNA, 218 bp, Homo sapiens
  I.895 (AA069640)
cccacgttttccctgaagtcgagtttgtggtctaaggatgtcttgggccctgtgtgccccaccattcatgacctctgtattctctagttagatccctgaccataagcctgagcccctccctcccagccccatattcacacacatcccagcccctggacttgccctcttcctttaggcatgtgagaaaatcagcctagcagtttaaaacccaattttcc

SEQ ID NO: 896 - DNA, 458 bp, Homo sapiens
  I.896 (AA069596)
  misc_feature (158)..(158): n is a, c, g, or t
  misc_feature (319)..(319): n is a, c, g, or t
  misc_feature (342)..(342): n is a, c, g, or t
  misc_feature (407)..(407): n is a, c, g, or t
  misc_feature (429)..(429): n is a, c, g, or t
  misc_feature (438)..(438): n is a, c, g, or t
  misc_feature (445)..(445): n is a, c, g, or t
ttgattatctggatgcaggttttattatcattaggatgactgtcatcgacaagggataggggcttagagggttatatacaaaccacaattcctaggcgatgtttcaatattcccacacacatttatcccacagccagacacagcacaacaccacaggntttgcccctacatatgcttctccaagcagtaacacagctgtgggtcagggctctgcacccacaaagggatgcccagaaaggagaagatcctgggtcctgggggtgaagtttacacatggagaatcctgccaggttggggaggggatggaagctggattttncacacaacgcttcagtcccaccnccacccttcacttggcttgccctccccagggggctccctggtccccacttggggggagtctttgncaaagacacagaagggaccatntttagccanggctaanggaaggagcaggc

SEQ ID NO: 897 - DNA, 498 bp, Homo sapiens
  I.897 (AA054439)
  misc_feature (74)..(74): n is a, c, g, or t
  misc_feature (110)..(110): n is a, c, g, or t
  misc_feature (135)..(135): n is a, c, g, or t
  misc_feature (144)..(144): n is a, c, g, or t
  misc_feature (203)..(203): n is a, c, g, or t
  misc_feature (205)..(205): n is a, c, g, or t
  misc_feature (214)..(214): n is a, c, g, or t
  misc_feature (374)..(374): n is a, c, g, or t
  misc_feature (476)..(476): n is a, c, g, or t
gcgaccgcttcctgcgcatccgccaaacggtcaaccgcggcggtggcggcttcggcgcgggccccgggcgggcnggcttgcagagcggccagaccatcgcgctgcctgcnagggcctcatcgagttccgcgacgnctggcgaantcatagacgactacggaggcgaggacgacgagctggcaggcggcccgggagcggcgcgngnggccagggnggggcctgtatggagagctcccggagcacctccatcaccgtggactccaagcgcttcttcttcgatgtgggctgcaacaaatacggggtgtttctgcgagttaacgaggtgaagccgtcctaccgcaatgccatcaccgtacccttcaaaagcctggggnaaagtttcggaggcgccttttgccggtatgcggattagatgaaagaaattccaggaacgacagagggataagctttatgaagcgacgtggttgggggcagcngcggcggcgaagagtcagaagg

SEQ ID NO: 898 - DNA, 330 bp, Homo sapiens
  I.898 (AA053361)
  misc_feature (116)..(116): n is a, c, g, or t
  misc_feature (131)..(131): n is a, c, g, or t
  misc_feature (140)..(140): n is a, c, g, or t
  misc_feature (141)..(141): n is a, c, g, or t
tattcacgttcacttcagttccattcacagatggatttcagcttccaccgggtgcactgcttgaatcactcatccatcatttgccaactctgattgtgaggtactgatacaatggntcaagttcttaaaanttttaaaannataaatgatgctggaattctggacctgaggatctttagtatttgaacaaatccacagattaaactgaaggtaaattaagacttcagttttggttatttccaacttttctgtgaggatgtatatccattaaaggctcaggcttatagccacactgttacttttgtagggtaatcttcaagttttatgggc

SEQ ID NO: 899 - DNA, 396 bp, Homo sapiens
  I.899 (W87718)
gcacatcacgtcttttatacacatcaagccttctctcactggtttcacaaatgtttgtcatccctaaaatgaaatgagaaatacatgcaaaacaggggtggtatgtgcccgggatgggtttagagggaaaccagtctctgaggagtactgggtgaactgctgatatgcgggggctccgggtccgtccaggcactgcccttgtgctaagttgaccagacgcctggtgcagactgggccttcttctggcattccccgtgtgtatatgcagacaggtccccatgtacgtacacagatcaagtccaaaacatctgctgtttgggttttgtgttcccccaaataaaaggcagtcggaggttcagaccttacttggatacactctttcagcctttaggaatg

SEQ ID NO: 900 - DNA, 398 bp, Homo sapiens
  I.900 (W87717)
  misc_feature (24)..(24): n is a, c, g, or t
  misc_feature (25)..(25): n is a, c, g, or t
  misc_feature (292)..(292): n is a, c, g, or t
  misc_feature (385)..(385): n is a, c, g, or t
cacttctggaagggcattctgggnngggaaggaggcccagactctgcttcggccatgatttgtgactgcccaggactctcaggttgggctggccctactcaggattacactgaaagtaatggcctcgtaagtacaggtgatggttttggacacgtcaggaattcctaaaggctgaaagagtgtatccaagtaaggtctgaacctccgactgccttttatttgggggaacacaaaaccaaacagcagatgttttggacttgatctgtgtacgtacatggggacctgtctgcantatacacacggggaatgccagaaagaaggcccaagtctgcaccaggccgtctggtcaacttaggacaaagggcagtgcctgggacgggacccngagcccccccgca

SEQ ID NO: 901 - DNA, 289 bp, Homo sapiens
  I.901 (W87591)
  misc_feature (57)..(57): n is a, c, g, or t
  misc_feature (204)..(204): n is a, c, g, or t
  misc_feature (261)..(261): n is a, c, g, or t
ctggatctgccttctggacaatctttccggtggagggagcaaagtcctgcacactgnagtggtgtactagcggatcaagtatggacactgactcagactgaggagcagctccactgcactgtgtaccgaggagacaagagccaggctagcaggcccacaccagacgagctggaggccgtgcgcaagtacttccagctagatgtnaccctggctcaactgtatcaccactgggggttccgtggactcccactttccaatgangtgggctcagaaattccaagggtgtgcg

SEQ ID NO: 902 - DNA, 392 bp, Homo sapiens
  I.902 (W87498)
  misc_feature (343)..(343): n is a, c, g, or t
ttccatacaaatgtttctattttattgttccttcttgtaataaagggaagataaaaccatccttagcgctgtctccctcaatatcccccaccccatcttgttgtgcaaactgactgcttgatttgggggtgcctggcctttgaggtagtcacagggaggcccctccccaacatgagactgggtggggatggggagagagaagtggggaatggaggggaaggtgcttaagggaatttctttgtcctgggtgccccatctagccttccggccctttggaaccctttctgcgctttgcttggtgggctcctgagcatggcggcgattgggcgcaggtccggcactngaacagcacctgtaaggagggtggagtcgcttgggcccagccagcataa

SEQ ID NO: 903 - DNA, 422 bp, Homo sapiens
  I.903 (W86875)
gcttttattttttgagacaatggcctaaaaaggcattgaaatccaaaataacataaattatcactaaatcttgataactaatcataatatatatattttacactaattttttcatgacatatagattccatgcatataaaatacttccaatatttgttttttgttttctttaatagaggcagggtcttgctacgttgcccaagctgcttgtgaactcctgggcccaagcgatcctcctgcctcagcctctgagcctggcattacacatgcacctggcttcctttttgtattttttgaatgttccacagtgaggaggaagaaaactaaaaattaacttatctctaagaagacaaaacattttttcttttcctaagatcagttaagttactgtgacaagaatacccaaccataaggaagaacag

SEQ ID NO: 904 - DNA, 410 bp, Homo sapiens
  I.904 (W85959)
  misc_feature (90)..(90): n is a, c, g, or t
  misc_feature (280)..(280): n is a, c, g, or t
  misc_feature (289)..(289): n is a, c, g, or t
gctcaccactccccagaaccaagtggatatgctgctccaggaaatggcagatgaggcgggcctcgacctcaacatggagctgccgcaggncgagaccggctccgtgggcacgagcgtggcttcggcggacaggatgaactgtctcagagactggcccgccttcgggatcaagtgtgacggcagaacccgctctgaggtttcctggccatagccaccctttgaaatgctctctgtgtgttagagagatactataccctagaaactctgaacacgccagaantgctgaaantgcccttctacctttgggtttacaagccccctccacataaattaagaaattcaagtatttctgcactcttagctgtattctaaagttctgtatagctcgtaatgatggtatttttatagca

SEQ ID NO: 905 - DNA, 439 bp, Homo sapiens
  I.905 (W85875)
  misc_feature (307)..(307): n is a, c, g, or t
  misc_feature (335)..(335): n is a, c, g, or t
  misc_feature (376)..(376): n is a, c, g, or t
taggaccacatttattaataatatacgttatgagaacaatcatttgcagtctcactgtgaaggcaaaaaaaaaaaacaaaaaccaaaacccaaaggataaacagaaatagcacagtccaccgaatacactgcatggtgtttataactgtataaccaaactaagtaatctttcccctctctttaacttttatgcaccacctgccattctagatactatcaatcacactaaataataataaaaaccaaccaccttcaatctgatcattctgggcaggaaactggaatacagttttgaccagatcttcgngaaagattcatatacacgaaattaactnagttctgttaaaaggctgctataaaaataccatcattacgngctatacagaactttagaatacagctaagagtgccgaaatactgaatttccttaattgagggg

SEQ ID NO: 906 - DNA, 412 bp, Homo sapiens
  I.906 (W84857)
ttttaaaatttattcaaccatttattcaagaaatatttattgaacaaccacttcatgtcagtaagtgccccaggtacagggcatacagtggtaaacaaacccgatctggcccctgccttcaggtttcttgtttccagaaggggcacagagtatgatattggggatagtacaaggagtagtgaggacatagagaaggaagatctatttccctcaaaagtcaggaaaaccttttagaataagaagaagaaggaataaatgggtatatggagggagtactgcaggcagtactgcctgtaactatcacattgataatataaatatcatatacacattacataatacacaaggcacagggacaagaaagaatcaaatcaacaggatgaaatgaaagttcaataggactgggaatact

SEQ ID NO: 907 - DNA, 432 bp, Homo sapiens
  I.907 (W84856)
  misc_feature (427)..(427): n is a, c, g, or t
aaaaaaggtgttttgcaatatggatgtcaatgggggaggttggactgtaatacaacatcgtgaagatggaagtctagatttccaaagaggctggaaggaatataaaatgggttttggaaatccctccggtgaatattggctggggaatgagtttatttttgccattaccagtcagaggcagtacatgctaagaattgagttaatggactgggaagggaaccgagcctattcacagtatgacagattccacataggaaatgaaaagcaaaactataggttgtatttaaaaaggtcacacctgggacagcaggaaaacagagcagcctgatcttacacggtgctgatttcagcactaaaagatgctgataatgacaactgtatgtgcaaatgtgccctcatgttaacaggaggatggtggtttgatgcntgtgg

SEQ ID NO: 908 - DNA, 531 bp, Homo sapiens
  I.908 (W80409)
  misc_feature (17)..(17): n is a, c, g, or t
  misc_feature (52)..(52): n is a, c, g, or t
  misc_feature (102)..(102): n is a, c, g, or t
  misc_feature (126)..(126): n is a, c, g, or t
  misc_feature (177)..(177): n is a, c, g, or t
  misc_feature (188)..(188): n is a, c, g, or t
  misc_feature (205)..(205): n is a, c, g, or t
  misc_feature (238)..(238): n is a, c, g, or t
  misc_feature (246)..(246): n is a, c, g, or t
  misc_feature (254)..(254): n is a, c, g, or t
  misc_feature (257)..(257): n is a, c, g, or t
  misc_feature (311)..(311): n is a, c, g, or t
  misc_feature (327)..(327): n is a, c, g, or t
  misc_feature (420)..(420): n is a, c, g, or t
  misc_feature (456)..(456): n is a, c, g, or t
  misc_feature (465)..(465): n is a, c, g, or t
  misc_feature (496)..(496): n is a, c, g, or t
  misc_feature (515)..(515): n is a, c, g, or t
tttttttttgacaaggnggaatatttagctttttatttggaaggtattcacnctgttacccttaagactaagacccataaactctatcaattacctattcgnggaagaatgacactgtaaactggnggcaatgtcaaaatgtgtactgcactttataaaagcatggataatattaanggatcacaaanggcagcattagcattcnctatccaggtattattaaatctttttatcccangccccccncaaatatnggngaattattatctgataagcctgaaacgactttttttaataccataacctaaaangacacttcttacaggngtatgcaactttggtcagcagaaacacaatacgagcctctggcctagctaaggcactctattctgaaagtacggaaaacatggcacgtatgcnccttatcatgggcattgctcccccaaaggcagctcntggtatgcnggggaaaaaggctgggggatgaagtcccccncaatatcatgcataagccnggaagacccttcaact

SEQ ID NO: 909 - DNA, 658 bp, Homo sapiens
  I.909 (W80407)
  misc_feature (242)..(242): n is a, c, g, or t
  misc_feature (544)..(544): n is a, c, g, or t
  misc_feature (575)..(575): n is a, c, g, or t
  misc_feature (587)..(587): n is a, c, g, or t
  misc_feature (643)..(643): n is a, c, g, or t
catacgattggtttaattttttttttcagcaggagaaaaaagaataaagttacaagattcttttaatattttcacaatgttaaaactaaaactgagctctaggctatgtgtgtaagtaaatctagaacacaaaagggttaaataagattttctcttttaaagatacaagaatttaagctttccttacatttaacaaacttcacagaacagatactgcaggggaacaagccccaccccccacnccccccagctctaagtcaggaagcgaacatgggcttcgctcccccaggccagctcccctgggctccttcccatggctgcctccacgcagcaggcagaggagggggcggggggcctggggagggcggggaagggctcgcacagcctcttcgggaccagagcttggcggaacctattggggggctgcctcactgaggatggcccgtatggtggccaagggcttgtggcttgacagcagtggtaaacgctgggcagacctggcccctctggcctggggttgccctagaagcaagacaccggtctngggtcctgaagcaagaattaaggctggggantttgcagcgggntccactctggtggggttgaaggttggaaagcatgacttcctattcagtacgtcggntcaaaaaatttgcat

SEQ ID NO: 910 - DNA, 509 bp, Homo sapiens
  I.910 (W79017)
  misc_feature (3)..(3): n is a, c, g, or t
ganaagtgaaattgagcaattcactgtttcaggatacttgaggatctttagtgtactgctgactctttttcttgttttgtctgccattcttgaaagtgcatcttgagagcccccatttgttgtgtagagatatagcagctgaagcaggacttcattccagatagctgtgtgcatttatgtcatgccaattactataacatttccaaagtatgaaaggtctttcaggcttatgcatgatattgtgggtgacttcatgccccagcctttctccccagcatacagtgagctgccttttggggagcaatgccaatgataaggagcatacgtgcatgttttccgtactttcagaatagagtgccttagctaggccagagctccgtattgtgtttctgctgaccaaagttgcatacacctgtaagaagtgtctttttaggttatggtattaaaaaagtcgtttcaggcttatcagataataattctcccaaaatttgaggggggcatgggataaa

SEQ ID NO: 911 - DNA, 496 bp, Homo sapiens
  I.911 (W79015)
  misc_feature (363)..(363): n is a, c, g, or t
  misc_feature (439)..(439): n is a, c, g, or t
  misc_feature (479)..(479): n is a, c, g, or t
tttataaaacaacaaatggttcaactctgtctgcaaattaacagctgaacacctgcaactgcaaatgttttttgatccgacgtactgaaataggaagtcatgctcttcccaccctccacccaccagagtggaacccgctgcaaaatccccagccttaattcttgcttcaggacccagaccggtgtcttgctctagggcaacccagggcagaggggccaggtctgcccagcgtttaccactgctgtcaagccacagcccttggcaccatacgggccatcctcagtgaggcagccccccataggcttccgccaagctctggtcccgaagaggctgtgcgaagccttcccggccctccccagggcnccccgccccctcctctgcctgctgcgtggaggcagccatgggaaggagcccaggggagctggcctgggggagcganccaatgttcgcttcctgacttagagctgggggggggtggngggtggggcttgttccc

SEQ ID NO: 912 - DNA, 495 bp, Homo sapiens
  I.912 (AA082418)
  misc_feature (140)..(140): n is a, c, g, or t
  misc_feature (242)..(242): n is a, c, g, or t
  misc_feature (279)..(279): n is a, c, g, or t
  misc_feature (396)..(396): n is a, c, g, or t
  misc_feature (417)..(417): n is a, c, g, or t
  misc_feature (468)..(468): n is a, c, g, or t
  misc_feature (494)..(494): n is a, c, g, or t
ccttccctctgctcctcagccatgcgacaaacaggagatcattaagattacagaacagctgattgaagccatcaacaatggggactttgaggcctacacgaagatttgtgatccaggcctcacttcctttgagcctgagnccattggtaacctcgtggaggggatggatttccataagttttactttgagaatctcctgtccaagaacagcaagcctatccataccaccatcctaaacccanacgtccacgtgattggggaggacgcagcgtgcatcgnctacatccgcctcacccagtacatcgacgggcagggtcggcctcgcaccagccaagtcagaagaagacccgggtctggcacccgtcgggaatggcaagtggctcaatgtccactatnactgctcaggggcccctgcgncaccgctgcagtgagctcagccacaggggcttttaggagattccagccggnaggtccgaacctttcgcaagccagtng

SEQ ID NO: 913 - DNA, 154 bp, Homo sapiens
  I.913 (AA062813)
  misc_feature (148)..(148): n is a, c, g, or t
gaagcacgaagagtttactgagggctcacagaagggccgagagacaacagaaacagacaccggcacaggctgggcagcagcatggccgctcacacctgcctctccaggttacacagttcaggatccaagtcctgtgcaaatgcatctngactgg

SEQ ID NO: 914 - DNA, 481 bp, Homo sapiens
  I.914 (AA055268)
  misc_feature (280)..(280): n is a, c, g, or t
  misc_feature (365)..(365): n is a, c, g, or t
  misc_feature (420)..(420): n is a, c, g, or t
cccttttccatcatctcttttcccactccctttgcgtcaggagcagcatcattcagcaaatgccttttcaaatgcagcaatcccacttagcagggacaggagaaaaattattcccatgttgactgtcttgactgtcacggaacagatcttgttctttgctggaccatcaagggtcatggcagtgctgaacatggcagtctagggtgaacaatcccctaacacaagtttacttgtctttgattatgacagtaacaaaattgacacgctttctaactcacanggcatagacgtgaccttttaatcacgacgcccacgggaagacacatgattaatgatttagctccctccatacctccgaacatcangttgggatccctcctccagccaagatgatccttcttaagagaaggctcagccttnggaagcaaacttataaatcatattctcatgggctttggttaaacttatttcaagtgatggt

SEQ ID NO: 915 - DNA, 451 bp, Homo sapiens
  I.915 (AA055163)
tttttcaaaatatgagtttaatgacagaattagttagctagtattccacaaaaagtattgctctattttcaaaaaatttgcacagtgtcttacacatgtgctaaaagattgagaaaataaattagaaaattatactgcacacttaacactaaatctaccaagcacaatgtaacttttagacagctcagaaggcactttgggatttttttttttttcagtgcctcagggatcagtatgaactccaattattgttgccctggccaattgtgggagtactgataactggagagttaattgactgctggataaagcaatctttaatctaaatggggaaggctcactagcagctacagaggaagggggtattcagatcccagcttaaggctaggaagccagctgacccaatcagagacatgaacccatcagaaaaatgtaaaagttttcatctttc

SEQ ID NO: 916 - DNA, 533 bp, Homo sapiens
  I.916 (AA046460)
  misc_feature (520)..(520): n is a, c, g, or t
attgtgaacttttaattcttgcattgtaattggctgtgtccataagaaatcatttattcttcaggcttagacattcatggatatgcttttctttcattaggaacattttgctggtgatgaggaagcatttagctgaataagtttaaagccctttatacagagaattctacaagtttgcaaatattttaacaatattaaatgtgcaatagaacttttataaaataattagaacagagattttacagttaaggtttcaaattgtggcaggtggtactgttgatctcagggtactttctgggattgctcacatttctctaatgtactgcacttgatgccagtaggaaagaagcttaagtgtcttcagttcaagattgatagagcccttggcattttattacacattcttagttcccaggtgggacctccaatactggcgcagacagtagtgggtaaaaatagatatggaattattaaaagattttggtccaaaccttttagaatagggttgccagtaagatcngccagggatggac

SEQ ID NO: 917 - DNA, 294 bp, Homo sapiens
  I.917 (AA046135)
  misc_feature (79)..(79): n is a, c, g, or t
  misc_feature (269)..(269): n is a, c, g, or t
  misc_feature (276)..(276): n is a, c, g, or t
gtatgaggggaatagaaacaaagcagcagttttagccagggttcaatgatagagtggaggtaaattaagagcctccagntgtgattcaccatttgagacattatacataatttgtttttgttataagccatttgaatttttaaaaaatttcatacatgcaatggaatatagatatgtatatacacatataatatatatgctaaagtataaagagtaataataatgacaataaacaaacccctgtgtgcctaccacccaccttattgccnttccccntgaggtacccgtgtgcgg

SEQ ID NO: 918 - DNA, 379 bp, Homo sapiens
  I.918 (AA046092)
cagtttaattccatttattattctttaaggatacatacatggagataaagtgatgaaagacaagaaggctatggtcaacacaaagttcagtacaggggttccctctatcagacagggatagagataggttcaggaaaccgcacacggtacctcaaaggaaaggcaataaggtgggtggtaggcacacaggggtttgtttattgtcattattattactctttatactttagcatatatattatatgtgtatatacatatctatattccattgcatgtatgaaattttttaaaaattcaaatggcttataacaaaaacaaattatgtataatgtctcaaatgggtgaatcacagcctggaggctcttaatttacctccact

SEQ ID NO: 919 - DNA, 435 bp, Homo sapiens
  I.919 (AA046739)
ttcaggtgtcaggttttacaacatactagctcttaggatctctcagcattaataggattcaaattttaaataatatggttcctagatataatgcaaaattaactcaaatgcctttaccatatacgattttatcttccctaggatgcacatcctactgaccttttcccaagtatagtggaaacacatttaccacccctagattgtagagcctgaggattcttttgaaattaaacaataatcattgcagatgtggcaaaaactagactagctttagggactctgttcaagataatagctttagtccctggttggcaagttctcaaaatttttaaaggtagaaggaataactggtttcctatctactgacttcattgccatagttacaaacatactgttcaaataggtaacagaatgcattagaagtaggcaggctta

SEQ ID NO: 920 - DNA, 504 bp, Homo sapiens
  I.920 (AA040785)
  misc_feature (10)..(10): n is a, c, g, or t
  misc_feature (12)..(12): n is a, c, g, or t
  misc_feature (14)..(14): n is a, c, g, or t
  misc_feature (19)..(19): n is a, c, g, or t
  misc_feature (22)..(22): n is a, c, g, or t
  misc_feature (70)..(70): n is a, c, g, or t
  misc_feature (126)..(126): n is a, c, g, or t
  misc_feature (133)..(133): n is a, c, g, or t
  misc_feature (234)..(234): n is a, c, g, or t
  misc_feature (462)..(462): n is a, c, g, or t
gcgaccgcgncntntactncgnggattggcgagcagcgactcaggcaccaggccgccgcccgcccccgcntgcagcccggcgcccgccttgagcgcagggtgctcggcgtccgcacgccgcccagncgtaggnaccgggaaggcgaacttgtccttcttgagcagcgtcttgggcttgcgccgcggccggtacttgtagtcggggtgctccttcatgtgcatggcgcgtagacnttgggcctcgtcgatgaacggccgcttctccgactctgtgagcagtttccactcggcgcccaagcgtttgctgatctccgagttgtgcatcttggggttctcctgggccatcttgcgccgctgagcccgcgaccacaccatgaaggcgttcatgggccgcttgacgtggtccaccggctttggacatgctctcgccttgccgcggtgcagccggcaggccgcccgggnccttggacttgggccggaagaaattaattgttggctgcccgc

SEQ ID NO: 921 - DNA, 403 bp, Homo sapiens
  I.921 (AA039767)
ggtctgggtttcactggcagggactcctttctttccatagctgcttctctttctttccatcgtcggatctgttcctctctcatcttgaagaacaggatctgtttctgttcttcgctgagctctgccagtagatcaggatctatgtacatctccgacagtatctgtttcagcatctttgcacttctgaagtcttttatacttgtggcaaaagttcctgaaactggcctccaggtgtccctccacctgtgctggcacttgggcgtttccacgaaacttcccaaacagctcacaatcctgggctgactgggacaataattcagcaaactggctactcagacctggcaccaaatgtcctgtccaaaatgctgttcactgaaccagtgctgggcgcccctgggcaggg

SEQ ID NO: 922 - DNA, 436 bp, Homo sapiens
  I.922 (AA039766)
  misc_feature (47)..(47): n is a, c, g, or t
  misc_feature (343)..(343): n is a, c, g, or t
ggcggccaagtggatgtggcgggtgatcgagccaccctgcccagggngcccagcactggttcagtgaacagcattttggacaggacatttggtgccaggtctgagtagccagtttgctgaattattgtcccagtcagccaggattgtgagctgtttgggaagtttcgtggaaacgcccaagtgccagcacaggtggagggacacctggaggccagtttcaggaacttttgccacaagtataaaagacttcagaagtgcaaagatgctgaaacagatactgtcggagatgtacatagatcctgatctactggcagagctcagcgtagaacagaaacagatcctngttcttcaagatgagagaggaacagatccgacgatggaaagaaagagaagcagctatggaaagaaaggagtccctgccagtgaaacccagacc

SEQ ID NO: 923 - DNA, 158 bp, Homo sapiens
  I.923 (AA032291)
tcttttttttttttttttttttttgactggcctaaaacacctaccttttattttttaaaaaaccaacacattatcagtacttcatgccagacaccattctaggaaattaactcctctgactttcacatcaatcccatgggtagctgttatttacagat

SEQ ID NO: 924 - DNA, 429 bp, Homo sapiens
  I.924 (AA021081)
ctcctagctgctgtgctctgctgacatttggcaggcagcttctgcagccaagggtctcaccccagccccccggctctgcacccactgtgctgcccacaggagtggtcctgcccatggaagggccagttcaggtggccggagctcctgagctgccctaggggactgctgtgggtctgaggtggtgatgtcccccacggctgcctgcgcctgagcccccacgcatccacccctggggccactctgctgttcaggagcacccacccgtgtcctcgaccatgagcaagccccccaagcttaccctggcatcaggatctcagggtgccgggcccttggaagcaagaaggcaagcaatgcaagaagtcccttggacaaggctcctgccacctggtggggcacttgggcgctctccccggaaagcgggaccaccag

SEQ ID NO: 925 - DNA, 341 bp, Homo sapiens
  I.925 (AA020997)
  misc_feature (292)..(292): n is a, c, g, or t
  misc_feature (297)..(297): n is a, c, g, or t
  misc_feature (307)..(307): n is a, c, g, or t
  misc_feature (312)..(312): n is a, c, g, or t
  misc_feature (319)..(319): n is a, c, g, or t
  misc_feature (331)..(331): n is a, c, g, or t
tacgcagcaggggaggctctgacttgcactggctggtggtccgcttccggggagagcgcccagtgcccacaggtggcaggagcctgtccagggactctgcattgctgccttctgctccaagggcccggcaccctgagatcctgatgccagggtaagctggggggctgctcatggtcgaggacacgggtgggtgctcctgaacagcagagtggccccaggggtggatgcgtgggggctcaggcgcaggcaagccgtggggggacatcaccacctcagacccacaagcagttcnctaangcaactcaangaagnttccggncaacttgaactngggccttttc

SEQ ID NO: 926 - DNA, 514 bp, Homo sapiens
  I.926 (AA020912)
  misc_feature (147)..(147): n is a, c, g, or t
  misc_feature (150)..(150): n is a, c, g, or t
  misc_feature (225)..(225): n is a, c, g, or t
  misc_feature (226)..(226): n is a, c, g, or t
  misc_feature (236)..(236): n is a, c, g, or t
  misc_feature (292)..(292): n is a, c, g, or t
  misc_feature (299)..(299): n is a, c, g, or t
  misc_feature (306)..(306): n is a, c, g, or t
  misc_feature (335)..(335): n is a, c, g, or t
  misc_feature (365)..(365): n is a, c, g, or t
  misc_feature (381)..(381): n is a, c, g, or t
  misc_feature (484)..(484): n is a, c, g, or t
cggcggttccagcatgaagaggagagctggcctggggggcagcatgaggtcagtggtgggcttcttgtcccagcgggcttgcatggggaccccctgctcactcaggactttcagaggagacgcctgcggggctgcagaaacctctancangaaggacctcctcggccacttcggctgtgtcaatgccattgaattctccaacaatggaggccagtggctggtctnnagaggaaatnaccgccgggttcctgcaatggaccatgggaacaagccattcaattccagggttaangcccatnacagttnaaagaggaccaccatttccaacatttttngcttggctttcaacattgggaacactaaantgttctctggaggcantgatgagcaatttaatcctccatgatgtttgaaaggtaaataagattggtggtgtgttgaaggtgattgactttgtttttcatatatgaagaggcaaatatcnctttagactaaaatagttttggttttttga

SEQ ID NO: 927 - DNA, 186 bp, Homo sapiens
  I.927 (AA020842)
  misc_feature (149)..(149): n is a, c, g, or t
  misc_feature (167)..(167): n is a, c, g, or t
  misc_feature (183)..(183): n is a, c, g, or t
tgtaaggctacttttgtagctttttgttttccctttgtatttatcatgtttttaatttcttctctgaggaggaattctctgaatctgtatcttccaattcaattcgttgccttttgaggccactgtggcatgaacagccctgctactanctgtggctggggtgtcantggggtcctctcttgntcc

SEQ ID NO: 928 - DNA, 496 bp, Homo sapiens
  I.928 (AA019772)
  misc_feature (203)..(203): n is a, c, g, or t
aaagaagagaaaagaggaataaaatatatcaggcaaatcccttatcctcactggcttcaatttccccgcccacccctcttagtgacagggaaattgaagccagtgaggataagggatccttacctctccgcactcttctgagacctggcagatctgagaataaacttcagcaatgacagtggccctggagagcacaggaaggncctcaggaggggactctcctccttccaccccaccctcattccaccccacccttcctcaccccaactcacttgcagtccagccctcccccaggaggtaaatctgggatgtcctctgaggccagagtcctgaaaactgtgttcaggctggggggcttctgagcagaggcacacagttctgagaaagagtcaagagttaggctggggcacagtgggcgcacgcttggtaatccccagcactttggggagaccaaggcgggccggattcactttgagggccaggggttcgagaccag

SEQ ID NO: 929 - DNA, 397 bp, Homo sapiens
  I.929 (AA019745)
  misc_feature (16)..(16): n is a, c, g, or t
  misc_feature (54)..(54): n is a, c, g, or t
  misc_feature (57)..(57): n is a, c, g, or t
  misc_feature (68)..(68): n is a, c, g, or t
  misc_feature (72)..(72): n is a, c, g, or t
  misc_feature (120)..(120): n is a, c, g, or t
  misc_feature (148)..(148): n is a, c, g, or t
  misc_feature (239)..(239): n is a, c, g, or t
  misc_feature (242)..(242): n is a, c, g, or t
  misc_feature (252)..(252): n is a, c, g, or t
  misc_feature (254)..(254): n is a, c, g, or t
  misc_feature (261)..(261): n is a, c, g, or t
  misc_feature (262)..(262): n is a, c, g, or t
  misc_feature (284)..(284): n is a, c, g, or t
  misc_feature (290)..(290): n is a, c, g, or t
gcgaccgacgggggtncgaggcgtctgggggcctgcgcttcggggcgagcgacnaanggctggcggcncatnggaggatgctcactgcacttggctttcgttacctggtctgcccccggntgggcctttgtttgccgtcctcgacgcnacggtggggctcgagctgcccgcttcggtgcacgccatttgccaggccatgtgctccaggagctgggcccggagcctagcgagcccgaggngtngcgcgaggcntngcgcgannctttcttgagcgccgacgagcncttgcntccctctggccccgcgtggaaacgggcggctgcacggccgtggtgttgctggtctccccgcggtttctgtacctggcgcactgcggttgactcccgcgcggtgctga

SEQ ID NO: 930 - DNA, 451 bp, Homo sapiens
  I.930 (AA019720)
  misc_feature (4)..(4): n is a, c, g, or t
  misc_feature (39)..(39): n is a, c, g, or t
  misc_feature (43)..(43): n is a, c, g, or t
  misc_feature (44)..(44): n is a, c, g, or t
  misc_feature (52)..(52): n is a, c, g, or t
gcgnccgccttggtggactccaaagccaagacgcggacnctgnnctgtggcncttacatggcacccgagcgcattgaccccccagaccccaccaagccggactatgacatccgggccgacgtatggagcctgggcatctcgttggtggagctggcaacaggacagtttccctacaagaactgcaagacggactttgaggtcctcaccaaagtcctacaggaagagcccccgcttctgcccggacacatgggcttctcgggggacttccagtccttcgtcaaagactgccttactaaagatcacaggaagagaccaaagtataataagctacttgaacacagcttcatcaagccgctacgagacgctggaggtggacgtggcgtcttggttcaaggatgtcatgggcgaagactggagtcaccgcgggacttagcggccgtcctgagccagc

SEQ ID NO: 931 - DNA, 196 bp, Homo sapiens
  I.931 (AA019710)
  misc_feature (176)..(176): n is a, c, g, or t
  misc_feature (182)..(182): n is a, c, g, or t
cttgatttgcatgcaacacccacaaaaaggaaacacaccccctcctgctctggccaccccagcaggctccggggggcacctggcctgggtccccggtgcactcacccggtccttcccagtcctggacctcaacgtggactgggccaggtgtgggtgagtggagggacggccagggnacagantgggagtgaccacc

SEQ ID NO: 932 - DNA, 396 bp, Homo sapiens
  I.932 (AA018856)
  misc_feature (150)..(150): n is a, c, g, or t
  misc_feature (163)..(163): n is a, c, g, or t
  misc_feature (323)..(323): n is a, c, g, or t
  misc_feature (346)..(346): n is a, c, g, or t
  misc_feature (371)..(371): n is a, c, g, or t
  misc_feature (375)..(375): n is a, c, g, or t
  misc_feature (379)..(379): n is a, c, g, or t
  misc_feature (389)..(389): n is a, c, g, or t
cagcactcacagcacagccccctgagacccgccctgcacttgaccgcagcaggagggagtccaggagccaaggttgccgcggtgtctccgtcagcctcaccatgaacctggaaccgcccaaggctgagttccggtcagccaccagggtgncgggggacctgtnacccccaggaaagggccccctaaatttaagcagcgacagaccaggcagttcaagagcaagcccccaaagaaaggcgttcaagggtttggggacgacatccctggaatggaaggcctgggaacagacatcacagtcatctgcccttgggaaggccttcaancacctggagctgcactatctggnccaatatggcatcatctatcacggnggtnctgnttgaaagtcnagaccct

SEQ ID NO: 933 - DNA, 477 bp, Homo sapiens
  I.933 (AA019529)
  misc_feature (415)..(415): n is a, c, g, or t
  misc_feature (429)..(429): n is a, c, g, or t
  misc_feature (430)..(430): n is a, c, g, or t
  misc_feature (470)..(470): n is a, c, g, or t
tttcaaggacacactaattttattttgaaatagggactgcaagggcgggctgtattgagaaggatggccccctggtgtgatgagcttggggcctcatctgctcaccgtgcacgccctggagtcctgctacccagcatgtccaaactaagggcacccccctgggaagggatgcagagacggggagcttctctgtatccccttacaggcaggacagggggctggggtgcagaagcactctggggagacctgccctaagctttccaagctgggaggaggggacgatctggggtccagcaggctcccgggctggggtccacttcccgttctccctggggagttggagaccgaccaagcctctctgttgggcaggactgaggggtgggcctgtgtctccagatgttgagcagggcctggncagcccctgagggnnaatcctagagggaggtggtgggtcctggtgactggtattnaatatgt

SEQ ID NO: 934 - DNA, 470 bp, Homo sapiens
  I.934 (AA018418)
tttttcactgtttctcatagagctctattgtggcatataataataggtactctatataaattaaattaaaaataaagctccagcaggttgcacaggttggctgttaataaatatatctctgggtaattgtgccccaagaccagctcacgaccactctccctcatccagagaattatacaaaaataaatacaggctcggggggtaggcggaggacatgcccagttccactctaaaagttcccctcactcacaccatctacccgttccctcatctccactggtgtcaccacaagggaagccctgtgttgactggagagcttggggatgagaaggcctctctttcaagttgagcattctcagaagcaaagggacccaggtcccctcactgcacaggccattgtatcccatcttaagcctctgctgatcccacaagcagagctatgagaaccaagccagagagaggcacagcgc

SEQ ID NO: 935 - DNA, 235 bp, Homo sapiens
  I.935 (AA018437)
  misc_feature (146)..(146): n is a, c, g, or t
  misc_feature (158)..(158): n is a, c, g, or t
  misc_feature (167)..(167): n is a, c, g, or t
  misc_feature (217)..(217): n is a, c, g, or t
agggcgcgggcgattggggcgcgctcagacttcgtggtgcgctatgagacccctgagggcactttctgggccaacaaccacggccgcaactacacagtcctgctccggatcgcacccgctcccacacccacttgatgccagaaggnttgccccagcanaagcagctncagcagctggagccacagcccgagtgccagggtcccgtggaggctgaagngcaaggcaagcttgaaag

SEQ ID NO: 936 - DNA, 192 bp, Homo sapiens
  I.936 (N75903)
ggcgctcaaatctcctcccacctctctccctgcttttgccttgctctgttcctctttggtcccaagagcagcagccgcagcctcctcgtgatcctccctagcataaatttcccaaacagtccacaggtcccatgcccactttgcgtctgcactgtgatcgtgacaaatcttccctcctcaccagctagtctg

SEQ ID NO: 937 - DNA, 456 bp, Homo sapiens
  I.937 (N71828)
  misc_feature (6)..(6): n is a, c, g, or t
  misc_feature (108)..(108): n is a, c, g, or t
  misc_feature (390)..(390): n is a, c, g, or t
  misc_feature (430)..(430): n is a, c, g, or t
ggtctntcattgcgtttctcagggacctgatgcccagaaccctggacgggcagatcaccatggagaagacgcccagttacttcgtcacgcgggaggcccccggcagcnatctcggccatgtccaaggacaccaagctcatcgtggtggtgcgggacccggtgaccagggccatctcggactacacgcagacgctgtccaagcggcccgacatccccaccttcgagagcttgacgttcaaaaacaggacagcgggcctcatcgacacgtcgtggagcgccatccagatcggcatctacgccaagcacctggagcactggctgcgcaccttccccatccgccagatgctcttcgtgagcggcgaacggctcatcagcgacccggccggggantggggccgcgttgcaagacttcctgggcctcaagaggatnatcacggacaagcacttctactttaa

SEQ ID NO: 938 - DNA, 433 bp, Homo sapiens
  I.938 (N59438)
caagatttatttttttattttaatgatcaaaaaggtgtatttgaaagcactatgaaaactgtgacgggtacaaacatatgataatactaactgggaaataatttaagaaaaagtggcacgggaaaaagggagaaaaatataaggatagatatcaattttatcagggccttgtattttaaaaaaagagagagagatgtttaacctcaagattttctgaaaacttttaatgacaactgatgcttatactttatgactgggtatatagaacataaaataaaaactgaaaattgaaagtgtttagacgagtgaaattttccttttctgttgatccaccgtgtttggtgttggttatacattaagatggggcgggagtgagaacaatctcttaacattcattgaaaaaaatactgaaacatattttcagcacaaatat

SEQ ID NO: 939 - DNA, 331 bp, Homo sapiens
  I.939 (N59167)
catcacaatccattttattccacagcatgtttaagggaatgttattttcaggaagatgtttgggattaaaataattaaaaaaaaactggaaattcacacatttatgtatctcttcttttcattaaatatatatctgtttggcaaaaaatgttagactcttttcgtacaaaaacaaagcaaaaaaaaaaaaaaactaacccaaaactcttgcaaattgtaaataccagtaataattacaatgatgtaaacttggatgtctgacagcttgaccatcctgtggaacttgagttgcagcaggacctcccaggagaaggtaacaccaaacgcttgg

SEQ ID NO: 940 - DNA, 394 bp, Homo sapiens
  I.940 (N78234)
  misc_feature (212)..(212): n is a, c, g, or t
  misc_feature (311)..(311): n is a, c, g, or t
  misc_feature (360)..(360): n is a, c, g, or t
  misc_feature (392)..(392): n is a, c, g, or t
gcaacaaaggtgacagcatttaacaaagcttagagaaacctccaggagactgctaccatggcagagaagcccaagctccactactccaatatacggggcagaatggagtccatccggtggctcctggctgcagctggagtagagtttgaagagaaatttataaaatctgcagaagatttggacaagttaagaaatgatggatatttgatgtnccagcaagtgccaatggttgagattgatgggatgaagctggtgcagaccagagccattctcaactacattgccagcaaatacaacctctatgggaaagnccttaagggggaaagccccttcaacctgagggaacaagatgccaagctntgccttgatccaagagggaacccaaaaatcgngt

SEQ ID NO: 941 - DNA, 421 bp, Homo sapiens
  I.941 (N77653)
  misc_feature (24)..(24): n is a, c, g, or t
  misc_feature (364)..(364): n is a, c, g, or t
ataggtcacacagcaaaccagcanctaagccccctggtcccctaatctgccccagaaaggtagtttctcagctgttctgagcttgacagcatgaacatcctcaggagccacatgcaaagtgggctgaggcttggcattcccctcgaggtcatctggccattctgaacgcccctcctcagcctgcttcctccggctgagccatgtggcccccggaacccctctgaactctgttgccgatccctccctccatctgcgccttcagtgaagcagtttcttaaaggaggggtccttggtaccgtggagggacaggacatctctgggaatttcgtacccagctgcgttcgtgctgaagttcttcatgganccacttcctttccaagcgtcacggtgggggattccaggggcttgggtaatgaagccg

SEQ ID NO: 942 - DNA, 460 bp, Homo sapiens
  I.942 (N77615)
  misc_feature (205)..(205): n is a, c, g, or t
ccggctccccatcatcgtactagggaggaagaagcgggtgagaaacaaaacttctttccattgtcctgcccgtttctgcggacttgttctgaggccgaggcacctctaagatactgatgctctgcagaggacccattcattgcttctgcttttgctgctgaccctgctggggctggggctggtccagcttcctatggccaggatngatcgtaccagcgattcctgcggcaacacgtgcaccctgaggacgacaggtggcagtgatcgctactgaacttgatgatgcaaagacggaagatgactttgtatcactgcaagcgcttcaacaccttcatccatgaagatatctggaacattcgtagtatctcagcaccaccaatatccaatgcaagaacggcaagatgaactggcatgagggtgtagtgaaggtcacagattgcagggacacaggaagttccag

SEQ ID NO: 943 - DNA, 486 bp, Homo sapiens
  I.943 (N76660)
  misc_feature (3)..(3): n is a, c, g, or t
  misc_feature (339)..(339): n is a, c, g, or t
  misc_feature (350)..(350): n is a, c, g, or t
gantgtttgagctactctgtgacatttaatcattaatagaagatttggggtatacactacagatgggccctgtttgctgaaatgttggggccaaacaacttgatagagcctatgatgttcctttcaagctttctaaagtttccaccaacctcagatgaaaatgtaactgtgagaagtaaatttaacaacattgttgtctgcatatgtgtgccaaaatggaagacagaatcatgaaaaagaagcttattttataaccatggtggtggctcatgtttgagtagtaatgctccttggtctggccactgaagaatgacagagcccagggccccggtcccatcntgccatcactngctttggagccccagggtaactcctgccagtaacagagaccaagaagcgggacgttcaccatgggaagaaaatcgctgtaccttctgattgtggggatcctcatagcatattatatttatacgcctctcccagata

SEQ ID NO: 944 - DNA, 411 bp, Homo sapiens
  I.944 (N59772)
  misc_feature (355)..(355): n is a, c, g, or t
  misc_feature (395)..(395): n is a, c, g, or t
ttaagaggaagaacatgtagctcactttattttccccaaagatgtcttgaaattttaatcagttcagtcatccctatctttcttcttacatattaatcctatagattagtgactcttgtataagacaagaaaaactaatgtgcttgtttgatatcagcacagatcagtctctaagcagaagtgaaaatatgggaaaatgagttggaaaggaaaatgttatagaaaatagtaaagacaaaccatgggaccaccttttctcagtgagagatacattgtcgggggcagagtgctggagagctgggcagagaggaacaaaatgtctgacagcaggagccggagcccagggaggaaaccnagatggaaagggctctgctcagactgactccatgtgggcnccttatgggataaagg

SEQ ID NO: 945 - DNA, 384 bp, Homo sapiens
  I.945 (N59729)
  misc_feature (69)..(69): n is a, c, g, or t
  misc_feature (185)..(185): n is a, c, g, or t
  misc_feature (236)..(236): n is a, c, g, or t
  misc_feature (304)..(304): n is a, c, g, or t
ctcccttacgtccccgagtgcggcagtaccgctccttcccagccgcgcgcttcctccagacctctcggngcgggtgagccctattcccagaggcaggtggtgctgaccctgtaacccaaaggaggaaacagctggctaagctcatcattgttactggtgggcaccatgtccttgaagcttcaggnaagcaatgtaaccaacaagaatgaccccaagtccatcaactctcgagtctncattggaaacctcaacacagctctggtgaagaaatcagatgtggagaccatcttctctaagtatggcngtgtggcgggcttgttctgtgcacaagggctatgccttatgttcagtactcccaatgagcgccatggcccgggcagctgt

SEQ ID NO: 946 - DNA, 267 bp, Homo sapiens
  I.946 (N59035)
  misc_feature (3)..(3): n is a, c, g, or t
  misc_feature (41)..(41): n is a, c, g, or t
  misc_feature (130)..(130): n is a, c, g, or t
tgnctctaccatgttggtatggagcaaggatgatggtgttncctggagcacaccccggaatctctccctggatattggcactgaagtgtttgcccctggaccgggctctggtattcagaaacagcgggancacggaagggccgcctcatcgtgtgtggccatgggacgctggagcgggacggagcttctgtctcctcagcgatgatcatggtgcctcctggcgctacggaagtggggtcagcggcatcccctacggtcagcccaagc

SEQ ID NO: 947 - DNA, 299 bp, Homo sapiens
  I.947 (N58563)
  misc_feature (6)..(6): n is a, c, g, or t
  misc_feature (16)..(16): n is a, c, g, or t
  misc_feature (18)..(18): n is a, c, g, or t
  misc_feature (19)..(19): n is a, c, g, or t
  misc_feature (24)..(24): n is a, c, g, or t
  misc_feature (26)..(26): n is a, c, g, or t
  misc_feature (47)..(47): n is a, c, g, or t
  misc_feature (49)..(49): n is a, c, g, or t
  misc_feature (51)..(51): n is a, c, g, or t
  misc_feature (56)..(56): n is a, c, g, or t
  misc_feature (58)..(58): n is a, c, g, or t
  misc_feature (70)..(70): n is a, c, g, or t
  misc_feature (71)..(71): n is a, c, g, or t
  misc_feature (78)..(78): n is a, c, g, or t
  misc_feature (79)..(79): n is a, c, g, or t
  misc_feature (107)..(107): n is a, c, g, or t
  misc_feature (117)..(117): n is a, c, g, or t
  misc_feature (118)..(118): n is a, c, g, or t
  misc_feature (127)..(127): n is a, c, g, or t
  misc_feature (139)..(139): n is a, c, g, or t
  misc_feature (142)..(142): n is a, c, g, or t
  misc_feature (155)..(155): n is a, c, g, or t
  misc_feature (156)..(156): n is a, c, g, or t
  misc_feature (160)..(160): n is a, c, g, or t
  misc_feature (168)..(168): n is a, c, g, or t
  misc_feature (176)..(176): n is a, c, g, or t
  misc_feature (181)..(181): n is a, c, g, or t
  misc_feature (182)..(182): n is a, c, g, or t
  misc_feature (187)..(187): n is a, c, g, or t
  misc_feature (190)..(190): n is a, c, g, or t
  misc_feature (207)..(207): n is a, c, g, or t
  misc_feature (217)..(217): n is a, c, g, or t
  misc_feature (222)..(222): n is a, c, g, or t
  misc_feature (234)..(234): n is a, c, g, or t
  misc_feature (252)..(252): n is a, c, g, or t
  misc_feature (258)..(258): n is a, c, g, or t
  misc_feature (268)..(268): n is a, c, g, or t
  misc_feature (269)..(269): n is a, c, g, or t
  misc_feature (278)..(278): n is a, c, g, or t
  misc_feature (279)..(279): n is a, c, g, or t
  misc_feature (286)..(286): n is a, c, g, or t
  misc_feature (290)..(290): n is a, c, g, or t
  misc_feature (295)..(295): n is a, c, g, or t
atcatnataacctacntnnaaagngnactaaggttacaatggttacntncnttttnanagggaaaatttnnatttatnnactctagaatggacaatggtttagtcantaaaaaattnnaatgggatnttgaagaatgtntgnaaattcagggtgnngtgnagatgagntgggatgntgtgnnactgnttnagggttcctgggactgnatctcttggncactngctgaatcttgncatggaaggttttagctnatggcnagtggagatnnagaaaatgnnaagttgncttnggggntgtg

SEQ ID NO: 948 - DNA, 480 bp, Homo sapiens
  I.948 (N58282)
  misc_feature (2)..(2): n is a, c, g, or t
  misc_feature (190)..(190): n is a, c, g, or t
  misc_feature (436)..(436): n is a, c, g, or t
tnggcggcagagagaaggatttattcttgcacccagggtgtgcggaggagcccaagggatttggacctgtgttgacgtccggaagggcccggaacccaggaagctctgcccgcagagggtattcctctccctctgaagaccacctcaaagctcaactttatcacctccacgcatgagaccgccggcggtngaactaaaatctcaccatcccaattccagtttctgggaattgtcacctccattcgctctcattagaaatccagcttttttcacgaggtgaataacagggcagttgacagttcccaagttttctgtgtccaatcttcagccctggagggactcttctgctccaagtccagcgatcccgggagggggcccactggtccagtacggctcagtacccagccctgaatccaccagctgacgctggaagaantgggtcatgaagaactcagcacgaacgcagctgggtaacgaatt

SEQ ID NO: 949 - DNA, 494 bp, Homo sapiens
  I.949 (N58236)
  misc_feature (469)..(469): n is a, c, g, or t
cggtttaggtcctttattacaaggaaaacataaaaaatctttcaatcagtaagagcacataagtcttaatgatctagtacattttttagtactttgacttactagggtgattcaaagtttcaggaaaaagaaaattcccagtatcattttcttaatcttattaaacccaaacataagaatgccaaaaaatacagagctcacattttgctggcatacatttccaaatttttaatgcctccctgacaggtgaattttaaggataaaaaaagcagacactttcaaaacattccttgtgatgaagtagaaaaagccctggataagtggccagctacactggatttttgtctcaattcttccattaactttacagtcttcagcaaatcccttaactttgagcttctatatgtagtgacatcattataagtgctgtggtattaaaatgtgataaacatagatgaaagcattttgnaatgtttggaatactacataaatac

SEQ ID NO: 950 - DNA, 451 bp, Homo sapiens
  I.950 (N57763)
  misc_feature (164)..(164): n is a, c, g, or t
  misc_feature (308)..(308): n is a, c, g, or t
  misc_feature (390)..(390): n is a, c, g, or t
  misc_feature (402)..(402): n is a, c, g, or t
  misc_feature (420)..(420): n is a, c, g, or t
  misc_feature (427)..(427): n is a, c, g, or t
  misc_feature (442)..(442): n is a, c, g, or t
cgggatccaatctctttattgtcagggtcccctccctgtggccccccgccaaacctatagaaaaaacccaagcctgggagtgtcctggggaggggaggtagtatggggaaacccctgtgctctaccctctggcctgggcagtgcagacagggagggctcatggngaaggagtaggccagtaactccacctgcagaggacatggcactggctgggatgcgttgggggaggaggcgcctgctgccagctttcctctggtacccgctggggggtggcatccagggttgggtgcccggcttgaggcctgggnaagcgatgcctttcacctgctggtggccattgctcctgtcaaggctgcttacttgcaaagccccatcatccgggtcttgtgntcctggctgtgnttcaagttcttcctcgcngtgtttnaagaagcccttcctnatggccgtc

SEQ ID NO: 951 - DNA, 433 bp, Homo sapiens
  I.951 (N54579)
tgtagagacagggtctcactgtttttcccaagctgctatcaaactcctggtctcaagtgatccctttgccttggctcccagagcgctgggattgcagtgctgagccaccacatgcaggctataattttaaatgaatgatttatccaaagaattaacattcccttaagaaagaaaaaaaaatctatgacagaagcagggattgatattataatgttttagtcatttcttctcaatattctctttgtttcaaaaaattaatatctcctatttgcattcattttttaatacatgcattcaatatgtttataaatatgtttttaaaacagcgtagaaacgctatttttaaaaagcatagaaattatgaacatacctgtttgagtcactgctggcagctaaattcccctcccgggactatctccaggaaataccggtt

SEQ ID NO: 952 - DNA, 490 bp, Homo sapiens
  I.952 (N53946)
  misc_feature (272)..(272): n is a, c, g, or t
  misc_feature (474)..(474): n is a, c, g, or t
tttttttttttttttttaatattcattatccttcattaaaaattttaagttacaaacattttgattgatagtcagtcatggtggtgcacctagtccttactctgaaaccaaatatcctgccatctggggactttcaccagccctgtcggttatcttaccgcaacaccaaagaggaggctcagccttccccagttccctgagttcacattgattcaattctacagctcactagacctgcccaagacaggaccaatcaatgtcccgggacgcangagagggtggtggggccacacttagccatatggaaagacagtattctcagatgagggcaggacttttttgtgggagaggacgcctagctttcagtcctaaaggaagtgatttccccggtaaagggaaggtgattttgccaagggctgggagtctaaaggaagatggaactgtctttcagggggtctccagcagaccctctanagacccgtgttcctga

SEQ ID NO: 953 - DNA, 396 bp, Homo sapiens
  I.953 (N53133)
  misc_feature (376)..(376): n is a, c, g, or t
ctccattacagggtttttgccacttgctgtgaggatagggccctgagttcttacctctaaggtactggaggtttcagttgtagaatttccagtattattgcttgagtttgaagacactgtttcatttttactttcattatctgatttttcatcggaactcatacattcaatatctgcatcaaagcctgttggatatcccattgcctgcaataccttcaccgctacgtgaaagttttgctgttttcttggatggtcctgaggcttcatatgttgtgccatccacatctacagacattgtgaagactgggggcatgaacgggggccagactgaagataagaagctatactgaagcacaggcctgatctgaattaagcntcattagtggcattccataa

SEQ ID NO: 954 - DNA, 341 bp, Homo sapiens
  I.954 (AA186345)
  misc_feature (119)..(119): n is a, c, g, or t
  misc_feature (150)..(150): n is a, c, g, or t
  misc_feature (155)..(155): n is a, c, g, or t
  misc_feature (224)..(224): n is a, c, g, or t
  misc_feature (291)..(291): n is a, c, g, or t
  misc_feature (331)..(331): n is a, c, g, or t
caacattaggatctacagcgagaccacccctcctggctgagcaaagatgacatccgaagaatgcgactcttggcggacacgcagtggcagggctccggcgtgtgtcctctaggagcggngccgtttgctggtgctggaggggggcgcacntggcngtgtgctccgctgtggccgtagccctgtggcttcgtcaagcagccttggacatgagtgaggtgtttgcnttcacctagacaggatcgtggggctcaacaggacccgtgccgtctgtgagcaggaaagcagagttcntccaagatggcccgccatgcccatcattctttgggattcntctttagctt

SEQ ID NO: 955 - DNA, 293 bp, Homo sapiens
  I.955 (AA187222)
aataataactgaaatttctgttgtcagatgttcagactgacacatagcatgatgttagagaaaaatataaacaaatatttctcaagtagtttgtttttcaaaacctttttaagtatgcatacagtgctaagtcccattatagctacttggttaaagtcatttattttacgtattcatctacactgcctcattgctaaacgggcttgaggttgatgtgcttgatttaaaaacaaaaccaaaaatgcataaatatatctaacaccctagccagaagattcttttggtcattcatt

SEQ ID NO: 956 - DNA, 519 bp, Homo sapiens
  I.956 (AA182529)
  misc_feature (24)..(24): n is a, c, g, or t
  misc_feature (44)..(44): n is a, c, g, or t
  misc_feature (142)..(142): n is a, c, g, or t
  misc_feature (148)..(148): n is a, c, g, or t
  misc_feature (225)..(225): n is a, c, g, or t
  misc_feature (236)..(236): n is a, c, g, or t
  misc_feature (302)..(302): n is a, c, g, or t
  misc_feature (328)..(328): n is a, c, g, or t
  misc_feature (403)..(403): n is a, c, g, or t
  misc_feature (419)..(419): n is a, c, g, or t
  misc_feature (457)..(457): n is a, c, g, or t
  misc_feature (475)..(475): n is a, c, g, or t
  misc_feature (486)..(486): n is a, c, g, or t
  misc_feature (514)..(514): n is a, c, g, or t
ggtaccggaccatcacaacagccntattaccgtggggccatggncttcattctgatgtatgacatcaccaatgaagagtccttcaatgctgtccaagactgggctactcagatcaagacctactcctgggacaatgcacaanttaatncctggtggggaacaagtgtgacatggaggaagagagggttgttcccactgagaaagggcaagcttcctttgcagaanaagctttgggnttgaattcctttgaaagccagttcaaaaggagaacatcagttttaaggcaaggccttttgaagcgncctggttggattgccattttgtgacnaagatgtctgatttcgcttggacacagaacccgtcgaatgctgggctccctcccaagaacacgcgtctctcgganaccccaccgctgctgnagcgaactgctcatgctaggcaaggccaacttcctgancttcccctcattgttggnccaaaccagtntgcttttcctgttaaaaatgtcggtctnagcca

SEQ ID NO: 957 - DNA, 300 bp, Homo sapiens
  I.957 (AA181598)
  misc_feature (18)..(18): n is a, c, g, or t
  misc_feature (19)..(19): n is a, c, g, or t
  misc_feature (22)..(22): n is a, c, g, or t
  misc_feature (143)..(143): n is a, c, g, or t
  misc_feature (153)..(153): n is a, c, g, or t
  misc_feature (223)..(223): n is a, c, g, or t
  misc_feature (241)..(241): n is a, c, g, or t
  misc_feature (249)..(249): n is a, c, g, or t
  misc_feature (255)..(255): n is a, c, g, or t
  misc_feature (264)..(264): n is a, c, g, or t
  misc_feature (287)..(287): n is a, c, g, or t
tttttttttgagacgganngcntctgtcgcccaggccggactgcggactgcagtggcgcaatctcggctcactgcaagctccgcttcccgggttcacgccattctcctgcctcagcctcccgagtagctgggactatacaggnggcccgcacngcgcccggctaattttttgtatttttagtagagacggggtttcaccttgttagccaggatggtctcgatnccctgacctccatgatcnacccggcnttgggncttccaaangtgctgggatttaaagggggtcnaaacggggggccc

SEQ ID NO: 958 - DNA, 452 bp, Homo sapiens
  I.958 (AA156454)
tctgttttaagatcatttattagaacagtcattcagaagccattgagacatcaggcagcagaaaggaaggtgggatggagcaggccctgtgaaggaccaagaacaaagtaatagccacagttatgaaatttcattttattctgataaagactaatatatgcttgataacctagtgataatccataagtttggtatttcacaacattttttagaaagcacataagattaacattcaaataaggcattatagaaagttttataaagaatgaagtgtttcctataattcttttaaaaaaccttggttcatcttgaaagatcgatgaattttttaaatatcagaagaaaagggaaataaaattttccccccaaaacacataagaaccacttactggcacttgtattttaagtacctgggaaaaaaacggaacagatttttaaagggccataacgac

SEQ ID NO: 959 - DNA, 446 bp, Homo sapiens
  I.959 (AA150603)
  misc_feature (61)..(61): n is a, c, g, or t
  misc_feature (89)..(89): n is a, c, g, or t
  misc_feature (91)..(91): n is a, c, g, or t
  misc_feature (93)..(93): n is a, c, g, or t
  misc_feature (234)..(234): n is a, c, g, or t
  misc_feature (438)..(438): n is a, c, g, or t
ctccctctgcttcagagagtcaggtgagcatccataacctaacaggcagagcctacgcgantgtggatcaagtttcctgagcccggggngntnggagcctcatgatctcttatcttttgaggctgaggcaggtcacatgcaacaaattgtgaccctgctccccacaagtcatgcaaaggttttgaagagcttttaccgtggggcagatgaacttgtgtcaaccatgcacacccntgtgagaaccaagtacctgtgtttctaaggcgggcactcaaggtgaggggtgcattctggccaaagaaacaaaagctgtggtttcaggaccatgccgtgtgtagctgatctgtacgggacgtgtatgtaaggaagagcaatcatgatagataagaacagtgtgtgaagcagccctcacactagagtgtttggtcatctcttatnatgtaagg

SEQ ID NO: 960 - DNA, 416 bp, Homo sapiens
  I.960 (AA150801)
  misc_feature (120)..(120): n is a, c, g, or t
  misc_feature (388)..(388): n is a, c, g, or t
agtcaagtgaatattgatacatggctgaaaaagcatgaaaataaaatgaacacgtacgggaattactattaacataagcgataacatcaaaacatctggtaaaatgcagttaaaaaaacnacacaaatgaaatggaatgtaaaacattttcacagtattcaaagcttttgtaagagacttaggatctaaaagaggagtactacaggaagaaactagaggaaacgggaatttcatccatgtcctgtgtatctgctggcaacaggtcagaacggccagtatgttattccctgcaggctgcctagggtgctctcctcaaacagatcacctgagcctcctgcatctatgaagttatgacacagcaaccagttactcagagtctgatgagaanaaacagattttagggtttgggaaatggg

SEQ ID NO: 961 - DNA, 442 bp, Homo sapiens
  I.961 (AA150714)
  misc_feature (387)..(387): n is a, c, g, or t
  misc_feature (417)..(417): n is a, c, g, or t
  misc_feature (425)..(425): n is a, c, g, or t
  misc_feature (430)..(430): n is a, c, g, or t
  misc_feature (442)..(442): n is a, c, g, or t
aagatggaatagttttattcagcaaacaaaaaacttgctaattcagagtatcctctagtccacgtaatgtggtttagactacatttgcaaaattagggccttgacgctgaacaaaataaaatccagaggaagaactacagtatccaatcaaaaaggaagtactagcaaatgaaccagaataaaagactttattgtattccatacattcacaggtcacttccagatttagtaacaacactgcaatgctatgatgctgtgcggtcatttagcttaaaccacagtgtaagttggtagctctctcctgctctcttggcctctagatgtatcacaatacaattcctaactgtggcctggcaaccaatgcttatttcattgggattattttcnggactggggacatgagttcatcgcatcttncccagaantttanagtaccttcccn

SEQ ID NO: 962 - DNA, 431 bp, Homo sapiens
  I.962 (AA150696)
gacaaagtgcctcatgcaaccgggccctctctctgcggcagagtccttagtggaggggtttacctggaacattagtagttaccacagaatacggaagagcaggtgactgtgctgtgcagctctctaaatgggaattctcaggtaggaagcaacagcttcagaaagagctcaaaataaattggaaatgtgaatcgcagctgtgggttttaccaccgtctgtctcagagtcccaggaccttgagtgtcattagttactttattgaaggttttagacccatagcagctttgtctctgtcacatcagcaatttcagaaccaaaaggaaggctctctgtaggcacagagctgcactatcacgagcctttgtttttctccacaaagtatctaacaaaaccaatgtgcagactgattggcctggtcattggtctccga

SEQ ID NO: 963 - DNA, 232 bp, Homo sapiens
  I.963 (AA149226)
  misc_feature (172)..(172): n is a, c, g, or t
aaagtctctcaaaatgtttatttttgtcagaatagctgacaattttctgttaagtattttggtttattattataataagcatttcccccccttgaaaaatccattcaaaatatctcaaccattgaggtaaagcattttaactaaaaaaaaaaaaaaaaaaaaatcctaattngtttttaaagaaaaaaaaaaatcttaaaattcctttggcttgataaatagaaataatatc

SEQ ID NO: 964 - DNA, 400 bp, Homo sapiens
  I.964 (AA149225)
  misc_feature (2)..(2): n is a, c, g, or t
  misc_feature (4)..(4): n is a, c, g, or t
  misc_feature (210)..(210): n is a, c, g, or t
  misc_feature (315)..(315): n is a, c, g, or t
  misc_feature (384)..(384): n is a, c, g, or t
  misc_feature (392)..(392): n is a, c, g, or t
cntnagtctcatcctgaaaaagaaacagggaacagatgcagttcgaacattaagcaatgccgaggactatctcgatgatgaagactcagattaattcctttcctggagctttgagatctaaaacttctgttgcttttgccattccaaaactttgtctttgccagaaaagtgttggtaactataaagaaaattatatatgaacacggcagnttgcacctgtgtttgagtagaaccgtgtaaatgaattgttccacctttggtttgccagtaagtgacctggattcttggcacatttgtgttcaccaaagtagaacnagaagatattatttctatttatcaagcaaaaggggggggaattttaaagattttgttttttctttaaanacaaattnagggattt

SEQ ID NO: 965 - DNA, 404 bp, Homo sapiens
  I.965 (AA147583)
  misc_feature (391)..(391): n is a, c, g, or t
taaggagaaagaactctattggtgtcgtctgagcagccatttaaaaattggaatctaaaggatggttgctgatgtactgtgtggcctggtagaagtggggaaatatgagagatggaggaaaaacttgattatgtcttccatggcatatttactcttactttacttcgtgccaaatcaaatgaaacaagccgtcttacaagtcgttattgcctttaaaaatctgttccgtttttttcccaggtacttaaaatacaagtgccagtaagtggttcttatgtgttttggggggaaaattttatttcccttttcttcctgatatttaaaaaattcatccgatctttcaagatgaaccaaggttttttaaaaagaattataggaaacacttcattcntttataaaacctt

SEQ ID NO: 966 - DNA, 274 bp, Homo sapiens
  I.966 (AA063567)
  misc_feature (115)..(115): n is a, c, g, or t
  misc_feature (118)..(118): n is a, c, g, or t
  misc_feature (222)..(222): n is a, c, g, or t
  misc_feature (260)..(260): n is a, c, g, or t
tttttttttttgagctcggtattatatatttttttctcattaaaggtttaaaaccaaaagcggtttctctttgcagcaaatatacattaaaatagagtctctgtacagccaaggntcntgggccctggcttgccccatgtccctgcgcctccctggccaaacccaaaaataaatatagtgttattgctctgcagggcatagaggcagtgctctcctaccccntgaggaggctcgtttggggagctgattggggaagcccntggccaaccccaag

SEQ ID NO: 967 - DNA, 201 bp, Homo sapiens
  I.967 (AA035697)
  misc_feature (2)..(2): n is a, c, g, or t
  misc_feature (13)..(13): n is a, c, g, or t
  misc_feature (24)..(24): n is a, c, g, or t
  misc_feature (35)..(35): n is a, c, g, or t
  misc_feature (37)..(37): n is a, c, g, or t
  misc_feature (40)..(40): n is a, c, g, or t
  misc_feature (179)..(179): n is a, c, g, or t
  misc_feature (185)..(185): n is a, c, g, or t
  misc_feature (197)..(197): n is a, c, g, or t
anattcggcacgnggggccccggngtagagttaancngcngcgtgcgggcaggctgctgctcacgctttatgctcctccgccagacagcgggcaaagtgctggcccatttctatggggtgaagctggagggcaaggtgccatgcacaagctgttcttggagatgctcgaggccatgatngacttnaggcaaagggtnggac

SEQ ID NO: 968 - DNA, 559 bp, Homo sapiens
  I.968 (AA017507)
  misc_feature (48)..(48): n is a, c, g, or t
  misc_feature (53)..(53): n is a, c, g, or t
  misc_feature (56)..(56): n is a, c, g, or t
  misc_feature (66)..(66): n is a, c, g, or t
  misc_feature (67)..(67): n is a, c, g, or t
  misc_feature (68)..(68): n is a, c, g, or t
  misc_feature (69)..(69): n is a, c, g, or t
  misc_feature (70)..(70): n is a, c, g, or t
  misc_feature (73)..(73): n is a, c, g, or t
  misc_feature (88)..(88): n is a, c, g, or t
  misc_feature (100)..(100): n is a, c, g, or t
  misc_feature (103)..(103): n is a, c, g, or t
  misc_feature (108)..(108): n is a, c, g, or t
  misc_feature (133)..(133): n is a, c, g, or t
  misc_feature (301)..(301): n is a, c, g, or t
  misc_feature (324)..(324): n is a, c, g, or t
  misc_feature (363)..(363): n is a, c, g, or t
  misc_feature (402)..(402): n is a, c, g, or t
  misc_feature (407)..(407): n is a, c, g, or t
  misc_feature (424)..(424): n is a, c, g, or t
  misc_feature (439)..(439): n is a, c, g, or t
  misc_feature (495)..(495): n is a, c, g, or t
  misc_feature (503)..(503): n is a, c, g, or t
  misc_feature (521)..(521): n is a, c, g, or t
  misc_feature (527)..(527): n is a, c, g, or t
  misc_feature (536)..(536): n is a, c, g, or t
  misc_feature (546)..(546): n is a, c, g, or t
  misc_feature (551)..(551): n is a, c, g, or t
cctggggtggtttcccaatcttaaagaagcagaaggatattaaagtgngcctnccncttggacccnnnnntgnatcatatcacttggngagcctaataanacncagantcagtaggttccttccttccctganagagttgatttggtaggtctgatgtggggacctagggaaactgtttataccagttttccttttaatgaggggatttccaggatgctggacatttagtgctgaaatggggaatgtgtctggtaagccaagacaggtcggtcacccttgttggcacctgaaaatttgcgngattatgaggtttcaggtaatgntgaggcatcttatccagagaccacagcttgaaaactccntgggataaacacttacagatacaattttctaactcttanaaatnaacctaaagtaaatgtnaaaataaaaagttanaaaaaaaaaggtcaaactgttcatttaaaataattcctgggctgagcacgggtggntcaccccncgttaattctcagcaatnttgggnaggttggangtggggcggnttccnaaggttca

SEQ ID NO: 969 - DNA, 463 bp, Homo sapiens
  I.969 (AA017301)
  misc_feature (441)..(441): n is a, c, g, or t
ttgtttttatcttttttttaaaggtgcctctcaaagtgctgggattacaggcgtgacaccagtgcccagaccattttagcctttttcttaccagaaccacactcagcttggggcttaagatggataggctaagaggggaactaagcttgtaactgttgcggagacaggcactccaggtgacagttcacaggccctttcaagtgactggagccatgggatcatttctctccaaggatttgtgagtagaagtgatgtgtgtcatctcccaggtgaacaggttcggccttccctacatgctccaagggtacagtgaagagcagagctacaacagagatggggcctggatccctgaatcactgtatggagcagagtgcaaaccaatattataagcaacagcaacaccaacacaggacaatcgactgtttagtaaataattttttntttttgagtcagggtcttgttc

SEQ ID NO: 970 - DNA, 177 bp, Homo sapiens
  I.970 (AA017300)
  misc_feature (173)..(173): n is a, c, g, or t
tattcggcatgaggaaaaaaaaaaaaaggtaatccagaaaagtacaaaaaagtgaagattacccgtaatcccaccaccctgaatttatcatatgtagcattttacatatgatatatatacatgtttataattaagtacatgtttactctgtaaagctttctaaaagttaatcnaata

SEQ ID NO: 971 - DNA, 439 bp, Homo sapiens
  I.971 (AA017141)
  misc_feature (387)..(387): n is a, c, g, or t
  misc_feature (439)..(439): n is a, c, g, or t
ccttgagatcacggtacacaatctttccggaatgtagatagtccaaggcagagacaatttctgcaccatagaaacgtgtgcggtcctcagagaacacccgctctctcgacaaatggaaaaacagctgcagggtaaacagcagggacaggattgtaataattactgatttagtgggggaaattaacacaaacataaaacacctctcatcaccatattgtgatgatagatagtgtactctcagtggacactgagcactcttagacagcagctggcttatcttttccaggtttccaaggggaaactgcgagctgttaaatcagcgttttaatcaatataccaatccttggtttaaggcatttctgcttgctacccatttaaccttccagntaccagaaggaaaagggtatggcatcatccgatttgcaggtttcccccccan

SEQ ID NO: 972 - DNA, 463 bp, Homo sapiens
  I.972 (AA017140)
  misc_feature (390)..(390): n is a, c, g, or t
  misc_feature (426)..(426): n is a, c, g, or t
  misc_feature (432)..(432): n is a, c, g, or t
tattttgcatggcagaaattattttaacctggaaaacatggctccttctactttctatccttgttaggctggtaatacattgataatatatatctaactatatgaaatgaatgaattttttaaaatatccctgagtaattgtataaatgacttgatttttcacatactgtaattggattatttggaagacatacttaacatttctgtaatcagaatgccttttagaatagatcatgtgttatagttttaactgacaaccttttttaccttggtgttttataaaatgatgatgcagtcccaattccgtagcatatgagatttgataaaataccagtaatatagtaggaagccattaaagtttagagactgccaaaataatttttagttttnaatataattaattggttggggcctaccccttttttngggggnccataggtgataattttcccccccccccccg

SEQ ID NO: 973 - DNA, 452 bp, Homo sapiens
  I.973 (AA016317)
  misc_feature (2)..(2): n is a, c, g, or t
  misc_feature (5)..(5): n is a, c, g, or t
  misc_feature (16)..(16): n is a, c, g, or t
  misc_feature (24)..(24): n is a, c, g, or t
  misc_feature (27)..(27): n is a, c, g, or t
  misc_feature (49)..(49): n is a, c, g, or t
  misc_feature (51)..(51): n is a, c, g, or t
  misc_feature (71)..(71): n is a, c, g, or t
  misc_feature (82)..(82): n is a, c, g, or t
  misc_feature (365)..(365): n is a, c, g, or t
  misc_feature (406)..(406): n is a, c, g, or t
antgnatttgacttcntttaatanagnatgactcacttctgatacttanancgtaggcattatccaattanatgagacttgnaaggagtccatatccagtcacctgctttgcaaattgtagatgtcctatgatgaattttaagtcaccttgaactttagccaaatatgcctcataagctgagtttcatgttcattgctggtgtccaaatgtccacagttgaattctcaggtttgtggtgaacagatttggtaacttctttttaggaagcatctgctgctgctcttgtttctttattttacttattttaaagatgattcgttaggtaaggagcagaaagtcactgaggcctttgtataaggtaatnaatttaccaccacaaactgatatgctagaaatatcaccttncatcctttctgattttggttgttttaaaaatgcatttttttcaatt

SEQ ID NO: 974 - DNA, 478 bp, Homo sapiens
  I.974 (AA015955)
  misc_feature (4)..(4): n is a, c, g, or t
  misc_feature (23)..(23): n is a, c, g, or t
  misc_feature (27)..(27): n is a, c, g, or t
gcgnccgccgtcccgacgcgcantacnagccaggagtccaaaactacttacctggaagaccttccaccaccccctgagtatgaattggccccgtccaagttagaagaggaagtggatgatgtctttctcattcgagctcaaggactgccctggtcatgcactatggaagatgtgcttaactttttttcagactgcagaatccgcaacggtgagaatggaatacattttctcctaaacagagatgggaaacgaaggggtgatgccttaattgaaatgggagtcagagcaggatgtgcagaaagccttagagaagcaccgcatgtacatgggccagcggtattgttggaagtatattgagataaacaatgaagatgttggatacctttaatgaagagcttgcaggttcaaatcttccgcctgtggtaaatggatgggtgttggttcgttttgagaggactttccttatagtttgccattg

SEQ ID NO: 975 - DNA, 428 bp, Homo sapiens
  I.975 (AA015954)
cataatcccaaactggatctttcatttcttcttctaaacagtccactatgaaacttttcttagaagcaattaacccaaaacaccaaaatcatttccctagcagttgctgctaataaactggaactgtatatcccaagtccaagaaagatgtgcaaatgaaatgcttcttgcttcacccttattatctggagcccctagagtcttattttccttttggacatgaattcaggaacagttcaatatacctatgatgaacgtgggaccgatccttgagcatcgctgcaacagcatcctcatgggtctcaaagtgcacatcagcttctccagtggccttcccactgggagctggtattcccatgggtgattcctaacagggcttgagtgggagcaaaaaagtttataatgtcctggggcatttggctttggga

SEQ ID NO: 976 - DNA, 442 bp, Homo sapiens
  I.976 (AA015922)
aaatattaactttctttaccaacactttttcaaggagccttccctcacccactaaaccggggtaggggtatgcttcacatgtatcaggtgccacttcttcacagcggaaacacattccattgtgagcacatttgccttctggctttatctcttgtcctccaccggacaatgcattgaccaatgttctcatgtgtgcagctgtgtgaccttgggcaagttactgaaccttgctgggtctttacctccctcctttacatctgcaaagggaggacaaagggctgctggaggatgagatgagatcatatcagtcagtgctccgttaaggtaaactctattttaccctcactggctgttgaggttacaagttgccaggtggggccagttctggtgggatgtgagtttggggaaaagggtcgcatttgaccgtccttagcccacatgg

SEQ ID NO: 977 - DNA, 463 bp, Homo sapiens
  I.977 (AA015921)
agaccgagtagtgccgagttccttgaagaaaattattttatggacaatgtatgagtctgttttcgtgctgctgataaagacatacccagactcacagttctacgtggctggggaggcctcacaatcgtgatggaaggtgaaagacacgtcttacatggccacagggagaatgagagtccctgtacagaaccatcagatcacatgagacttactcactgccatgagaacagcatgggggaaaccgcccccatgattcagttatctcccaccgggtccctcccacaacacgtggaaattatgggagctataattcaagatgagatttgagtggggacacagccagaccatatcagacaagaatcatcttctcaaatttgggggtgcgtggctggagtgcacacacctggtgaaaactggcggggatgaatgcatttacaactttcctgggaacaagttcattttt

SEQ ID NO: 978 - DNA, 443 bp, Homo sapiens
  I.978 (AA011293)
  misc_feature (409)..(409): n is a, c, g, or t
  misc_feature (424)..(424): n is a, c, g, or t
  misc_feature (443)..(443): n is a, c, g, or t
cataagccatgaatttactatctcaggtagactgagcatttggataattctcattctccagaaatcccacaggaaggaaaaaataaataaatttatatatattcatataaagacttttatctattgtgcaaagagagggtcatctggctccccagaaggttctcaaccccatcaagactgtccattttacatctctagctccagttcttctcagagagtaaaagtgctccaaaggcctgtgatcatgggtactgattaagggctgcagactcttcagatccagttaaatccctggtgtttgagctgtgtgggagctgtggttgcttgcttcctggctttgctggaggtcctgccgcaaaccctgcagcagctggtttaggagtgtaaggtggctgtctctgcgaggcanaggcaggggtgggangcaaattccctttaatacn

SEQ ID NO: 979 - DNA, 299 bp, Homo sapiens
  I.979 (AA010857)
  misc_feature (24)..(24): n is a, c, g, or t
  misc_feature (177)..(177): n is a, c, g, or t
  misc_feature (178)..(178): n is a, c, g, or t
  misc_feature (179)..(179): n is a, c, g, or t
  misc_feature (180)..(180): n is a, c, g, or t
  misc_feature (296)..(296): n is a, c, g, or t
catgcggctgtcggtcgctgcagnatcatcccatggccgcgtatttcgccgtatgggcctcggtcccgagtcccgcatccatctgttgcggaacttgctcacagggctggtgcggcacgaacgcatcagaggcaccatgggcgcgtgtggacgaaatgaggggctacgcggagaaannnnctcatcgactatgggaagctgggagacactaacgaacgagccatgcgcatggctgacttctggctcacagagaaggatttgatcccaaagctgtttcaagtactggcccctcggtncaa

SEQ ID NO: 980 - DNA, 414 bp, Homo sapiens
  I.980 (AA001016)
  misc_feature (302)..(302): n is a, c, g, or t
  misc_feature (334)..(334): n is a, c, g, or t
  misc_feature (383)..(383): n is a, c, g, or t
tgcagatttcaatgaattttcttcatgtctgtatcagaaaaggctctaaaggtagatttaataattcacttgcagtgtcaaaatctgcacgatttataactctgttggtcatgaaagaaggaaagcaaagaacaccctgttgggagtcttgagaccttgatcatctactcctggtgcttatggggtgtgtgatgtgggatgagcctgtcctctccagggaccttggtttccatagaattatctgcagagatctctgtggtgtcctttcactctgcctctgggagccacgagctgctgaaganttctctaagtgaatgtcctgacaccattactngtcattcacctaaaccctcctttaacgatctcctcaaaggcccttttancagttcccaagtttggggtccagggaaaaag

SEQ ID NO: 981 - DNA, 563 bp, Homo sapiens
  I.981 (AA001392)
  misc_feature (12)..(12): n is a, c, g, or t
  misc_feature (17)..(17): n is a, c, g, or t
  misc_feature (27)..(27): n is a, c, g, or t
  misc_feature (443)..(443): n is a, c, g, or t
  misc_feature (462)..(462): n is a, c, g, or t
  misc_feature (484)..(484): n is a, c, g, or t
ggaccccgcagngatgngggctcctgnccaagaccccgctgagccgcccagtcaagagaaacaacgccaagtaccggcgcatccaaactttgatctacgacgccctggagagaccgcggggctgggcgctgctttaccacgcgttggtgttcctgattgtcctggggtgcttgattctggctgtcctgaccacattcaaggagtatgagactgtctcgggagactggcttctgttactggagacatttgctattttcatctttggagccgagtttgctttgaggatctgggctgctggatgttgctgccgatacaaaggctggcggggcgactgaagtttgccaggaagcccctgtgcatgttggacatctttgtgctgattgcctctgtgccagtggttgctgtgggaaaccaaggcaatgttctggccacctccctgcganctggcgcttcctgcagatnctgcgcatgctgcgggatggancgggagaaggtggcacctggaagcttctggggctcagcatctgtgcccacagcaaagaactcatcacggcctggtacat

SEQ ID NO: 982 - DNA, 435 bp, Homo sapiens
  I.982 (W96107)
  misc_feature (156)..(156): n is a, c, g, or t
  misc_feature (343)..(343): n is a, c, g, or t
ttttactttgaaattactttaatttagaaatagaaaacatcttgaaaggaaaaaaaaaaacccacaaaacatacaggcaaatttgtattctgtgagtttctcacaccctcacacttgttcaccaatctctaagatgaaaaactctcttccaaaatngtattcagccaccaacaatgatgttattaataggaatatgggatcaatttcacaaagaagccaatgaatcccattatagcaaatcctattgctgttgccatggaatcttctggaattcttttctatcaggtttagtgcatcttttaaccagccgaatggagtcccttacaaactggccggacttggntcaacaaactgcattacctgatccatggactggcctacccaaccggacacctaaaatggccaggggacacgtagcactggaggcctcgtgcc

SEQ ID NO: 983 - DNA, 408 bp, Homo sapiens
  I.983 (W96106)
ctccagtgctacgtgtccctggcattttaggtgtcggttgggtaggcagtcatggatcaggtaatgcagtttgttgagccaagtcggcagtttgtaaaggactccattcggctggttaaaagatgcactaaacctgatagaaaagaattccagaagattgccatggcaacagcaataggatttgctataatgggattcattggcttctttgtgaaattgatccatattcctattaataacatcattgttggtggctgaatacattttggaagagagtttttcatcttagagattggtgaacaagtgtgagggtgtgagaaactcacagaatacaaatttgcctgtatgttttgtgggttttttttttgtcctttcaagatgttttctatttctaaattaaagtaattt

SEQ ID NO: 984 - DNA, 495 bp, Homo sapiens
  I.984 (W95979)
cccaacatggcggctccccaagacgtccacgtccaggatctgtaaccaagagattgtcaaatttgacctggaggtgaaggcgcttattcaggatatccgtgattgttcaggacccttaagtgctcttactgaactgaatactaaagtaaaagagaaatttcaacagttgcgtcacagaatacagccagttctctatcaaagggcatttatttggactgcttccacatttttttttaagctaacttattccctgacagacttttcttcaactcagcatgacttcaactctccaactacacctgttaccttcagtgacctggagcagttggctaaagagcaagacaaagaatcagagaaacaacttctactccaggaagtggagaatcacaaaaagcagatgctcaggaaaaccaccaaagagagcctggcccagacatccagtaccatcactgagagcctcatggggatcagcaggatgatggcccagcaggtcca

SEQ ID NO: 985 - DNA, 458 bp, Homo sapiens
  I.985 (W94872)
ttttttttttatcttacaaaatcaaatacattttattctattaaataaaatcaagtttattcaaggaatgaccaggagttttcatcacctttcttcctacctcttctctcttccctccaccagatctggcatttaagggcacgatgggagcgggagacaggaggggcatccggtcctggaggctggactttaagtgctccacgcagcagcggcctcccatagtgcacaatggtggaaggaggcggttcgtatgtccccagggcggcatcccaatgccagaccttcctcccatggctctgttcaccctttacaagccagctacttgcagaaaagtggggcactggtgttccatccaacctgcaggcaactggtgcaaacggaggggtgtgtggctcagcttagcagcctagagctcaggaaccaggacagatcctgaaacaggagctgaaagggccagg

SEQ ID NO: 986 - DNA, 371 bp, Homo sapiens
  I.986 (AA131993)
aaacaaaaaataagtatgctgctttaaggcaagtgggcatccatcagttaagagactcaaacatgaattaaatgcaaacaaatatgaaaccaaggaaggctatgaattaagtaaaaattttaacattttgggtgaagtggaagccaaaaagtcaaaacccagaggatttggaaagggtgattcttgacaaatggtagtgaacttcacagtccagaccatggctggtcactggctgtccgtctgctattaaagtttttgtagttttggtaggtttgagagcggtaactaacccgtggagatccctgttcagctggcaaaccgttttgggaaacttgttctcccttttgaagtatcccactgctgctgggact

SEQ ID NO: 987 - DNA, 399 bp, Homo sapiens
  I.987 (AA131826)
  misc_feature (3)..(3): n is a, c, g, or t
  misc_feature (5)..(5): n is a, c, g, or t
  misc_feature (6)..(6): n is a, c, g, or t
  misc_feature (8)..(8): n is a, c, g, or t
ggncnngncttctcccgagccgagcacgaaggtttcagaggaagccgagtcccagcagcagtgggatacttcaaaaggagaacaagtttcccaaaacggtttgccagctgaacagggatctccacgggttagttaccgctctcaaacctaccaaaactacaaaaactttaatagcagacggacagccagtgaccagccatggtctggactgtgaagttcactaccatttgtcaagaatcaccctttccaaatcctctgggttttgactttttggcttccacttcacccaaaatgttaaaatttttacttaattcatagccttccttggtttcatatttgtttgcatttaattcatgtttgagtctcttaactgatggatgcccacttgccttaaagcag

SEQ ID NO: 988 - DNA, 458 bp, Homo sapiens
  I.988 (AA131525)
  misc_feature (1)..(1): n is a, c, g, or t
  misc_feature (368)..(368): n is a, c, g, or t
  misc_feature (390)..(390): n is a, c, g, or t
  misc_feature (432)..(432): n is a, c, g, or t
  misc_feature (440)..(440): n is a, c, g, or t
  misc_feature (453)..(453): n is a, c, g, or t
ntttttttgaagcctcagtcataaatttaatcaattctaggttgaatgctaagaaaagttttaattgtgcaaatgtggtacataacatttcaaatataagtggaaggatcatcagtagtgttatcaaaatgcataatacagaaactttttaagaaaggataaaaaattacactcaggacccataactcttcctcattataagcatatgtagtgattcattcatgcaggtttttatatgtagataggatttttttttccttttcaagaattccattgtagccatgagatgaaaaatgtattatggtaatggtatagctttcgtctattttgctttagtgttaggtttgctaaaagcttatttaaaattnccaactgacataatgtgtttcnataaggaggacgccggccgtggtccataccccttcccctgtnattggttnggtaccaaatctnctggc

SEQ ID NO: 989 - DNA, 442 bp, Homo sapiens
  I.989 (AA131311)
  misc_feature (24)..(24): n is a, c, g, or t
  misc_feature (134)..(134): n is a, c, g, or t
  misc_feature (408)..(408): n is a, c, g, or t
  misc_feature (413)..(413): n is a, c, g, or t
ctctcttctgcttctgtggatgtnatgccctggaggcccagggagctgattcccctaaaacttatgattaccaggatggaaaggccttggtcccatggcactgggtggggctgggggatattctctactttgancacttctccaaagaggcagaagggccacagagttctgccaccctgaacatttttctcagttccctgggagtttttgtggcagcctttgtgggagtggtctgactggctgttgacctagcatgcttcataaatcagggtttggccctctgcttggagcatccaaccccttgaactcaaacctgtcgagcaaggggttaagagttctgttctcttgccaacctggctgggcaaaagcctgtgccatctttcactgggaggcaaatatgtttttcancctgncatatgacacctatgagaaagcgttcaca

SEQ ID NO: 990 - DNA, 465 bp, Homo sapiens
  I.990 (W92628)
gaaaataatgacagcaaaagacttgtaggagaaaacacaaatcgtgctacattaaattatactacaagagacttttataatgaaaagctagaggaaataaaggaaaagaagaaattctgtaaaacatatatagaagaccttgtgaaggaagccacagaaatcaacatgaaaaatcgaggctttgcagaagctttggccacagatgttcattgagcttgttagggatgcagtcatagaaattcgcaataaaaattcctatatgaagctctgcctacagcagataacagaccaaaaataaaaatggcctttagttacagttgattttggcagttttattttttgaaggttgaaaatatgcaggttatacatgttaaaacaacaacaacactatcctataaactagaaagactagtataaaagcattattgcccactgttctcatagctaaaagttaagaaggaaaga

SEQ ID NO: 991 - DNA, 427 bp, Homo sapiens
  I.991 (W94555)
gactaatttgttagtaagtttattcttcactcataaaaagaacatatttttggctttgaaatcatgacataaaataaaaagggaaataactgaaaattatcagctaaaagtaggtagatgcagctcatgctgaatcatcagcaaatactacgtgctttgggctatagcagggcaccaatcaaagcaagaaccaaggatgcagtgccacgccatctctgaaaactgtttagttcccaaaggttgtttggtcctcacatacaggcaattaatccttcctttctcctgctttccttctttccttcttaacttttaagctatgagaacagtgggcaataatgcttttatactagtctttctagtttataggatagtgttgttgttgttttaacatgtataacctgcatattttcaaccttcaaaaaataaa

SEQ ID NO: 992 - DNA, 399 bp, Homo sapiens
  I.992 (W93568)
  misc_feature (359)..(359): n is a, c, g, or t
cctttgggtcctctaactgtttggcatgaagaacatgttttaaataaaaatgaagctactactaaaaatttaaatggccttccaataaaagaagtcccatcacttgaaagaaatgaaggtcgaattgctcagccccaccatggtgtgccatatttcagaaatatcctccagtcagaaactgagaaattaacttcacattgcttcgagtgggacaggaaacttgaattggacattccagatgatgctaaagatcttattcgcacagcagttggtcaaacaagactccttatgaaggaaaggtttaaacagtttgaaggactgggttgatgattgtgaatataaaccgagggtataaaggngactaccctgtacaggtctgggatggggttttgggggtat

SEQ ID NO: 993 - DNA, 468 bp, Homo sapiens
  I.993 (W93717)
  misc_feature (398)..(398): n is a, c, g, or t
  misc_feature (419)..(419): n is a, c, g, or t
tgttagtattaatatcatctgctactccaccagcaagaagaggcaaactcattctctcactggataaacaatccaccttcaagtctgtcttatttacaacatgattttcttcaattaaatctggtaatccaggacactgagcatcttctatgctgctcctcgctttcaggaatactcaaaaacaaagtcttcttcacatgttcacttttcgtattctgaggaccggcattttctggtgatgtagtttgttgtggaatgcccatctcatttctactctgagatacagctttgttgacagacttaggtgttccaagtctttgagaagggccttcagaagagacagaaagtcctgagaataatttaacaggactttcaactctggaaaaatccagcatcgnacactattttatcaacttccnttgggtatcacagaaactggcggtttcagcacattcttcccggcccaat

SEQ ID NO: 994 - DNA, 386 bp, Homo sapiens
  I.994 (W60352)
  misc_feature (36)..(36): n is a, c, g, or t
  misc_feature (62)..(62): n is a, c, g, or t
  misc_feature (66)..(66): n is a, c, g, or t
  misc_feature (96)..(96): n is a, c, g, or t
  misc_feature (98)..(98): n is a, c, g, or t
  misc_feature (100)..(100): n is a, c, g, or t
  misc_feature (103)..(103): n is a, c, g, or t
  misc_feature (104)..(104): n is a, c, g, or t
  misc_feature (150)..(150): n is a, c, g, or t
  misc_feature (155)..(155): n is a, c, g, or t
  misc_feature (176)..(176): n is a, c, g, or t
  misc_feature (238)..(238): n is a, c, g, or t
  misc_feature (354)..(354): n is a, c, g, or t
gcaagagtgagcatgagtgtgtgcgcgcgctggacngcgaactggccgtgagcgggcacctncacntcctcggtctccgcccgcacggtggggagntntnctnngcgtagagcgggaccagtttcctcgtaagcgaccagagccgtttcnccaangaagtgctgccccagtatttnacgcatagcaacatggcgagcttcgtgcgccaactcaacatgtgtgagtccctacggccggncggggagcggggatgggggactcggtgccggggatggggcgacccacgccccaacgccccactccccagacggttttcggaaggtggtgagcatcgagcagggcggcctgcttagncggaagcgcgaccacgtcgagttccagcaccc

SEQ ID NO: 995 - DNA, 547 bp, Homo sapiens
  I.995 (W25607)
  misc_feature (131)..(131): n is a, c, g, or t
  misc_feature (170)..(170): n is a, c, g, or t
gtgaagacgagaagaaggcaactgtctccaatccagacggagatgccaggcacagccttctgtcacaaccctcagaaggaaccaaccctgccgacaccttggccttgtacttctggcctccagaaccgcangaaagtacatttctgttgcttaggccgctcagcctgtgnactttgttacagcttctcacccagttcaggcccttttaattgattgctgggcctttgcagttgtttttgcttctaatatattcatctctcaatttatttctggaggctgccacccgaggggcaagaacttcaattgtgtccctaaatgggaaaccttgctgggatcatgtggtctacagcacaaggttgctaaagcatcttctgccagaattctgtgagtatctggttaggtgggtctggaatatactggagtttaaaaaaagttaaatagggttctttactgcaagatggtttcagagactttaaatatggctactctggctgtatgaaacctccaaggcagggaaaatccttaataaaaatggtggttttctgga

SEQ ID NO: 996 - DNA, 368 bp, Homo sapiens
  I.996 (W25472)
  misc_feature (38)..(38): n is a, c, g, or t
  misc_feature (39)..(39): n is a, c, g, or t
  misc_feature (40)..(40): n is a, c, g, or t
  misc_feature (209)..(209): n is a, c, g, or t
  misc_feature (228)..(228): n is a, c, g, or t
  misc_feature (240)..(240): n is a, c, g, or t
  misc_feature (253)..(253): n is a, c, g, or t
  misc_feature (258)..(258): n is a, c, g, or t
  misc_feature (270)..(270): n is a, c, g, or t
  misc_feature (294)..(294): n is a, c, g, or t
  misc_feature (327)..(327): n is a, c, g, or t
  misc_feature (347)..(347): n is a, c, g, or t
  misc_feature (356)..(356): n is a, c, g, or t
agatgctgcaggaccagagagcgtccttgccgagcacnnncaggacctgcggaggaagcccttctaccctgccctcatccgctacatgagctctgggcctgtggtggcatggtctgggaagggtacaatgtcgtccgcgcctcgagggccatgattggacacaccgactcggctgaggctgccccaggaaccataaggggtgacttcancgtccacatcagcaggaanattatccacgcnatcgactccgtgnagggnggcccagctgangaatccaagctgtggttccaagancagtgaagctgggtgagctgggcagacgggggncaagcacatgaagcatccanccaagcctnaggtcaaagctt

SEQ ID NO: 997 - DNA, 304 bp, Homo sapiens
  I.997 (W19320)
  misc_feature (206)..(206): n is a, c, g, or t
  misc_feature (242)..(242): n is a, c, g, or t
  misc_feature (272)..(272): n is a, c, g, or t
tttttgtgcaaaacttcctctttactgttcaactccttacaacttgcataaaggcgtcatttctacctcagagctgggggaagtcataattagtgtaccacccatgtgctgggcaagtgaattttaatgcctcccctttagaggagaggttatgataattgtgaagacccccccccaccacaaaaggttgtcccggcactttggtncaaaaaaaggattggtcaaatccttgtgctggcttnggggtacaggaaaggcactgaaatttggtnggccaaaactcctctggggcctgggggttggg

SEQ ID NO: 998 - DNA, 444 bp, Homo sapiens
  I.998 (W02693)
  misc_feature (172)..(172): n is a, c, g, or t
  misc_feature (248)..(248): n is a, c, g, or t
tcagaaacacattttataagatttcctgcctggagattcatacagcagagtagcatattaaagtctctgaaacatcttgcagtaaagaaacctatttaacttttttaaactcagtatattccagacccacctaaccagatactcacagaattctggcagaagatcgctttanaaccttgtgctgtagaccacatgatcccagcaaggtttcccattagggacacaattgaagttctgcccctcgggtnggcagcctccagaaataaattgagagatgaatatattagaagcaaaaacaactgcaaaggcccagcaatcaattaaaagggcctgaactgggtgagaagctgtaacaaagtgccacaggtggagcggccttaagcaacagaaatgtactttcctgcggttctgggaggccagaagtacaaggccaaggtgtcggca

SEQ ID NO: 999 - DNA, 471 bp, Homo sapiens
  I.999 (H96798)
  misc_feature (361)..(361): n is a, c, g, or t
  misc_feature (440)..(440): n is a, c, g, or t
  misc_feature (453)..(453): n is a, c, g, or t
cattaaataatccatcatcacattagtacaatacaattttatattttttaaatatactatatatgttaaggataaggggtgaagttttcttcctttgtaatacctgttcaagagtttaatggattaggagattagtgttaaccttgaggataaaagtacaaatttgtctcattaggacacttctaccaagcatttcttaaggctatagtttaacatttggtttcaaaaagaaaaaaaaaggtttcatttaaaaaataatttagtgaattacattctttcataacttccaccctaattagttacaaagataagtctaaagattcttagttttgtgtactaatttacatttatatttaaaggnttaattttacttgtatcttaaaaccaagaattttaatgttgggaaaaaagagaacctaaatacatttgtataaagggcngtaaatggtcccntggccaaatgcccccgtc

SEQ ID NO: 1000 - DNA, 459 bp, Homo sapiens
  I.1000 (H96557)
  misc_feature (14)..(14): n is a, c, g, or t
  misc_feature (18)..(18): n is a, c, g, or t
  misc_feature (19)..(19): n is a, c, g, or t
  misc_feature (49)..(49): n is a, c, g, or t
  misc_feature (102)..(102): n is a, c, g, or t
  misc_feature (137)..(137): n is a, c, g, or t
  misc_feature (189)..(189): n is a, c, g, or t
  misc_feature (221)..(221): n is a, c, g, or t
  misc_feature (256)..(256): n is a, c, g, or t
  misc_feature (360)..(360): n is a, c, g, or t
  misc_feature (366)..(366): n is a, c, g, or t
gaaggagaagtggnatgnngggggagctcggcgtcccgctccctccgcngctcatggcgacgactctcggcacatccgggaccctccggccgtggcggcacngcgccggctgctcgggccccagcccggccgctgtngtgactccgccgcgcctcgccgtcgcccccgtgacgcccgccgcccccgccncccccgccgccgggacatgtctaaccccgganccggaagaacgggcccgtcaagctgcgcctgacangtactctgtgcaaaaaacctggtgaaaaaggattttttccgacttcctgatccatttgctaaggtggtggttgatggatctgggcaatgcattctacagatacngtgaanaatacgctttgatccaaagtggaatcaagcattatgacctgcagtgaagtgaaatctgcaagagttcttgctcgctcaaggcctgcataaaag

SEQ ID NO: 1001 - DNA, 427 bp, Homo sapiens
  I.1001 (H96392)
  misc_feature (80)..(80): n is a, c, g, or t
  misc_feature (139)..(139): n is a, c, g, or t
  misc_feature (259)..(259): n is a, c, g, or t
  misc_feature (321)..(321): n is a, c, g, or t
  misc_feature (343)..(343): n is a, c, g, or t
  misc_feature (364)..(364): n is a, c, g, or t
  misc_feature (381)..(381): n is a, c, g, or t
  misc_feature (404)..(404): n is a, c, g, or t
ttacagaaattttatttgagatctcaagtccttataaaaagtgcattacatcaagattgcaaaagacactttttaaatgngagacttctatctattcatccattttaccctatgattcatttcctaccctaacagaaangatgaaacagtttttctttcttccttttcttcctcctgctttgaaagggcaactgtcatgagggatatcttaacagaatgtgccaattaatccttgccaggagagcagtagcttcctacnggctaaatttagagagcccttggcattccttttggtgtggctcaaagattattacaagctgnatctaaaagattgcaacctacnacttggcaatctggtctcccngggctcctcttttactnacaaactcccatttaaaacaacnttaaatttaagcacgcaataatt

SEQ ID NO: 1002 - DNA, 394 bp, Homo sapiens
  I.1002 (H95976)
  misc_feature (335)..(335): n is a, c, g, or t
ccagtcagctgaagaaggaaatgtttgcttctccctttaaggtgttaaagtaatgcacagaaaataaaaatagcagcctcataaatctgcacggcattgcattcaagcaaaggacaatatgagtaacttagagaaatatccacattcaatggcacttaatgaaatcctgttttctttggagttacatgaggcagcagtactagctagtgtctaatattgcacttttatagcataaacacagctaaacatagtgttaaacactggacagcatcagtacctgttctaattggcatcagtgtttacctctcagtctagcatgctgactatagtcctanggctttaaaaggttataattatttgacagttaaagggcttagaggaaaaaggttttaag

SEQ ID NO: 1003 - DNA, 424 bp, Homo sapiens
  I.1003 (H95975)
  misc_feature (20)..(20): n is a, c, g, or t
  misc_feature (21)..(21): n is a, c, g, or t
  misc_feature (26)..(26): n is a, c, g, or t
  misc_feature (53)..(53): n is a, c, g, or t
  misc_feature (63)..(63): n is a, c, g, or t
  misc_feature (92)..(92): n is a, c, g, or t
  misc_feature (364)..(364): n is a, c, g, or t
  misc_feature (373)..(373): n is a, c, g, or t
  misc_feature (397)..(397): n is a, c, g, or t
  misc_feature (412)..(412): n is a, c, g, or t
  misc_feature (419)..(419): n is a, c, g, or t
actgcagccctccacagcgnnctacncagcaggcactcagctcttcatgaacnacacagcgtnctatcccagccccccaggttcgcctaatngtcttggctacttccctacagctgctaatcttagcggtgtccctccacagcctggcacggtggtcagaatgcagggcctggcctacaatactggagttaaggaaattcttaacttcttccaaggttaccagtgtttgaaagatgtatggtgatcttgaaacctccagacacaagaaaacttctagcaaatttcaggggaagtttgtctacactgcagggctggcagtattttcagcaaacttggattggggacaaacggggcctgtgccttnatcttttgngtgggagttgaaaaaattttgagnctagtgtaagccaantcggtgnactta

SEQ ID NO: 1004 - DNA, 344 bp, Homo sapiens
  I.1004 (H94794)
  misc_feature (48)..(48): n is a, c, g, or t
  misc_feature (64)..(64): n is a, c, g, or t
  misc_feature (336)..(336): n is a, c, g, or t
gcctgggagaggttaagaggaggtttcgaaggtatagatgctattgtnctgatggcccggctgnataaaatggaaattctagtttgttagaattatgcattctttttcaagattctcagtgtgcctaacttattggagcacatcagtttcttgggtaatggaaaacattacctagagttgccagtggacattacaccagtacagagcacattccaaaggagacattggaccagttaattcccatacaagtcaaggtaacagaacaaaagggaatcctgatgcccttttaccattgctggttgagctcaggcactgtcatggacacccttaattttnaaaggttt

SEQ ID NO: 1005 - DNA, 252 bp, Homo sapiens
  I.1005 (H94745)
  misc_feature (196)..(196): n is a, c, g, or t
  misc_feature (236)..(236): n is a, c, g, or t
ttgggaaaaaagggaaagtgttgagacaatgcataaagaacagagctatcatgggaattgcaagaaataataaatttccatctggcattatttggtaagtgcagaagtaatacctgtaaaccaggtttaaaaatcagaaacacttctaaaacatcatgtttaaaatttgctttcaacaatacataaagtaactccnaatggtaatcatcttggctaaataaaacagcctttgcttncaatatgtcatttgta

SEQ ID NO: 1006 - DNA, 313 bp, Homo sapiens
  I.1006 (H94121)
  misc_feature (34)..(34): n is a, c, g, or t
  misc_feature (39)..(39): n is a, c, g, or t
  misc_feature (40)..(40): n is a, c, g, or t
  misc_feature (43)..(43): n is a, c, g, or t
  misc_feature (54)..(54): n is a, c, g, or t
  misc_feature (56)..(56): n is a, c, g, or t
  misc_feature (95)..(95): n is a, c, g, or t
  misc_feature (114)..(114): n is a, c, g, or t
  misc_feature (204)..(204): n is a, c, g, or t
  misc_feature (226)..(226): n is a, c, g, or t
  misc_feature (272)..(272): n is a, c, g, or t
  misc_feature (288)..(288): n is a, c, g, or t
cacccagcagccgtttcaccccaatagatagggngcacnnagnaaatcctcctngnctctctagcgtgacttttcccaaggggccacgccaggcntgccttctgattggtccanctggtgggttgtcttccgccatctttgatcagggcactaaggatgctcccgacggccttcacagtgacggcggagaccctgccccgccanctgctcagtacgtgccgcgtanccgtgcgagccaagtgtgagtccgggcgagcgcctgcgggagtagncactgggcccagaatnagagggaggcggaggagcagcgatc

SEQ ID NO: 1007 - DNA, 425 bp, Homo sapiens
  I.1007 (H94034)
  misc_feature (194)..(194): n is a, c, g, or t
  misc_feature (375)..(375): n is a, c, g, or t
  misc_feature (386)..(386): n is a, c, g, or t
  misc_feature (401)..(401): n is a, c, g, or t
  misc_feature (414)..(414): n is a, c, g, or t
  misc_feature (420)..(420): n is a, c, g, or t
aagcgctttgcacggcttatttcctttaatctttgcaacaacccaaagtataatagtaagcacagggtttttgcgtgatacccggtagccttattaagaattagctcttattttcatcaaaggtagagaaaatgagtaactattgaggcccccgctggctccctacggaggcccccgctttcagccctagggcnctctgtcttgtagggctgtataggacagtccggtcagcagttacctcaagctgagctgggcttgtaggttggggagggtggtgggtgggagaaagttgatggggaacgcagcggttcccaccccctgaaaacaccggcaattgcttggcgttggaattaattagacagtcccctaaaaacnacgtgatcggntgctcctccgggctnccctcttaattcntggggnccaag

SEQ ID NO: 1008 - DNA, 418 bp, Homo sapiens
  I.1008 (AA100534)
  misc_feature (357)..(357): n is a, c, g, or t
  misc_feature (395)..(395): n is a, c, g, or t
  misc_feature (416)..(416): n is a, c, g, or t
attcaatggaaaaaacaaatccaagactccagaaatatacttggcatatcgaaattttatgattgacacgtatcgtctaaacccccaagagtatttaactagcactgcttgtcggaggaacttgacgtggagatgtgtgtgctgtgatgagggtccatgcctttttagagcagtggggactcgttaattaccaagttgacccggaaagtagacccatggcaatgggacctcctcctactcctcattttaatgtattagctgataccccctctgggcttgtgctctgcatcttcgatcaccctcaggttcctgctgctcaacagatgctaaattttccctgagaaaaaacaagggaanaaaccaggttggatttgcagaacttttggtcctccgtnctggacatttactcccaaganaa

SEQ ID NO: 1009 - DNA, 171 bp, Homo sapiens
  I.1009 (AA101379)
  misc_feature (169)..(169): n is a, c, g, or t
ccagaaatggtgttccatttattcactgaaaaagagagagattaggccttcttcattcattttctccattcttgccaaactccctcccctcattttttccaaaataacaacacactgagaaacatgtttgtacaaaaaccacatattattcccccccctcacaaaatcngg

SEQ ID NO: 1010 - DNA, 393 bp, Homo sapiens
  I.1010 (W81290)
  misc_feature (377)..(377): n is a, c, g, or t
tagaatgtctacagacataatgattttaataaactatcctatactgagtgtaacaacatgaataaaagaatggcaaaaccagaaaaaaaaaaggtagtgtgaagtcttctcttggcattttccttggtccaaactgtcacctcatctcttccttgtttcttttctctgtatccctttatccctttgccacacagtttccttttcattatgttctaatatttataatccaggccttcggactatgcttgcccctcacagagagacaggaggccaagtctgggctgggtgggctctgtccagactacacgtggccctgcccatgtctcttggtgtcctgtctctccctgctccgactggaactgtgggtgagaatgggnagggaaggggactggg

SEQ ID NO: 1011 - DNA, 445 bp, Homo sapiens
  I.1011 (W79101)
  misc_feature (78)..(78): n is a, c, g, or t
  misc_feature (231)..(231): n is a, c, g, or t
  misc_feature (235)..(235): n is a, c, g, or t
  misc_feature (362)..(362): n is a, c, g, or t
  misc_feature (441)..(441): n is a, c, g, or t
cacctggcaacagctattctgaaaaacccagaggtgaagctggcagggctggcagcagggacagcctgcgcctggagnaggcctctgctgtatgggaatgacattgatgaacacactacacctgtggagggcagcctcagttggacactggggaagcgccgccgagctgctatggacttccctggagccaaggtcattgttccccagctgaagggcagggtgcagcggagncgtngtggggttgatgtgtgagggggcccccatgcgggcacacagtcccatcctgaacatggaagggtaccaagattggtactgtgactagtggctgcccctcccccttctctgaaagaagaattttgccnatgggttaatgttgccctgcgaagtacaatccgtccaagggacaatgcttgctgggtaaaagttccggccggaaaaacnagaa

SEQ ID NO: 1012 - DNA, 443 bp, Homo sapiens
  I.1012 (W79815)
  misc_feature (338)..(338): n is a, c, g, or t
tggcaagtaagaaggaagtttaatttttttttcaggattcagtggagtccattaatgcataccaggggcaaagatcagcccagggtaaggcaagtctgggaggaagcccaccctgccctacagcagccctggaactcagaataggtggtgagtctgccatggtttgctactgggcagcacactagaccaacttgggaatgtggaagagtgagtctatgttccctcagccatccccaagtttacacacaggcatagcagccctactgtgagtcagcaatcattcctgacttgcagtaaggacaatttgcatttacggaaagcaaactgggagggggtancctaagtccgcactgcccatgttattaccctttgcaatgtgaaaaaccatggtgagggttaggttgggcaggttttatccctcctccacaaagggtgagccttta

SEQ ID NO: 1013 - DNA, 423 bp, Homo sapiens
  I.1013 (W79688)
  misc_feature (108)..(108): n is a, c, g, or t
  misc_feature (321)..(321): n is a, c, g, or t
  misc_feature (360)..(360): n is a, c, g, or t
  misc_feature (405)..(405): n is a, c, g, or t
gtaacctggcgcctgaatggaaaggagctgaatggctcggatgatgctctgggtgtcctcatcacccacgggaccctcgtcatcactgcccttaacaaccacactgtnggacggtaccagtgtgtggcccggatgcctgcgggggctgtggcagcgtgccagccactgtgacactagccagtgagtctgctcctttgcctccctgccatggtgcggtccctcctcatctctcccaccctgaagcccccaccattcatgctgcctcttgttactcttagcataaaatgggccttaactgcacgaaatgtcaaatcagaacangtagctgcctacgtaatgcccagtgatgggggacccttngtgcccttggaaaacctcactccaagtagaggctgtatctggagngagtgtctacagagaggg

SEQ ID NO: 1014 - DNA, 594 bp, Homo sapiens
  I.1014 (W74724)
  misc_feature (86)..(86): n is a, c, g, or t
  misc_feature (87)..(87): n is a, c, g, or t
  misc_feature (88)..(88): n is a, c, g, or t
  misc_feature (89)..(89): n is a, c, g, or t
  misc_feature (90)..(90): n is a, c, g, or t
  misc_feature (91)..(91): n is a, c, g, or t
  misc_feature (92)..(92): n is a, c, g, or t
  misc_feature (114)..(114): n is a, c, g, or t
  misc_feature (115)..(115): n is a, c, g, or t
  misc_feature (160)..(160): n is a, c, g, or t
  misc_feature (262)..(262): n is a, c, g, or t
  misc_feature (317)..(317): n is a, c, g, or t
  misc_feature (341)..(341): n is a, c, g, or t
  misc_feature (526)..(526): n is a, c, g, or t
  misc_feature (534)..(534): n is a, c, g, or t
  misc_feature (559)..(559): n is a, c, g, or t
  misc_feature (575)..(575): n is a, c, g, or t
  misc_feature (586)..(586): n is a, c, g, or t
ttttatgattgtaaaaattttattctcaataacaattccactaaaattatacaaagtacattcaatacttaagaatggcaaaggtnnnnnnnggaggagaggaagccagtttgnnctggaagcatcaacagttgactccaacaaaggaagcccagctggntggacggaagttgggggtggaggtccggttgtaaaaaataaaaaaggggatcggtaaaaaaaggccacccacaaggaagcagagtgagcgtgcatgttcctnggggagggcaggaggctcagctgacatgctgctgctgggcactggagctcaggcnggctccgagtttggtggggggcangtttttatgctttgaaatactgcacaactttgttgggggcagctccgccagcacagcttttggccaaggtctcttttgctgcgttgcggaactctcgaaagggaacgaactgcacaatatcgcgggctgcctcctcccccgtgtgggaacgccaatgcggcttgtccccatccaggaactccatngcagcganttccgcattgcccccgtgccgaatntttggccccgaggccnaatttcccaanagtgaatc

SEQ ID NO: 1015 - DNA, 459 bp, Homo sapiens
  I.1015 (W74401)
cacgaaacatttctaccaaatgagacaacaactttaggataagttcatcctctaggagctttctaatgtgcactcagttcctgtatactgtgtgttttgttctgatcaaggggtagggaacctttccagagaagtcccattagtaagaaatgacataaaatacgtgctttctcaggttactgtataactgttataatatatttaatatataaaattaagacttttgcttccagcaagtatgttagactagatattataaaacaactagatcctgaataaaatctgcttttaataggttcactggaagtaggagaattttcaagaaccatacttcgacatttcctctgccacaaaaaatgaacgcattttaagttaggagtcatgaatactgtattgaccatacaagtggattatggttgtctggatggcagataccaatagcaacattgtcatatgcag

SEQ ID NO: 1016 - DNA, 448 bp, Homo sapiens
  I.1016 (W74512)
  misc_feature (161)..(161): n is a, c, g, or t
  misc_feature (297)..(297): n is a, c, g, or t
  misc_feature (393)..(393): n is a, c, g, or t
gcaatgcggacttcgctgccatggagttcctggatggggacagccgcatgctgcgctcccacacgggggaggaggcagcccgcgatattgtgcagttcgttccctttcgagagttccgcaacgcagcaaaagagaccttggccaaagctgtgctggcggantgccccaacaagttgtgcagtatttcaagcataaaaacctgccccccaccaactcggagcccgcctgagctccagtgcccagcagcagcatgtcagctgagcctcctgccctcccccaaggaacatgcacgctcantctgcttccttgtgggtggcctttttttacccgatccccttttttattttttacaacccggacctccacccccaactttcctccaagcccaagctngggtttccttttgtttgggagttcaactggttgatgcttccaaggccaaactggg

SEQ ID NO: 1017 - DNA, 421 bp, Homo sapiens
  I.1017 (W73467)
  misc_feature (396)..(396): n is a, c, g, or t
cactaacccaaaaactttctgtagagctgttcctttggaggcagcatcacttattggcagtaaagactcagtataaaagcaccagcatccctacttgggtgatggggattaattttatagcattccattttcctagtgccacatgtgaaattggattttgatgatcttaatctatattctacccttataataaaagatcaaaagatatatctcctatgaacagattggagataggagatgaaaagttgggaggatgtctttattctaatgtgagggtagggaaaatgtggataacattactggggtgaaggaggcattgttctttagttggagttctcatttttattctccagtactgacttgtggggaaagcatactttttcactgccaggtacngaatgcagaggctcagtgaagtata

SEQ ID NO: 1018 - DNA, 397 bp, Homo sapiens
  I.1018 (W73347)
gttttaactttttattaaaatgcttaggatacagattgactttctttcgtaaatgactgttttacttttcctgaagtaggacatatatgcactctgataaaacagaatgagaagtcataattcatgggaattcctatacaaggtgctgatcctgtgtttcggagctgagctcctcacagcagcttctttcagctatcttataggaatagtgttccgtggggcaagaaatacattggttctaactgattttcaatcccctttctccagtggaataaaccactttcacaaagagctgccctatgtataacccacagatttctagcttgcaacaaagtgacaagggacaaatagggggaaaaaaaaattaagaaaactaacactgaagtaatcatacttc

SEQ ID NO: 1019 - DNA, 588 bp, Homo sapiens
  I.1019 (W72877)
  misc_feature (452)..(452): n is a, c, g, or t
  misc_feature (464)..(464): n is a, c, g, or t
  misc_feature (480)..(480): n is a, c, g, or t
  misc_feature (489)..(489): n is a, c, g, or t
  misc_feature (558)..(558): n is a, c, g, or t
  misc_feature (585)..(585): n is a, c, g, or t
tttttttaatgttgcataacaatgtttatttagttttacatttgtttacaatttcttataaacacttcattataattgttttatacaaacaacagtttaaatttacttatgtttatcatttatttgcttactagtttttcaatttcagataatccttttagaatcatttcccttcttgaagatcatccttttgtagtctctttactgaatttgtgctgaggataacatctgtttttcatctgagcatctgtttgtttcagtttcgcttgttgcaaattctaagctaatagtttttctcagaattctaccctcttttgggtacattgttgctgttaggaagcctactaagtatttgactgtcttgctttcactgatctttttctccccatggttgcttttaaaatcttggtatttgggtatcttgtcatttacaataccttgagtctaggccnggattttaattnaaatatatggttgggnaaaaatggngcttcccgaatttatgaaatcaggttttcccacaaatttgtaaaatggggtaaccttcaaggacggccnccccctaatccccaaaattccccttcnagg

SEQ ID NO: 1020 - DNA, 418 bp, Homo sapiens
  I.1020 (W70181)
  misc_feature (8)..(8): n is a, c, g, or t
  misc_feature (10)..(10): n is a, c, g, or t
  misc_feature (11)..(11): n is a, c, g, or t
cccttggntnnactaaaaccaaaaaaacctgtccagtgtgcaagcaaaaagttgttccttctcaaggcgattcagactctgacacagacagtagtcaagaagaaaatgaagtgacagaacatacccctttactgagacctttagcttctgtcagtgcccagtcatttggggctttatcggaatcccgctcacatcagaacatgacagaatcttcagactatgaggaagacgacaatgaagatactgacagtagtgatgcacgaaaatgaaattaatgaacatgatgtcgtggtccagttgcagcctaatggtgaacgggattacaacatagcaaatactgtttgactttccagaagatgattggtttatttccctttaaaatgattaggtatatactgtaatttgattttttgctccc

SEQ ID NO: 1021 - DNA, 384 bp, Homo sapiens
  I.1021 (W70054)
  misc_feature (309)..(309): n is a, c, g, or t
  misc_feature (352)..(352): n is a, c, g, or t
  misc_feature (358)..(358): n is a, c, g, or t
  misc_feature (364)..(364): n is a, c, g, or t
  misc_feature (381)..(381): n is a, c, g, or t
actggatcttaaagtggaaaacatgtttattaacattcaaactcccctcatacaaggccatataaaaatccttagcattttgattatacattagtctacactttctacatagttacaatgatgtataatttagcttttcataatacagtgtttcaatacatcattagttctgttaaacataagtcacttactttcaaatccaatacttgaacagtttcctctgtacatagtttagcagggctaattagcataagatgctatttattaagaggtatatgatctgagtattaacagttgctgaagtttggnatttttattgcagcattttcccttttggcttttgataacactnacaggnaccccnttaaaggggccactggnaaa

SEQ ID NO: 1022 - DNA, 356 bp, Homo sapiens
  I.1022 (W69649)
  misc_feature (232)..(232): n is a, c, g, or t
tcaaagcattaatacttttattcccatcagtgatgctgacgggcctgaccctttatagagaaaaacattaggaaaacagaagtgggcagggaccctgggagcctccattctcaatgccccaccctttacctctctgccagtgtcagcgccttcaaaccagaaggtatggggatggcctggtggggtgggccacacatggggctccccaggcaaggccacctgctgacagagntgaaggcgacgggcagggaagccaggggcccagcaaagctcttctggcgcaggcagcatacggagaagggcgacgggtgggttgttctccttggttactgggtcctgggctttcagtgccctgc

SEQ ID NO: 1023 - DNA, 458 bp, Homo sapiens
  I.1023 (W69648)
  misc_feature (11)..(11): n is a, c, g, or t
  misc_feature (16)..(16): n is a, c, g, or t
  misc_feature (202)..(202): n is a, c, g, or t
  misc_feature (276)..(276): n is a, c, g, or t
  misc_feature (350)..(350): n is a, c, g, or t
  misc_feature (418)..(418): n is a, c, g, or t
  misc_feature (431)..(431): n is a, c, g, or t
  misc_feature (455)..(455): n is a, c, g, or t
cctcagcgacnctatnttagtacatttcatcactcagtgtatgcgaaaacagccaaaagaaaggccagcacctgaagaattgatgggccacccgttcatcgtgcagttcaatgatggaaatgccgccgtggtgtccatgtgggtgtgccgggcgcaggaggagaggcggacagctatggggcccccgtgagctgccgcaggnacgtgaaagcccaggaccagtaaccaaggagaacaacccacccgtcgcccttctccgtatgctgcctgcgccanaagaagctttgctgggccctggcttccctgccctcgccttcacctctgtcagcaggtggccttgcctgggggangccccatgtgtggcccaccccaccaggccatccccataccttctggtttgaaggcgcttgacactggnagagagggtaaanggttgggggcattgagaaatgganggg

SEQ ID NO: 1024 - DNA, 565 bp, Homo sapiens
  I.1024 (W63748)
  misc_feature (480)..(480): n is a, c, g, or t
  misc_feature (519)..(519): n is a, c, g, or t
  misc_feature (530)..(530): n is a, c, g, or t
  misc_feature (541)..(541): n is a, c, g, or t
gtgttgaaatggtttaatacacagcaatagataactctatatttgctgagaaggttctgagcaacctctataactgtagcaggaacaggcttaagagaccatttttactaacccctccctttatgatggaggcagctcctccccaaggtcccacttacagagtgagacctttgtctacttctgtttggcatgtgctggccatgtgcaaacccacaattatattggccaatggcaaacagaattgggaaaccaaccatttccaataaaataaggtttcatttcaaaccagatacacccattttggggattaccaattgctttggagtttctaaatcacttctcccatctgcatacatgggcaacagggctaacttaccacctcccagtgaaaaataaaaagataaccaaaccctggacctctgttgcccctctctctcccgtgcctggtttcctcatccttgcattcttggctggtgcatnccctgggaagccagcagccagtaatggctcctatggctnggattgcttgngaaaatggtanttggaaagggccttgggtccgggg

SEQ ID NO: 1025 - DNA, 450 bp, Homo sapiens
  I.1025 (W61099)
  misc_feature (413)..(413): n is a, c, g, or t
gatcgaccgtcttcagactgttaaggattgtggtagagaactgtgacagccactctcagcatcaccctgaaccaaaggcccctatcaagtaacaatatagccaagcaaaattccagtcaatagagacattgactggctggctggcttcccaagggatagcaccagacaagaaatgcaaggatgaggaaaccaggcacgggagagagaggggcaacagaggtccagggtttggttatctttttatttttcactgggaggtggtaagttagccctgttgcccatgtatgcagatgggagaagtgatttagaaactccaaagcaattggtaatccccaaaatggggtgtatctggtttgaaatgaaaccttattttattggaaatggttggtttcccaaattctgtttgccattgnccaatataattgtgggtttgcacatggccagcacatg

SEQ ID NO: 1026 - DNA, 430 bp, Homo sapiens
  I.1026 (W61367)
  misc_feature (235)..(235): n is a, c, g, or t
cgttcccaggcacagcataattggtttaggagacagatactgatagtacacagcctcagaggcctgtgaggacccaggggaggcagaggggagagaggtgctccagcctcttcattgccaatgacccttccttcttgaccccatcgcaggcaggggtgtggggaagaacgaggaactgcgtctttatcaccatctcttcaacaactatgacccaggaagccggccagtgcggganctgaggatactgtcaccatcagcctcaaggtcaccctgacgaatctcatctcactggtaagctacccccaccctcatcttaagccaaaaatcccacttctggccccaaccgctgagctctgtcctaaagctcacttctggccctgaaatctcacttcaatcatccccatctcccatctgcagaatgaaaaagagg

SEQ ID NO: 1027 - DNA, 232 bp, Homo sapiens
  I.1027 (W61366)
  misc_feature (9)..(9): n is a, c, g, or t
  misc_feature (12)..(12): n is a, c, g, or t
  misc_feature (83)..(83): n is a, c, g, or t
  misc_feature (84)..(84): n is a, c, g, or t
  misc_feature (85)..(85): n is a, c, g, or t
  misc_feature (102)..(102): n is a, c, g, or t
  misc_feature (199)..(199): n is a, c, g, or t
  misc_feature (221)..(221): n is a, c, g, or t
  misc_feature (226)..(226): n is a, c, g, or t
cgcaccctngtntcccatctgtacctccggccgcgctggagcgtcccacccagtgcctacgcctggctccgctccagcgcgannncccagccccgagcgtcncattcccggttggccccgcccataaggcccccccccaacaataatcgtccgggcctcggagtagctcttcccaccggaaaataagcgaacagttctnccaatcgaaggggaagtaagtnaactncaattg

SEQ ID NO: 1028 - DNA, 437 bp, Homo sapiens
  I.1028 (W58689)
  misc_feature (437)..(437): n is a, c, g, or t
cataattacattgtcatttatttcaatcctgtggcacacactgaatataacaggcttgaaaaacactttgatatttcctttgtagattactaaatgctaccattgatttctgtaaattaaatttactaggaaaacccacagtttaaaaaaagtacacaagaataagctagctgatcacaatgaaatgaatgaattcaaaatagtataaagtcaggaacagtttatcttcatggtaaacattcactttatgcaaatcccacttggcttcatttaattaaaaagctataaggatagccgtggtacttggaacgaaatattgaaagtagaaaactgaagaagaagaccaccaggcccaatcccactaggcaaattatccgtctttttccaacatcgcctttcgaagttgctgcttcatttagaagaaccatccccatggn

SEQ ID NO: 1029 - DNA, 452 bp, Homo sapiens
  I.1029 (W58688)
  misc_feature (34)..(34): n is a, c, g, or t
  misc_feature (52)..(52): n is a, c, g, or t
  misc_feature (64)..(64): n is a, c, g, or t
  misc_feature (127)..(127): n is a, c, g, or t
  misc_feature (153)..(153): n is a, c, g, or t
  misc_feature (163)..(163): n is a, c, g, or t
  misc_feature (165)..(165): n is a, c, g, or t
  misc_feature (166)..(166): n is a, c, g, or t
  misc_feature (182)..(182): n is a, c, g, or t
  misc_feature (185)..(185): n is a, c, g, or t
  misc_feature (186)..(186): n is a, c, g, or t
  misc_feature (191)..(191): n is a, c, g, or t
  misc_feature (200)..(200): n is a, c, g, or t
  misc_feature (207)..(207): n is a, c, g, or t
  misc_feature (267)..(267): n is a, c, g, or t
  misc_feature (301)..(301): n is a, c, g, or t
  misc_feature (303)..(303): n is a, c, g, or t
gcgtcctcggccgcaggccgggtccctcgcaaanctgctgccatcccggagnacagccagcggntcccggagctggccgcgcagcgtcggtgcgcggtaggagctgggccgcacggctaccgccgtngaggagacactgccctgccgcgatgngggcccgggnannccttcaggtcgtcaangcnngggcngcggctgcngtacctncccaccggagctttcccttccttctcctgctgctgctgctctgcatccagctcggggganggacagaagaaaaaggagaatcttttagctgaanangtagagcagctgatggaatggagttccagaccgctcaatcttcccgaatgaatggtgataaattccgaaaatttataaaggcaccacctcgaaactattccatgattgttatgttcactgctcttcagctcagcggcagtgttctgtgt

SEQ ID NO: 1030 - DNA, 567 bp, Homo sapiens
  I.1030 (W58472)
  misc_feature (300)..(300): n is a, c, g, or t
  misc_feature (526)..(526): n is a, c, g, or t
  misc_feature (546)..(546): n is a, c, g, or t
  misc_feature (563)..(563): n is a, c, g, or t
gctgttgggtttcataggagctggctgctgaatgtaagagtgcaggctaccccgggactttgatcccctacagatgtgacctatcaaatgaagaggacatcctctccatgttctcagctatccgttctcagcacagcgctgtagacatctgcatcaacaatgctggcttggcccggcctgacaccctgctctcaggcagcaccagtggttggaaggacatgttcaatgtgaacgtgctggccctcagcatctgcacacgggaagcctaccaagtccatgaaggaagcggaatgtggaccnatgggcacatcaattaacatcaataagcatgtctggccacccgagtgttacccctgtctgtgacccacttctatagtgccaccaagtatgccgtcactgcgctgacagagggactgaggcaagagcttcgggaggcccagacccacatccgagccacgtgcatctctccaggtgtgggtggagacacaattcgccttcaaacttccacgacaaggaccctgagaangcagctgcaacctatgagcnaatgaagtgtctcaaanccga

SEQ ID NO: 1031 - DNA, 535 bp, Homo sapiens
  I.1031 (W58347)
  misc_feature (55)..(55): n is a, c, g, or t
ggttgcgatttttcttttttaatgatcaccatgaaatccactgggccaggcctgngtgttctgctgccatagtcagagtcagagtggagggatgaccccaggagggacaagaagccaagactgggctggggagccgagaaggagatagataagggggagagggtgcagtggggcaggcagaggaggaagtctggagccctggataacaacacagatataaggtgaaggcctccctctgccaccccagccctgagccacagacgttgaggtgcaagaagatggggattttggccacaactcctttcccatgtcaaagggaagacactgagagcagacaaaggccaagtgcccaggggccaagaacaagttaacaagtaaaacaattagggacaccacctcctttccccagcccatttttcacatttacaactgaagcaattttgacaagatgatataaaaatctcaaacaaattttctagcccctggtcggggtgttgacaggaagtggtatcccgtgatccagaatcaacaccta

SEQ ID NO: 1032 - DNA, 424 bp, Homo sapiens
  I.1032 (W58304)
  misc_feature (320)..(320): n is a, c, g, or t
tcctcatcttcactgcccccttgagctaggtggattttctcttcatgacaagagtatttggtagggaaagcaggtttaaaataaaaagacaacccaccccctgcccttttgcttccctcccatcagtctggttgacaggaagaaaccacaccatcaacaccaacaagtttctgtgttccttttacagcaaaagggactttttatataaccaaatgtggtgttttagtgactttttgataatgtacagttttttgtgaatttaaatttatttctttctatatttttaggaccaatctcatttttaataaggttaaaaaganaaaaaaagtctagcgaaaaaactcctgtttttgccatgtgatgttccacaagtgcagctgtagaaaagtgcttggtcagttgttgaataaaaaaaccacatttg

SEQ ID NO: 1033 - DNA, 400 bp, Homo sapiens
  I.1033 (W58195)
gaatctctatcaaatgtcggtttttttattcaacaactgacaagcacttttctacagctgcacttgtggaacatcacatggcaaaaacaggagttttttcgctagactttttttttctttttaaccttattaaaaatgagattggtcctaaaaatatagaaagaaataaatttaaattcacaaaaaactgtacattatcaaaaagtcactaaaacaccacatttggttatataaaaagtcccttttgctgtaaaacggaacacagaaacttgttggtgttgatggtgtggtttcttcctgtcaaccagactgatgggagggaagcaaaagggcagggggtgggttgtctttttattttaaacctgctttccctaccaaatactcttgtcatgaagagaaa

SEQ ID NO: 1034 - DNA, 694 bp, Homo sapiens
  I.1034 (W51807)
  misc_feature (663)..(663): n is a, c, g, or t
aattcggcatgaggagctaaccaggattcaggtcccggtttgagtcttgaagaatttattgcttttgagcatcctgaagaagttgattatatgacggaatttgtcattcaagaagctttagaagaacatgacaaatggtgatggatttgttagtttggaagaatttcttggtgattacaggtgggatccaactgcaaatgaagatccagaatggatacttgttgagaaagacagattcgtgaatgattatgacaaagataacgatggcaggcttgatccccaagagctgttaccttgggtagtacctaataatcagggcattgcacaagaggaggcgcttcatctaattgatgaaatggatttgaatggtgacaaaaagctctctgaagaagagattctggaaaacccggacttgtttctcaccagtgaagccacagattatggcagacagctccatgatgactatttctatcatgatgagctttaatctccgagcctgtctcagtagagtactggctccttttataatttgttaccagctttcttttgtgataaaatattgatgttgtattttacactcttaagtcttaaccacagtcagaattatcttaatgtagattataattttggtcttttaggaaaaaaaccaaaaatctgtattanttccaaacgtttgaagcaccaaatataatat

SEQ ID NO: 1035 - DNA, 441 bp, Homo sapiens
  I.1035 (W52351)
  misc_feature (410)..(410): n is a, c, g, or t
tttttttttttttttttttaatttaattcttcaactaaaacaacaaaaaaaataatttattatataattattacactcaaccacaaataaacacaaaaataatccaaaatatcacaaatccaaaacaaaaaaccaacataaacattttatttataaacaaaataaatctcaaaaataatcaacaatcaaaaaacaataaaattctaaatccattaaaacaaactctaaacaataacatacaatcccacaacttataccaacatccccaacatctaacattccatatttctactcctataacctccacaatacaacaaactaacaatttacttaaacctctacctcatctttcttcttttacacttcaacctacacattcacttcttcctccacttaactctcataacacnaaaatttccaaaaaaataacacctcatacca

SEQ ID NO: 1036 - DNA, 467 bp, Homo sapiens
  I.1036 (W51901)
cgtctgtgacgaggatagtatcaaggaccccatggaggaccaggacggcctccttggcaaggagctgggattcgatgcctccgaggtggagttgacgagaaacaatgaattgattgcagttggaaaaggcagctcactgaagcggctccctgtttttggaatggagcctcgcatcctatacaaccctttacaaggccagaaatgtattgttcaaacaacttcatggtcccagtgctcaaagacctgtggaactggtatctccacacgagttaccaatgacaaccctgagtgccgccttgtgaaagaaacccggatttgtgaggtgcggccttgtggacagccagtgtacagcagcctgaaaaagggcaagaaatgcagcaagaccaagaaatcccccgaaccagtcaggtttacttacgctggatgtttgagtgtgaagaaataccggcccaagtactgcggttcct

SEQ ID NO: 1037 - DNA, 46 bp, Homo sapiens
  I.1037 (W49513)
  misc_feature (4)..(4): n is a, c, g, or t
  misc_feature (11)..(11): n is a, c, g, or t
ctgnttgcagntggaataagaattggaggaagggaaagaagtggta

SEQ ID NO: 1038 - DNA, 473 bp, Homo sapiens
  I.1038 (W49512)
  misc_feature (415)..(415): n is a, c, g, or t
aagagaaaactcctccaaaagcagctctcactatcagaaaacccaactacagttgtgaacgccttcattttctgcctgaggtctcagtccgtcggcccagactgaagtgcagtggcacaatcatagctcgctgcagcctcgaccttccaggcttaaacgattctcccacctcagcctctccgagttgctgggaccacaggtcactgtgcatggcatcatcctggccccctctagagctccaatcctccaaccagagccagctcttccctcaaaatgctacggcctgtgacaatgctccagaagcctgggacctgctgcacagagtgtgccgacatttatcatctccatctgtttcttcggcctcctagggaacctttttgtcctgttggtcttcctcctgccccggcggcaactnaacgtggcagaaatctacctgggccaacctggcaagcctctgatctggtgtttgtctt

SEQ ID NO: 1039 - DNA, 461 bp, Homo sapiens
  I.1039 (W48667)
  misc_feature (360)..(360): n is a, c, g, or t
  misc_feature (391)..(391): n is a, c, g, or t
tttttttttttttaggtaaatatttctttattaaatggttaattccataaataaaatcttttcactgaatataaaattaaaatcatttacaaattattccagtattacatttcccctccctccccaaaagctacattttgataaataaaacattcagtcttaaaacacctgatttctgtttgcagtttagagtgcagatagctgcctctcacagacactcatggagtgtcccccttcaggaacgggatggaatgccctcccatttacttttgtcaaaggacgaataaaagctttaaactgtccaactaatcttattatctcttttacgactgtagaaccccaaaaggaaaaaagcctagngaaaatatgcttagcaaataatttacaaacnggaaacagaaagtcatcaactccacaagctccaaaatgaagcagtaacatgtggctccaatactatggag

SEQ ID NO: 1040 - DNA, 442 bp, Homo sapiens
  I.1040 (W47487)
  misc_feature (53)..(53): n is a, c, g, or t
  misc_feature (185)..(185): n is a, c, g, or t
  misc_feature (318)..(318): n is a, c, g, or t
  misc_feature (324)..(324): n is a, c, g, or t
  misc_feature (357)..(357): n is a, c, g, or t
  misc_feature (383)..(383): n is a, c, g, or t
  misc_feature (442)..(442): n is a, c, g, or t
gcaggatggagatccctgtgcctgtgcagccgtcttggtcgccgcgcctcggncccgttgcccggactttcggcgcccggacgctctttgaccagcgcttcggcgaggggctgctggaggcgagctggctgcgctctgccccaccacgctcgccccctactacctgcgcgcacccagcgtggcgntgcccgtcgcccaggtgccgacggaccccggccacttttcggtgctgctagacgtgaagcacttctcgccggagaaattgctgtcaaggtggtgggcgaacacgtggaggtgcacgcgcgccacgaggaagcnccggantgagcacggattcgtcgcgcgcgagttccaccngtcgctaccgcctgccgcctggcgtnggatccggctgccgtgacgtccgcgctgtcccccgagggcgtccttgtccatccagggn

SEQ ID NO: 1041 - DNA, 396 bp, Homo sapiens
  I.1041 (W47419)
  misc_feature (47)..(47): n is a, c, g, or t
  misc_feature (58)..(58): n is a, c, g, or t
  misc_feature (338)..(338): n is a, c, g, or t
  misc_feature (354)..(354): n is a, c, g, or t
  misc_feature (389)..(389): n is a, c, g, or t
gggcggagtcagatcggctttaatagagggagcctgaggaggctcgngcgtgcgggcncggccagccccctcctacttggctgcggctggcggtggggcctgggcgacgctggtgcggcctggatggacaggactccctcgggggacagcgcggacgtcacggcagccggatccacgccaggcggcaggcggtacgacggtggaactcgcgcgcgacgaatccgtgctcatccgggcgctcctcgtggcgcgcgtgcacctccacgtgttcgcccaccaccttgacagcaatttcctccggcgagaagtgcttcacgtctaagcagcaccgaaaagtngccggggtccgtcggnacctggggcgacgggcaagcgcacgctgggttgcncgcaggt

SEQ ID NO: 1042 - DNA, 418 bp, Homo sapiens
  I.1042 (W47229)
gggatccagtgtccacacttaaaagttgtatgtgtttaaaaaacaacaacagtaatgtgcaaggtgaaatgcttttgggataaacgtaagcctattttctgacgtttcttaatgcaaactctttgccttaaatggtagaatatttagaaatttgcacaaaattaaaaaaataaacattgtcttggagggttaaaaaatagaaaggtgtatgtgtatagattcacatacacatatgtatatacaggctgacttgatctagaacattaaatccgccctgcaagttaaccccccattgcaatggttgccttaaggtgtttgctagttgtgtacatagtgtggttaatcattagctacactgcttcccacttgattagagcaatgggaagcatactgtggcctaccagcatctggaagtgtg

SEQ ID NO: 1043 - DNA, 440 bp, Homo sapiens
  I.1043 (W47105)
  misc_feature (425)..(425): n is a, c, g, or t
  misc_feature (435)..(435): n is a, c, g, or t
tttttttttatcaaattgctacttttgtcttccacaacaaaagtagcaatttgatagaagaaaaaaaacaaaaaaacaaaaaaacaccctacagtaacactcgtcagttgtttaacctgagcgtttggcctactaggagtagcagctttttttccttcatgcacgctcacatccacaccacctctgcacacatacagatcgagcacacacttccagatgctggtaggccacagtatgcttcccattgctctaatcaagtgggaagcagtgtagctaatgattaaccacactatgtacacaactagcaaacaccttaaggcaaccattgcaatggggggttaacttgcagggcggatttaatgttctagatcaagtcagcctgtatatacatatgtgtatgtgaatctatacacatacacctttcnattttttaancctcc

SEQ ID NO: 1044 - DNA, 463 bp, Homo sapiens
  I.1044 (W46874)
  misc_feature (89)..(89): n is a, c, g, or t
  misc_feature (463)..(463): n is a, c, g, or t
aaggatggtgcctagtggtggccctgtgttctgaggacagagagagctggaggggtggagggaaatgcatcggcactcatttggtgtancaagaagagggggaaagatgtcttgatagaatcaaagttgccaaaaacaaagaagagtttatcaagcagatttctaacatttagtagaaactacttcatagctctcatttttagggggttctatctataatttatggtaaatagttgggaggcaaagggaagaatgtgtgtggggggattattaatttgaagtataagctaaattgtttattaaaaagcctattttggatgaacaagtttagagagataaactgactaatgtgtcctccagtttagaatttcaccttaccccgaccccaggcacttcttaaaaacaccagatcctccagtgcagctctgcccagcatcaaggcctttaaaaatatgtagtattn

SEQ ID NO: 1045 - DNA, 378 bp, Homo sapiens
  I.1045 (W46986)
  misc_feature (339)..(339): n is a, c, g, or t
ttttttttcttcaaggggtccattcctttaagacaattttggatttctttaaaaaatctattttatttgctatattagatggctaacccaaaattgtttcttgggttattgagtaataagtatggtttaaatggcctaaatactacatattttaaaagccttcgatgctggcagagctgcactgaggatctgtgtttttaagaagtgcctgggtcgggtaaggtgaaattctaaactggaggacacattagtcagtttatctctctaaacttgttcatccaaaataggctttttaataaacaatttagcttatacttcaaattaataatccccccacanacattcttccctttgcctcccaactatttaccataaatt

SEQ ID NO: 1046 - DNA, 446 bp, Homo sapiens
  I.1046 (W46652)
  misc_feature (295)..(295): n is a, c, g, or t
  misc_feature (322)..(322): n is a, c, g, or t
gattcggaacgaggttcaaagtttaactcctcaaagcttcgtgttaataagctgattctccagctatgtatcgggaaccatgatctatttatgaggagaaggaaagccgattctttggaagttcagcagatgaaagcccaggccagggaggagaaggctagaaagcagatgaaagaagaagcaacaatggccaactgaagcactgatgcggtctgaggagacagctgacctgttggctgaaaaggcccagatcaccgaggaggaggcaaaacttctggcccagaaggcgcagagnctgagcacggaaatgcagcgcatcaanggccacagcgattcgcacggaggaggagaagcgcctgatggagcagaaggtgctgtaagccgaggtgctggcactgaagatggctgaggagtcagagaggagggccaaagaggcagatcagctg

SEQ ID NO: 1047 - DNA, 381 bp, Homo sapiens
  I.1047 (W46617)
  misc_feature (332)..(332): n is a, c, g, or t
gacagctcaagtgtaccttttaataagatctatcagggactttaacagctgacctctcttgatgggataacgaccacaagtaggatctatcttatgccagatctctttttgttagaaaggttccaatgagcttattccactctatgagcagaaactgcagggaagactccaaaggacacatcctatgctgctgtcaggtggtgtggggcttgttggcatgggtactactggggattaggtgagaagtagacggcaggatgtcattttattattgggcaaaatacattctctccactgcctaaggcatcgctgggaggaataatgaactgttngcaggagaaaagcagcaaacattcggttaattcactcagcaaccagtgg

SEQ ID NO: 1048 - DNA, 567 bp, Homo sapiens
  I.1048 (W44530)
  misc_feature (492)..(492): n is a, c, g, or t
  misc_feature (504)..(504): n is a, c, g, or t
  misc_feature (542)..(542): n is a, c, g, or t
  misc_feature (564)..(564): n is a, c, g, or t
tttttcactcagtaggtgtctttattcatacttgttgacatttcccatggggaatcggttgaagggaggggcagggagggctgagcgggaagccacggcttggttttcctccatccagtggagaagagactcggtagggacatgctaagtagagtgaacaggggaaccatcactatgtgggctgagatgcactgtgcagtgacttcagacaacctgagtccttctgtcaggaaatgcaatttctaagtggaaaaaaaaaacaagacccaaagaaaaaaacaaagtgcatacaaagcaaactgctaatgtaagaaaggttctaaggcagccagcagtgaaaagccaggggtctggagtggccacctggcattgccctgtcccactgccctgtgccaggctgtcgggccaccagtgccctcttgagacagtctccattggctccaagggttctgtgagccacagaaggttgtgaaaggagaagagcctgaagtntggcagcaccanggcagcccaaacagggctgcgttgaaaatatcaaaggntctctttaggggtggctcttanggt

SEQ ID NO: 1049 - DNA, 587 bp, Homo sapiens
  I.1049 (W44529)
  misc_feature (434)..(434): n is a, c, g, or t
  misc_feature (451)..(451): n is a, c, g, or t
  misc_feature (481)..(481): n is a, c, g, or t
  misc_feature (561)..(561): n is a, c, g, or t
  misc_feature (584)..(584): n is a, c, g, or t
tggatctactcagccagcaccctggagcgagggtaccccaagccactgaccagcctgggactgccccctgatgtccagcgagtggatgccgcctttaactggagcaaaaacaagaagacatacatctttgctggagacaaattctggagatacaatgaggtgaagaagaaaatggatcctggctttcccaagctcatcggagatgcctggaatgccatccccgataacctggatgccgtcgtggacctgcagggcggcggtcacagctacttcttcaagggtgcctattacctgaagctggagaaccaaagtctgaagagccgtgaagtttggaagcatcaaatccgactggctaggctgctgagctggccctggctcccacaggcccttcctctccactgccttcgatacaccgggcctggagaactagaganggacccggaggcttggncaagccgtgccttcagctctacagctaatnagcattctcaatcctacctggtaaatttaagattccagagagtggctcctcccggtgccaagaatagatgctgattgtantcctccaggggcccttcccctcnaat

SEQ ID NO: 1050 - DNA, 572 bp, Homo sapiens
  I.1050 (W55920)
  misc_feature (316)..(316): n is a, c, g, or t
  misc_feature (541)..(541): n is a, c, g, or t
ttttttgcataaaggaatataaaactatttattaaccactgttcaccagtatttacaataaagtaaacaatatacagttggataacattttgattactacaaagttgttcttcctggcttttgctgaaccagtaaagcaaactcaagattgagcctccatcgtaatgaattggggtaaagaaaaaacatgcaggtcaataggttaggttacaaaaggttgttcacacatttatgacagcaggtcctaaactgccaacacctctaaccatctgattaggtttctatgagccaagtcttacatattccattcatcatngaccttttagtcaatgtagcaacagggattccaacattttggctaaggaatggcccgctaggaaaacttttaaatgttcatttaacttagttttgtttagctagttaaaacacactagcatttgtctagtttcctcatctggatgaggaaacctgctgtgatgggcagtgataaaatttttcccctttaggaattttgcaaataaaccactggcaattatagacnctttaaaattatccaatttaaattgtcccat

SEQ ID NO: 1051 - DNA, 588 bp, Homo sapiens
  I.1051 (W55919)
  misc_feature (547)..(547): n is a, c, g, or t
  misc_feature (576)..(576): n is a, c, g, or t
ttaagcattcacccaaacaaaaaaatcacaggtaaacccatgtttctgagatgccattattccaagcaaaataagagataatcccttcaagttaaattgaaaattttcctgaaaccatacatttcaagtgaaataagtaattctagataggacaatttaaattggataattttaaagtgtctataattgcagtggtttatttgcaaaattcctaaaaggaaaaattttatcactgccatcacagcaggtttcctcatccagatgaggaaactagacaaatgctagtgtgttttaactagctaaacaaaactaagttaaatgaacatttaaaagtttccctagcgggccattccttagcaaaatgttggaatccctgttgctacattgactaaaaggtcatgatgaatggaatatgtaagacttggctcatagaaacctaatcagatggttagaggtgttggcagtttaggacctgctggtcataaatgtgtgaacaaccttttggtaacctaacctattggacctggcatgttttttccttaccccnattcattacatgggaggcccaacctgagnttgctttactgg

SEQ ID NO: 1052 - DNA, 438 bp, Homo sapiens
  I.1052 (W44852)
  misc_feature (1)..(1): n is a, c, g, or t
  misc_feature (267)..(267): n is a, c, g, or t
  misc_feature (322)..(322): n is a, c, g, or t
  misc_feature (377)..(377): n is a, c, g, or t
  misc_feature (384)..(384): n is a, c, g, or t
  misc_feature (420)..(420): n is a, c, g, or t
  misc_feature (432)..(432): n is a, c, g, or t
  misc_feature (437)..(437): n is a, c, g, or t
nattcggcacaaggatattcgaaatcaaagaatctatcgtaagcttcgaaaagctgaattggcaaaacttcagcagaccctgaatgcacttaacaagaaggcagcattttatgaagagcaaatcaattattatgacacctacataaagacttgtttagacaacttaaaaagaaaaaatactcggagatcaattaaactagatggaaaaggagaacccaaaggggccgaagagagcgaaccacgtcgaagtacactgcagcaaagctnattgacgaaaggtgtcctgctagatatagatgatcttcaaacaaaccagtttaangaatgttacatttgatatcatagctacttggaagattgtaggcctttttccgatntaaggtnccaaaattcccttggggtgtttggagattgggaaangggtggccaccnccaant

SEQ ID NO: 1053 - DNA, 460 bp, Homo sapiens
  I.1053 (W42832)
  misc_feature (441)..(441): n is a, c, g, or t
ctcaaagatagaatggctcatgcaatgaatgaatacccagactcctgtgcagtactggtcagacgtcatggagtatatgtgtggggggaaacatgggagaaggccaaaaccatgtgtgagtgttatgactatttatttgatattgccgtatcaatgaagaaagtaggacttgatccttcacagctcccagttggagaaaatggaattgtctaagccaaaagaaagtctaattatatacagagataaagctaaacgtaattattatttaaatgaaagctatttttttaaatgaattgaaatttttcatgatgctactaatttgccactaaatactgcaaatggtcaccctgaatctcttctgacattggatgttatttgcttatattcttataattttaaatgagggcacagtgaaatgaaaattttatactctatgtttcngtttatttttaaatcctta

SEQ ID NO: 1054 - DNA, 372 bp, Homo sapiens
  I.1054 (W42742)
  misc_feature (226)..(226): n is a, c, g, or t
  misc_feature (364)..(364): n is a, c, g, or t
ggacttaatgtttcatatttattttctgacaccaacattaaaacaagagaatgctcattccacaatgaggaaattttctaatgaattttattatcaccagcatctttaaaaattaagaggaattctctcgagagtatatataaaaaagaaattaaaggcaaatattttgctgttaaggatttaaaaataaacagaaacatagagtataaaattttcatttcactgngccctcatttaaaattataagaatataagcaaataacatccaatgtcagaagagattcagggtgaccatttgcagtatttagtggcaaattagtagcatcatgaaaaatttcaattccatttaaaaaaatagctttcntttaaata

SEQ ID NO: 1055 - DNA, 410 bp, Homo sapiens
  I.1055 (W39739)
gagaaaatcctgtaccttagattgacaatactgttactttaaaagaaatatatacggtacaaattgctgattctacatgtgtacatttaacagatactcagttctgcaccacctaaatcaaaatggcatttgtatgctgatgattacatatgtggattgtagtatcctttgtgatgaatctttgataagatttataaagggcattgcaatactttttgactgtgtaaattaagttaattttttgtatgatgtacagtttgtttaaccttagagcttctatagatttctactttattatacttgaatgaggcagaaaagcactgtggaaaatctgtagctctggatgcaacatgcagacataccaaaaaaataataataaagcaaggtactgaagagcaatgttaacagaa

SEQ ID NO: 1056 - DNA, 434 bp, Homo sapiens
  I.1056 (W39181)
  misc_feature (83)..(83): n is a, c, g, or t
  misc_feature (320)..(320): n is a, c, g, or t
  misc_feature (330)..(330): n is a, c, g, or t
  misc_feature (335)..(335): n is a, c, g, or t
  misc_feature (434)..(434): n is a, c, g, or t
cgtttcacagtctgaagtgataagagcatatgataccacgaaacagaggcccgacgaatggtgatggggagagcctgaaacangcgctctgttacctctctaaggagagctaccaggttgtcaccgcagtctgctaaccaattccagtctggtccatgaagaggaaaggtagatctgagctcatctcgctgatggacattcagattcatgtatattatagacataagcactgtgcaactgtactgtaacaccatctcttttggatttttttaaggtatttgctaagtctttgtaaacggaaattgaaaatgacctggtancttgccaganggctnttcttaaacggagaataagtcagtattcttatgccattactgtggggctgtaactgactgtcagtttattgggctgtaccacaaggtaaccaaccattn

SEQ ID NO: 1057 - DNA, 445 bp, Homo sapiens
  I.1057 (W37336)
  misc_feature (33)..(33): n is a, c, g, or t
  misc_feature (41)..(41): n is a, c, g, or t
  misc_feature (242)..(242): n is a, c, g, or t
  misc_feature (306)..(306): n is a, c, g, or t
  misc_feature (321)..(321): n is a, c, g, or t
  misc_feature (336)..(336): n is a, c, g, or t
  misc_feature (346)..(346): n is a, c, g, or t
  misc_feature (400)..(400): n is a, c, g, or t
  misc_feature (414)..(414): n is a, c, g, or t
  misc_feature (421)..(421): n is a, c, g, or t
  misc_feature (440)..(440): n is a, c, g, or t
ttttttgctttttctctccctgttttgttttgnaacctatnggaagcagacctctgagtgaagtgtactatcccatcactgaagcccacaggaacaagtcctacaattttaaaaaggctcgatggaaaaatttctcaatcctgaaatcccctagggaaggggtcaggagaaagtgccatggttgatatttaagaactccacagctcttaaaaataagcacttatccctaacatgcaatactngcagatgcaagttaaacttatctgttaacagctgcctgctgttttctgctcccagatcgaaatngaagcaactcttctngataacgaagagatnacctgtctgnaggcaaacgaaacattggcacacagcacagccttcctcaatccacttgatcccnactcatctctcatnttatttnggcttcttttattccaggnttaat

SEQ ID NO: 1058 - DNA, 432 bp, Homo sapiens
  I.1058 (W37335)
  misc_feature (43)..(43): n is a, c, g, or t
  misc_feature (427)..(427): n is a, c, g, or t
ggtgatttaataataatttaaaactactatagaaactgcaganaaacggaagtggcttaatgatcctgaagggatttcttctgatggtagcttttgtattatcaagtaagattctattttcagttgtgtgtaagcaagtttttttttagtgtaggagaaatacttttctattgtttaactgcaaaacaagatgttaaggtatgcttcaaaaattttgtaaattgtttattttaaacttatctgtttgtaaattgtaactgattaagaattgtgatagttcagcttgaatgtctcttagagggtgggcttttgttgatgagggaggggaaactttttttttttctatagacttttttcagataacatcttctggagtcataaccagcctggcagtatgatgggcctagatgcagagaaaacagctccntgggt

SEQ ID NO: 1059 - DNA, 457 bp, Homo sapiens
  I.1059 (W37244)
  misc_feature (48)..(48): n is a, c, g, or t
agcggcgacggcgacgacgtaagggaaaaacggaagagggctttattnaacctaccggggacacagacctctggggaagctaaggatggtcctcccaagaagcaggtctgtggggatagcatcaagcctgaagaaaccgagcaggaggtggctgccgatgaaactaggaacctgcctcactccaagcaaggcaacaaaaatgacttagagatggggattaaggcagcaaggcctgaaatagctgatagagctacctcagaagtgccagggagccaagccagtcctaacccagtgcctggggatggattgcaccgggctggttttgatgcctttatgacaggttatgtgatggcctatgtggaagtgagccagggaccgcagccctgcagctctggaccctgggctccctgaatgccacaataaggtatatttgagtggcaaagctgtacccctcaca

SEQ ID NO: 1060 - DNA, 437 bp, Homo sapiens
  I.1060 (W33179)
ttttttttttattttcataacttgcttctgttgattttttttttttgtaaaactttcccaagacattttcagacttaaaaataaagtcagtgttacaggtgctggtcagccttcttacttgtacctcaaacactgggataaaggaggcggtccagggcaatgcagtgatgtctgtcaagacattccccctcccctaaactcagtagcagttgaggatgacatttcaggctagagagacccaaaatacctctgttccacctgagagcaaggtggaagttgcatcagctactgccccaagtgagcttcatcttctgattgtgggctttggaggaacgagagaactggctcttgggcactgtggaggggtacagctttgccactcaaatataccttattgtgggcattcagggagccagggtccagagctgcagggctgc

SEQ ID NO: 1061 - DNA, 437 bp, Homo sapiens
  I.1061 (W32272)
  misc_feature (350)..(350): n is a, c, g, or t
  misc_feature (364)..(364): n is a, c, g, or t
  misc_feature (400)..(400): n is a, c, g, or t
  misc_feature (411)..(411): n is a, c, g, or t
  misc_feature (433)..(433): n is a, c, g, or t
ttttttttttaatcggaattaagtaacatttattttacataaaacaatttccagagaatacatttaaaaaccatctagatactgattttttagcattacaaaaaattgagaggcacaattgaagtattcaaataaattgtgaggggtggaggtggggactatgctcactatctatgttgttccttagtcacttaaaggctctgcgtgcaagagtctttacatgaggcagtagtgcactttcatttagtaggaataaatcacataaaatatatacttttatacagaaagtgttattgtgttgtcattttcaattacttataaaaacttcatttgaattgcacaaaagttcncctttaaaattggntaactcccagaagaccagggccttagaactggtccnaaataattccnttaccaataattaggggttccnattt

SEQ ID NO: 1062 - DNA, 426 bp, Homo sapiens
  I.1062 (W15311)
  misc_feature (306)..(306): n is a, c, g, or t
  misc_feature (315)..(315): n is a, c, g, or t
aattgtgaccaattttattttagaactgcatttttgggtgttttatggtaatgtagattttattcaatatttatttttgcatattttttaaaaaattcccaaagcgatgcttttatacacatcttcccaatagtagtcaagtttggagatgatttatactgtagcctcaaggatgcaagaacaatgaagtaaaatcacaattctgggtaggtttttacagatatctgctaccaagacgagcaaaaagctcagggttttcagtccttttaaatagtttttcatctaacgcaagagaaataaactttnggaaaagtncaattttgaacccctcctgtggcttttacataaaaaagctttatgcatttgatgttgtaggactcaggcagttcatattagttgctgttttaggcactgctgtaagtacta

SEQ ID NO: 1063 - DNA, 491 bp, Homo sapiens
  I.1063 (W15233)
tttttttttttaaggccaaaggtgcaacatcaccgattttagtagcaaatgccttgaaatattcatttttgtaaatcactcttacatttggaaagtcaggcatgcagatcttacagcggaactggaagtaaactttctcttacatttctgggcatatgactactgaactagaaaaacacttactgaacctctttggcaaacatttatcaagacaattttggacacaaatgcttgtttagaaattttgctcaggaaggtgagtcagttccttaagaatgctggtttgtttcagcatatcctgaaatctaagtctgggataccaagagtccctttaactaaatatcatttaggagttttttaatggggtgggttaccttggtggtacagccaataaaactggaccagtccagttacaggccccacagtaatggcataagaatactgacttattctccgtttaaagaaagccctctggcaagataccaggtcat

SEQ ID NO: 1064 - DNA, 359 bp, Homo sapiens
  I.1064 (AA059360)
  misc_feature (152)..(152): n is a, c, g, or t
  misc_feature (234)..(234): n is a, c, g, or t
  misc_feature (241)..(241): n is a, c, g, or t
  misc_feature (264)..(264): n is a, c, g, or t
  misc_feature (273)..(273): n is a, c, g, or t
  misc_feature (288)..(288): n is a, c, g, or t
  misc_feature (317)..(317): n is a, c, g, or t
  misc_feature (333)..(333): n is a, c, g, or t
  misc_feature (339)..(339): n is a, c, g, or t
  misc_feature (348)..(348): n is a, c, g, or t
  misc_feature (354)..(354): n is a, c, g, or t
aaaaacctgattggcggctattactgtgattgcatcccgggctggaagggcatcaactgccatatcaacgtcaacgactgtcgcgggcagtgtcagcatgggggcacctgcaaggacctggtgaacgggtaccagtgtgtgtgcccacgggnttcggaggccggcattgcgagctggaacgagacaagtgtgccagcagcccctgccacagcggcggcctctgcgaggacctgnccgacgnttccactgccactgcccccaggnttctccggncctctctgtgaggtngatgtcgacctttgtgagccaagcccctnccggaacggcgtcgcngctatnacctggagngtgacnattat

SEQ ID NO: 1065 - DNA, 269 bp, Homo sapiens
  I.1065 (AA059314)
  misc_feature (4)..(4): n is a, c, g, or t
  misc_feature (212)..(212): n is a, c, g, or t
  misc_feature (249)..(249): n is a, c, g, or t
  misc_feature (255)..(255): n is a, c, g, or t
  misc_feature (260)..(260): n is a, c, g, or t
gcgnccgcggctgtggcagggatcgggaaggcagtcgttgggattggtgtcgcagagctcgccctcccagccgctggggcagaagcagcggaaggcgtccacctcatcgatgcatgtgcccccattgcggcagggctggcccaggcagtcgtcaatgttctcatggcagtaggtgccagtaaagccactgtcacagatgcaggaaaagttgncccctggctggcttgacgcagcgtccatgggggccanacacgncggangtggcttgt

SEQ ID NO: 1066 - DNA, 491 bp, Homo sapiens
  I.1066 (AA043039)
  misc_feature (35)..(35): n is a, c, g, or t
  misc_feature (170)..(170): n is a, c, g, or t
  misc_feature (491)..(491): n is a, c, g, or t
gtagcagccgggctggtcctgctgcgagccggcgnccggagtggggcggctgacaaacatgaacgttggagttgcccacagtgaagtgaatccaaatacccgtgtcatgaacagagctgtgtatgtggctgacatatgcattgggagttggcttgcttcatattgtctgnactcagcattcccttcttcagtgttcctgttgcttggactttaacaaatattatacataatctggggatgtacgtatttttgcatgcagtgaaaggaacacctttcgaaactcctgaccagggtaaagcaaggctcctaactcattgggaacaactggactatggagtacagtttacatcttcaccggaagtttttcacaatttctccaataattctatattttctggcaagtttctatacgaatatggtccaactcacttcatcctaaacacagcttctcctcctgagtggtactaaattcccaaaatggccacactacn

SEQ ID NO: 1067 - DNA, 494 bp, Homo sapiens
  I.1067 (AA042984)
  misc_feature (232)..(232): n is a, c, g, or t
tacggtaataaaaataatctttaataaacttgtatagagaggattccggtttacatgtaagtctgctttaaataaccacagctgaatgactggaaatgttcttttcttaacacaatgcccattcattataagttaagctggtcctagtttcttacaaatctcttatttccttgaatttatctactacaccctcactgtgatgccctttaacttataagctgggcctgcccancttgcttataaagcccctcttcagaaatgtaccaggtgtattaaacagaggcatcatttaatggaaatctgcacttcaaaacagcacttgaaggaccagccattggcctccaatgtaaatacttctcatttcacattatcacagaaacagtgcagtttactaaccactccttccttataagaaattcagtagctggtaaaattttttttcagtttcaaaacattttccaatacttattaattccaaagatccgaacaccatg

SEQ ID NO: 1068 - DNA, 555 bp, Homo sapiens
  I.1068 (AA043139)
  misc_feature (174)..(174): n is a, c, g, or t
  misc_feature (309)..(309): n is a, c, g, or t
  misc_feature (504)..(504): n is a, c, g, or t
  misc_feature (510)..(510): n is a, c, g, or t
gtgggacctttcctccatccctgttgtccggagccagctcagctgtcttccacactggtgctaactggcccaggcactggaagtggaatagaatgcagctggaggctacacatggcctctgcagcacacgcagctggagagggcttctgtccctgtcagcggcagagggcgttngggctggccggggcaccttgtccctgctatggtccacatgctaacgctgtccacctgccaggtggaagtgtatgtggctgtggcctccctcgtggaggtgccgtgctttaaagaggccttagtgcccgggatggnacaggtgttttgaatgggaggtgggagctcttgctctcctggtcactgcagaatgacagagaaggtgaagctccatgcatgtgtgcgcgggtgtatgtgcgctcagggtctctgtttaagtatcagctaaaagatgtgcttcctccgtgtctgtcatacactgagaccaacaggctacagtgtccctgattcttngaaaancctggagaagctggggagatgcggttcacaatgcctcggtatagg

SEQ ID NO: 1069 - DNA, 482 bp, Homo sapiens
  I.1069 (AA040870)
  misc_feature (368)..(368): n is a, c, g, or t
  misc_feature (392)..(392): n is a, c, g, or t
  misc_feature (411)..(411): n is a, c, g, or t
  misc_feature (441)..(441): n is a, c, g, or t
  misc_feature (446)..(446): n is a, c, g, or t
  misc_feature (453)..(453): n is a, c, g, or t
  misc_feature (481)..(481): n is a, c, g, or t
actcgccagtttcattattattaaagaatccatttgaatgtcagctcaacacagcctcctataccgaggcattgtgaaccgcatctccccagcttctccaggcttttccaagaatcagggacactgtagcctgttggtctcagtgtatgacagacacggaggaagcacatctttagctgatacttaaacagagaccctgagcgcacatacacccgcgcacacatgcatggagcttcaccttctctgtcattctgcagtgaccaggagagcaagagctcccacctcccttcaaaacactgtgcccatcccgggcactaaggcctctttaaagcacggcacctccacgagggaggggccacagccacatnacactccacctggcaggtggacangcgttaaaattgtgggacnataggaaggacaagggtggcccggccaggnccaanggccttntggcggtgacagggacagaagccctctna

SEQ ID NO: 1070 - DNA, 456 bp, Homo sapiens
  I.1070 (AA040449)
  misc_feature (423)..(423): n is a, c, g, or t
aaaaataaagagacatatttatttgtaataactctctttttttggtaataactatctttaacaatgctattatttatttttacccatggggaatgcataagtacaaacattgttagcttatttaacatttattaaaaatacagactctttatactaatgcagaaggataagcctcttcttcccactctaaaaatctcttctttgctgtaaagaattctcagtgcatgtgagctaagactctggagcactcagtagagaggtgtgtgggatgaccagacagaatcactaggttttctctgttttcaactagctgaaaataggaactctagttctaaatattcaaagtctaaatattagaaaaataaggagaggggatatggacaaaatgcttttcaaaatacatgcctggaggtggagactgcntggtatggttgcatgtgggtagcctcccagagg

SEQ ID NO: 1071 - DNA, 470 bp, Homo sapiens
  I.1071 (AA040448)
  misc_feature (1)..(1): n is a, c, g, or t
  misc_feature (90)..(90): n is a, c, g, or t
ngtcgctgccttaaagagtgagtttcagaagacacttaatgacaagacagaaaaccagaagtcactggaggagaatctggcgaccaagcnacaatctactcagggttcaggagcagctgcacatggctgaaaaggaattagaaaagaaatttcagcaaacagcagcttatcgaaacatgaaagagattcttaccaagaagaatgaccaaatcaaagatctgaggaaaagactggcacagtaagccacactgatcccgcctttggatttctctctctggattgatgtttgttctctgttaaatctaagcttgttccagagaggtcaagccggtggtagttgctgggatcatttagtccagaagccttcatttgaggaaagtgggaggagctctgggcctgaccttatctataatgcccacccagggttctttttaggttcatctaggcctttagactcacacaggccctac

SEQ ID NO: 1072 - DNA, 428 bp, Homo sapiens
  I.1072 (AA035097)
  misc_feature (1)..(1): n is a, c, g, or t
  misc_feature (28)..(28): n is a, c, g, or t
  misc_feature (110)..(110): n is a, c, g, or t
  misc_feature (156)..(156): n is a, c, g, or t
  misc_feature (158)..(158): n is a, c, g, or t
  misc_feature (267)..(267): n is a, c, g, or t
  misc_feature (351)..(351): n is a, c, g, or t
nttctgctacaaactaattttattgatncaccccttggtcctgggccaacagtatatcttcaagctcttacttcccccagcaatgccccagacaaccgaacacatgttgnaggggctcccagactggcttacctctgacggggcccagcacccggntngtgaccttttgggtactagagcccaggcctggcagccctgcaggccgactgccatgaaaaggaaagctgggggaattcttcatctgtggagaattttgttggctgctgntgctaccaccggcacttgtgtcccttagaaacttcgtgcccgactcaaggtgttttcggagcaggagacaggcaacccattgtnacttttgggtcggagttcgaaggcccctcttcttgttgacacccacattcagagtgctggcttaggcctcggctgtt

SEQ ID NO: 1073 - DNA, 276 bp, Homo sapiens
  I.1073 (AA035096)
  misc_feature (86)..(86): n is a, c, g, or t
  misc_feature (128)..(128): n is a, c, g, or t
  misc_feature (249)..(249): n is a, c, g, or t
  misc_feature (255)..(255): n is a, c, g, or t
  misc_feature (264)..(264): n is a, c, g, or t
caggaacagaagctcaacagtgtgtggattatgccacaacagtctgcggggcttgaagagtcagcccctgataccatcccccccanagagagtggcgttgcttactatgtggacctgcatggacatgnttccaaaaggggctgcttcatgtacggaaacagctttagtgatgagagcacccaggtggaaaacatgctatatccaaagctcatctccttgaattcagcccacttcgacttccagggctgnaatttntcagagaanaatatgttttcc

SEQ ID NO: 1074 - DNA, 256 bp, Homo sapiens
  I.1074 (AA032013)
  misc_feature (1)..(1): n is a, c, g, or t
  misc_feature (250)..(250): n is a, c, g, or t
naataaattatctagtcttgggtatttcttcatggcagtatggaaatggactaatacatctagtcaatcctactttcctaaaaggtagagaaggaatggctagagaatataatcactactactatggaaagcatcatgatatagcagaaagaacattcttgggaccaaatatactaggctttgaattctggtattgccactaacttactttataaccttttcatcagcaaaataaaaacacggattctcntgcaga

SEQ ID NO: 1075 - DNA, 206 bp, Homo sapiens
  I.1075 (AA032012)
ggcgcgagatggattccgggtgctggttgttcggcggcgagttcgaggactcggtgttcgaggagaggccggagcgcggtcaggaccccgcgtcctactgcgccaagctctgcgagccacagtggttttatgaagaaacagaaagcagtgatgatgttgaagtgctgactctcaagaaattcaaaggagacctggcctacagacga

SEQ ID NO: 1076 - DNA, 417 bp, Homo sapiens
  I.1076 (W31201)
  misc_feature (105)..(105): n is a, c, g, or t
  misc_feature (185)..(185): n is a, c, g, or t
  misc_feature (387)..(387): n is a, c, g, or t
gattgaacagaatttattggctgtctttgagtgtctttggtatggctttggcagggctgtctgggttcctccgctttgcttgtttttgggctgctgctgcacatntctaaggctcttcttcgcttcttcagcttttgagtctcctggaaaacccgaatgcacagagccttcttggtcacgaatcnggcggtgggctcttcggtaatacagaggggggaaggtgtactcaattcccagcccccagcatatcttctcaaagacatcatagttggtgttacggaggtttttgagcatctttttcctcctggtcaatgctcaattaagcagatagcgttttgtgggctttgtcctttcggatggttctccaagtggttccttcaataactngcggaatcctttggacaagaccaaggcaaa

SEQ ID NO: 1077 - DNA, 321 bp, Homo sapiens
  I.1077 (W31075)
  misc_feature (2)..(2): n is a, c, g, or t
  misc_feature (296)..(296): n is a, c, g, or t
  misc_feature (303)..(303): n is a, c, g, or t
  misc_feature (313)..(313): n is a, c, g, or t
anttcggaacaggcagccatcttccagtaattcgccaaaatgacgaacacaaagggaaagaggagaggcacccgatatatgttctctaggccttttagaaaacatggagttgttcctttggccacatatatgcgaatctataagaaaggtgatattgtagacatcaagggaatgggtactgttcaaaaaggaatgccccacaagtgttaccatggcaaaactggaagagtctacaatgttacccagcatgctgttggcattgttgtaaacaaacaagttaaggggcaagaattctngcccagnggaatttatntgcggggt

SEQ ID NO: 1078 - DNA, 340 bp, Homo sapiens
  I.1078 (W30750)
  misc_feature (306)..(306): n is a, c, g, or t
gtgtttaatcgggaagaagagagaagttgggaggtctctgaggaatatgtgtgtcttctgatcaaaatcatttccgaggagaaattgaggaaaccatcactgaaagctttggtaatgatcatagcaccttggatgggtattccagaagaaccaccttgtcttcaaaaatgtatcacaccaaaggacaagaaggttctgtttgtctccggtcatcagactgtgcctcaggattgtgttgtgctagacacttctggtccaagatctgtaaaccctgtcctgaaagaaaggtccagtgtgtaccaagcnttaggagaaaaggctctccatggacctaggaata

SEQ ID NO: 1079 - DNA, 262 bp, Homo sapiens
  I.1079 (W25330)
  misc_feature (1)..(1): n is a, c, g, or t
ngcactgctggagagattcctgttgttgctatcagaactgctaaaggagagaagtttgtcatgcaggaggagttctcgcgtgatgggaaggctctggagaggttcctgcaggattactttgatggcaatctgaagagatacctgaagtctgaacctatcccagagagcaatgatgggcctgtgaaggtagtggtagcagagaattttgatgaaatagtgaataatgaaaataaagatgtgctgattgaattttatgcccctt

SEQ ID NO: 1080 - DNA, 390 bp, Homo sapiens
  I.1080 (W24987)
  misc_feature (47)..(47): n is a, c, g, or t
  misc_feature (320)..(320): n is a, c, g, or t
cgtacggccaacgccaagtaggggattgcgttccctccagtcgcagncctatcagatttggatatgtccttcatatttgattggatttacagtggtttcagcagtgtgctacagtttttaggattatataagaaaactggtaaactggtatttcttggattggataatgcaggaaaaacaacattgctacacatgctaaaagatgacagacttggacaacatgtcccaacattacatcccacttccgaagaactgaccattgctggcatgacgtttacaacttttgatctgggtggacatgttcaagctccgaagagtgntggaaaaacctaccttcctgctatcaatggcattgtatttctggtggattgtgcagaccacgaaaggctg

SEQ ID NO: 1081 - DNA, 199 bp, Homo sapiens
  I.1081 (W24475)
  misc_feature (191)..(191): n is a, c, g, or t
tccacaagcactagatatgtttctgtgatgattttgagataagtactcaaaattacatagttcatttctaagagaaggccatgttttctacctattgggtttttctaccctgagatactatggcttctttgtaaaggtatataaagtgtttttcaaagcggaaagatactgttaaattcagctgccagcgngaaaccaa

SEQ ID NO: 1082 - DNA, 422 bp, Homo sapiens
  I.1082 (W24279)
  misc_feature (51)..(51): n is a, c, g, or t
  misc_feature (280)..(280): n is a, c, g, or t
  misc_feature (281)..(281): n is a, c, g, or t
  misc_feature (299)..(299): n is a, c, g, or t
  misc_feature (301)..(301): n is a, c, g, or t
  misc_feature (316)..(316): n is a, c, g, or t
ggaaaatgagccttaatttgttaaacctatacactgagaactagcctcagnttaatattctcattgcatttgcaagatctgagcaaataagattaagtaaaacaaatcaattgtatatataattgacctttttgtggaacatgtagtttatagaaagtatactctaaagggaatttgccgaagaccttttactgattgaacagttgtgctacaatcaacttttcatagtacatgacctgcattccacatctcaagtctaacaagtttaagtagtgatgtnnaggacgtagtgcgaaagngnaaacccggactccangtgctttgttaatggttttattaactggccctgtctcaggaacatcttaacagatgggcaaaaaaacaaaaactttttttcaactcctatggagtggcaactggaa

SEQ ID NO: 1083 - DNA, 428 bp, Homo sapiens
  I.1083 (W24107)
  misc_feature (216)..(216): n is a, c, g, or t
  misc_feature (237)..(237): n is a, c, g, or t
  misc_feature (252)..(252): n is a, c, g, or t
  misc_feature (258)..(258): n is a, c, g, or t
  misc_feature (321)..(321): n is a, c, g, or t
  misc_feature (340)..(340): n is a, c, g, or t
  misc_feature (358)..(358): n is a, c, g, or t
  misc_feature (399)..(399): n is a, c, g, or t
  misc_feature (412)..(412): n is a, c, g, or t
gtgattcttgtaacttgaggacttctccacacccccattcagatgcctgagaacagctaagctccgtaaagttggttctcttagccatcttaatggttctaaaaaacagcaaaaacatctttatgtctaagataaaagaactatttggccaatatttgtgccctctggactttagtaggctttggtaaatgtgagaaaacttttgtagaattatcntataatgggattttgggaatngcctccctaaaaggngttaanaggtgaatttgccataccaaagttaacagcctatgtaatttttaccatacttaaggagataancatatcagtggttccaagnaagtgataatgggatccnggttgaaaggttaaccataatggtgtatataatttggtttngaaatataatttnataagtaattttccaa

SEQ ID NO: 1084 - DNA, 163 bp, Homo sapiens
  I.1084 (W23890)
  misc_feature (2)..(2): n is a, c, g, or t
  misc_feature (5)..(5): n is a, c, g, or t
  misc_feature (16)..(16): n is a, c, g, or t
tnagngatgagattcngaatatgaaggaggaaatggctcgtcaccttcgtgaataccaagacctgctcaatgttaagatggcccttgacattgagattgccacctacaggaagctgctggaaggcgaggagagcaggatttctctgcctcttccaaacttttc

SEQ ID NO: 1085 - DNA, 190 bp, Homo sapiens
  I.1085 (W21509)
  misc_feature (1)..(1): n is a, c, g, or t
  misc_feature (116)..(116): n is a, c, g, or t
ntcctcttttaataatgttatttgaacaccacatattttagatttatcttatttgaaagtattagttccattgtgcctggaaaccacactcctttagattgggggccgagacgacnaacccaacattgaggagagtttatttttaaacatggctagttgtcagtatgtacgtgagctagtatttttatga

SEQ ID NO: 1086 - DNA, 310 bp, Homo sapiens
  I.1086 (W21365)
  misc_feature (8)..(8): n is a, c, g, or t
  misc_feature (14)..(14): n is a, c, g, or t
  misc_feature (293)..(293): n is a, c, g, or t
  misc_feature (307)..(307): n is a, c, g, or t
gcattggncggtgnaaattcaagtcctgttaaccccagtggtgttctttgatgtcagtattggcggtcaggaagttggccgcatgaagatcgagctctttgcagacgttgtgcctaagacggccgagaactttaggcagttctgcaccggagaattcaggaaagatggggttccaataggatacaaaggaagcaccttccacagggtcataaaggatttcatgattcagggtggagattttgttaatggagatggtactggagtctccagtatttaccgggggccatttgcangatgaaaatttttnact

SEQ ID NO: 1087 - DNA, 210 bp, Homo sapiens
  I.1087 (W21349)
  misc_feature (203)..(203): n is a, c, g, or t
ctaagtggaaaaaccccaggggacttctatgatagacggacaactaagcctgagtttttgagacctggtcctcgaaaaactgaagatacctacttcattagttctgcgggaaaacctacaccaggcactcaaggaaaaataaaattagtaaaagaatcttctctgtcacgacaatcaaaagatagtaacccttatgcaacttncaacttt

SEQ ID NO: 1088 - DNA, 226 bp, Homo sapiens
  I.1088 (W21309)
  misc_feature (2)..(2): n is a, c, g, or t
  misc_feature (4)..(4): n is a, c, g, or t
  misc_feature (5)..(5): n is a, c, g, or t
  misc_feature (14)..(14): n is a, c, g, or t
  misc_feature (201)..(201): n is a, c, g, or t
angnngagccgagnagtcggtatggaagatagatcggcttccagacaaaaattcaagtctagatcatccccattgtctgtcatacaaattagagcttggatcagaccaagaaattccctctgattggtatccatttgctactgttcagttttccgtgcctgacacctgtgcctcaaggacagaggtcaggtctctgggaantgggagagtgatgtccagccacaga

SEQ ID NO: 1089 - DNA, 297 bp, Homo sapiens
  I.1089 (W21430)
  misc_feature (8)..(8): n is a, c, g, or t
  misc_feature (185)..(185): n is a, c, g, or t
  misc_feature (196)..(196): n is a, c, g, or t
  misc_feature (210)..(210): n is a, c, g, or t
  misc_feature (214)..(214): n is a, c, g, or t
  misc_feature (233)..(233): n is a, c, g, or t
  misc_feature (239)..(239): n is a, c, g, or t
  misc_feature (255)..(255): n is a, c, g, or t
  misc_feature (272)..(272): n is a, c, g, or t
  misc_feature (282)..(282): n is a, c, g, or t
  misc_feature (288)..(288): n is a, c, g, or t
cagaccanagaaggatgatgccaaggcagcccccaaggcagctccagctcccgcacctccccctgagcctgagcgccctaaggaggtcgagtttgatgcttccaagatcaagattgagttcacacctgagcagattgaagagttcaaggaagccttcatgctgttcgaccgcacacccaagtgtnagatgaagatncacctaacgggcantgtngggatgtccttccggcggncgctgngccagaaccccacacnggcagaattgctccgtntcctggggancccaangccgggaag

SEQ ID NO: 1090 - DNA, 437 bp, Homo sapiens
  I.1090 (W21045)
ggggattctcccagctgctaaatttaaacagtaaatatcacattttgtcattaacacagctataacttgccgtggttctcagatttattttggactattttgatgccaagtgaatataagagtttgtactgaaaccatttatttctttctattttgctatttgcaaatgcttgttatcttccctacatgaagtggcagtaacctttttcacatttaagctacccttctaccttttgaagtgatttgcagttactcatctgagacagcatcagtatttgacctaaatcattgtttcacaactgaatagtcttgttcttttagtagcaatgaaatcctaagctcttgaggccattcacctgccaacctgaccatactgctttcaaaagtcttttctcatcagtagaatctattttggtcacttctagtcaatgaaaaat

SEQ ID NO: 1091 - DNA, 443 bp, Homo sapiens
  I.1091 (N98510)
ttttttttgctttaaatatttctttgggggagaggacaccacacttctactcaatgaagagaaacatttttgtagcccagaggtcctttatttttttttttaacacctattatgccatgaattcatagggaataggttccagcagctcaggctccttcccattggttctcacaaagtgtgcttctctgggtggagcaggctggcgctttagttgaacccaggtacctttctctttggcttctttctttttctgatcattttccttcacacgtttcaggaagctatctcggctcttagagtgcttaatgtgctcaatacgcacattaattctcttggcaagaatcttggccttaacttgtttgttttacaacaatgccaacagcatgctgggtaacattgtagactcttccagttttgccatggtaacacttgtgggggcaatc

SEQ ID NO: 1092 - DNA, 462 bp, Homo sapiens
  I.1092 (N95495)
  misc_feature (447)..(447): n is a, c, g, or t
tttttgccaaacattagagtttgttttattgcatgacgtttgcataagaaaaaaagttattgaaaactgtaaggcatcatgcaatcattgaataagctaattattaactgtacacttaagataggtggacatataatctaaaatttaaaaactagttccagaaaagtacataaaaaatttaacatgatgagcttttaaatatggtttatagtttcatgttgttaaaaagtgcttcaaatgtactgctggaaagttgctctttacaaatggcgctggggtgatgtcagattataaactgtaaaaaccaagtacttttatggaattagaaagctaacattgtgatccccaacttcttgaaccagttttcaatccccattcaaattaagttgattaatattaataactaaaaacactggtttatacccccaaaggcttggatccagtagnctgtggccaccaatc

SEQ ID NO: 1093 - DNA, 502 bp, Homo sapiens
  I.1093 (N95217)
tgagacagagttttgctcttgttgcccaggctggagtgcaatggcgctatctcacctcactgcaacctctgcctcccgggttcaagcaattctcctgcctcggcctcccaagtagctgggattacaggcatgcaccaccatgcccagctaattttgtattcttagtagagacagggtttctccatattggtcaggcttggtctcaaactcccgatctcaggtgatctgcccgcctcagcctcccaaagtgctgggattacaggcaagagccaccgcgcccagcacggtcttttcaaagaccagataatttatttaaccaactgtctaaagatggacattgtgattgatcacactattttatatgtaacattgaatggagtgggtgagtctaggaaacatctctcctaaaagtttacattttcatgactagaagtgaccaaatagatctactgatgagaaaagacttttgaaagcagtatggtcagttggcagtgaatggctc

SEQ ID NO: 1094 - DNA, 553 bp, Homo sapiens
  I.1094 (N95041)
  misc_feature (12)..(12): n is a, c, g, or t
  misc_feature (21)..(21): n is a, c, g, or t
  misc_feature (30)..(30): n is a, c, g, or t
  misc_feature (37)..(37): n is a, c, g, or t
  misc_feature (42)..(42): n is a, c, g, or t
  misc_feature (45)..(45): n is a, c, g, or t
  misc_feature (56)..(56): n is a, c, g, or t
  misc_feature (59)..(59): n is a, c, g, or t
  misc_feature (81)..(81): n is a, c, g, or t
  misc_feature (85)..(85): n is a, c, g, or t
  misc_feature (102)..(102): n is a, c, g, or t
  misc_feature (109)..(109): n is a, c, g, or t
  misc_feature (113)..(113): n is a, c, g, or t
  misc_feature (115)..(115): n is a, c, g, or t
  misc_feature (117)..(117): n is a, c, g, or t
  misc_feature (119)..(119): n is a, c, g, or t
  misc_feature (121)..(121): n is a, c, g, or t
  misc_feature (123)..(123): n is a, c, g, or t
  misc_feature (125)..(125): n is a, c, g, or t
  misc_feature (127)..(127): n is a, c, g, or t
  misc_feature (129)..(129): n is a, c, g, or t
  misc_feature (131)..(131): n is a, c, g, or t
  misc_feature (133)..(133): n is a, c, g, or t
  misc_feature (135)..(135): n is a, c, g, or t
  misc_feature (147)..(147): n is a, c, g, or t
  misc_feature (159)..(159): n is a, c, g, or t
  misc_feature (168)..(168): n is a, c, g, or t
  misc_feature (174)..(174): n is a, c, g, or t
  misc_feature (182)..(182): n is a, c, g, or t
  misc_feature (232)..(232): n is a, c, g, or t
  misc_feature (261)..(261): n is a, c, g, or t
  misc_feature (309)..(309): n is a, c, g, or t
  misc_feature (436)..(436): n is a, c, g, or t
  misc_feature (549)..(549): n is a, c, g, or t
aaaaaacccccncctttcccnaaacctttnaaaaaanaaggnggnggaaaaatttnaanaaggccctattgggcccggggncccnccccgggccaaaaattnttttgtntgtntntntntntntntntntntntnttggaaggaagnggggaaggcccnttaaggctnttttgnttccaacnccccaaggggcttggggaagattggccaaggttaaggcggttggattctnccggggcttcaacttggcttaaccttccnaaccttcccaggtttcaagttggattcttcaaggaaacttaggccagnattttggccagggcaattacagtaactttaaacttggatttctactggacatgtttataagttacccacatacctccaaaaacgtattaacagcaagatacaggactatctctgactttaataaggnacaaggtaagattgtgggagttgttgagctttctctttgccatatttttcagagaatatttatactaacaagcagcaaccaactaaataattaaaacagagtaacctagtggnaacc

SEQ ID NO: 1095 - DNA, 456 bp, Homo sapiens
  I.1095 (N94525)
ttttttttttgatattaaatgttaaattttatttcaaaaactatcacagcctaaagggaaatataatttaagcattaagatagtacatttcagaaaataagctagtattttcatgttacattttaggtacctatcatttgtcattccaagagatccttgcgttctagactctagaattaaatggggtaaagggttatgcttttaagaactataagctgaaatgatttacttcagttcaatatagaatatttgtcagtcaagataacaatcaatgtgtacaaaaatttacataacaagaggaaaaataggcagtgcagcacctttagaaaaataattaaaagtttcattgcatttacaggtaagtgccacactgagaatttacaatacagtaatttactgcaatcacaggggagttccataaagaaacaaagctcttacactccaggtttttgggaa

SEQ ID NO: 1096 - DNA, 318 bp, Homo sapiens
  I.1096 (N93797)
  misc_feature (314)..(314): n is a, c, g, or t
acgtaaacccagacatgcttctgctctttttaattagacagataaaattagcaaggagattaaggtaaaaggagaaatttaaaataattaaatgttaggtggaatttacaaaagtgaattgaacaatgaggtacaacaaggaatgtaaagagaaacacagacacatttgaaacattcctcggatgccacacggcttaagccagtccataggtaaagcaagaattctcccttgtcacttcttgaattgcagattccagtgatgtgaaagaacattctccagaaacactttccttctccttttcttgagatgctancaag

SEQ ID NO: 1097 - DNA, 177 bp, Homo sapiens
  I.1097 (N93541)
tttatattatttgatttggtatttaataacagttataagtacaatggtagacactgaaaaagaaaacccttaatagaaaagaaaaagacaatttaaaattagattttgttgaagggtgttataagtgcaactttatccatatgcattccttttaaggcattttcattgtccaaatat

SEQ ID NO: 1098 - DNA, 202 bp, Homo sapiens
  I.1098 (N93496)
  misc_feature (197)..(197): n is a, c, g, or t
ttaccaaatatagccaattattatttaccaacggaagaggacaggtaaataagtaattcaaaagcacagatacttccagatctacattttagcctgtggtttcaacatcattctacacctagccacatttcagaggcaagaaagagggaaaattaactattttggtttatgtctcctttgattccctttaccccttnacccc

SEQ ID NO: 1099 - DNA, 385 bp, Homo sapiens
  I.1099 (N93349)
  misc_feature (340)..(340): n is a, c, g, or t
  misc_feature (362)..(362): n is a, c, g, or t
  misc_feature (376)..(376): n is a, c, g, or t
tttaaaggggtctcatttattgtcactgttccaaatgtacaaaaaaaattagaaaatacccccaactcaaccccacccccacaacatttcccccaacacaaataatttttcccaaaaccacaaacataaactggtcctggtatttccataaacagtgcagctaagaaacagtttagagaaaatttaacaggattcagattatatccattctgtcctctcggccctgagaggtaataattcccatatgggtcctagtcctccccaatggttttcccatctctgatggaaagagtccttttacaaagtggtgtttggctactggctttaggagatcctcccngtggccttcttcttgccttccntgggggttttcttncttggaaat

SEQ ID NO: 1100 - DNA, 195 bp, Homo sapiens
  I.1100 (N93041)
ttaccttttttattttttaatttatttgttcacgttcatcataataaatttgtttaatgtaaaataaacaaatccttgacaagggtttaacaggattttcaacatctgtgcagataaatgtaatttattcctaaagaaaaaacagtttagaacatgccaggaaacctgcttttaacatttttggataaaggtgtg

SEQ ID NO: 1101 - DNA, 201 bp, Homo sapiens
  I.1101 (N93015)
ttttttttttttacgcatacaaaaaaactttatttacagttgaaaacttaaagacaatcttggattctgaatctctgacacttccatggtctcttgatcaaatggggcagcagcaggcagggaagcaaagacgggggccagtccagattatcttactcaagaacaccaccaagaagaagggaaggcctgattcagtctttt

SEQ ID NO: 1102 - DNA, 162 bp, Homo sapiens
  I.1102 (N92912)
  misc_feature (36)..(36): n is a, c, g, or t
  misc_feature (158)..(158): n is a, c, g, or t
gccggcaagaagccatttattcatgaggcccatggngtcggggacagagctgctgtcacaggtaagcacagcctgagaggggccagagacggcaaccacgtggagaggtccaagggtttttgcaggagtcttggtaaggctcccctccttcccacgantcca

SEQ ID NO: 1103 - DNA, 463 bp, Homo sapiens
  I.1103 (N92296)
tttttttttggcattattaatggtgagcaggcaggtttattcagaaaaagctcagattcatactcgtaaaagtctgagaaaaacattaaaatgctattacaatacagttgacccaaacaacacaggtttgaactgcgcaggtccacgtatctgtggattttcttccacctctgccactgggacagaaagaccaactcctcttgctcctcagactactcagcgtgaagatgaggatgaagacctttaggatgattcacttctacctaacgaatagtgaatatattacttccttaataacatttttttttcctctagcttaccttcttgtaagaatacggaatataatacatacaacacaaaaaatatgttaatcaactgctttatgttatcaataaggcttccagtcaattggtaaactaactactaatttaagtttttgagggggtcaggttaatatgcagat

SEQ ID NO: 1104 - DNA, 153 bp, Homo sapiens
  I.1104 (N91948)
  misc_feature (148)..(148): n is a, c, g, or t
taaagaaaaacaaaaagaactttactttcctatgttaatacaggtcaagagacctttcttctcaaaagggttggtaacaccagttcttagcaataaacataaggcacttgtttagattacaacatcactccattttttccacttgggngtgtg

SEQ ID NO: 1105 - DNA, 231 bp, Homo sapiens
  I.1105 (N91929)
  misc_feature (213)..(213): n is a, c, g, or t
gaaaatactataaattatatttcaaacaaatatatacacattatgttaaccttcaacaggatccattatcactacttagaacactgatatgtttatctcttaagtatgtaaaaattacatagctgttaactttgtatggcaattcacctataacacatttaagaaagcattacaaaattcattatatgataattctacaaaacgtttactcgnttttaccctttcccaaag

SEQ ID NO: 1106 - DNA, 583 bp, Homo sapiens
  I.1106 (AA019961)
  misc_feature (439)..(439): n is a, c, g, or t
  misc_feature (450)..(450): n is a, c, g, or t
  misc_feature (517)..(517): n is a, c, g, or t
  misc_feature (552)..(552): n is a, c, g, or t
ctgggcagaaaaaggactagaaagggagcactttaatgaacagaagtacagacgtgctggcaaggatggaaatctccactggttcctggcccccttcacctccatgcatccccagcatgggtgttaatcattacccaagctctcgctgttccccctcaccccctgcagagtccagcaggtctagatacgtgctctttgaaatgtgttctgggattaaaaatggtgccctgaggctgtctaaccctcacaaaagacagacacatgcacacacgggccttggggaagggctgtgtattagcagtcaggtgggccctcctgggagagcttgctcaagaactcttctcggaaggaaacccaccttaaggtagggttctgataggcagagctcccagaggggacagccagctgctagaagatggggttaatccagggtttgttnagggtttaaancaacgggcaagggaaggcaaaccgagtcaaatggttttggaaacctactgtgtgcaggggcattctnaaggaatcctgaactctgcctcttttgcatgaccnaagctgaagccaggacatacattacgaaggg

SEQ ID NO: 1107 - DNA, 439 bp, Homo sapiens
  I.1107 (AA019891)
  misc_feature (5)..(5): n is a, c, g, or t
  misc_feature (7)..(7): n is a, c, g, or t
  misc_feature (13)..(13): n is a, c, g, or t
  misc_feature (19)..(19): n is a, c, g, or t
  misc_feature (238)..(238): n is a, c, g, or t
  misc_feature (336)..(336): n is a, c, g, or t
  misc_feature (406)..(406): n is a, c, g, or t
gcttntngggcanaaggangccccgccggtccttctttgaatccttcatccggaccctcatcatcacgtgtgtggccctggctgtggtcctgtcctcggtctccatttgtgatgggcactggctcctggctgaggaccgcctcttcgggctctggcacttctgcaccaccaccaaccagagtgtgccgatctgcttcagagacctgggccaggccattgtgcccgggctggccgtggnattgggcctggtacgcagcgtgggcgccttggccgtggtggcgccatttttggcctggaattcctcatggtgtcccagttgtgcgaagacaaacactnacagtgcaagtgggtcatgggttccatcctcctccctggtgtcttttcgtcctctcctccggcgggctcntggggttttgtgatcctccctcaagaaccaaat

SEQ ID NO: 1108 - DNA, 414 bp, Homo sapiens
  I.1108 (AA019259)
taaaaggaaaacagtgtctttattgtgtgtagttctaacaaacgttcactgtgtgcgcattccagcagaaagagacaaagatctttgttcaaaatattctgaaaaaggtaaactaactgcattattgaatacacaaaaggaatgttaccgttacttgttcatagtcaaaggtgaagttaaaaaaaaagggaagttaaataactgaagtaatggtttgcccaaatagcaaacgtaggatacaggcgtgggcaaagagcagctactgaagctcatgaggaggatgctggatatagggtaggtaacttgacaaatgcctctgcttctttggaaccttcttcctagatcacccccacaaattccaaacctggctctttcagagcacaacagccaaatgtaactaaacttcctcattac

SEQ ID NO: 1109 - DNA, 443 bp, Homo sapiens
  I.1109 (AA019258)
  misc_feature (407)..(407): n is a, c, g, or t
  misc_feature (416)..(416): n is a, c, g, or t
tgtatcctgtgatttagcagttgaatgaatacagaattcatcaaaataatattaaccttgtacttgcacacttggatatatttgggagtaattttaggagatttctggctgacttttattatcagggatatgggtttagtaaagcttttatctttagaaaaatgtttgtatgcattataagatgctacttttaagacaatattgaaaaaaactttggttattatttaacaaaagtggtatgacttgatgcttctctatttaaaggcaaggaaggattggtatatgattgcctgtaataaataaattgcgtgattattggagtacattggggtaaaagtaaagaacagaggaagtattgaggagcctgaaagggaacattcaaactaaagcccaagcctgaagataancttgaatcngttggtaaaagtgtgtttggccaatgg

SEQ ID NO: 1110 - DNA, 427 bp, Homo sapiens
  I.1110 (AA018580)
  misc_feature (363)..(363): n is a, c, g, or t
  misc_feature (419)..(419): n is a, c, g, or t
acacgtgaaaaaaataatttattacagactcttttacacattaacatggaacatttatacatatatcgatgtgctgatatgaaatactaaatttaaaggcaaacatttttacacaaaagtagttgcactctattttataaagatagatattaataagttatcagagacatttaagagctagaggccaattattccaacagtaatgcattctatgctgaaagtaaactaagttttctgaacatgatgtcctggatataatcacattcttctaagctaaggaaagggagctcatttctgggaatacaaggccaagaagggctctaacagcagtatcccagcagtgtgtttccagatttattcttnggatgtggttggagctcccaacatttagcctgaactaatgtaacagctcaatgtgnaacaatgg

SEQ ID NO: 1111 - DNA, 329 bp, Homo sapiens
  I.1111 (AA018579)
  misc_feature (55)..(55): n is a, c, g, or t
  misc_feature (56)..(56): n is a, c, g, or t
  misc_feature (77)..(77): n is a, c, g, or t
  misc_feature (237)..(237): n is a, c, g, or t
  misc_feature (250)..(250): n is a, c, g, or t
  misc_feature (276)..(276): n is a, c, g, or t
  misc_feature (287)..(287): n is a, c, g, or t
  misc_feature (292)..(292): n is a, c, g, or t
gaactgactgggactgagatcagctgcttacagtctcaagggtcaaatgatctanntacctgaagcagatagcatantttttctatgttcaccaggtgtcatgaacctggacgatttgacaaggagagggctgtatctaagtgacatccctctgcatgatgccactctcgatcttgttcttttgggagaacaatttagagaggaatacaaactcacccaagaactggaaatcctcantgacaggctacangctcaccgttaagaagcccttggaangatgaaaaganaaagnccggacacatttgctgtattctgtcccttcctccggt

SEQ ID NO: 1112 - DNA, 495 bp, Homo sapiens
  I.1112 (AA018472)
ggttagacacttgagttttagcattttaccattcctgaaatggatgtaatttaaactgtggtatgtaaatttaatagtagtattgttgaatggcacaatgcttacagaggtagattgcattttgtcaatatataaaatttaaatataatattgatagctgtccataaagggggtgccacatattaaagaaacttaagtggaaccagaagaaaaagaaacaaacttacttttcttcaatgcttagtatgttttactctagtgctaaataaaaactctatcttcaaatgtttagtgggttaaattgagaaactatttcagaaaaaaattctaaggttacagcatattcaaagaaaagcattagttaccactttttaaaaagcttttttttcaaactgcaaatttcataaaaatgcaaactgtgtaaacagggcctcttatttttataacttgtgtaaaaagggaaagcattcatatttaaagtttaagtatattaag

SEQ ID NO: 1113 - DNA, 427 bp, Homo sapiens
  I.1113 (AA018443)
  misc_feature (238)..(238): n is a, c, g, or t
aatatttacatgtttttaatatgctttgtattaatattcaattttttaaatgaattgattacttaaaaacacattgttatattcatatgctggataattctcagtttgctgctgcttactctccattgattttggtgtcataaattccatgtttcatggaatttagaattttgcattttctattttggtttcaaaatcaaattggatacctttacataaaatgagtatatttagttcngttcaaagaaacttcaacaccagactgctgtagggggccaactgagagtttgttgaatagtaagaattttcccatgggtaaaacaaatcattttgggacattctcttgggtagcaagcactgataagaggagtacaaagattaatttaaaaagtttcactataaacaattgccagtcacaatctcattt

SEQ ID NO: 1114 - DNA, 339 bp, Homo sapiens
  I.1114 (AA017342)
agatgaagtagagtgctctgacaaggacgagcccgacctcgatggggatgtgtccagcgactgccccaccatccgcgtcccactgacatccctcaagagccaccagggcgtggtcatcgcctccgactggctggttggggggaagcaggctgtgactgcctcctgggaccggacggcaaacctgtacgacgtggagacgtccgagctcgttcactctctgacagggcacgaccaggagttgacgcactgctgcacacaccccacccagcggctcgtggtgacctcctcccgtgacacgactttccgcctctgggatttcagggacccctccatccactc

SEQ ID NO: 1115 - DNA, 428 bp, Homo sapiens
  I.1115 (AA017133)
  misc_feature (362)..(362): n is a, c, g, or t
  misc_feature (385)..(385): n is a, c, g, or t
  misc_feature (419)..(419): n is a, c, g, or t
ttatggaacatggacattttaatgaatttcatattgcaatgaagacagtcaacacttagagacaattatatcgatacaataaaaactgattccatggaacacttataaatgcatacattttcctccaaagaaatatgtttttcacagacttaagtaacaaatgatttacataggattcttcagattccaaaatatgtacagagtttttgtctctacagaaactgatgagcagtggttgaaaaagagttgctttgcccaacagcatggctcttatgaaattcctgtatcatatacagttttcagtaaccacacattttcccgtctatcattaaatggaattctgggacacatccagcataccnggaccaaactggttcccactttnccaaacactggtttcagacgagattcacgtggtnggtttgaac

SEQ ID NO: 1116 - DNA, 185 bp, Homo sapiens
  I.1116 (AA015795)
  misc_feature (181)..(181): n is a, c, g, or t
acattctgagtttttacttcttaagaagaaatttaattcaataatttgattcatcactactggaaaactacatctttcttccctgtcagtactggatggcaatgacgtgaaagcagctttcctggttctcaacttcccttcaatgggaagcattatggaatttcagcagtgaacatcatcngggt

SEQ ID NO: 1117 - DNA, 501 bp, Homo sapiens
  I.1117 (AA015794)
  misc_feature (1)..(1): n is a, c, g, or t
  misc_feature (6)..(6): n is a, c, g, or t
  misc_feature (29)..(29): n is a, c, g, or t
  misc_feature (31)..(31): n is a, c, g, or t
  misc_feature (59)..(59): n is a, c, g, or t
nattcnggaacgagggctagaagctagangngccggagagggtgctggctgccgcgcgncgacgtgtgttttatggaccatgtgctgctatgtatgcctgaagaagtacttgaaatgcaaatttggggagactttgccatataaatgcttggctggattaagcgcctaattaggatggtttttcaacaagttggagtaagcatgcaatcggtactttggtctaggaagccatatggttcgtctcgaagtatcgtaaggaaaattggtactaatttgtctctgattcagtgtccaagagttcagtttcagattaacagccatgcaacagaatggagtcccagccacccaggagaggatgcagtggcgtcttttgctgatgttggatgggtagccaaagaagaaggagagtgttcagcaagactaaggacagaggtcagatcaaggccaccccttcaggatgaccttctttttctttgagaaggccccaagcagacagatttc

SEQ ID NO: 1118 - DNA, 483 bp, Homo sapiens
  I.1118 (AA007351)
  misc_feature (149)..(149): n is a, c, g, or t
  misc_feature (221)..(221): n is a, c, g, or t
  misc_feature (419)..(419): n is a, c, g, or t
  misc_feature (483)..(483): n is a, c, g, or t
ttgggatttcactcaagaatgtgtctttattgaagaatttgtaagaaaaaaggatgtaccctctgtaaaaagaggagatgttgcctccaacagcagggaggaatgagacctgggtggcttcccagaagtcagtgtttccggcatgactnggctcctttcctggcaaacactacaatgtgtcacactacagctagcaattcctccccactccctcccagccnttcctccctccaccccacaaccctatagccatttgaggcaaatggctttctaaaggcccagggatagatgtgccaggcttgcctcttaatggggtcaaagtgagttttgctttggaaaaattcaaacaggaatgtaaaatggtttgagctctttctagtccaaccaaaggtgattacatccagcccctctcaagggantgggggcagagactgtcgctcctgaatgtgcacacatggggtaaatggactatatcgcagtctn

SEQ ID NO: 1119 - DNA, 457 bp, Homo sapiens
  I.1119 (AA007350)
  misc_feature (75)..(75): n is a, c, g, or t
  misc_feature (76)..(76): n is a, c, g, or t
  misc_feature (82)..(82): n is a, c, g, or t
  misc_feature (354)..(354): n is a, c, g, or t
  misc_feature (454)..(454): n is a, c, g, or t
gctaagtttctccttaagggttggagccattgtcttatgcaacagaatgttggcgctgtcaatcttgtccttgtnngaaacnagccccccttttttggatgctgtggatgagtcagttatgccccatccccactggttccctagaggctgtggcaggcagctaccccttcattttcccactgtcccccaggtccagatggctgtggaggccaagtttgtccaggacaccctgaaatgatgacggtgtgacagaaatccggatgagattcatcaggcggattgaggacaatcttccagcttggagaggaataaccatccctacaactcgaggatagccatcaggagcacttgttnggaatcagcaggcctctgtgctccctcttgccctccagaactcagtgactcttgaacatggatgttatatattcttataacctgtttccattctccattnaaa

SEQ ID NO: 1120 - DNA, 493 bp, Homo sapiens
  I.1120 (AA001964)
  misc_feature (232)..(232): n is a, c, g, or t
  misc_feature (411)..(411): n is a, c, g, or t
ggctacagcatcagacccgaggaacccggctctaccaaaggaaagcacttttattcttcaagtgaatcggaagaagaagaagaatcacataagaaatttaatatcaagattaaaccattgcaatctaaagacattcttaagaatgctgcaactgtagatgaattgaaggcatcaataggcaacatcgcactttccccatcaccagtgaggaaaagtccgaggcgcaccgggntgcaattaaaaggaacttatccagtgaagaagtggcaagacccaggcgttccacaccaactccagaacttataagcaaaaagcctccagatgacactacggcccttgctcctctctttggcccaccactagaatcagcttttgatgaacagaagacagaagttcttttagatcagcctnagatatggggttcaggccaaccaattaatccaagcatggagtcgccaaagttaacaaggccttttcccactggaacacctcc

SEQ ID NO: 1121 - DNA, 460 bp, Homo sapiens
  I.1121 (AA001702)
ttcattttgttatttatttatttatttttaaattttactctaagttccgggatacatgtacagaatgtgtaggtttgttacataggtaaacatgtgccatggtggtttgctgcacccgtcaacccgtcacccagtttttaagccccacatgcattaggtatttgttctaatgctctccctctccttgcctcccaactcccgacaggccccagtgtgtgttgttcccctccctgtgtccatgtgttctcattgttcaactcctacttatgagtgagaacccataagtgttctttccttgaatggtttatttcttttcttgaagtgtttatttcttgaatggttccttgcagttacaaattggatgctggtaattttgagcactactgaaagttattctcccaatgggactgataaatatgattggagaagtaggaagaatgcagtctgccattgtttgcct

SEQ ID NO: 1122 - DNA, 462 bp, Homo sapiens
  I.1122 (W95830)
agtggaacatatttttatttaatgcataaacatataagtcccttattagagaaactgtatatattgatgaatatggtcaatggtcacatctatgggttaattctttaaaaatcagaaccaataattaggatagattttatgctctcttcattacattgtcgaagtgtcttgtgtagtcatattctattgttggaatgacagcttgtacaaatttcaagaaaataagaagatacatatgaactccaagttctccccctccttctgcaacagtctcaatgattttcttcatcacctcagcatgcctgcatgggtgaactgaacacatgggaggtggtggcagatgagggtgattttcaatgggtcactgttttcttcacatgatcctgactggatgtcttcatacatgtggctcaactgttaaaggctgccgttgctcatcatagccaaacaaccataatcgtg

SEQ ID NO: 1123 - DNA, 481 bp, Homo sapiens
  I.1123 (W95829)
  misc_feature (433)..(433): n is a, c, g, or t
ggaaaatagtagaagcttgtaaagccaaaactgatgctggcggtgaagatgctattttgcaaaccagaacttatgacctttacatcacttatgataaatattaccagactccacgattatggttgtttggctatgatgagcaacggcagcctttaacagttgagcacatgtatgaagacatcagtcaggatcatgtgaagaaaacagtgaccattgaaaatcaccctcatctgccaccacctcccatgtgttcagttcacccatgcaggcatgctgaggtgatgaagaaaatcattgagactgttgcagaaggagggggagaacttggagttcatatgtatcttcttattttcttgaaatttgtacaagctgtcattccaacaatagaatatgactacacaagacacttcacaatgtaatgaagagagcatanaatctatcctaattattgggttctgatttttaaagaattaacccatag

SEQ ID NO: 1124 - DNA, 440 bp, Homo sapiens
  I.1124 (W93275)
  misc_feature (440)..(440): n is a, c, g, or t
catagggctcggcgtggtgaactcacgacaggcctggggtgggagcacagacacgccggcctgtgactaggcagcagggtggcacagggcagcaggttccacagcggacagccgcctgccaccccctgtagttcacacaccggcgggtgactcgttaagtaaatggaaagggctttcagtaacaatggaccacctctgcagcgaccaactgcatggactccctgttctgcgccacgaaagaaaggtggttagcgttccgtgtttcgctttgacaaatgcgcattcacatgacagaaactcttccatgcagaaagatcacctgttcatatttctctagctcagagtggttaaatctgtcggatctgggacagcttggccctgttagtcagagtgctcaatgctattggtcattttggacagccacctgggtgttgctgttn

SEQ ID NO: 1125 - DNA, 467 bp, Homo sapiens
  I.1125 (W93274)
  misc_feature (19)..(19): n is a, c, g, or t
  misc_feature (20)..(20): n is a, c, g, or t
  misc_feature (21)..(21): n is a, c, g, or t
agtattcctttctcccgannntcatatgcaaaaattttcagacataacaccagtgctcacattttctcatggtttgttttctctccagaaaatgaattgtgacttgtcccggtctctcttatctagtggtaagcatccgtggcattcaagacgaagatccccctgacgcccagctcctgaggctggataacatgctgctggctgagggcgtgtgcaggcccgagaagagaggaagaggaggagcggtggccagggccggcacagcaacaccaggtggctgtccaaatgacaatagcattgagcactctgactacagggccaagctgtcccagatccgacagatttaccactctgagctagagaaatatgaacaggtgatctttcagccatggaagagtttctgtcatgtgaatgcgcatttgtcaaagcgaaacacggaacgctaaccacctttcttttcgtgggcg

SEQ ID NO: 1126 - DNA, 469 bp, Homo sapiens
  I.1126 (W87295)
ttggcctccttggaagtcagtcgtagtcctcgcaggtctcggcgggactggaagtgcgcagtccacgacagaacaaatattcggtgcttttacctacctacaacgagcgcgagaacctgccgctcatcgtgtggctgctggtgaaaagcttctccgagagtggaatcaactatgaaattataatcatagatgatggaagcccagatggaacaagggatgttgctgaacagttggagaagatctatgggtcagacagaattcttctaagaccaccgagagaaaaagttgggactaggaactgcatatattcatggaatgaaacatgccacaggaaactacatcattattatggatgctgatctctcacaccatccaaaatttattcctgaatttattaggaagcaaaaggagggtaatttttgatattgtttctggaactcgctacaaaggaaatggaggtgtatatggc

SEQ ID NO: 1127 - DNA, 464 bp, Homo sapiens
  I.1127 (W86796)
  misc_feature (411)..(411): n is a, c, g, or t
ttttactttatgcaaaaaaaaatatacatttatttataggtctcaatacagcaaaatgaaaacgaaaattgagaacattgctcattaggccagcaactttaaaattatttaatttgaaatataaaataggtggtcttcataaaaagatgcatgaaatttaccttaccttatattttatactttaagagtacattttatacaaatcagtaaccaggcttctttcatgtttaacctgaaatgaacgtaactataaatgagtatctttcttttatgtagtagcaaaaagagtcaataatcctttcaagaaagatactatttcatttcctcccaacttgggattcaccataaacacgatccacaaatggatattggaacctcgccaatagtataattcaactggtcttggcccgnacaatcatctccatctgggaagacgtagcctttagaaacacattttttctatt

SEQ ID NO: 1128 - DNA, 352 bp, Homo sapiens
  I.1128 (W69508)
attcgtaaaaaaaaaaagaggaaattgaattggtttctacttttttattgtaaaaggtgcatttttcaacacttacttttggtttcaatggtggtagttgtggacagccatcttcactggagggtggggagctccgtgtgaccaccaagatgccagcaggatatacccgtaacaccgaaattgctgtcaaaagcttattagcatcaatcaagattctaggtctccaaaagtacaggctttttcttcattaccttttttattcagaaccgaggaacgagaacacaaggaatgattcaagatccaccttgaagaggaatgaactttgttgttgaaacaaattagtggaaataaa

SEQ ID NO: 1129 - DNA, 329 bp, Homo sapiens
  I.1129 (W69425)
ttagatcattgctttatttcactaattgttcaacaacaaagttcattcctctcaaggtggatcttgaatcattccttgtgttctcttcctcgttctgaataaaaaaggtaatgaagaaaaagcctgtacttttggagacctagaatcttgattgatgctaataagcttttgacagcaatttcgtgttacggtatatcctgctggcatcttggtggtcacacggagctccccaccctccagtgaagatggctgtccacaactaccaccattgaaaccaaaagtaagtgttgaaaaatgcaccttttacaataaaaaagtagaaaccaatt

SEQ ID NO: 1130 - DNA, 469 bp, Homo sapiens
  I.1130 (W58230)
tagcaacaatagacattgttctacttcctggatttcgatctaaagctaaaagataaggagaatatggcttcctcccaaagcagctatgatgaactcctatcaacactgttttggacagctggaccctgaaggtacactcaggaaaacaggaatatttgtggtcatttccaaacccaatgcatcagggccgactttagaaacatagtcacaattttatgcctcatactgcttaaacaaatttagtgctatagtccaccaaagatcttaatcaaaaggaaattagaaagggtctggctggggaacattttgagacccaactaaaacccaagatatagttaagtctgatgaaaaagtggtcacccaaacatttacttatttttcactcttgattctgtgaaaaggcttctgaagaccagctttagtttctctccaacctaggaccttattgattgggtgctgagggcttttt

SEQ ID NO: 1131 - DNA, 452 bp, Homo sapiens
  I.1131 (W58229)
tgatgctttcacattaaaaaattgaagttttggacttgagcatttggctctagtatcatagctttacttataagaaaaccctgggcaagtcatctgcttattctcatcagtaaaaatggagagggttggcctctgctgcctgcctcagaggactgttgtgatgatcaaaggaaatggtacacattctgggggaacaagaagcacacccagagaaaacaagcctcatcagttcctccaaaacagaatggaaacgagttacaccttctgaaaaagccctcagcaccaatcaataaggtcctaggttggagagaaactaaagctggtcttcagaagccttttcacagaatcaagagtgaaaaataagtaaatgtttgggtgaccactttttcatcagactaactatatcttgggttttagttgggtctcaaaatgttccccagccagaccctttt

SEQ ID NO: 1132 - DNA, 575 bp, Homo sapiens
  I.1132 (W44451)
  misc_feature (40)..(40): n is a, c, g, or t
  misc_feature (295)..(295): n is a, c, g, or t
  misc_feature (409)..(409): n is a, c, g, or t
  misc_feature (444)..(444): n is a, c, g, or t
  misc_feature (461)..(461): n is a, c, g, or t
  misc_feature (484)..(484): n is a, c, g, or t
  misc_feature (496)..(496): n is a, c, g, or t
  misc_feature (512)..(512): n is a, c, g, or t
  misc_feature (548)..(548): n is a, c, g, or t
  misc_feature (572)..(572): n is a, c, g, or t
actttgtgttagcactcttaaaaacgctaacagagatcancattagctgtgaagatttgagttgtatatacctgcactgatattcttatcaaaaatttctacattagctttaagtgttcagattaacacttttgaaatttttgtagcttttagctgattaattagaaaaattaatatttcagtgaaagttttaaattatcatttatttatttttttaaatgagaggggaaagctgaaattccttgttaagacacaacggaaaaacgaatggccctactattatcatgcaaaaacngctttgttggcacctcacgattaatcatataatagctatagtctcttcagcatttcgtttaaattttagaaaacctcgtataaattactgggtgcataactttaaagattattnctgcctttgggctaaattggacgtaattccccctnccaggcactaggagganccggctcagtggctccttaacgngaatggaactcnggtaaacggcctttgngctgggggttggattgagggaatggtggtggaaaanggctcacaggagcccggatgggcnggg

SEQ ID NO: 1133 - DNA, 472 bp, Homo sapiens
  I.1133 (W44337)
  misc_feature (428)..(428): n is a, c, g, or t
ttttttacgcactctcatgtttattgcactatttacaatagctaagctttggaatcaacttaagggtctgtcaacagacgaatgaagaaaatgtggtacatatataatggagtactactcagccataaaaaagaataagatcctgccatttgaaacaacatggatggaactggaggtcattatgttaggtgaaataagccaggcacagaaagataaacatcacatgttctcactaatttgtgggtgctaaaaattaaaacaattgaactcacagaggtagagggtagaaggatggttaccagaggttgggaagggtagtgaggggagaggggagcaggaggtgaagatggttaatgggtacaaaaatatagttatatacaatggaataagatctagtatttgatagcaaaacagagttactatagccnacaataatttattgtacattttccatatccggtatccaaaatat

SEQ ID NO: 1134 - DNA, 462 bp, Homo sapiens
  I.1134 (W42564)
  misc_feature (6)..(6): n is a, c, g, or t
  misc_feature (9)..(9): n is a, c, g, or t
  misc_feature (407)..(407): n is a, c, g, or t
gattgnacngaggcagaagaaggctgcaaacatgcttcagaatctcggttctaagaatacaggagctaagaaaagaaaaatcgatgatgcctgatatgaatgttactaaattttctaattaaagatggtttatgcatgtatatgccattatttttgtagttagacaatagtttttaaaagaatttcatagatattttatatgtatggatctatattttcagagcttatctctgaagatctaaacttttgagaatgtttgaaaattagagatcatgaattatataattttccagtataaaacaagggaaaaatttttatgtaaaaccctttaaatgtaaaatatttgagaataagttcatacaatccgtcttaagttttttatgcctttatatacttagctatatttnttcttttgacataactatctttttgaaagcaatattatactgacagagggtcaca

SEQ ID NO: 1135 - DNA, 368 bp, Homo sapiens
  I.1135 (W42459)
aagtttgaaatcagttcaaagtttatttatagatatatctttccaatacaacactgaccgcttagataaaaatcttaagttatttatttctgtgttttaaacataaatatgtttacttgtgatttagctttggagcaaatttaggtaagttatctacttagccaaatgtactctagtagactagaaccattctttgtgaaatgtcaaaatatggctatggtttcaggaactttaaaatcggttgtattttactttaaatagagatgtagcaatatctcgtttgctaatatttatattgatgacttactccttttttgttgaattgtacttctggttttataacctgaaatcatctacaagcttgtcca

SEQ ID NO: 1136 - DNA, 173 bp, Homo sapiens
  I.1136 (W32239)
gttaccaatctgggaaggtatagtttgaatttcattgcagctcacatcaagttccatcaaatgtctaaggtgtccaatttcttctggaagtgacaccaatttgttattactagcaattaagactttcaatggcaaattacacaagtgtaccggcaatgttgacagttggttcc

SEQ ID NO: 1137 - DNA, 451 bp, Homo sapiens
  I.1137 (W20184)
  misc_feature (2)..(2): n is a, c, g, or t
  misc_feature (12)..(12): n is a, c, g, or t
  misc_feature (13)..(13): n is a, c, g, or t
  misc_feature (15)..(15): n is a, c, g, or t
  misc_feature (17)..(17): n is a, c, g, or t
  misc_feature (19)..(19): n is a, c, g, or t
  misc_feature (22)..(22): n is a, c, g, or t
  misc_feature (25)..(25): n is a, c, g, or t
  misc_feature (34)..(34): n is a, c, g, or t
  misc_feature (36)..(36): n is a, c, g, or t
  misc_feature (45)..(45): n is a, c, g, or t
  misc_feature (57)..(57): n is a, c, g, or t
  misc_feature (60)..(60): n is a, c, g, or t
  misc_feature (62)..(62): n is a, c, g, or t
  misc_feature (63)..(63): n is a, c, g, or t
  misc_feature (64)..(64): n is a, c, g, or t
  misc_feature (119)..(119): n is a, c, g, or t
  misc_feature (175)..(175): n is a, c, g, or t
  misc_feature (177)..(177): n is a, c, g, or t
  misc_feature (181)..(181): n is a, c, g, or t
  misc_feature (182)..(182): n is a, c, g, or t
  misc_feature (183)..(183): n is a, c, g, or t
  misc_feature (184)..(184): n is a, c, g, or t
  misc_feature (186)..(186): n is a, c, g, or t
  misc_feature (187)..(187): n is a, c, g, or t
  misc_feature (215)..(215): n is a, c, g, or t
  misc_feature (246)..(246): n is a, c, g, or t
  misc_feature (248)..(248): n is a, c, g, or t
  misc_feature (259)..(259): n is a, c, g, or t
  misc_feature (266)..(266): n is a, c, g, or t
  misc_feature (287)..(287): n is a, c, g, or t
  misc_feature (305)..(305): n is a, c, g, or t
  misc_feature (306)..(306): n is a, c, g, or t
  misc_feature (318)..(318): n is a, c, g, or t
  misc_feature (339)..(339): n is a, c, g, or t
  misc_feature (380)..(380): n is a, c, g, or t
  misc_feature (394)..(394): n is a, c, g, or t
anttcggcacgnngngnanggnacnggggaagtncncacacagcncacacagacaanacncnnntacacagacacagagggaaggggttgggatggggacagggtgcacagcagggcgnggtaggaccccagccccttcccaaaacagcctctcctactcccatagacccctttntnctcnnnntnnccacggtaggaacatagcgtgtttatantttatggccaaactattttgaattttgttgncnggccctcagtnccctgcnctctcccttaccaaggaccanagctctgtaccttacggnnaagttttctctntggtcccctcctgggtttctnacgtagttgatttttcctctttagtctcccccgacctgcgnccaagccccgtggnccctggccctctcctaatctctgtggcagtttcatatttgctaagacgaatttgctc

SEQ ID NO: 1138 - DNA, 191 bp, Homo sapiens
  I.1138 (W20171)
aacgaaggctggatggggcactgaatagagttccagttggattttatcagaaagtatggaaagttttgcagaagtgtcacggactttctgttgaagggtttgtccttccttcctctaccactagagagatgactccaggtgagattaaattctctgttcatgtggagtctgtcctgaatcgtgtacctcca

SEQ ID NO: 1139 - DNA, 276 bp, Homo sapiens
  I.1139 (W20026)
  misc_feature (53)..(53): n is a, c, g, or t
  misc_feature (54)..(54): n is a, c, g, or t
  misc_feature (63)..(63): n is a, c, g, or t
  misc_feature (243)..(243): n is a, c, g, or t
ttttacaaggacacctacaacaagctgaaaaccaaggatgagccccagcggannacgtgaaancatccactatgcgttgaactgctgtggtttggctgggggcgtggaacagtttatctcagacatctgccccaagaaggacgtactcgaaaccttcaccgtgaagtcctgtcctgatgccatcaaagaggtcttcgacaataaattccacatcatcggcgcagtgggcatcggcattgcgtnggtcatgatatttggcatgatcttcagtatgaa

SEQ ID NO: 1140 - DNA, 223 bp, Homo sapiens
  I.1140 (W20133)
  misc_feature (144)..(144): n is a, c, g, or t
aggtttcacagactgtggagtgccatgcagtttgtctactgcattcccgtgggacacacgagttcacagtcgagcagtgctttggtgatgggctacactgggctggctgtatgatcatcgtacttcttgggcagcagcggcgtntttgctgtgctggatttctgctaccatctacttaaagtccagaaacatgatggcaaagatgagattattaaaaatgtgc

SEQ ID NO: 1141 - DNA, 506 bp, Homo sapiens
  I.1141 (W19735)
  misc_feature (1)..(1): n is a, c, g, or t
  misc_feature (432)..(432): n is a, c, g, or t
  misc_feature (445)..(445): n is a, c, g, or t
ngttaaaggagattcctcagactcatccagcccttgggtgctgaccagcagagtcactagtggatgctgaagttacatgagctacatgttaaatatttaaagtctccaaaataaaacaccccaacgttgaccttacccggctgatggttagccccttgctgcctgctccatgtgtcttatgagagcccgtagttacagtgtcctctaatttgaaatccataagttaacaagtctatatcaggtgcagctggctttgattaaaggccatttttaaaacttaaaaactcaacacctcacagattataatagaaaaagaaatggcctcagtttgatctccgttcagaatgaccccagattgtttctgctttggggtgcagctggtttaagttcagagttatattacaggagaattatttcctgagataatccttnaacctagaatggntcaaaacctattggataattggaagtatccaagatacgtagaacacccccggagaattttc

SEQ ID NO: 1142 - DNA, 461 bp, Homo sapiens
  I.1142 (W19713)
  misc_feature (1)..(1): n is a, c, g, or t
  misc_feature (3)..(3): n is a, c, g, or t
  misc_feature (8)..(8): n is a, c, g, or t
  misc_feature (40)..(40): n is a, c, g, or t
  misc_feature (373)..(373): n is a, c, g, or t
  misc_feature (416)..(416): n is a, c, g, or t
  misc_feature (439)..(439): n is a, c, g, or t
nanttcgngcacgacgaggcaagagtgctggagggcggcnggcgaccggagcggtaggagcagcaatttatccgtgtgcagccccaaactggaaagaagatgctaattaaagtgaagacgctgaccggaaaggagattgagattgacattgaacctacagacaaggtggagcgaatcaaggagcgtgtggaggagaaagagggaatccccccacaacagcagaggctcatctacagtggcaagcagatgaatgatgagaagacagcagctgattacaagattttaggtggttcagtccttcacctggtgttggctctgagaggaggaggtggtcttaggcagtgatggacccctccatttttacctcctttanccctgtccgctccataattgaaggcatcatatatcctcctcantctcctggggacaccatagccantggcccccttcccctggattgc

SEQ ID NO: 1143 - DNA, 584 bp, Homo sapiens
  I.1143 (W19699)
  misc_feature (19)..(19): n is a, c, g, or t
  misc_feature (359)..(359): n is a, c, g, or t
  misc_feature (500)..(500): n is a, c, g, or t
gcttgctagtcccataggntcgaaactcgtctatgttccattttggcagaaaaagacttttccagagatcatcgactacctttatgagacgactctacctttgctgaaggaaaagttagaaaaaatgatggagaaaaaaggcactaaaatccagactcctgcagcacccaagcaagttttcccatttcgagacatcttttattatgaagacgatagtgaaggagaggacatagaaaaagaaagcgaaggccacggcgccatgcatggttcacgcctgtaattccagtactttgggaggccaaggcgggttggatcatctgaggtcaggagttccgagaccggccttgaccaacatggtnaagacctgtcactattaaaaatgcgaaaatttagccgggtgtggtagttgcacacctggtaattttcaactacttgggaggcttgaggcaggagaattgccttgaacccaggaagttggaggtttgcagtgagcccagatncgcaccacccgcatgagagagagagattaccaatttccttgtccccttttcccagttttgattataatttatatacatatggtc

SEQ ID NO: 1144 - DNA, 437 bp, Homo sapiens
  I.1144 (W19509)
  misc_feature (97)..(97): n is a, c, g, or t
  misc_feature (394)..(394): n is a, c, g, or t
  misc_feature (431)..(431): n is a, c, g, or t
  misc_feature (436)..(436): n is a, c, g, or t
tgttccagtgtttagacatgaaatcatcttccttgtctcatgaaaacctaaatataaaaaaaaggaaaatactggagtttttatttctcttgtcttngttacatcctctgtttattataattttagcaccaacttcacacctagctaatttttttcatcataaagtggatgaaatgagcaagtacctaaaaattttatttcagataaaagtcaggagttactgctaaaaaacagacatgtaggagacattcaacaggagtatgaaatgagagttagaccatatgggctgacaacaccataaataacaagaaaaggggagtgctgaaataggagagaacagagcaaatgttagctccaaagtatagacttagaaatatcaaagtaagagctatcngggataaatatatagatattgagtgcctgggaatccnagccna

SEQ ID NO: 1145 - DNA, 488 bp, Homo sapiens
  I.1145 (W19499)
  misc_feature (6)..(6): n is a, c, g, or t
  misc_feature (15)..(15): n is a, c, g, or t
  misc_feature (141)..(141): n is a, c, g, or t
  misc_feature (146)..(146): n is a, c, g, or t
  misc_feature (488)..(488): n is a, c, g, or t
gttcgngaacgagcnctcgctcctcgggctcccctaaggcattggacccatcgccgcgtcttttattttttgcaaagttgcatcgctgtacatatttttgtccccgccacctccctctgtctctggagtgacagcccgggntaggncgcctggagaataagatattttctgttaccaacaacacagaatgtgggaagttactggaggaaatcaaatgtgcactttgctctccacattctcaaagcctgttccactcacctgagagagaagtcttggaaagagacctaagtacttcctctgctctgcaaagactatttgcaaagaattcttttacacttgccgaggccatattccaggtttccttcaaacaactgcggatgagttttgcttttactatgcaagaaaagatggtgggttgtgctttccagattttccaagaaaacaagtcagaggaccagcatctaactacttggaccagatggaagaan

SEQ ID NO: 1146 - DNA, 454 bp, Homo sapiens
  I.1146 (W20512)
  misc_feature (354)..(354): n is a, c, g, or t
  misc_feature (389)..(389): n is a, c, g, or t
  misc_feature (403)..(403): n is a, c, g, or t
gcactttaaagtttctgcagtcctttgacacataggatctcatggagcctcacgtctactcccttctgcagatgaggaaaccgagagaagtggcccaaggtcacgcaactctgagatgccacatttcatttgatcttgtacacattttcttttattccttcttttttcctcctttcatttcccactacgcacaaagagtttataaacactgttctcagaagagtcacagtttggggtgagatctggaaatcaagaaatgggtgtccactcttttctttcattagctaggatctactagatgcattatactccatacctgcttttcccatggccgccctacggaaaatcccatcnacaagaggccagggctacccaagcccctccaggtnagctggggcctttnctttatgaacctccatcctcccagccagctacagtaggggctcctcaaccc

SEQ ID NO: 1147 - DNA, 330 bp, Homo sapiens
  I.1147 (W19247)
  misc_feature (52)..(52): n is a, c, g, or t
ggaagactggacctactgattcaacttggagatgagcgggtctgtcctctancacggcgggagagaggtggagatgctttctgaccccgtcgaggtcatccctgtactgggccttacataatttctgctgtcggaaaaaatccactacacctaagaaaattactcccaatgttactttttcgtgatgaaaatgcaaaggagcccgaaaatgcacttgacaagctcttctcttcagaacagcaggcttccatcttgcatgtgttgaatacagcatctactaaagaacttgaagctttccgattgcttccgtggaagaaggtccatcaataa

SEQ ID NO: 1148 - DNA, 1216 bp, Homo sapiens
  I.1148 (W18193)
gcacatacatagtgtacactaaattttacatacacacagaggaatatatatgtgtatagttatcttgtgtttagaaatttggaatcccttctagttgtcttgtaacatgtgcttactctattttgaggattttctctatgaatttcatgtagctctttaaattaactttcaggaggattgtaacaatgtgctctccacccagtattttaccagccttgagttttctcaaagggggcattggaggggttcttatacatttacagtgggaatgtgaattgatacaacttctgtggagggcagtttatcagccactatctaaattacacatacataaaccctttgtctaagcaaacttgctgggaataaatcctacacatatatttgtatgtgtgcagactgtttgtacatggttttcattatgctattgattttaaaagtcagaatttggaaacaaccctccatgtccaccatggggaactggctaagtacatttatggtggaatggagatcatatccttaaaaatgaagactctttatatacaggttgagtatcccttatccaaaatgctcaggaccagaagtgtttcagatttcagatttttgaattagggatcctcaaactatactaatgtgagaaagagctctaagatagttaagtagataaaagcaaggtgtcaaactgtagagtatgtttccatttatgtaaagaagaaacaggctaggcaaggtgactcacgcctgtaatcccagcactttgggaggccgaggcgggtggatcacctgaggtccggagttcaagaccagcctgaccaacacggtgaaaccccatctctactaaaaatacaaaagctgggtgtggtggtgcacacttctaatcccagctactccgtaggctaaggcaggagaatcgcttgaacccaggaagtggaggttgcagtgagccaatattgtgccattgcactccagcttgggcaacaagagcgaaactccatctcaaaaataaataaataaataagaaacatttgtttatatgtacacacataatctctgaaagggtaaaagtggcatactggttggccagaagaattgggaggacagtgatgaggaataattttcactctttatcattttatatttttggaattttgaaacatgtaaaattattaccagttcaaaaaataaatttaaacaaaaatcttaactgttaaaaaaaaaa

SEQ ID NO: 1149 - DNA, 487 bp, Homo sapiens
  I.1149 (W17369)
  misc_feature (463)..(463): n is a, c, g, or t
  misc_feature (472)..(472): n is a, c, g, or t
  misc_feature (476)..(476): n is a, c, g, or t
  misc_feature (478)..(478): n is a, c, g, or t
aattcggcactagggcttcccgaaggtcctctctgatgacatgaagaagctgaaggcccgaatgcaccaggccatagaaagattttatgataaaatgcaaaatgcaagaaatcaggacgtggacaggtgatgtcgagcctggcagagctggaggacgacttcaaagagggctacctggagacagtggcggcttattatgaggagcagcacccagagctcactcctctacttgaaaaagaaagagatggattacggtgccgaggcaacagatcccctgtcccggatgttgaggatcccgcaaccgaggagcctggggagagcttttgtgacaaggtcatgagatggttccaggccatgctgcagcggctgcagacctggtggcacggggttctggcctgggtgaaggagaaggtgtggcctggtccatgcagtgcaggcctctggaaacagttccagagttctntgcctctgnaaantnttcatgtcc

SEQ ID NO: 1150 - DNA, 445 bp, Homo sapiens
  I.1150 (W17214)
  misc_feature (352)..(352): n is a, c, g, or t
  misc_feature (379)..(379): n is a, c, g, or t
  misc_feature (412)..(412): n is a, c, g, or t
  misc_feature (429)..(429): n is a, c, g, or t
  misc_feature (433)..(433): n is a, c, g, or t
cattaacaaccaaaggaaaagttggtgattctctgctagatgttgtggttgaaaataatctagatattgatggctttggtgcatgtgagggaaccctggcttgttcaacctgtcacctcatctttgaagatcacatatatgagaagttagatgcaatcactgatgaggagaatgacatgctcgatctggcatatggactaacagacagatcacggttgggctgccaaatctgtttgacaaaatctatggacaatatgactgttcgagtgcctgaaacagtggctgatgcagacaatccattgatgtgggcaagacctcctgaactagaacaaatagggaatattttcatggnattttacctatttttataattattatntcttaaaagtgattaaattgagaacatgggatnagtggactttcatattnatgnctaagctttact

SEQ ID NO: 1151 - DNA, 368 bp, Homo sapiens
  I.1151 (W16870)
  misc_feature (349)..(349): n is a, c, g, or t
gaaggattttaaaaccgttatcatcaagtacttagaatcactagttcaaacacaacaacagctgataaaatactgggaagcattcttacctgaagccaaagccattgcctagcaataagattgttgccgttaagaagaccttggatgttgttccagttatgctggattccacagtgaaatcatttaaaaccatctaaataaaccactatatattttatgaattacatgtggttttatatacacacacacacacacacacacactctgacattttattacaaagctgcatgtcctgaccctcctttgaatttaagtgggactgtggcatgacattctgcaatactttgcnggaatttgaacacctattt

SEQ ID NO: 1152 - DNA, 503 bp, Homo sapiens
  I.1152 (W16617)
  misc_feature (413)..(413): n is a, c, g, or t
  misc_feature (444)..(444): n is a, c, g, or t
  misc_feature (451)..(451): n is a, c, g, or t
  misc_feature (464)..(464): n is a, c, g, or t
  misc_feature (480)..(480): n is a, c, g, or t
  misc_feature (485)..(485): n is a, c, g, or t
tttactgcttgtgttttacagacccgatatcaggttcttctttagactgggcttatgacctgggcatcaaacacacatttgcctttgagctccgagataaaggcaaatttggttttctccttccagaatcccggataaagccaacgtgcagagagaccatgctagctgtcaaatttattgccaagtatatcctcaagcatacttcctaaagaactgccctctgtttggaataagccaattaatccttttttgtgcctttcatcagaaagtcaatcttcagttatccccaaatgcagcttctatttcacctgaatccttctcttgctcatttaagtcccatgttactgctgtttgcttttacttactttcagtagcaccataacgaagtagctttaagtgaaccttttaactanctttctttgctccaagtgaagtttggaccancagaaancatattttgaaangtgatatcagttgggncaganacaaatgaaccttcagtt

SEQ ID NO: 1153 - DNA, 408 bp, Homo sapiens
  I.1153 (W17391)
  misc_feature (67)..(67): n is a, c, g, or t
  misc_feature (68)..(68): n is a, c, g, or t
  misc_feature (69)..(69): n is a, c, g, or t
  misc_feature (72)..(72): n is a, c, g, or t
  misc_feature (155)..(155): n is a, c, g, or t
  misc_feature (156)..(156): n is a, c, g, or t
  misc_feature (157)..(157): n is a, c, g, or t
  misc_feature (203)..(203): n is a, c, g, or t
atcgccgccatcatgggtcgcatgcatgctcccgggtgagctcggggcatcaagccggattgctggnnnggnggtgggaggaagacagggagtgtgggcagcgggccgaggggatgatgttctgggctgctctggcactagccgccacctcaccnnngagactgcttctctccccaggaagggcctgtcccagtcggctttancctatcgacgcagcgtccccacttggttgaagttgacatctgacgacgtgaaggagcagatttacaaactggccaagaagggccttactccttcacagatcggtgtaatcctgagagattcacatggtgttgcacaagtacgttttgtgacaaggaataaaatttaagaatcttagttaagggacttctcctgatctcctgaaga

SEQ ID NO: 1154 - DNA, 453 bp, Homo sapiens
  I.1154 (W16493)
  misc_feature (304)..(304): n is a, c, g, or t
  misc_feature (390)..(390): n is a, c, g, or t
  misc_feature (412)..(412): n is a, c, g, or t
  misc_feature (417)..(417): n is a, c, g, or t
  misc_feature (450)..(450): n is a, c, g, or t
gagaaactgtgtgtgaggggaagaggcctgtttcgctgtcgggtctctagttcttgcacgctctttaagagtctgcactggaggaactcctgccattaccagctcccttcttgcagaagggagggggaaacatacatttattcatgccagtctgttgcatgcaggctttttggcttcctaccttgcaacaaaataattgcaccaactccttagtgccgattccgcccacagagagtcctggagccacagtcttttttgctttgcattgtaggagagggactaagtgctagagactatgtcgctntcctgagctaccgagagcgctcgtgaactggaatcaactgcttcagggaaaaagaaaaaaaaaaaaaaaaagacttgcctgggagncgcgagaaacttgcattggaanttcanaaccagcattcgagaaactcctctctactttancac

SEQ ID NO: 1155 - DNA, 526 bp, Homo sapiens
  I.1155 (W07774)
  misc_feature (20)..(20): n is a, c, g, or t
tatttccccatggccttccncctcgctttgtgatgcaggtgaagacattcagtgaagcttgcctgatggtaaggaaaccagccctagaacttctgcattacctgaaaaacaccagttttgcttatccagctatacgatatcttctgtatggagagaagggaacaggaaaaaccctaagtctttgccatgttattcatttctgtgcaaaacaggactggctgatactacatattccagatgctcatctttgggtgaaaaattgtcgggatcttctgcagtccagctacaacaaacagcgctttgatcaacctttagaggcttcaacctggctgaagaatttcaaaactacaaatgagccgcttcctgaaccagataaaagttcaagagaagtatgtctggaataagagagaaagcactgagaaagggagtcctctgggagaagtggttgaacagggcataacacgggtgaggaacgccacagatgcagttggaattgtgctgaaagagctaaagaggcaaagttctt

SEQ ID NO: 1156 - DNA, 449 bp, Homo sapiens
  I.1156 (W07601)
  misc_feature (1)..(1): n is a, c, g, or t
  misc_feature (131)..(131): n is a, c, g, or t
ngtgacagttgtcctgatgtcagcaaccctaaccagtctgatgtggataatgatctggttggggactcctgtgacaccaatcaggacagtgatggagatgggcaccaggacagcacagacaactgccacancgtcattaacagtgcccagctggacaccgataaggatggaattggtgacgagtgtgatgatgatgatgacaatgatggtatcccagacctggtgccccctggaccagacaactgccggctggtccccaacccagcccaggaggatagcaacagcgacggagtgggagacatctatgagtctgactttgaccaggaccaggtcatcgatcggatcgacgtctgccccagagaacgcagaggttcaccctggaccgactttcaggggctttaccagacctttggtccttggattcttgaaagggggaatgcccagattcg

SEQ ID NO: 1157 - DNA, 401 bp, Homo sapiens
  I.1157 (W07395)
  misc_feature (188)..(188): n is a, c, g, or t
  misc_feature (371)..(371): n is a, c, g, or t
  misc_feature (382)..(382): n is a, c, g, or t
  misc_feature (392)..(392): n is a, c, g, or t
  misc_feature (398)..(398): n is a, c, g, or t
gattgacggtgtgcatcgcggtgattgccaaggagaattaccccctctacattcgcagcacccctacggagaacgagctgaagttccactacatggtgcacacatctctggacgtggtggatgagaagatctccgcaatggggaaggccctggtcgaccagagggagctgtacctgggcctgctctancccaaggaaggactacaaggtatacggctacgtcaccaaactccaaggtgaagtttgtcatggtggtagattccctcaacacaagcctttcgagacaacgaaattcgcagcatgttccggaagctacacaactccctacacaagacgtgatgttcaaccccttctacaacccggggggaccgnatccagtccanggcctttganaaacantgg

SEQ ID NO: 1158 - DNA, 192 bp, Homo sapiens
  I.1158 (W07242)
  misc_feature (188)..(188): n is a, c, g, or t
gaatttttttttttttttttttaatttaaaagtacgaatttatttctcatagttgtgaagactgagaagcccacgatcagcgtgctggcagactggtatcatctattgagggcccagtctcagcttctaggacggggcctgttgctgtgtcctcatatggtggaagggaatcgaagggcaaaaaaggngggt

SEQ ID NO: 1159 - DNA, 454 bp, Homo sapiens
  I.1159 (W07023)
  misc_feature (21)..(21): n is a, c, g, or t
  misc_feature (43)..(43): n is a, c, g, or t
  misc_feature (348)..(348): n is a, c, g, or t
  misc_feature (412)..(412): n is a, c, g, or t
  misc_feature (425)..(425): n is a, c, g, or t
agcaaggcatctgcgaggagnatgccatcgctctgctctcggntgcggtgaagtatgatgcacaggatttagaagaattctgcttcaggttttgcataaaccatctgactgtagtaacacaaacatcaggttttgcagaaatggaccatgatctcctgaagaactttatcagcaaagcaagcagagttggagcctttaaaaattgatcccatctgcaggaaagtttttgagctttcccatttcccctgcaaaagccagagatgaatcacttctctttaattaatagtatgtatgatgagctatgtttggctgagtacttgtaactgtcagaagaaggatggtggtgangtggtctttggtctgcctaaacccagagttttatggtaagaaagccattgaatggttcctgatncaggatgtggccnaagggtccaaggggaaaaaaatttgggaa

SEQ ID NO: 1160 - DNA, 610 bp, Homo sapiens
  I.1160 (W05639)
  misc_feature (1)..(1): n is a, c, g, or t
  misc_feature (48)..(48): n is a, c, g, or t
  misc_feature (469)..(469): n is a, c, g, or t
  misc_feature (482)..(482): n is a, c, g, or t
  misc_feature (488)..(488): n is a, c, g, or t
  misc_feature (509)..(509): n is a, c, g, or t
  misc_feature (551)..(551): n is a, c, g, or t
  misc_feature (577)..(577): n is a, c, g, or t
  misc_feature (585)..(585): n is a, c, g, or t
ntcatccgcggcggccgggctcgtggggcgcctggagtgagggttctngttcccgccggcgaggattgttaaaatgagtcttcggaagcaaacccctagtgacttcttaaagcaaatcatcggacgaccagttgtggtaaaattaaattctggagtggattatccgaggggtcctggcttgctggatggctacatgaatatagccctggagcagacagaagaatatgtaaatggacaactgaagaataagtatggggatgcatttatccgaggaaacaatgtgttgtacatcagtacacagaagagaccggatgtgaagacaccaagagagcaacgcttttcatagttggatatatttttttatgaattttttctaatttttgcttcttttgtgatacaatttgtcctccttttataataagttgggtgatttttcactgacatgtgaagtaagataaatgtataccantgtgggatttaantggtgnaatggtccttcacctgtaagnttcagtcatttcctttaccccgtggtcagtgtacagaatgcnaaaataattaaaaaaggccaaatatncccctccnccaaaaaaaaaaaaaaaaaaaaatt

SEQ ID NO: 1161 - DNA, 223 bp, Homo sapiens
  I.1161 (W05696)
  misc_feature (102)..(102): n is a, c, g, or t
  misc_feature (216)..(216): n is a, c, g, or t
agcagcagcaacaacagaacgatgtggtgaagctcacgaagaacagtaaacgaaagaaacgctgctgctaatggcacccagtccactgcagagactgcactncggtccctcccccagcccgaggcccacggaggttcctcgggggacagtctcagtttcgtgccgttatttaaagaattctctccatgtttttgtatcgggaggtgccatcggatntcctccc

SEQ ID NO: 1162 - DNA, 472 bp, Homo sapiens
  I.1162 (W05595)
  misc_feature (395)..(395): n is a, c, g, or t
  misc_feature (410)..(410): n is a, c, g, or t
  misc_feature (455)..(455): n is a, c, g, or t
  misc_feature (463)..(463): n is a, c, g, or t
  misc_feature (468)..(468): n is a, c, g, or t
gccaaggctatcatggatttcagattggtggaccttccccttggcttacccttttataaatggatgctacggaagaaacttcactgacatcacacgatttgtttgacatcgacccagttgtagccagatcagtttatcacctagaagacattgtcagacagaagaaaagacttgaacaagataaatcccagaccaaagagagtctacagtatgcattagaaaccttgactatgaatggctgctcagttgaagatctaggactggatttcactctgccagggtttcccaatatcgaactgaagaaaggagggaaggatataccagtcactatccacaatttagaggagtatctaagactggttatattctgggcactaaatgaaggcgtttcctangcaatttgaatccgntccagagatgggatttggaaccagtctttcccactcaggtcatcntcagtacntctancccg

SEQ ID NO: 1163 - DNA, 428 bp, Homo sapiens
  I.1163 (W05428)
  misc_feature (37)..(37): n is a, c, g, or t
  misc_feature (38)..(38): n is a, c, g, or t
agaaaacaactacacctgatggggaggtggttcctanncaccaactggacattcctgttgataacccaatcgagagcaataacatttttctggtggcccctttgatcatctgccacgtgattgacaagcgcagtcccctgtatgacatctcagcaactgacctggccaaccaagacttggaggtcatagttattctggaaggagtggttgaaactactggcatcaccacacaagcacgaacctcctacattgctgaggagatccaatggggccaccgctttgtgtccattgtgactgaggaagaaggagtgtattctgtggattactccaaatttggcaacactgttaaagtagctgctccacggtgcagtgcccgagagctggatgagaaaccttcgatccttattcagacctccaaaagagtgaac

SEQ ID NO: 1164 - DNA, 473 bp, Homo sapiens
  I.1164 (W05407)
  misc_feature (418)..(418): n is a, c, g, or t
  misc_feature (429)..(429): n is a, c, g, or t
  misc_feature (452)..(452): n is a, c, g, or t
  misc_feature (461)..(461): n is a, c, g, or t
gtagcaaggagaagcccactcactgctccgagtgcggcaaagctttcagaacctaccaccagctggtcttgcactccagggtccacaagaaggaccggaggcggtcgcggagtcgccaccatgtctgtggacgggaggcagccggggacgtgttctcctgacctcgccgcccctctggatgaaaatggagccgtggatcgaggggaaggtggttctgaagacggatctgaggatgggcttcccgatagaatccatctggataaaaatgatgatggaggaaaaataaaacatcttacatcttcaagagagtgtagttattgtggaaagtttttccgttcaaattattacctcaatattcatctcagaacgcatacaggtgaaaaaccatacaaatgtgaattttgtgaatatgctgcanccagaagacantctgaggtacacttggagagcanacaaggaanaacaaaccgatg

SEQ ID NO: 1165 - DNA, 439 bp, Homo sapiens
  I.1165 (W05170)
  misc_feature (373)..(373): n is a, c, g, or t
  misc_feature (411)..(411): n is a, c, g, or t
tcgtttctaagaacttcacaaagaaaatccagcttcctgcagaggtggatcctgtgacagtatttgcctcactttccccagaggtctgctgatcatcgaagctccccaggtccctccttactcaacatttggagagagcagtttcaacaacgagcttccccaggacagccaggaagtcacctgtacctgagatgccagtactggccatccttgttttgtccccaaccctagggcttctctgattccaggatacattactttagctgaactcagatttagtgcaaagtaaaatgttagagggtgcgggggtgaaggacttgaccacagattccctggatagtgtagtggtagatttctccacaggataagcgcnatttgggcaaatcatgctttgggttgtgttaagggccnaaatactaagtttttgctttcctttaac

SEQ ID NO: 1166 - DNA, 376 bp, Homo sapiens
  I.1166 (W05173)
  misc_feature (295)..(295): n is a, c, g, or t
tagcagcggctggatgtgatatgtctagtttaaccagtccccttgatctttctatataataaataacacaggagtgaacatcctgaatcagatcttagcagagatgctcacattcggggtaactgtccatggtgtgtggaggggtcctcggaaccccctcttaggatcatctccacatactctcccagttctgagattcgttaccaatagcaggtttccgtcacactgcgatatcaagagcagtgcaaggaactctccgctccaaggggttttttcctcctaggggaacactctnctaagtaatgggcagagaacaaaggggctcctaattcaaggcaggcctaagggagggtcagaaagaactttagctggaggt

SEQ ID NO: 1167 - DNA, 415 bp, Homo sapiens
  I.1167 (W05151)
  misc_feature (14)..(14): n is a, c, g, or t
  misc_feature (16)..(16): n is a, c, g, or t
  misc_feature (383)..(383): n is a, c, g, or t
cttttttcttttantnttttgttcttgtttcgttttgtttttgagatgcactccagcctgggcgacagagtgaagactgcatcacaagaaaaaaaatttgcaagggatggttcacgagacacatttgggacgaaggtgaaagagaaattccccattctgagtgtcctagttgggttcctccgactctaaacaagggacttgggttcagttagtgtacagcgggggctcacgtccactaaggaacatgtaagaatgtaaccaccgggtgacagggaagctgcggtatttactacctagcccccatcttcactggttattccacttatttaaaatgtccagaataagcaaatctccatatagaggaagtagattagtgggttgcntccgggattgggaaggaatgggggaaatttga

SEQ ID NO: 1168 - DNA, 457 bp, Homo sapiens
  I.1168 (W04370)
  misc_feature (34)..(34): n is a, c, g, or t
  misc_feature (457)..(457): n is a, c, g, or t
ggcacgagctttaaaaaagtaagctgcccacagncttcttggagaatgaagaatatcagccccattcagggtttaccaatgtctctctgaggtgacaatacattctggttttccaggacagtcctggcttaggtctgctgtccttctataaatattaacaatgatccctcttatttccaaacgtgtcccagtttagacaacaaattatacagtgtctgcccccaacacacacacacacaccccaccatctttatgggttgttgttgttttcttgttgtttttaattttgtagaattggctttgtcttctccaaagcagataacagcttaaactaaaagagcctaagctacttctttctgactgagcagggtcatagtaaacagagaagaatggatcacttcctcctctgaaatctccatcaatccactttctggtccaactaatctctctacccagn

SEQ ID NO: 1169 - DNA, 449 bp, Homo sapiens
  I.1169 (W03969)
  misc_feature (1)..(1): n is a, c, g, or t
  misc_feature (346)..(346): n is a, c, g, or t
  misc_feature (395)..(395): n is a, c, g, or t
  misc_feature (435)..(435): n is a, c, g, or t
  misc_feature (442)..(442): n is a, c, g, or t
ngactcgagaaaggggcatgaaaatgaagagtccgcatactactcagacttgtttgcaatgattgggactctctttctgtggatgttttggcccagctttaactcggccattgctgaacctggagacaaacagtgcagggccattgtaaacacgtacttctctctcgctgcctgtgtgctcacagcctttgccttctccagcctagtggagcaccgaggcaagctcaacatggttcacattcagaatgccacccttgctggaggagttgctgtgggcacttgtcggatatggcaattcacccatttggttctatgattattgggagcattgcaggaatggtctctngtgcttggatacaagttcctgactccactttttactactaaaacttgangattccatgatacatgttgggggtccaaaactccacgggnttaaccngggtgta

SEQ ID NO: 1170 - DNA, 484 bp, Homo sapiens
  I.1170 (W03894)
  misc_feature (1)..(1): n is a, c, g, or t
  misc_feature (358)..(358): n is a, c, g, or t
  misc_feature (436)..(436): n is a, c, g, or t
  misc_feature (456)..(456): n is a, c, g, or t
nggcaagtgtcagtggacttcgtactgctaggaagctccgtagtcaccgacgacgaccagaagtggcatgataaacacgtataagaaagctcatttgggcacagctaaaaaggccaacccttttggaggtgcttctcatgcaaaaggaatcgtgctggaaaaagtaggagttgaagccaaacaagccaatttctgccattaggaagtgtgtaagggtccagctgatcaagaatggcaagaaaatcacagcctttgtacccaatgacggttgcttgaactttattgaggaaaatgatgaagttctggttgctggatttggtcgcaaaggtcatgctgttggtgatattcctggagtccngctttaaggttgtcaaagtagccaatggtttctcttttggccctatacaaaggcaagaaggaaagaccaagattcctnaatgtttaatgggtgaaacnctgtaagttataaattttccaaaatgcc

SEQ ID NO: 1171 - DNA, 538 bp, Homo sapiens
  I.1171 (W03459)
  misc_feature (20)..(20): n is a, c, g, or t
  misc_feature (237)..(237): n is a, c, g, or t
  misc_feature (238)..(238): n is a, c, g, or t
  misc_feature (240)..(240): n is a, c, g, or t
  misc_feature (241)..(241): n is a, c, g, or t
  misc_feature (538)..(538): n is a, c, g, or t
cctcatggttgcgttaatgngctacctagggatctgttcactgatttagagggtcccagagctctgggtcgggactgaggtgaaagagcggaaaaacgcgagaagcgtgttccttctacacagaggctagagtgcggatcggctgagtcggctgcaggcgcccctgcctccgtcagcgtccaggtgaccgccgttcccgccccgctcttccctgggtggactggaggaggccgcgcnntnnaacctgaccgaggccgaaagaatgagggtcgtgatcaactcagtatgccactggaggctatatgagtaaacagcaaaccgtttctcatgaaagcaggatgttggcaaactgacaaactgcgtctgccacccagaaggaatgctgaaggagtcacgacccaggcacaagtgtttcttgtgattaggcataattgaagcctgttaacaataatgtgaacttgtgatcaattaagcagctgaccagtcgttactcctcctccctttcatcctacccaataaatgtggagggctgtggaan

SEQ ID NO: 1172 - DNA, 475 bp, Homo sapiens
  I.1172 (W02928)
  misc_feature (68)..(68): n is a, c, g, or t
  misc_feature (438)..(438): n is a, c, g, or t
  misc_feature (447)..(447): n is a, c, g, or t
cttgattcttctcttttaaactgaatcccataggggaaatgaattttaaaatattgcccccggagttnttccgtggctggattcctgcgagttgctttcagtcattcagggaaacagaaagacgttttccaacatgtagaactgctttttaactggaggaaaaatacttcaggaggcttagcatattgcttggattctacgtgcagcgggttctctgcctccgtgaagacaagctgggctggggaggacggtgtctaaggagggatgaccccactcaagctccaggcagtgttctgccgatgaccccaagaactcggggtgtcagagggcaaaggaactacctgcctttcacggctgctgacttctcagggctgcaagcagcacagaatgttatccttacgtcctgagccggtttaagtctgtggaaaaggaagcacnggagaaatncacgtaacctttgctttctttttaaggg

SEQ ID NO: 1173 - DNA, 437 bp, Homo sapiens
  I.1173 (W02040)
  misc_feature (33)..(33): n is a, c, g, or t
  misc_feature (34)..(34): n is a, c, g, or t
  misc_feature (429)..(429): n is a, c, g, or t
ggaccgcgggttcggtcgctgtggcagcggctnncgagtactctggcacggtagcgtcgggaggtaacctccctggtgttcactgcggcccaagctccggggcaggccctggttttggcccgggctcgtggagcgcctctctcgatcgagccctggaggaggcggcggtcactggggtgctgagcctgagcggccggaaactgagggagtttccccggggagcggccaaccacgacctgacggacaccacccgggcggacctgtcgcgaaatcgcctttcagaaattcctatagaagcatgtcactttgtttctctggaaaatctcaacttgtaccaaaattgtattcgttatattccagaggcaattttaaacctacaagctctaacattcttaaatattagtcggaaccaacttgtcaacattgccnggtacact

SEQ ID NO: 1174 - DNA, 477 bp, Homo sapiens
  I.1174 (W01997)
  misc_feature (375)..(375): n is a, c, g, or t
  misc_feature (446)..(446): n is a, c, g, or t
  misc_feature (471)..(471): n is a, c, g, or t
gaagaattaagttaatttcttctctttccatctacctttttataaatacatatctatgtctcataaaaattagaatgtactattttaaaataatatgtgtaaattgaaatttttttcatttttaagttatcaggcacttttcatgctgtttaaaagactgtgtatcaaattgtgcactttaagtatgtgcagtttgttgtatgtcaattatacctcaataaatctaataaaaaactaaattaaaccttgcattaaaataatatcacagtatcagtggactaaacattaaaatgtaccactctaatcattggcctcatgattgaagcatcctgaactatgaattagacatcagttagcaataataagcattttttnactatcattgaggaataattcatggagcatgaaatttgggcctccggtatacttctgaatgtggatttatnctctttttaatgatgtagaaaatgnaggaga

SEQ ID NO: 1175 - DNA, 515 bp, Homo sapiens
  I.1175 (W01776)
  misc_feature (219)..(219): n is a, c, g, or t
  misc_feature (396)..(396): n is a, c, g, or t
  misc_feature (435)..(435): n is a, c, g, or t
  misc_feature (446)..(446): n is a, c, g, or t
  misc_feature (457)..(457): n is a, c, g, or t
  misc_feature (504)..(504): n is a, c, g, or t
catgtttccagttcttaaatttaggatacgttctgggaagggattaatgagacagatttttacttttcatacattgtgtcaaactgctttccaaaaaatacggaaacagttgatcctcccaccagcagagaagactctcttcacccttgcatgactgggaataattcttcattcttggaattctgtgggttaagaaagacgtttcattaaatatctgtncctgtttttatatcttccccgttggccccaaagtgctccttgcctattagcctagttggcaccttgttacaggttgcacccacctttggctcttagttcttaattgttcactgcttatacttttttgtaagcaaatcagattctgtaatacagccgtaaagttagagatatatagantgtattttattacctacagtaagtgtggtgtggaagganaggaattgacnaagactagatngttgtggtccatcttgtgagtgccctcgtggtgggctgaatcgtggntcaggggggtg

SEQ ID NO: 1176 - DNA, 436 bp, Homo sapiens
  I.1176 (W00454)
  misc_feature (433)..(433): n is a, c, g, or t
ggaagaaaaagaaagcctaatattgggagaatgtttgtgtaaggattggaaatctgtttatttttaaataagatagcactgatgtgaatcttatttggaaattacagatactgccattaagcgatgcttttatcttcattaattcattttggtaagcgcctatgcatttctgatggttaggtgccctaggtagtgttaagtatgtccgtgtcctcccttactcccctctcgctccctctaccctctatcccctagggttcttttattaatggaatttctccagttactagagaaaaaaatgacatttgaaaactaaagctcatttatattaatactaaggtcctgtgggcctagtgccgttactcttcccagtgatacctagattttaagagtaagagaacagaggaaacatgggatgagaggagagaggttnttt

SEQ ID NO: 1177 - DNA, 321 bp, Homo sapiens
  I.1177 (N99796)
  misc_feature (266)..(266): n is a, c, g, or t
agacagcgtctcactctgtttcccaggctggagtgcaatggcccaatctcagctcactgcaacctccgcctcctgggttcaggcaattctcctgcctgagccccccaagtagctgggattacaggcgcgtgacaccacacccggctaatttttttgtatttttagttaagatggggtttcgccatgtttgccaggctggtctcgaactcctgacctcaagtaacccacccgcctcggcctcccaaagtgctgggattacagacgtnagccatgggcccggcaaatgaagcagctctttaaaagaaaataaggacattgaaa

SEQ ID NO: 1178 - DNA, 461 bp, Homo sapiens
  I.1178 (N99495)
  misc_feature (8)..(8): n is a, c, g, or t
  misc_feature (172)..(172): n is a, c, g, or t
  misc_feature (173)..(173): n is a, c, g, or t
caaaaatnagctgggcatagtggcgggtacctataatcccagctactcgggaggctgaggcacgagaatcacttgaagccgggagtgggggttgcagtgagccgagatcacaccactgcactccagcctgggcaacaagagcaaaactccgtctcaaaaaagatgaaaatannataaaatatatatttacaggcctacaacttttgcctcagactgttccccttttctaagggtattcaagttttcaccttttaagcttcatatcctcagtgcttgtagaatgatgagcttagaggtaccaggtcattgcagttgtttgcttaaagacttattgaaatggttactggcgtaaatacttggccaactcaactttattgcccctggatcttttccatttttgtttccaccttaacctatagcagctcctccaaatgaggaatgctgtaagttaagactcatca

SEQ ID NO: 1179 - DNA, 153 bp, Homo sapiens
  I.1179 (N99414)
tggggtggctccaagcattaagaggtttaatctttgatggcattgttctagttttgaaatttctagtatatttcagagtctcttagaagacttgtgtgggaagtttcactttgttttcagtgaagatcacaaacctccttcttcctttactca

SEQ ID NO: 1180 - DNA, 495 bp, Homo sapiens
  I.1180 (N93915)
  misc_feature (431)..(431): n is a, c, g, or t
  misc_feature (481)..(481): n is a, c, g, or t
catgcacttcctcctggatttgtgttgaaaaaagataaaaagaaagaagagaaagaagatgaaatttcattagaagatctaattgagagagagcgttctgccctaggtccaaatgttaccaaaatcactctagaatcttttcttgcctggaagaaaaggaaaagacaagaaaagattgataaacttgaacaagatatggaaagaaggaaagctgacttcaaagcagggaaagcactagtgatcagtggtcgtgaagtgtttgaatttcgtcctgaactggtcaatgatgatgatgaggaagcagatgataccccgctacaccccagggaacaggtggtgattgaggttgatgattcagtgagtgtaaattgacatagattttaagcctggtacatccccaagagatgtagatggaaacaggtattactgtnagccagtcttggaaagattcagcacatatacttcagattaaagatgaaancaattaagtgaagc

SEQ ID NO: 1181 - DNA, 474 bp, Homo sapiens
  I.1181 (N92783)
  misc_feature (229)..(229): n is a, c, g, or t
aagttgaaaacattttatttcaattctatccttgggaggcagcataaataatcacagaagaccacaaaggtcaatggggaaggaaaaaaaaaagctccagaaatgtgggaggaggagatgagtgctgacactgtctagctgtggggtacggggtgaggaggccctactgtagctggctgggaggatggaggttcataaaggaaaggcccagctcacctggaggggcttnggtagccctggcctctgtggatgggattttccgtacggcggccatgggaaaagcaggtatggagtataatgcatctagtagatcctagctaatgaaagaaaagagtggacacccatttcttgatttccagatctcaccccaaacttgtgactcttctgagaacagtgtttataaactctttgtgcgtagtgggaaatgaaaggaggaaaaaagaaggaataaaagaaaatgtgtacaagatccaa

SEQ ID NO: 1182 - DNA, 490 bp, Homo sapiens
  I.1182 (N92167)
  misc_feature (402)..(402): n is a, c, g, or t
gaaaaaaattcaccttacagtgctaagaaagtgcattagaatggaattgccctttccttaaggagacagtttgggctctccccttgccaccggtctggtgttttggcttatgcgttccttcaggttgagctgagcagtgtgttatgggaagctgctcaatttcctttcattcaattccacctccttcctgaactctaatagaggttaaaagggaaaaaaaaaattctgtagatagcaaattgtgtgtgtgtgggggggtgggggtgtgggtgcatggaggacaacctgcaactctgagctccctacttcctgcctcatttcatgcagtcttttctgaacagcctatgtgctgcctgctgggccttgtgcacggcactggcgtgtccgtagctgtcagtatgnttagactagtctactactggttgatgtgtttttcctttgccagtgaattaggctgttagtagtttccaccatctagccttaagtaaaa

SEQ ID NO: 1183 - DNA, 215 bp, Homo sapiens
  I.1183 (N91391)
  misc_feature (45)..(45): n is a, c, g, or t
  misc_feature (47)..(47): n is a, c, g, or t
  misc_feature (48)..(48): n is a, c, g, or t
  misc_feature (49)..(49): n is a, c, g, or t
  misc_feature (52)..(52): n is a, c, g, or t
  misc_feature (58)..(58): n is a, c, g, or t
  misc_feature (101)..(101): n is a, c, g, or t
  misc_feature (106)..(106): n is a, c, g, or t
  misc_feature (113)..(113): n is a, c, g, or t
  misc_feature (116)..(116): n is a, c, g, or t
  misc_feature (130)..(130): n is a, c, g, or t
  misc_feature (131)..(131): n is a, c, g, or t
  misc_feature (150)..(150): n is a, c, g, or t
  misc_feature (167)..(167): n is a, c, g, or t
tgcccccagaactgcagcatcatgtaatctgggacctgccaggcngnnncgnggggtngaggcttcctgcgtcctcctcacctcatgcccaccccctgcantgtantttatangcngggggcttgaaganngtttgctataaccctttgntttttttcttctgtatntttttttctaagagaagttattttctacagtggttttatactgaagga

SEQ ID NO: 1184 - DNA, 456 bp, Homo sapiens
  I.1184 (N91325)
ttcttgcatgaaatatatttgtaaacaatataataaaagtaatttttaaagacctataaagaatgaattttctattggactattctaatactatctagcagtttaaatggtttttaaagaagtagactggactataacatagttctacaattctagctataatatattttgagagatactttctacaaaacaaaaacgactaaagggcagaaaaatgattccacactaagaaggcattggtgcctctaagaagttggcccaatctaaatttgcacaaggattttttcaattttcaaaagcattttccttgtttaaagtcggtcaatgtagtagcatagcttcacaagcccgttcccagcttcaccccccaagttgcttcagcaacaccgtcactccgtgagtaaggagcagagcttcccgtcaatttcatggcttctgaagaggtcgacaagaggg

SEQ ID NO: 1185 - DNA, 350 bp, Homo sapiens
  I.1185 (N91216)
  misc_feature (118)..(118): n is a, c, g, or t
  misc_feature (120)..(120): n is a, c, g, or t
  misc_feature (337)..(337): n is a, c, g, or t
ctgtggggcaaggtgaatgtggaagatgctggaggagaaaccctgggaaggctcctggttgtctacccatggacccagaggttctttgacagctttggcaacctgtcctctgcctctncnatcatgggcaaccccaaagtcaaggcacatggcaagaaggtgctgacttccttgggagatgccataaagcacctggattatctcaagggcacctttgccagctgatgaactgcactgtgacaagctgcatgtggatcctgagaacttcaagctcctgggaaatgtgctggtgaccgttttggcaatccatttcggcaaagaattcacccctgaggtncaagcttcctgga

SEQ ID NO: 1186 - DNA, 281 bp, Homo sapiens
  I.1186 (N91029)
  misc_feature (67)..(67): n is a, c, g, or t
  misc_feature (68)..(68): n is a, c, g, or t
  misc_feature (69)..(69): n is a, c, g, or t
  misc_feature (70)..(70): n is a, c, g, or t
  misc_feature (71)..(71): n is a, c, g, or t
  misc_feature (137)..(137): n is a, c, g, or t
  misc_feature (200)..(200): n is a, c, g, or t
aaaatacaacaaaatgtttaatgagcaaattcgtcttagcaaatatgaaactgccacagagagtagnnnnngggcaggggcacggggctgggcgcaggtcgggggagactaaagaggaaaaatcaactacgtaaganacccaggaggggaccagagaggaccagaggccgaagaacagagctgtggtcctggtaaggganagggcagggcactgagggccggacaacaaaattcaaaatagtttggccataaaatataaacacgctatgttccaaccgttt

SEQ ID NO: 1187 - DNA, 300 bp, Homo sapiens
  I.1187 (N91004)
  misc_feature (276)..(276): n is a, c, g, or t
ttttttagatctcattagttttatttctataacctttcgatctgatgtcacgttagattttgtcacaactggatttagtggaagcaggggaatcaagttcactattttctgaaacacacaaaaaagggatgggaacaatgacttagaactaagattgctcataaaagaccatcagaaagatccctaaacaaaagctaaatagttacagttaatggtaactggcaagggatttaatgcatttgctggtattaagtttcttatggaatgaatgaatgnacccagcagcattttatgacacag

SEQ ID NO: 1188 - DNA, 384 bp, Homo sapiens
  I.1188 (N90949)
  misc_feature (59)..(59): n is a, c, g, or t
  misc_feature (71)..(71): n is a, c, g, or t
  misc_feature (79)..(79): n is a, c, g, or t
  misc_feature (95)..(95): n is a, c, g, or t
  misc_feature (103)..(103): n is a, c, g, or t
  misc_feature (111)..(111): n is a, c, g, or t
  misc_feature (120)..(120): n is a, c, g, or t
  misc_feature (126)..(126): n is a, c, g, or t
  misc_feature (130)..(130): n is a, c, g, or t
  misc_feature (138)..(138): n is a, c, g, or t
  misc_feature (140)..(140): n is a, c, g, or t
  misc_feature (150)..(150): n is a, c, g, or t
  misc_feature (156)..(156): n is a, c, g, or t
  misc_feature (168)..(168): n is a, c, g, or t
  misc_feature (171)..(171): n is a, c, g, or t
  misc_feature (174)..(174): n is a, c, g, or t
  misc_feature (180)..(180): n is a, c, g, or t
  misc_feature (184)..(184): n is a, c, g, or t
  misc_feature (186)..(186): n is a, c, g, or t
  misc_feature (190)..(190): n is a, c, g, or t
  misc_feature (192)..(192): n is a, c, g, or t
  misc_feature (198)..(198): n is a, c, g, or t
  misc_feature (202)..(202): n is a, c, g, or t
  misc_feature (204)..(204): n is a, c, g, or t
  misc_feature (208)..(208): n is a, c, g, or t
  misc_feature (211)..(211): n is a, c, g, or t
  misc_feature (216)..(216): n is a, c, g, or t
  misc_feature (220)..(220): n is a, c, g, or t
  misc_feature (225)..(225): n is a, c, g, or t
  misc_feature (228)..(228): n is a, c, g, or t
  misc_feature (236)..(236): n is a, c, g, or t
  misc_feature (239)..(239): n is a, c, g, or t
  misc_feature (242)..(242): n is a, c, g, or t
  misc_feature (251)..(251): n is a, c, g, or t
  misc_feature (269)..(269): n is a, c, g, or t
  misc_feature (277)..(277): n is a, c, g, or t
  misc_feature (283)..(283): n is a, c, g, or t
  misc_feature (293)..(293): n is a, c, g, or t
  misc_feature (295)..(295): n is a, c, g, or t
  misc_feature (303)..(303): n is a, c, g, or t
  misc_feature (305)..(305): n is a, c, g, or t
  misc_feature (313)..(313): n is a, c, g, or t
  misc_feature (325)..(325): n is a, c, g, or t
  misc_feature (327)..(327): n is a, c, g, or t
  misc_feature (331)..(331): n is a, c, g, or t
  misc_feature (333)..(333): n is a, c, g, or t
  misc_feature (336)..(336): n is a, c, g, or t
  misc_feature (342)..(342): n is a, c, g, or t
  misc_feature (344)..(344): n is a, c, g, or t
  misc_feature (345)..(345): n is a, c, g, or t
  misc_feature (349)..(349): n is a, c, g, or t
  misc_feature (351)..(351): n is a, c, g, or t
  misc_feature (358)..(358): n is a, c, g, or t
taaacaatcattttattgcttgagtacacagacaaatttatgcgaccaggggaaaaggngtaaaagattcntatttccnattgggagggaggacncgcttggncttataanatcgagccnaacggngaanccgggtcncnattagaatcngacggnatttagcatccntanccnttctgntccncncaanangctttngaanancaantgntttcntaantaaanggnagagatcntcnggnagatcaggngcaagtcccctagacttnagaattcntaaaantttattgccngncacaaaangnacttgtgnaacaccatgtgnanctcncnggnttacancnntctntnaaggagnaaggcccctcttgggcagtttgtaaa

SEQ ID NO: 1189 - DNA, 437 bp, Homo sapiens
  I.1189 (N90834)
  misc_feature (91)..(91): n is a, c, g, or t
  misc_feature (378)..(378): n is a, c, g, or t
  misc_feature (417)..(417): n is a, c, g, or t
gaatggtgttcacagaatatgagcaaattccaaagaaaaaggcgaatggcattttcagcacagcagctctgccagaaaacgccgagcgcancgaatccgtgaagttgtcccctatgaggagaatcgagtagagctgataccaaccaaagaaaataacacaggatacattaatgcctcccacatcaaggtggtggttggcggggcagaatggcactacatagccacccaggggcccctgccacacacgtgccacgacttctggcagatggtgtgggagcagggagtgaatgtgattgccatggtcactgcagaggagtgatctttccactggaatttgggagtctcaggctgctctgggcaaatcgacatagacgccantccaggcaccagctccacatgccatcatccttatcagcngaaaagagaccagaactgtt

SEQ ID NO: 1190 - DNA, 291 bp, Homo sapiens
  I.1190 (N90649)
  misc_feature (273)..(273): n is a, c, g, or t
  misc_feature (280)..(280): n is a, c, g, or t
  misc_feature (287)..(287): n is a, c, g, or t
gcacggcagctgtttctagggagaaagtgacgtatacatgaatgtatttatctatcaaattactgaagatctcatcatgcatgtgtcagccacagcgaatcccatgtcttggttataggttttatgttttgttttctgggtcatagggagcacatttcacctgtgcaggaaaagagttttctgccgtcttttgaggaaatctagtgaagaggtcgccataaaatattagagtcaacaaccaaaattattaagctctgtgcgaaggctgtcaancacaccnggggttngggg

SEQ ID NO: 1191 - DNA, 587 bp, Homo sapiens
  I.1191 (N90546)
  misc_feature (149)..(149): n is a, c, g, or t
  misc_feature (412)..(412): n is a, c, g, or t
  misc_feature (448)..(448): n is a, c, g, or t
  misc_feature (458)..(458): n is a, c, g, or t
  misc_feature (476)..(476): n is a, c, g, or t
  misc_feature (489)..(489): n is a, c, g, or t
  misc_feature (519)..(519): n is a, c, g, or t
  misc_feature (526)..(526): n is a, c, g, or t
  misc_feature (537)..(537): n is a, c, g, or t
  misc_feature (549)..(549): n is a, c, g, or t
  misc_feature (583)..(583): n is a, c, g, or t
tttttttaggaataagttattattaacacttgctccccaaacaggagttagaaaactatattggtaacagatctagagaataaaaacacatgcaaacttttatgaatgatgaaagaaataaagccaatcatgacaggcctggctgagtngttcattatactcataagattgtcactggttctgcaaggtgagcctccaggtaagtgttcacttcttctacagtagttagtttatcgaaaaagttctctcttcttgggaaggatgggacagaaaggggcagggttggagtgattaggcaataacattttagttccatgcacaatcaaccgaggcagggaccagctgtcaaaaggctcccagaagccaggaaccaaagccctcattgcatggcacagatgctgtgggggcaggnactcctgcacgtaggtggccggctgccctgggagangtaggtcatnggtgccaacctgccactngggtgcactgtcnatacccgaagagtacagatgcccagatgcnggatccnttgccaacatnggtatcatctgngcccaagggtttccggtccttgaaggacaagccnttgg

SEQ ID NO: 1192 - DNA, 247 bp, Homo sapiens
  I.1192 (N90536)
  misc_feature (238)..(238): n is a, c, g, or t
tccaggacattgtcataattttttattatgtatcaaattgtcttcaatataagttacaacttgattaaagttgatagacatttgtatctatttaaagacaaaaaaattcttttatgtacaatatcttgtctagagtctagcaaatatagtacctttcattgcaggatttctgcttaatataacaagcaaaaacaaacaactgaaaaaatataaaccaaagcaaaccaaaccccccgcngaactacta

SEQ ID NO: 1193 - DNA, 468 bp, Homo sapiens
  I.1193 (N90368)
  misc_feature (462)..(462): n is a, c, g, or t
atatttgctatggacgacaaatcagagaatgagcccattgaaaatgaagctgccaaatatgatctaaaatacataggactagatgggaacattgcctgctttgtgaatggtgctgggctcgcatggctacttgtgatatcattttccttaatggtgggaagccagccaacttcttggatcttggaggtggtgtaaaggaagctcaagtatatcaagcattcaaattgctcacagctgatcctaaggttgaagccatccttgtcaatatatttggtggtatcgtcaactgtgccatcattgccaatgggatcaccaaagcctgccgggagctagaactcaaggtgcccctggtggtcccggctttgaaggaacccaacgtccaagaaggccccagaagatactccaacaacaagcggactcccccattactttaagccattgaccttgagggatgcagccaanaaggct

SEQ ID NO: 1194 - DNA, 422 bp, Homo sapiens
  I.1194 (N90140)
  misc_feature (44)..(44): n is a, c, g, or t
  misc_feature (49)..(49): n is a, c, g, or t
  misc_feature (422)..(422): n is a, c, g, or t
tcagggaagtataagcaggttttattaagatgccagggcgacanaccanggtcagagctgcggcaggaacgccaggcagggggactgagtgtgcgggagagggcggggcacaggacagctgagggaggggtcagggtgggtgcgcggtgacggggagggcaaaggtggtgtcagtatcttcattttgaggattggggttcagagcacttctggggtgtcagctcctccttgtccccccgtgggcttccgtagactggaaagaggacatgaagagctctgacagagagcagcagaaactctggaactgtttccagagggcctgcacttgcatggaccagggccaccaccttctcctttcacccaggccagaaccccgttgccaccaggtcttgcagccgctgcagcatggccttggaaccatn

SEQ ID NO: 1195 - DNA, 402 bp, Homo sapiens
  I.1195 (N89992)
attagtgcctgctttttaaaagtttattttacattttaaatacagtatttttctcataaaaaaaaaatccaggaagtgcctaactccatggtttctataccatatgtacatgaaagctgacagagagcctgacaaatgttctggatgtaacagtatgaacacctatgagctgggactacttctgaatcaaaattaaaaaacacaaattaagcactgcttaaggaaaaaaaaatccagtttctgaacaaccaaaagagaacagagttagatatgtacaaaaccaggtattaaaaaacagaaagaaatacagcacacaaaaaactcaaacaacccatatgtagtggaactggtatatactggcagttaatgaaaaccctcctacaagaaagtgatttaggattt

SEQ ID NO: 1196 - DNA, 404 bp, Homo sapiens
  I.1196 (N89970)
  misc_feature (112)..(112): n is a, c, g, or t
  misc_feature (313)..(313): n is a, c, g, or t
  misc_feature (321)..(321): n is a, c, g, or t
  misc_feature (377)..(377): n is a, c, g, or t
  misc_feature (404)..(404): n is a, c, g, or t
ccaggaggccaggaaatattttattgacaaccagggacacagtcatcaagagagggaagcacacaggactgcaaactaacacccagtagccagcaagggccctctgcagcgnaatactgaatcctgggatcctcacagtctcccaccagtagacatacattactgggcatccaggggagggggcagtggctatggtgtcccagagagtgagaggatatatgatgcctcattatgagcgacagggtaaagaggtaaaatggagggtccatcactgcctaagaccacctcctcctctcagagccaacaccaggtnaaggactnaaccacctaaaatctttgtaatcagctgctgtcttctcatcattcatctggtttgncactgttagatgagcctctgctgttgn

SEQ ID NO: 1197 - DNA, 338 bp, Homo sapiens
  I.1197 (N89955)
cacattcaaatacgttttaataggaatggcaatatattttaatgctccagaggaaagagtagaactctggccattgtacattctttattaaacatcaatactgaaaacagatttactgacatatgtatataaatataatcaaactgagaaaaagggacaagaaatagtaatctctctctctcatgcggtggtgcgatcttggctcactgcaacctccacctcctgggttcaagcaattctcctgcctcagcctcccaagtagttgaaattacaggtgtgcactaccacacccgggctaattttcgcattttttaaataagtggacaggtcttcaccat

SEQ ID NO: 1198 - DNA, 256 bp, Homo sapiens
  I.1198 (N89932)
  misc_feature (251)..(251): n is a, c, g, or t
ggcattttgaaaaataagctttataaataaaagagtgataatgttctataacatttagaatgaaataccattgattttctcagtatctgccttcgatgcataaggcatttcttgaactaactaaaggttgaatttttaaaaatcaaaggtgatggaaaacataataggaataagtgagtaacaagtaccagaagaaaacccatctttactattttattacattccttttgggaccagaagattaaactacnccagg

SEQ ID NO: 1199 - DNA, 437 bp, Homo sapiens
  I.1199 (N89915)
caatccatgaaataaatatttatttatgtaatacaatttgctaaacaccaccattattaaggagagcactaggaaaaactaccaaacacagcatgtgaaacagttgggcacggtggtaaagggcacagactctggagccacagctggctaatacactgcaatattttatgtttagcaaattatagctggtctgtgtataaccagaagagcggtatctgggggatcaggatatctaaattctagacttacagcctggccctgaatctaactatcaatgttgccttggaaaaactgctcaaacttttgatgtctaaagtttcagacttgtaaacttcgagagggttgaggtccaaggtcccttaaatgtaaactttaaaatgcttttttgggaatctttcaaatcttcaagctcttcaaagtggcaaccagactttctc

SEQ ID NO: 1200 - DNA, 448 bp, Homo sapiens
  I.1200 (N89718)
  misc_feature (297)..(297): n is a, c, g, or t
  misc_feature (314)..(314): n is a, c, g, or t
  misc_feature (325)..(325): n is a, c, g, or t
  misc_feature (344)..(344): n is a, c, g, or t
  misc_feature (350)..(350): n is a, c, g, or t
aacttttatgaatttatttatagtaaagataagagtacaaatgtcttccacacatacgtggtaatctgtggtgcttgccactccctcactcctgggactgacacactgcagcccacgctgatcaccctgcagccccatccttgcgtgagagaatggcgccacctggggtgtgcaacgtgtcagcctgctcattcccttctccagctcaggacagagaaacacaattcattcataaggtttccattctgttataggcagagatttataaatcagcattatttttcaaagagtacaaangttaaaccattctgctnagaaaagaatnaacacatccaatcattttncctctnagtttagtcaaaacagggatccaaacttcctttggataagcattataatggtctaacgtccaggacttagtcttccggaatcaaaattttggaataat

SEQ ID NO: 1201 - DNA, 371 bp, Homo sapiens
  I.1201 (N80632)
  misc_feature (250)..(250): n is a, c, g, or t
  misc_feature (258)..(258): n is a, c, g, or t
  misc_feature (262)..(262): n is a, c, g, or t
  misc_feature (263)..(263): n is a, c, g, or t
gaccagaagatttgtttacctaccatttcattggtagtatggcctgcggtgaccatttttttgtgtgtgtacagcgtcatacaggctttgcttctaatgatctcttatggttagaaaacacaataaaaacaaactggctactggacaaattgtatattaccagatcatcactagcagctttcagttgcacttcagtcctttatcaaattcataaagaattgttctgggaagtgaggagcacctctgcctnggcaaccngttnnggaaagtgagggagccccgcttcccgggagccgccccatctgggaagtgaggagcgcttgcctggccgcccaactgtctgggaagtgaggtgtgcctgtgcctggctg

SEQ ID NO: 1202 - DNA, 367 bp, Homo sapiens
  I.1202 (N80469)
  misc_feature (273)..(273): n is a, c, g, or t
  misc_feature (328)..(328): n is a, c, g, or t
  misc_feature (357)..(357): n is a, c, g, or t
tttttgagacggatttcactcttgttgcccaggctggagtgcaatggcgcgatcttggctcaccgcaacctccacctcccagattcaagcaattctcctgcctcagcctcccgagtagctgggattacaggcatgagcaccgtgcctggctaattttgtagttttagtagagatggggtttctccatgttggtcaggctggcctcgacctcccgacctcaggtgatctgcccgccttgggctcccaaagtgctgggattacaggcgtgccacncacgcccggccaaaaatcattcttttgtaggggaaaataattttcatttgacctnaaaagatgacatattacatataatttttnacataaatgg

SEQ ID NO: 1203 - DNA, 487 bp, Homo sapiens
  I.1203 (N80082)
  misc_feature (49)..(49): n is a, c, g, or t
  misc_feature (135)..(135): n is a, c, g, or t
  misc_feature (141)..(141): n is a, c, g, or t
  misc_feature (250)..(250): n is a, c, g, or t
  misc_feature (252)..(252): n is a, c, g, or t
gcggtggacatagagggcatggagtttggccctggtgagctggacagtnttggcagcagcagtgacgcggacgaccactacagcctgcagagtggcaccggcggcgacagtggcttcgggccccactgccggcgntgggcncagcccatctcgtaggcccgtgccctctgctccttggcctgctgcccgccagccacgcgtgtcagccctccagttctctttcagttgacgccagcctctccacaggccnantgctgtgccattctggaagctccagctgctgctgggcttgccttggcactgccgcttgccggtcagggcctgccgagcttgcctgccccttccaagctgggcagagtcccctgcaaagaaggcagggcccaagcttccacatccggaagccctggtcaagcataagccgccacggtcttgttctcagattcctaatcattccagaagtattaaacgttattgctgcaaaactcgg

SEQ ID NO: 1204 - DNA, 238 bp, Homo sapiens
  I.1204 (N78529)
  misc_feature (13)..(13): n is a, c, g, or t
  misc_feature (194)..(194): n is a, c, g, or t
  misc_feature (199)..(199): n is a, c, g, or t
  misc_feature (205)..(205): n is a, c, g, or t
  misc_feature (211)..(211): n is a, c, g, or t
  misc_feature (219)..(219): n is a, c, g, or t
  misc_feature (235)..(235): n is a, c, g, or t
gcacttagcagcnatcaggtaggcatcttctatttttcttcattccttaatttcctttgtatccctcaaatggttatttatttggctggagtctgttttgttcattaagcaaacatgtctttgctttgaacatgtctttgatttgatggatacttaaattcctcatcaaacattttgttgctatgcataaccgntttcntttggncaactnccgggaanttttcccccattttgngaa

SEQ ID NO: 1205 - DNA, 383 bp, Homo sapiens
  I.1205 (N77582)
  misc_feature (127)..(127): n is a, c, g, or t
  misc_feature (135)..(135): n is a, c, g, or t
  misc_feature (238)..(238): n is a, c, g, or t
  misc_feature (271)..(271): n is a, c, g, or t
  misc_feature (296)..(296): n is a, c, g, or t
  misc_feature (332)..(332): n is a, c, g, or t
  misc_feature (338)..(338): n is a, c, g, or t
  misc_feature (345)..(345): n is a, c, g, or t
  misc_feature (372)..(372): n is a, c, g, or t
agaatagccatttcctgctgtcttcccaatgatcactgccctttcaataacactcttgcctctagaatcatatgttcaaagtatgaatacacacctagcacatagtaggtgctcaaatattaatttnccctcctngccttccttatctaccctgtgtcctccatttccccgtatgattccaacccaatatagcaaatgacatttacatgttatgaaaacatctattgggtaaaatcangatcttggataaagaaattctgacttttatatnagcttttggtagacagaaaaaacangaaaggtattcgttgggtagaacatttttaagttcngggaangaaagcngggataatacctacgtaacctttggtncagggttacct

SEQ ID NO: 1206 - DNA, 496 bp, Homo sapiens
  I.1206 (N77068)
  misc_feature (375)..(375): n is a, c, g, or t
  misc_feature (421)..(421): n is a, c, g, or t
  misc_feature (436)..(436): n is a, c, g, or t
  misc_feature (450)..(450): n is a, c, g, or t
  misc_feature (469)..(469): n is a, c, g, or t
ggacttcattggcattgttagtcccacaggccaaggataaggttgaaatgagacggcttgtgtgtgaaaagattttggaaattacacagatgtgggcttgttattgggatgaagactgctggaagggactccttgctgtttatctactgctttgagccctcctaagttaacctgtgcctcatttgtaaaaccaccagcatcaggagtaagggggaggccagagggctcagatggacacagaattctagctttacctgcatccgctgattcagttttctgttgggatcagagtgaggatacttccatatgggtgataagcagccatgcccctgggaagtcaacttcaaggatctgggacattttggtgtgccattncttctttttcctgaactcacagtcctggggtggttctgcacttggntatgtgtgtctgtcngaatgtccgtctcnggagctttgcctctatcanggctggaattggtgcagcccctggaat

SEQ ID NO: 1207 - DNA, 274 bp, Homo sapiens
  I.1207 (N76878)
  misc_feature (19)..(19): n is a, c, g, or t
  misc_feature (36)..(36): n is a, c, g, or t
  misc_feature (43)..(43): n is a, c, g, or t
  misc_feature (54)..(54): n is a, c, g, or t
  misc_feature (117)..(117): n is a, c, g, or t
  misc_feature (134)..(134): n is a, c, g, or t
  misc_feature (186)..(186): n is a, c, g, or t
  misc_feature (196)..(196): n is a, c, g, or t
  misc_feature (207)..(207): n is a, c, g, or t
  misc_feature (212)..(212): n is a, c, g, or t
  misc_feature (239)..(239): n is a, c, g, or t
gggggtccacatagacagntggacagcagcaagccnatggggnccccagagganggctctgtgaagccaggatgcctgggcattccctggcaagaccaccgcagatgggcagcagantctgacctaagaagctngacttttgggcagtctgcaagccatggctcccggcaccggtccccccccagnagtgtgtccngagtactctantcgcncctcccggtgatccatgaactctgacncctccccagtaaaggcttctgtagagagcatgctg

SEQ ID NO: 1208 - DNA, 477 bp, Homo sapiens
  I.1208 (N76628)
  misc_feature (1)..(1): n is a, c, g, or t
  misc_feature (5)..(5): n is a, c, g, or t
  misc_feature (9)..(9): n is a, c, g, or t
  misc_feature (13)..(13): n is a, c, g, or t
  misc_feature (14)..(14): n is a, c, g, or t
  misc_feature (15)..(15): n is a, c, g, or t
  misc_feature (16)..(16): n is a, c, g, or t
  misc_feature (21)..(21): n is a, c, g, or t
  misc_feature (24)..(24): n is a, c, g, or t
  misc_feature (25)..(25): n is a, c, g, or t
  misc_feature (33)..(33): n is a, c, g, or t
  misc_feature (34)..(34): n is a, c, g, or t
  misc_feature (35)..(35): n is a, c, g, or t
  misc_feature (43)..(43): n is a, c, g, or t
  misc_feature (44)..(44): n is a, c, g, or t
  misc_feature (47)..(47): n is a, c, g, or t
  misc_feature (48)..(48): n is a, c, g, or t
  misc_feature (51)..(51): n is a, c, g, or t
  misc_feature (58)..(58): n is a, c, g, or t
  misc_feature (186)..(186): n is a, c, g, or t
  misc_feature (382)..(382): n is a, c, g, or t
  misc_feature (430)..(430): n is a, c, g, or t
  misc_feature (456)..(456): n is a, c, g, or t
nggcntggncacnnnntacantgnncctagtannnttgactannagnntanactcatncatttatgttttgtctagtggttgctttccacaactgcagagttgtatgggcttgcaagtctaaaaacatttacctatttgggccctctaaagaaaaagttaagacacctagtctaatgggccttttngggaaaaaacaaatcactaactcataatcatttatatccattattttctgcataaatgtaatgctattgtacagggtttggtagaataaatattcagactgactaaactgttctaatcctcacaaaaaagtccccaaacaacatgcctcctaaaaaacatttttcctatcttttacaagagggtatggaacatttngtaagggtttccacatttggcatctagaaaatccaatggctctttagnatggttattacggataggaaaggatnggcaggatgacctttaggtgg

SEQ ID NO: 1209 - DNA, 394 bp, Homo sapiens
  I.1209 (N76317)
  misc_feature (18)..(18): n is a, c, g, or t
  misc_feature (39)..(39): n is a, c, g, or t
  misc_feature (51)..(51): n is a, c, g, or t
  misc_feature (120)..(120): n is a, c, g, or t
  misc_feature (152)..(152): n is a, c, g, or t
  misc_feature (153)..(153): n is a, c, g, or t
  misc_feature (215)..(215): n is a, c, g, or t
  misc_feature (241)..(241): n is a, c, g, or t
  misc_feature (257)..(257): n is a, c, g, or t
  misc_feature (264)..(264): n is a, c, g, or t
  misc_feature (273)..(273): n is a, c, g, or t
  misc_feature (371)..(371): n is a, c, g, or t
  misc_feature (381)..(381): n is a, c, g, or t
gcggcacgagggaacctncgcagctggacatctcggagntccctgccgtgnccaaccctggcctcactcagatattggtggaggagatgctgcccaattgcgaggttgtgggagtcgacngggctgagggctgaagtcagggccggagagcnngcctcgggacacagccagccctgtccctgcctagcctttagccctgtccccactcacgtggnttctcagcgggctgcatggaatgtantggtagctcaccacanttctggnttccatttntcttcactcaacgtcagggtgggggagtggtgctggcaatcacaggagagagcgtgagttcccagtatttattcctggcttgccttggtaaaggtcanagctcctgtnaacctgtcaagca

SEQ ID NO: 1210 - DNA, 531 bp, Homo sapiens
  I.1210 (N80894)
  misc_feature (22)..(22): n is a, c, g, or t
  misc_feature (448)..(448): n is a, c, g, or t
  misc_feature (468)..(468): n is a, c, g, or t
  misc_feature (499)..(499): n is a, c, g, or t
  misc_feature (516)..(516): n is a, c, g, or t
tcacaaggaatatcattttatnactgtaatcacaaaatcgtaatttctgtacaggaatgtataagtgaacattattcaaagcattggtaattcacttcataaagagggtaaacatactacagaacatattgtaaagaaaaaatattgtaaaattttctggtcttgcagtgcactatttagtgcaagtatttaagacacaatagtgttcaattcagcaaagtattgcagaatgtcatgccacagtccacttaattcaaagagggtcaggacatgcagcttgtaataaaatgtcagagtgtgtgtgtgtgtgtgtgtgtgtatataaaaccacatgtaattcataaaatatatagtggtttatttagatgggtttaaatgatttcactgtggaatccagcataactggaaccacatcccaggtcctcctaacggcaacaatcctattgcnaggccatggccttggcctcnggtaagaatgcctcccagtattttatcagcngttggtgtggttgaacnagtgatccaagtccc

SEQ ID NO: 1211 - DNA, 458 bp, Homo sapiens
  I.1211 (N80868)
  misc_feature (425)..(425): n is a, c, g, or t
aaaaatgatctcttctcctttattgccacattcacataaaacgttttgatatatttgggttggtaaaagctaaagaaaattgaagttaaaatatatatggttttagtgttccgaaaagcagttacagattgcttccttggtttaattatcgaagcggtcgaaattctgggtttgaaactcttggaagtcctcagggatggtgtcattgcagcgatacttgaggttggaccagatgatgttttcttgagagaagcagaaaacgccaagtcggcctccacgcattgtggtgtctatggtgacgccagagtcagccaccaactcagagccttcataaaatccgtaccctgatgtagcccacctgggggcctggtgctggtaggaaccagcggtaggacaccttgtccttccagcccacattcctgggngtccttccacagcagcctgacctgggtcactgg

SEQ ID NO: 1212 - DNA, 433 bp, Homo sapiens
  I.1212 (N80712)
agaaagatattttattttttaggaaaagagccataattatcttaaatgtgaaaaaccacatccaataaactgatataaagttttaggaacaagggaatatcttattgtcacgcattcacagtgaaacccattttaatgcaggtccagagccaactgcagtcctgtccaatcccataggtacaagggcctggctcctcttcctgtgtactgcccgacttcctcatcttactgggtccagcataaagcagatgtccactgtcttcctcacatgctgtgatcttggcttagaggtaggcacagtgccgctccagcagcgaggggttcgcgttacttaggaacagcagctcttttttcccttcttctgtaggagctttctcatgtttgaagccaattgttttccaaataatactgaatacaactttcaaattccctt

SEQ ID NO: 1213 - DNA, 183 bp, Homo sapiens
  I.1213 (N80268)
  misc_feature (60)..(60): n is a, c, g, or t
  misc_feature (63)..(63): n is a, c, g, or t
  misc_feature (174)..(174): n is a, c, g, or t
cctctcacaagacctttagttgagagaacatgcacagctgcctgccctgaaagccccagngtncccattcaggaagaggcaaccagaacagaccgacggccccaccacagtcgtgcgcgggctcctctgcgatggctggcagcacagctcactcagcacacctgtatcatcatnctgacgtta

SEQ ID NO: 1214 - DNA, 374 bp, Homo sapiens
  I.1214 (N80061)
  misc_feature (186)..(186): n is a, c, g, or t
  misc_feature (247)..(247): n is a, c, g, or t
  misc_feature (256)..(256): n is a, c, g, or t
  misc_feature (329)..(329): n is a, c, g, or t
  misc_feature (354)..(354): n is a, c, g, or t
  misc_feature (360)..(360): n is a, c, g, or t
tctgttatctgcaaataagcactttattaccaaatagttcagcatcagaacaagaattctaattccaaaagggtttcctttacattacatgacattgtgagatacacattagaagaatctgagactatgttccatttcagtttctcttttgcaattaggtaatttgttttgatctaaaaagtacanatttatctcattcttgttaatgctgtccatgaaatgtaagtatcagttccttctcagctangtgctttanacgttatacccggtgccagggttaaagagacctatttttaataggtgaggtgacatgaaaagtcaactacaangaaaaagcacattggccattttcantttacngagggcaaagtccc

SEQ ID NO: 1215 - DNA, 195 bp, Homo sapiens
  I.1215 (N79977)
  misc_feature (34)..(34): n is a, c, g, or t
  misc_feature (121)..(121): n is a, c, g, or t
gcgaccgccggcgatacgccgggccctcccgttnccccggccaagcacacgccgaacgggaagacgcgcgcggggccgaactggccctcaactcctcgcaggggcggaggtgggtaaaganagaaaagtccccaaaagatttggggaaggaattctccgcctctcgcaaaaggaatttaaagttcccaaggctgg

SEQ ID NO: 1216 - DNA, 188 bp, Homo sapiens
  I.1216 (N79582)
  misc_feature (185)..(185): n is a, c, g, or t
gaattttaaagcattaagtgcattttattttattgtattagcacataaattgatgaagccacatggtgaaaatctgtgagaaactgaaggttttcatttgttttctgtgccccactgtatatcacctttcaaaataatgctttctgctgggtccaaacttcacttggagcaaagaaaggtagttnaaa

SEQ ID NO: 1217 - DNA, 412 bp, Homo sapiens
  I.1217 (N78812)
  misc_feature (166)..(166): n is a, c, g, or t
  misc_feature (167)..(167): n is a, c, g, or t
  misc_feature (168)..(168): n is a, c, g, or t
  misc_feature (169)..(169): n is a, c, g, or t
  misc_feature (174)..(174): n is a, c, g, or t
  misc_feature (176)..(176): n is a, c, g, or t
agacagggtttcaccatgttggccaggctggtctcaaactcccaacctcaaatgatccggccaccttggctcccaaaatgctggcattacaggcgtgacacacacacccggcttacatgcattttttatcaccacaaactgaaactctgtacccacttaaaaagannnncaaantncaaccctcaccccagaccctggtaaccactatttcactttctttctgaatttcccttcatatgagtgggatcaaacaagagttgtccttttggtgtttagcattcttacttagcaagccatcaactggctcgaacagtcactggggcaactacttttcgcccagtgtcctccagaaaagaaagatctgggagggtcaggccactcttttttcttcaaaataaatgggggtgcagaa

SEQ ID NO: 1218 - DNA, 280 bp, Homo sapiens
  I.1218 (N77885)
gtaggaagaggtatattttgtctttttttaattattttagcattctgtacactgacaacgaggtaaaagaaaatgactgaaacttacaagtgaaagaacatttcacaattaaatccacaattgtatacatttatcttactcacatgtcagtgaaaaatcaccaactattataaaaagaggacaaattgtatcacaaaagaagcaaaaattagaaaaaattcataaaaaaatatatccaactatgaaaagcgttgctctcttggtgtcttcacatccgtct

SEQ ID NO: 1219 - DNA, 372 bp, Homo sapiens
  I.1219 (N76107)
  misc_feature (350)..(350): n is a, c, g, or t
  misc_feature (369)..(369): n is a, c, g, or t
aaactgcacagccacatttattgttccagcctggaaaaacatcccttttttaaatttcacacagcaaagcatgttaaaaacttcactcatcaaataaatgataatttaaacaagaacttgctaaagaaacctcatcacaacaacgttttagggcctgatcactttaagtccatggggccattaatgaatatcaaccaaatgtctctttataatctgcaagccgtttttcctacaacaagaaggcgtaacatgtttccttgactcaggtgataacattagaaaagaaatcatgatttgtttcttttgctgtaacaggcagacactgcatttcttgctatgatcagggaagntggggcgactgctgggccnctt

SEQ ID NO: 1220 - DNA, 291 bp, Homo sapiens
  I.1220 (N76019)
  misc_feature (183)..(183): n is a, c, g, or t
  misc_feature (189)..(189): n is a, c, g, or t
  misc_feature (227)..(227): n is a, c, g, or t
  misc_feature (235)..(235): n is a, c, g, or t
  misc_feature (248)..(248): n is a, c, g, or t
  misc_feature (259)..(259): n is a, c, g, or t
  misc_feature (270)..(270): n is a, c, g, or t
gataatttttaaaactttataatggcacttgaaaattcaattaaaacaattgcatcatccaggaattatacaatattgcattgtctctcatttcatgtgatttatgattctaagatgcccattatgttaatatcttccaaaccaaagattattttcccaacaagtgaatggtgtaattttacntaatanatttagatagatcacaaagttctataaaacattgtacnaaagtacnaaaaaaaagtgcnttatgcacacntttttaaaacnggccttggcccctttttggga

SEQ ID NO: 1221 - DNA, 292 bp, Homo sapiens
  I.1221 (N75966)
  misc_feature (181)..(181): n is a, c, g, or t
  misc_feature (201)..(201): n is a, c, g, or t
  misc_feature (233)..(233): n is a, c, g, or t
  misc_feature (241)..(241): n is a, c, g, or t
  misc_feature (285)..(285): n is a, c, g, or t
ttaagaacgtcagctcctttattattattattattaattatttactgttatttacccctaaacaacagcataactcaaataataatgacacacacgtcccgcccatatacacaataccactagcctatctgtcaggctatctggcctttgcttggttcctgatggagctgtctggagacantccctctgtaaaaatcccgncttaaacacaggggacagaagaaagggggganctagggcngatcataaactggcaggctcccagcgtccttagggagtgctaangtggaaa

SEQ ID NO: 1222 - DNA, 466 bp, Homo sapiens
  I.1222 (N75941)
taaattgagagtattgtatctttatttgtaaaattgtgtgcagtgtatcttttatttcaatatttaaaataagcatgtgtatatgtgtatatatatgtacgtaacacatatacatatatatacacatatatgtgtgtatatatacatatatatacatgtacacacacacatacatcacacatttttccctggagaggtgagtgttgagtatctaccagctcgcaactgctctagtacatatgaaaatgaaggcatgccctcaaagctgcatgttgagtgccgtctgctttcggtcccgtcattatctctgtatagacccagttggcaatcatgcatttggggccctctagtcttcctgtcattctccatggggaagatccaagcccagagaaggcaagcatttgccccaggccacacagcagagccagcaccggaatcccaggtgcctgcctgctcctatcaccac

SEQ ID NO: 1223 - DNA, 403 bp, Homo sapiens
  I.1223 (N75431)
aatttataaagaaaagaggtttaattggctcacggtcctgtagatggtacaggaagcacagcagcttttgcttctagggaggcctcaggaaacttacaatcatgttagaaggcgaaggagaagcaggcacatcttatatggccagagcaggagggagacagaggggaggcaccacacactttgaagcaaccagatgtgatgaggactcaatatcaggagaacagcactgagcgggtggtgctaaaccgtttgtgaggactctgccccataatcccatcgcctcccaccagggggccttacatttcaacatgagactcggttgaggacacagatccaaaccacatcaatagtgctttcatgcttttgattatcttttgtaactatgttattgaactataattta

SEQ ID NO: 1224 - DNA, 371 bp, Homo sapiens
  I.1224 (N74995)
  misc_feature (152)..(152): n is a, c, g, or t
  misc_feature (296)..(296): n is a, c, g, or t
ggcagcttgaacctttatttttagtatttttttaaaaagcataattagaaactttcaatacagaaatactcctagcaaaccattgaaaagtggtgtttgtttgacaggaatttcacatcaggtccactaggacgtcggtccagccctgagtncccacccccaccccataacccccattcatgcgtgtaacagtgggacaggcacactgtcatgaccaaaatcaccccaatacctggggctgatgtccagctgccagaagccatgggggcttctagcctgggctggaagcccaaggnaacccccctcttattgcttgaatttgcaagcacaccctcgctggcctcgctgatcgctcagaggccagctttccc

SEQ ID NO: 1225 - DNA, 493 bp, Homo sapiens
  I.1225 (N74534)
  misc_feature (236)..(236): n is a, c, g, or t
  misc_feature (452)..(452): n is a, c, g, or t
cattgctctggtttattgaacaacagtccaactttacagcattaaataacggggcaaccgttcaggaggggaacgatggcttaaaaataaaaatgaagacagagccgggacagttcacatttccacgtgagtgagcgaaaagcgaaggattgttagagacgtgaagagaacgctggcaatgctacagaatggagcccacggaggcgtgctcgccctgcgtccccggcctcgggcangaacagggagcaaccccaaagcctgccccactgtgtcccttccagctgcccttctgccgagaacacccggaagctgagggttccaagttcacggcggaaccgtttcccttaaaaagaaagcaaaggttacgtggatttctcccgtggcttcctttttccacaagacttaaaaccgggctcaggaacgtaaggaataacattctgtgctgcttgganccctgaagaagtcagcagccgtgaaaggcaggtagttcctt

SEQ ID NO: 1226 - DNA, 177 bp, Homo sapiens
  I.1226 (N73906)
  misc_feature (170)..(170): n is a, c, g, or t
ataacaatatttaattattggacattttatgcaaaatagactttgatcagatagcatttgagctcgttgcaaatagtcaacatgcaaaaggaattaagaataatattcatgcaaggatacaacattactaactagactatttttaaaataaaaagcactacctaaaatcntcctatt

SEQ ID NO: 1227 - DNA, 537 bp, Homo sapiens
  I.1227 (N73789)
  misc_feature (441)..(441): n is a, c, g, or t
  misc_feature (450)..(450): n is a, c, g, or t
  misc_feature (460)..(460): n is a, c, g, or t
  misc_feature (466)..(466): n is a, c, g, or t
  misc_feature (495)..(495): n is a, c, g, or t
  misc_feature (502)..(502): n is a, c, g, or t
  misc_feature (511)..(511): n is a, c, g, or t
  misc_feature (531)..(531): n is a, c, g, or t
atagaaaacataaaggaactttaatatccaaacattcagggtaaagaatactggattaatcacccattaagtgtaaatcacttcaggttctttacagtaccagaaagtaaaatctaaattttgcatattgcagagaatgaaaccattttaaaaactttaatttccttacctgatactaataccagtatgatttttagacggaaaaactaagagtaagatttaaaccaaagatagaggtgttcctgaaatgtgaatttgttcagtagtaaccttttcatcatgagtactgataccactttcttctcagaaagtagtcaatggtacattttaagatttgtggcaataagccaatatgctgggataataaaaactgttattactggagatagtcaaaatggaaagaaaactatttaaattatttatgcccaataattttacccnggcagtccntggagatgcnccgggnaataattttttttaataaggggaccatgngggtccnaaaggtggnaaccttagcccgaggaatcntaaaat

SEQ ID NO: 1228 - DNA, 468 bp, Homo sapiens
  I.1228 (N73723)
  misc_feature (163)..(163): n is a, c, g, or t
  misc_feature (167)..(167): n is a, c, g, or t
  misc_feature (172)..(172): n is a, c, g, or t
  misc_feature (176)..(176): n is a, c, g, or t
  misc_feature (183)..(183): n is a, c, g, or t
  misc_feature (185)..(185): n is a, c, g, or t
  misc_feature (194)..(194): n is a, c, g, or t
  misc_feature (199)..(199): n is a, c, g, or t
  misc_feature (231)..(231): n is a, c, g, or t
  misc_feature (232)..(232): n is a, c, g, or t
  misc_feature (234)..(234): n is a, c, g, or t
  misc_feature (237)..(237): n is a, c, g, or t
  misc_feature (242)..(242): n is a, c, g, or t
  misc_feature (245)..(245): n is a, c, g, or t
  misc_feature (251)..(251): n is a, c, g, or t
  misc_feature (259)..(259): n is a, c, g, or t
  misc_feature (260)..(260): n is a, c, g, or t
  misc_feature (261)..(261): n is a, c, g, or t
  misc_feature (264)..(264): n is a, c, g, or t
  misc_feature (279)..(279): n is a, c, g, or t
  misc_feature (282)..(282): n is a, c, g, or t
  misc_feature (285)..(285): n is a, c, g, or t
  misc_feature (286)..(286): n is a, c, g, or t
  misc_feature (302)..(302): n is a, c, g, or t
  misc_feature (308)..(308): n is a, c, g, or t
  misc_feature (312)..(312): n is a, c, g, or t
  misc_feature (327)..(327): n is a, c, g, or t
  misc_feature (330)..(330): n is a, c, g, or t
  misc_feature (340)..(340): n is a, c, g, or t
  misc_feature (365)..(365): n is a, c, g, or t
  misc_feature (402)..(402): n is a, c, g, or t
  misc_feature (416)..(416): n is a, c, g, or t
  misc_feature (424)..(424): n is a, c, g, or t
  misc_feature (438)..(438): n is a, c, g, or t
  misc_feature (443)..(443): n is a, c, g, or t
  misc_feature (454)..(454): n is a, c, g, or t
cggcatatgaaaatttattactacagtgttttcaccattaatatttatgatcttggtctttccttcttgcctttgtatagggccaaaagagaaacattggctactttgacaaccttaaagcggactccaggaatatcaccaacaggatgaccctttgcgaccnaatncagcnaccnggacttnancaatttccncaatnaagttcaagcaaccggcattgggtaaaaaggnngngantttcntgncattcntgattaannnganccttaaaaaattccnaanggnnagaatttgggctgttnggcttnaacnccaactttttccagnacngattcctttngcatgaagaagcacctccaaaaggnttgggcctttagggctgtgccaaaatggagctttctnatactgttaatcangccacttngggtctcgtcggtnactanggggcttccangcagtacgaattcc

SEQ ID NO: 1229 - DNA, 351 bp, Homo sapiens
  I.1229 (N73685)
  misc_feature (177)..(177): n is a, c, g, or t
  misc_feature (179)..(179): n is a, c, g, or t
  misc_feature (193)..(193): n is a, c, g, or t
  misc_feature (203)..(203): n is a, c, g, or t
  misc_feature (207)..(207): n is a, c, g, or t
  misc_feature (211)..(211): n is a, c, g, or t
  misc_feature (223)..(223): n is a, c, g, or t
  misc_feature (242)..(242): n is a, c, g, or t
  misc_feature (244)..(244): n is a, c, g, or t
  misc_feature (255)..(255): n is a, c, g, or t
  misc_feature (269)..(269): n is a, c, g, or t
  misc_feature (274)..(274): n is a, c, g, or t
  misc_feature (301)..(301): n is a, c, g, or t
  misc_feature (304)..(304): n is a, c, g, or t
  misc_feature (329)..(329): n is a, c, g, or t
  misc_feature (336)..(336): n is a, c, g, or t
  misc_feature (340)..(340): n is a, c, g, or t
gaaggttctaacgtttttattgattagatttgtgtacagtggtaatccttccatcatacaggtaatatataataacattcaaaaatctgacattaaaataacttattgactaatgctaatattaacacacaatagttctatctctattaataataaaaaccaaaccactgagtttancntaggaaacttaaanttcagggcanttantttnccaatttggaangtctgagtaatccaacttnangatgacttttncatggttgaagttngcttngtcgatggtgtgatttagggacttccnctngtttcaagccattcctgcatatgangcacctngganattggggacct

SEQ ID NO: 1230 - DNA, 462 bp, Homo sapiens
  I.1230 (N72174)
  misc_feature (332)..(332): n is a, c, g, or t
  misc_feature (382)..(382): n is a, c, g, or t
  misc_feature (456)..(456): n is a, c, g, or t
acaaattatatacatttatttttaataattttaaataacactcttgtataaattctttcatatattcaaatcatacacaaatttagaaatgcatgatgaagcctagtacagcatatgtatgagacacattttttaagtttgtgttagaattttagtcgacataaatacaagtttaatgtttcagaaacattccctaattgctcggcctataatttaatgtattatagagtgcttatgcctagcattacaacttgactttaaatcatttagcttttgggactaacttagatctgaagccctgggcttactttctagggctgctggctggcccnaacaaggtaacaattccctaccccacatagccccaaatatagggaacccnggggatggttccattataagtgggggggttaaggttcacccaagcatcccaaaaaagtggtagggacccagggnggatgg

SEQ ID NO: 1231 - DNA, 435 bp, Homo sapiens
  I.1231 (N71446)
  misc_feature (388)..(388): n is a, c, g, or t
taaaatatactggtttctctattccaaattaagcacttacttaagacattaagaggctgagaagcactccatttggtgtcaatatcaatagccctataagaaagaactctgtattggaatagctagaaaagttctcactaaagtgagaactttagtgcatccttcacctgcatagaatcagtttggctaatagctctttgccccagaacaccagtctggagttcaaataggctcctgaaagttcatctcagataagaaaaaaacatctcacagaagcaatgtaaggacacacaggataataaaatggttaaaatctgttttgatgagtccttacttacagcattcctcatttgggagggagctggctatagggttaaggtggggaacnaaaattgggaaagtttcagggggcaataaagttgaggttgggccagg

SEQ ID NO: 1232 - DNA, 430 bp, Homo sapiens
  I.1232 (N71365)
  misc_feature (360)..(360): n is a, c, g, or t
aaagatcctaacagaacatagcgtaacaatattggtcttccaggtgttactcatttcaattatgtgtagtataccaggacagacctattttcatgtcttatttctttaaagagctgcttcattggccgggcgccatggctcacgtctgtaatcccagcactttgggaggccgaggcgggtcgggttacttgaggtcaggagttcgagaccagcctggcaaacatggcgaaaccccatcttaactaaaaatacaaaaaaattagccgggtgtggtgtcacgcgcctgtaatcccagctacttggggggctcaggcaggagaattgcctgaacccaggaggcggaggttgcagttgaagctnagattgggccattgcactccagcctgggaaacagagtgaagacgctgtctaaaaaaaaaaaaaaaaaaaa

SEQ ID NO: 1233 - DNA, 438 bp, Homo sapiens
  I.1233 (N70558)
  misc_feature (438)..(438): n is a, c, g, or t
tggtgtgttactttttattactacagaaagtgctgttgcttgaatatgaatatcatttagtgtaataaaatgtagaaggacacattattgtgttccagctctggttcagtctggcagtgccagcataaaccgtcaaaacttgataaaagactgtcttggggttatcttgctgtcatgattccgatgtgttttgatttccttctggagtcataaattgcacctttggtaccatgagggaagaattgttccttcggatagaattgttcctcctcatggaattgtttcttctcatggagttgcgcttcctcagagaattttgatgagacagttcactcttttggagggtctgaataaggatggaaggtttctcatccagctctcgggcactgcaccgtggagcagctactttaacagtgttgccaaatttggagtaatccn

SEQ ID NO: 1234 - DNA, 440 bp, Homo sapiens
  I.1234 (N70546)
  misc_feature (146)..(146): n is a, c, g, or t
  misc_feature (262)..(262): n is a, c, g, or t
tacatcaacaacaaaaaggcattttattttattatttttattttttttgagacggtgtttcatttttgtctcgggtctttttgtcttatccggtgcaggggaaacactggttttaggaaacatctcagattgctgttgcctggtgncggccccttggacccccacattctgctgtggtctgtgggacttcaggttacttggggctaaagtgctagagtctatccctgaagtcagaggggccttgctggcccacggagcgtcntgcttccccttcgcagatggcagggatttggactgcgccgggaaagcagacttgggcttcgggtttacagaaactagagaggggaggcacatcttttcccagcaacgctgcgggggcatccggtacgtcgacttctaagcaaggacttgtttcgacagtttttatgaacgtcaggatt

SEQ ID NO: 1235 - DNA, 466 bp, Homo sapiens
  I.1235 (N69510)
acatcagaacacatctcctaattttattttaagattttataggaaaaaatacaaatacaaagttaacaaacattgtatagttcaatcccctcatgcaagaaggcgtttttaagcactgggccacatagacaactgggatttcctgatattagggaaataaattattaacaatttacattattagagcattagtattgacactaaacatttatgaaatgctaccatgcgctaagcacttcaggtactgtatctcttttaattcttgtaactattgagatggctaagtggtgtcatttccattttacagagaagggctctgtcacaccatgcagcccactaccagcggactccgtagtttctatattgtctccttccctctatgtgctctcccaattgggaaccagaaggtagggtataaaataggaggtgatgcgtttacttttcagtgtccaggcatatcaaggtt

SEQ ID NO: 1236 - DNA, 406 bp, Homo sapiens
  I.1236 (N69363)
  misc_feature (295)..(295): n is a, c, g, or t
  misc_feature (339)..(339): n is a, c, g, or t
  misc_feature (398)..(398): n is a, c, g, or t
agaaacaactagtgtattgatttggggaggagagaaggggtgcagatgggaaatggggaggcaagggctctttagcgtttgccaaaaccactgccacacccctccaccccctcttgccttcctcctccacggtgggtgccagcaggtctcccctttccagtgacctccctctccctcctcccagcaccccacttggcttcaacctccagtgactgcacagagcccacccagggtctaaagctagggaaggcagctcaaactcacctttcttctcccttcttccacctcccacctnattcccatctcttgtctaaataaaatacagaaaagcaagcgcantggttacctgggagaatggactcaccccggggctgggggcaggggtggggactgggggnggggcagg

SEQ ID NO: 1237 - DNA, 443 bp, Homo sapiens
  I.1237 (N69124)
  misc_feature (410)..(410): n is a, c, g, or t
  misc_feature (442)..(442): n is a, c, g, or t
ttaaaaggaacattatgtaaagaggaacaaagataaggatgacagatttttcatcacaaaacaatgcaagtaaatagcagaggtacatctttaaagcactgaaagaaactgtaaagccaaaaatgtatacactcagcaaaaactactttcaaaaatgaaggcaaaatactttttcaggcatatatacaaacactgaaagagtttatcaccagcagaaaaagtccttcaggcaaaaggaaagtgacatcaaatagaaatacagacctactagaagaacgcagggcaagatgccactgggtccagacaatagagaagggtgggagcgaggggcagtctcccaacgaggtggcagctactcagctacagctctctgctaatgcgggctgctgttaccagatcttccaaaaacnaagcacgactttgacacgtttatatggaattnt

SEQ ID NO: 1238 - DNA, 249 bp, Homo sapiens
  I.1238 (N68610)
  misc_feature (234)..(234): n is a, c, g, or t
  misc_feature (241)..(241): n is a, c, g, or t
agaagattaatttgtaatcattgtaccctgtagattttgaaacaattttactagaaattactaatgctggttcttgagtaacctaaaaaattgtatttactcaaatttagaatgctatttatagttctaagcagttagatcgaaatattctgattattctaaagttgctttggtacaaaatttagaataaagcaaaactggcagcacccacaaccaaatgtggatcccttcccnggcaggncctaaaga

SEQ ID NO: 1239 - DNA, 396 bp, Homo sapiens
  I.1239 (N68557)
gcatagagacagggttttgctatgttggccagactgtcctcaaactcctgggctcaagcgatcttcccaaatcgctgagatgatatgcatgagccactgcacctggccaagatccaggtttgcaaggtggcaggtgtggctatgatacagagacttgatataccagggtcccaggagtcagtgatatctcctgatgacaggaaaaaataaagaagtggggtttttggaatcaagacactagggctgaaccattgtcagccttattattagattattgtttccaggttagggctacaaaatgatgtgaagtcagtaacacatgtatcacagagccggaatgggagagaggaggggcagggatgtgctgggcagtactcaccgtcactgctgcaccca

SEQ ID NO: 1240 - DNA, 487 bp, Homo sapiens
  I.1240 (N68481)
  misc_feature (428)..(428): n is a, c, g, or t
  misc_feature (486)..(486): n is a, c, g, or t
agcaactgaagacagttgatgatgtccttattcattgccaggttatatatgatgctctgcaaaacctggataagaagattgatgtgattcgtagaaaggtttcaaaaatccaacgtttccatgcgagatccctgtggacaaatcataagcgatatggatataaaaagcattcttaccggcttgttaaaaagcttaaactccagaaaatgaagaaaaatgaggtttacgagacattctcctaccctgaaagttacagccccactttaccagtgtcaaggcgtgagaataattcccccgagcaaccttccaaggccatccttttgcatggaagaataccagcgagctgagctggaggaggacccgattcctcagcccgcactccgagtcccagtgcatccctcagatttctctgaggcataattgtcagncgtattatgcatctggatgggtgcaacgtatggttccttcctcaggggctctgctttng

SEQ ID NO: 1241 - DNA, 421 bp, Homo sapiens
  I.1241 (N68423)
gaagcaacatagtcttcattaataataaaattgctggacagaatgatttttaaaagacagcctatcagttttaatgaagtatctagtttttaaaatgggtgcgttagtagagcttttatatatttttcccttcctccttccttcctttctttctgaaaagttactagaaaagaaataatagtgaacaaaactgatctagaagaaaagatggaaggcacataaaacactaggaatgaaataaggcataattataactatgcaggagctcgtgtatcacaagaacaggtgcagctttagtgcactaagtttgaaaagctgaatgaagcttactatagtaaaataccagttattaaaattggcttgcagaaattcgtccaatataagtaaacaaccaatagcaaccaggtgtaaatagttttat

SEQ ID NO: 1242 - DNA, 436 bp, Homo sapiens
  I.1242 (N68390)
  misc_feature (394)..(394): n is a, c, g, or t
  misc_feature (402)..(402): n is a, c, g, or t
  misc_feature (433)..(433): n is a, c, g, or t
taaggatttgtttaatgttttaaaattcaaagcactttaaattattttaagacaaaagattaataaaaacaacattaccacattacctttcaaatacaactttataacagcacagtggaagagtggtaaacagtccctcttcttttttaaaaaaaatcagtacttaaaaccaaaggaaggcttatatgtacagctaattcagaaagggaacaatgacacctaaagacatagataaatgcttcattttaatccaataaatgtcctacctactgggtcttaataatgatgttttcaatatgccattttaaaataaactatccttgaaaataaagttttaaatcatttcaatataatcccatggaaatagcatctagttaactaggattacccttanatataccngatattataatccggccaaattaaaaacccnggt

SEQ ID NO: 1243 - DNA, 454 bp, Homo sapiens
  I.1243 (N68173)
  misc_feature (127)..(127): n is a, c, g, or t
  misc_feature (162)..(162): n is a, c, g, or t
ttaatgtcgaaaatgcaaacttggggagggcagaaagatcacacacaaggctgtcacttcatacttgcaggattgcacagcagccgggcagaggcgctcctcacttcccagatggggcggcgggcancagagacgcacctcacttcctagacagtgcggcancatggcacaggcacacctcacttcccagacagttgggcggccaggcaagcgctcctcacttcccagatggggcggctcccgggaagcggggctcctcacttcccagacagggtggccaggcagaggtgctcctcacttcccagaacaattctttatgaatttgataaaggactgaagtgcaactgaaagctgctagtgatgatctggtaatatacaatttgtccagtagccagtttgtttttattgtgttttctaaccataagagatcattaaaggcaaagctgttatgacg

SEQ ID NO: 1244 - DNA, 249 bp, Homo sapiens
  I.1244 (N67859)
  misc_feature (229)..(229): n is a, c, g, or t
  misc_feature (243)..(243): n is a, c, g, or t
ctgttttaaagaaggcgaactggggaagaagagagctccctgcttctagtgagcaaaggcagcccctgagcttccacagccctccacatttattgggtaggatgaaagggaggaggaggtaacgactggtcagctgcttaattgatcacaagttcacattattgttaacaggcttcaattatgcctaatcacaagaaacacttgtgcctgggtcgtgactgccttcagnattccttctgggtnggaaaa

SEQ ID NO: 1245 - DNA, 500 bp, Homo sapiens
  I.1245 (N64649)
  misc_feature (370)..(370): n is a, c, g, or t
  misc_feature (412)..(412): n is a, c, g, or t
tgggaaagcctctctgccagctgaagctgccgcagcagacgctcatgagaagccctttcctaaggtggctccaggagccctaaccgggctgctgggcagtgcagcattttacttttttgctttttgtttaaaaaagggagatgagtaagcccccgaggacccagcggctgcaacttaaccagcctccagttcaccccagccccagccaggaagagaagcccctctcctgtgcagacaggcaggactactgggtgggcgtgggtgagcaggagctagagggggatccaggcacaagccaaggggctgttttgccagaatgacccctgaaggccatcatccccagaacatgtgacctcgggacgcccaggtntgtctgcatgtgtgagcatgttacatgagtgggtgtgtctangtgcgtgcgccttgtgcctctgacagttcctaccagagcagaacgctgcccagctcggcctgggctgggctggcctgccttggccccg

SEQ ID NO: 1246 - DNA, 450 bp, Homo sapiens
  I.1246 (N64446)
  misc_feature (166)..(166): n is a, c, g, or t
  misc_feature (258)..(258): n is a, c, g, or t
  misc_feature (332)..(332): n is a, c, g, or t
gagactgcatagggctcggcgtggttcttgtccataagcagctgcacgtgctgctgtagctcctgcacctgctgctcccgcagctcgctgtgtgcgccaggctctcccgctcctgctccagggcctccacccgccggcccagctccgcgatctgccgcactttgtnccgcaccagctccagccggtccttgtcctcagccgccgccagtatgcgctggacgccgcttctcctgctgggcggcctccagtgccttgtgnaggatcttcactaagctccttctgaagactttaactccttggtgagcatcagaacctgttgctccaaggctgcnactttctcctggggcaagttcggttccgtgtgaattccttcagaaaagaatggggaaggtgttgttctggcgcttggctttctgaagcgaaactgatggtcagagaaaggctggggtg

SEQ ID NO: 1247 - DNA, 430 bp, Homo sapiens
  I.1247 (N64374)
cagttcattgcaatttatttaatttaaaaataaaaacagaaacaaaaaccaaaatgaaacaaaaatcagtttccaacgaaaatacaaacactttgggtggttatccagcttgtttttcccctgtaggctgttctgggctcaaaccaatcaaatgagtgaaaaccaattttgacaggagccataaagcatgttgcaccaattaaattacaccaatatattattataatacctttgaaatgcctttcagaccaataaataaaaaagacaaattcaaataaaaaagtcaactttttattaccaaaaaaaatagaaattaaataaaagtcacaatgtggatttttttttttttttaatgtgcagtcaagtttctctctttttttcttctaggaatgataccatgccagtaaatccctacagaacatttccagtt

SEQ ID NO: 1248 - DNA, 469 bp, Homo sapiens
  I.1248 (N63024)
  misc_feature (62)..(62): n is a, c, g, or t
  misc_feature (224)..(224): n is a, c, g, or t
  misc_feature (226)..(226): n is a, c, g, or t
  misc_feature (254)..(254): n is a, c, g, or t
  misc_feature (438)..(438): n is a, c, g, or t
  misc_feature (464)..(464): n is a, c, g, or t
gggatgggaaaactttattaggtttggtttccagcttcggccacgcgggctccccacacagnagctcgggtcacggggcgcccccgccgccctcctcgtcgtcctccacgtcgaggcccgggatgccgcggatctggcgttgcagcgccctcccagcaagggcacggcgccctcctcctcctcctctgggggcggcggcggtggcggcgacacggccccggggntnggctctgggggcacgggaggctgcgcgncacgccctctgcgccctccgagatccctgccgcttcgccctgcgccccctcgtccagggcaccgccttcaagcctcctcctagctccttctcctcctcggggcttgtccggtgaaaagggttctcgccctttcaagtaagcgctccaagtttctttgctgaagaagttgttgtttgaaaaaaantggggggcaacaattaagggaagaanttctt

SEQ ID NO: 1249 - DNA, 483 bp, Homo sapiens
  I.1249 (N62801)
  misc_feature (435)..(435): n is a, c, g, or t
  misc_feature (443)..(443): n is a, c, g, or t
aatgtatgatggtctttatttacaactttattggcaaaaaagaaaagggaaacttttaaacaatttaacacagggcattgtagctgatcctgtcagataaaagaagttccattttaaatgtccatctaattgtccaaagatacacaatactgaatctgcatacgcatttcctttatgaagtacagtgctcatgttttaggcagtcttctaaacatacaaatacagaggaattaaatcactcattaaaaactgtgtcaaatgaagggtattttaaatataagtttgttgtttctgggtaatagcacatgcccaaatgaaaaccaaaagatggaaaggcagatacacttcttacttgggtggacagttacaacatcaatcattttctggcaatggaccattatattttccattttaatccatggaactacctcccgnaccttacncatgagatggtaagcccaaagtcccgaagaggaagatggt

SEQ ID NO: 1250 - DNA, 372 bp, Homo sapiens
  I.1250 (N62695)
  misc_feature (176)..(176): n is a, c, g, or t
aagcagtaactttcggagagtctttagagtgaccttagatctttgcttgatttgtatgccatactggatatatcctgcggctttttaagcaagaattgaaacattaaaaaatattttttgagtttatgctttgaacgatagtcaatgaaatgttgaaaataaatttttgtaaatantacgggttatcagaatatttcattttactctgctaatgaacagtttaccttttttaagcaaatcatgaaggacaggtggatcaatgcagggcatgaagaagatgaactcaaaccatttgttgaaccagagctagacatctcagaccaaaaaaggattaggtaatccctccatggcctgcatgttccatgtggtttt

SEQ ID NO: 1251 - DNA, 452 bp, Homo sapiens
  I.1251 (N62291)
  misc_feature (450)..(450): n is a, c, g, or t
atggccaaaaatactgtatttttaaccagcaagatcattggggcattattatacaacattaggtgttttttgcaaaactagttcccatccccaaacaatagacagtacatgcatttgaatgacattttaggaacagtaaatattcttttaaatactgcaagttaaaaatgttttctgacaaaactccctaaatacataggtctagtaagggtttccaacaggatgatgggtgaggaatccagcaaggagttgcatttagagagttctttgaggaaaagaaatccaccaaaaacgtgtttcagtcaaagtaaccttggacaaagttacgtagtattattccagctttctttcctgaacttaaaaatgttctaccaacgaatacctttctgttttttctggtctaccaaaaagcttatataaaagtcagaatttctttatccaagatctggntt

SEQ ID NO: 1252 - DNA, 346 bp, Homo sapiens
  I.1252 (N59299)
  misc_feature (1)..(1): n is a, c, g, or t
  misc_feature (338)..(338): n is a, c, g, or t
nttttttttaaaaatggcaaaacatttattgagtcatctacagcagtctgacatccttaaaatcctggacaagatagtgagcacagcattaatggcagcagcagtagcagtaaggtctgtggggcttacttagctttactgtgggagatgaaacccaggctggtccagctcccacaagtgaggcaggaaccatgtctgagatgccaggggtgcaccactccagccctgatagaggcaaagctacagaagacagacatcagacaagacacacatagccaagtgcagaaacaccccaagactgtgagttcaggaaaagaaggaatgggcacaccaaaatntcccagat

SEQ ID NO: 1253 - DNA, 556 bp, Homo sapiens
  I.1253 (N57180)
  misc_feature (46)..(46): n is a, c, g, or t
  misc_feature (176)..(176): n is a, c, g, or t
  misc_feature (191)..(191): n is a, c, g, or t
  misc_feature (195)..(195): n is a, c, g, or t
  misc_feature (347)..(347): n is a, c, g, or t
  misc_feature (430)..(430): n is a, c, g, or t
  misc_feature (478)..(478): n is a, c, g, or t
  misc_feature (491)..(491): n is a, c, g, or t
  misc_feature (497)..(497): n is a, c, g, or t
  misc_feature (513)..(513): n is a, c, g, or t
  misc_feature (522)..(522): n is a, c, g, or t
  misc_feature (529)..(529): n is a, c, g, or t
  misc_feature (549)..(549): n is a, c, g, or t
cacttgtgtctggccaagttagatccacagacactggacacagagnagcagtgggacacaccatgtcccagagagaatgctgaggctgcctttgtcatctgtgggaccctctatgtcgtctataacacccgtcctgccagtcgggcccgcatccagtgctcctttgatgccagcgnccctgacccctgaangggnaggcactcccttattttccccgcagatatggtgcccatgccagcctccgctataacccccgagaacgccagctctatgcctgggatgatggctaccagattgtctataagctggagatgaggaagaaagaggaggaggtttgaggagctagncttgttttttgcatctttctcactccccatacatttatattatatccccactaaatttcttggttcctcattcttcaaatgtnggggcagttgtggtcaaatcctccaaaatttttagccaatgggaatcnaaattttttaagntccttngtttaattcggaattnagattctgnggtaaanccttttagaggcccgaagangttaaaa

SEQ ID NO: 1254 - DNA, 213 bp, Homo sapiens
  I.1254 (N57052)
  misc_feature (28)..(28): n is a, c, g, or t
  misc_feature (31)..(31): n is a, c, g, or t
  misc_feature (54)..(54): n is a, c, g, or t
gagcaagtggacgagcaagcggggcccngcnacttcaggggccgcaagggcggnggcgccaagggatcggcttcctcacctcgggctggaggttcgtgcagatcaaggagatggtcccggagttcgtcgtcccggatctgaccggcttcaagctcaagccctacgtgagctacctcgcccctgagagcgaggagacgcccctgacggccgcgc

SEQ ID NO: 1255 - DNA, 482 bp, Homo sapiens
  I.1255 (N57005)
  misc_feature (396)..(396): n is a, c, g, or t
gttttaatgtttattcggtagaaacagatcttcaatgcatactttgtgtttatataaactctacattctcttaaaggttttcgttttgttttcactggagatttttagcctccaagtgaacttaacatattgcctatgcatctgattctttatagacttttagattttaaaactaaatttgagaaaccatgcatactgtataccttatttaataatccaaagaattgtttgcactttcaaaaaagttacaaaaaggctgaacacaagttaaataacctatatgatgtaaattttccatttctgaatactttttcagtattatatattgcttgctgtctaataagttagattgtcagagacgcttcagtaaattatctctactttaaaattatatcnggaatcccctttctctggagatgaacctggccaatattaaacattggtggccatatggcagtattagccccaaagcctaaataaga

SEQ ID NO: 1256 - DNA, 234 bp, Homo sapiens
  I.1256 (N55419)
  misc_feature (17)..(17): n is a, c, g, or t
  misc_feature (24)..(24): n is a, c, g, or t
  misc_feature (25)..(25): n is a, c, g, or t
  misc_feature (26)..(26): n is a, c, g, or t
  misc_feature (28)..(28): n is a, c, g, or t
  misc_feature (49)..(49): n is a, c, g, or t
  misc_feature (50)..(50): n is a, c, g, or t
  misc_feature (54)..(54): n is a, c, g, or t
  misc_feature (55)..(55): n is a, c, g, or t
  misc_feature (73)..(73): n is a, c, g, or t
  misc_feature (74)..(74): n is a, c, g, or t
  misc_feature (75)..(75): n is a, c, g, or t
ccctatagtgagtcgtntagagannnantccctatagtgagtcgtatgnnaaanngactaatattgtcatatnnngcaatgataagtaaaacttcaatggattaagaaacaagcatggcatatttgattcagatcagttttttgacaatatttgtatgactttccaaattgatgtgactgtaaactttgaattcctcaaaattgacagaatatatatatatatatatatatata

SEQ ID NO: 1257 - DNA, 433 bp, Homo sapiens
  I.1257 (N55269)
  misc_feature (150)..(150): n is a, c, g, or t
  misc_feature (428)..(428): n is a, c, g, or t
gcttgtctgaaactttttccttttaatatggtttacattctatctccagagaaaacacacttaacagaagacagaaaacatttaacaaatccaaagcaattaaaaatagccacaaaaaaagagaataacctagactgacagctcacaganaaggaggtggcagagacctgcccaggtgagcttggctgttgccccagctcaatcttcctcctctcctctctctgtcccttcacctctgatcagtcccagcctgattcccgttccctgatgcctcaccttcttgctgccagatgcctctaggaactaagggtccttcagactccagatgccctggcctgggcttaaggacatcttggacttccccagtggacagctggacagtgccctgctctcacccacagctgggaccctggaccatgccatgaggnccctg

SEQ ID NO: 1258 - DNA, 143 bp, Homo sapiens
  I.1258 (N55143)
  misc_feature (5)..(5): n is a, c, g, or t
  misc_feature (21)..(21): n is a, c, g, or t
taganacatgggcatttgtcnaaatcctaattacaaataagtaacctagaattctcttcagatagtgcactaacagaatgaatctattctaaatttcaaatatccaaattaaaatgactgtattagcataagtactgggaatg

SEQ ID NO: 1259 - DNA, 171 bp, Homo sapiens
  I.1259 (N54776)
  misc_feature (40)..(40): n is a, c, g, or t
gacatacggactggcctctctactgtactgggtgccatcncccaccatactctggcatttttatataaaggataatttcttgtacctgagtctaaaattacaacgttatcaaaattcacttcgtttttcctgcattttaaaagtaataaaatattatttgagattattttg

SEQ ID NO: 1260 - DNA, 443 bp, Homo sapiens
  I.1260 (N54351)
  misc_feature (149)..(149): n is a, c, g, or t
  misc_feature (385)..(385): n is a, c, g, or t
  misc_feature (390)..(390): n is a, c, g, or t
  misc_feature (419)..(419): n is a, c, g, or t
  misc_feature (436)..(436): n is a, c, g, or t
aacttgaacagggaaagtttaatatagagaattactggctttaacagtgaactggaataatgagggcttcactggtaaaatgcttctgaattgactggaaatccatttggggtgctggggaacgttattcccagagaggtgcctcagtnggaggcgctgtgtctcctacgcaacttctgagggctggagggtgccaagggagctgctgaccgcctggtgcttcaggagctgggtgctggggaagccacatgcactgcggcgtccagaggcagaagcacaaccaacaagaaccaccgaaggaggcgcctttcctcctataatgcctgtttggtggcctctactgacaaagcttatccccttttcaaaaaacagccaacttgaaaanagctngattttggaacattaagtccataaatccntaaccaggaatactatnggggctg

SEQ ID NO: 1261 - DNA, 484 bp, Homo sapiens
  I.1261 (N53704)
  misc_feature (19)..(19): n is a, c, g, or t
  misc_feature (319)..(319): n is a, c, g, or t
  misc_feature (409)..(409): n is a, c, g, or t
  misc_feature (459)..(459): n is a, c, g, or t
tgttctccaatatgagtangatgtgacttccatgtagatataaaaatgattgtgccctaaccaaacttcctcagattgtgcactgtttgtttaaaataatcacgtattttagtctgatgctgttgtattttttcattttatttaaaacactacttacttcttattctcttaacaaattttaaaaggtagtgatcttaaaaaaaaatcactggataactaggaaatatttttgttgttgttttgtttcttaaagagtacagaggccattgaagccttttgctcctcttaccgtgaaaatgaaatgttagccattgtatgntaggaaccaatgcacttggcagttaatggatctgctgttgctggagtgtgagcgtggacttgatgcagtgatgacaaatcattgcttagnattaatgttttcaaatgtgcaactctagtttttaaaacaaaatttgggtncttaccattcattaatttcgttttt

SEQ ID NO: 1262 - DNA, 211 bp, Homo sapiens
  I.1262 (N52755)
  misc_feature (21)..(21): n is a, c, g, or t
  misc_feature (22)..(22): n is a, c, g, or t
  misc_feature (23)..(23): n is a, c, g, or t
  misc_feature (26)..(26): n is a, c, g, or t
  misc_feature (48)..(48): n is a, c, g, or t
  misc_feature (51)..(51): n is a, c, g, or t
cctgatagtgagtcgtatgtnnngangtggcatgtcttctgatgaaanacnaagcattcttgcagtttaccactggttgttcaactctacccccaggtggactggctaacctgcatcccaggctcacggttgtacgcaaggttgatgctactgatgcaagctatccatcagtcaatacatgtgtgcattaccttaagttgcctgaatatta

SEQ ID NO: 1263 - DNA, 299 bp, Homo sapiens
  I.1263 (N52679)
  misc_feature (18)..(18): n is a, c, g, or t
  misc_feature (20)..(20): n is a, c, g, or t
  misc_feature (21)..(21): n is a, c, g, or t
  misc_feature (22)..(22): n is a, c, g, or t
  misc_feature (265)..(265): n is a, c, g, or t
  misc_feature (286)..(286): n is a, c, g, or t
  misc_feature (295)..(295): n is a, c, g, or t
tgataagcctagaagtanannngtttaagctatattgaacaaaaatgtttaaactgcataaaagtgcttgaatttatagtgtccatccaaacattgagaaatatgagccatacacatgtgtatgggggtcatgggctgttccttgtttatttttaccccgttcagacaaaaaaggtatttgacaattttgcccaagtggtttcttgccctctctagtgtttcttttgaaggacatcaggagataaacgtatttgttactggctcntcattagtgccagttaatgcnggcccacantttg

SEQ ID NO: 1264 - DNA, 495 bp, Homo sapiens
  I.1264 (N51919)
  misc_feature (495)..(495): n is a, c, g, or t
taacttaagaaatcatttttatttttatagtacaaagcaaatgaatgtataggcacatttatttcaatcaagtcataatctgaacctaaaatgcaaagcaaaacattaacgtgcatttaatacgtatttcaagtctttgtaacagagaataaaaatcattacaaaattaaggtatgagacatcaagtcactaatgatagagttgattagacaatggcttccatgttccatctaacgacatggaacaatgtacatttgacaattcagccttaaagggttaagtagaataaactgcagccagctccttacactcaactgcctcagtaacaatgactcaaagaatagatattttccctatcaatgacaatatttcagtgctaacacttgcagtttaatattggataaaagctaaggagtggttcatcctggacagattataaaagataaaacttattgggcttcaagaagggattaaacctgttagaattgggaccan

SEQ ID NO: 1265 - DNA, 463 bp, Homo sapiens
  I.1265 (N50785)
  misc_feature (463)..(463): n is a, c, g, or t
ttttttttttactttcaaaggtgcagacattaatttattaaacactagtcttttctattttaattttcaataacaaacatttttgccttttacaatctcttcacatttgccatttatcacagatctttacgtggtttaaaagcacatcacaaacattcgggagatcatgcatcttcattaactctgaccaggtgtttgctattgcctaccccactcttctcaatgatgtctttgaaagagacagtcctacattgggtattaaaaaggtcaatctttctaaataatcagagcaaaatctctttagccctttaaggttatctgggtttgcaaacagaagaataccacaaatccatttccacttcacagggatctgagtatgcatgcaaatgcacacacacaaagaatgctgtaggactcgagtgtcaaccgcatcttagactccaaatattaccctgactgggcn

SEQ ID NO: 1266 - DNA, 438 bp, Homo sapiens
  I.1266 (N50261)
  misc_feature (36)..(36): n is a, c, g, or t
  misc_feature (38)..(38): n is a, c, g, or t
  misc_feature (387)..(387): n is a, c, g, or t
gtgggttttatctagtcttagtggcagcattttcgngnactttgggaatatgttctgaaacctgaattgaagtctgtggaaaatatgattcaatatccaaatctgaactttattcatggcctttcagggaagtacatacaattaaagaaaggctaagtaaaatgagttacatcatggtcgtaactaccacttgtagaacactttcaatgagtcaggcattttatatgctttatttctcatcttaatcttatatagcagacttgaaaatgtgaataacagaggcaaggaaagttgaagtaacttacccttcatcacctaagctaatatgtaccagagccaggattcaaatccagcgctgtctggctccaaagccagggcttattagcnataaagaaatcacactcctgggtcccctcagttcccatcctgatgtgctcc

SEQ ID NO: 1267 - DNA, 201 bp, Homo sapiens
  I.1267 (N50002)
  misc_feature (57)..(57): n is a, c, g, or t
  misc_feature (58)..(58): n is a, c, g, or t
  misc_feature (59)..(59): n is a, c, g, or t
  misc_feature (60)..(60): n is a, c, g, or t
gatgaaataggtattgtgtaaatctataaatatttgaatccaaaccaaatataattnnnnaacttacattaacaaacatttgggcaaaaatcatattggtaatgagtgtttaaaattaaagcacacattatctctgagactcttccaacaaagagaaactagaatgaagtctgaaaaacagaatcaagtaagacagcatgt

SEQ ID NO: 1268 - DNA, 581 bp, Homo sapiens
  I.1268 (N49976)
  misc_feature (97)..(97): n is a, c, g, or t
  misc_feature (318)..(318): n is a, c, g, or t
  misc_feature (485)..(485): n is a, c, g, or t
  misc_feature (517)..(517): n is a, c, g, or t
  misc_feature (563)..(563): n is a, c, g, or t
acgctgcaaacattttaatgattattgttgagcatacattttggaaattttttacttcaaacggcaacaagttaaataaatgtttataatataaaanaaaaatacaaccgaaagtaaaactcgctgtaagtgtgccttgcctttagaccaggttttccccccttaatacatctttatttttgagctgcaaacacacttaagactttgatcttcatagtatggcatttaggaaataaaaatatactcccaccttaaagaaataaaaagtttggtgcatgattatatgccaaacaaagagagaacactagaatactcttngataagtgcaggcatcattaaaaaggaaaagaaaaagcttgagatgctcattaattctctatgttttaaggaagcaggatttttgaccaagtagcttaaaagccagcaaaacagggatcagtgacagcaactggtagtgtatggagtatgaaatgacaaactttacncaaatacactgttagaaatttaccagtgaacnctgaagatctgagaagctgctccttgggaacagtccagtggggacnccctattccagtcacatt

SEQ ID NO: 1269 - DNA, 475 bp, Homo sapiens
  I.1269 (N49899)
ttccaacaacatttggtttataaaggaatacaaacaggcacaaaacatggttcagaagatttattaagtaaacttgctaaaatatggacagatacacttagcagtcaaacagttgaatattaattgctacctcattaaagtttttgtatctgtattaccaggtccaaacataaaaaccacctctgttcaaaaaataaatgttcagagagctgtatgttctttgttcttgtatgtacattttaaaaaaacacctctttccagtcttgctaaccaagaatattagtcatataaaagaacttagaatttttttccccaagtacaagctatcttttggctccaaaacagttctgaaggttttatttatattttatcttatcccgagggaccaacagcagggcatacctttggccaggccttcttggcagaaagacacagagccgtaaagggaaaaaataaaattgccataaaggtatag

SEQ ID NO: 1270 - DNA, 596 bp, Homo sapiens
  I.1270 (N49751)
  misc_feature (311)..(311): n is a, c, g, or t
  misc_feature (561)..(561): n is a, c, g, or t
  misc_feature (568)..(568): n is a, c, g, or t
  misc_feature (585)..(585): n is a, c, g, or t
ccagttctttccggtcataatttaaccttctcaggcacataattccacactcggaaactgtttctgtgaaaactgtcgaccattttcagctgccctcgaaggtctttcttggtcaagtggtccagcatcctggcgtctacaaggcactccatgaagtagctgcggtactgggggaggcccaggctggggagccactcgttgccgatccactcgtggttcatgtccccataggcgagtgtcgttctagatgtgggcggggcagacgggctggtcagcgacatgatctcctggatggccagcctcagcttcancctgtgcagggggttgctgatgccaatctcacgctggatctctgtgtcggacagggccgacatgatgggcccgcttttcacgtttgctcggcaggcagccacataccaggctggcatcccaacccagagctctagccagaccacaaccgttggcccgtcccattgggcaaaaggtaaccttgtctccggggcttcctccagcaattcatgtttttttgaagtttacgaatttttttaagcctgtcccccnaatttgncaagtccaaggaatctnagatgagttat

SEQ ID NO: 1271 - DNA, 452 bp, Homo sapiens
  I.1271 (N49208)
  misc_feature (4)..(4): n is a, c, g, or t
  misc_feature (10)..(10): n is a, c, g, or t
  misc_feature (11)..(11): n is a, c, g, or t
  misc_feature (13)..(13): n is a, c, g, or t
  misc_feature (15)..(15): n is a, c, g, or t
  misc_feature (38)..(38): n is a, c, g, or t
gcgnccgcgnngngngcaaggtgctgagcgcccctagngcctcccttgccgcctccctcctctgcccggccgtagcagtgcacatggggtgttggaggtagatgggctcccggccgggaggcggcggtggatgcggcgctgggcagaagcagccgccgattccagctgccccgcgcgccccggccaccttgcgagtccccggttcagccatggggacctctccgagcagcagcaccgccctcgcctcctgcagccgcatcgcccgccgagccacagccacgatgatcgcgggctcccttctcctgcttggattccttagcaccaccacagctcagccagaacagaaggcctcgaatctcattgggcacataccgccatgttgaccgtgccaccggccaggtgcttaacttgtggacaagtgtccagcaggaacctatgtctctgagcattgt

SEQ ID NO: 1272 - DNA, 388 bp, Homo sapiens
  I.1272 (N48913)
  misc_feature (376)..(376): n is a, c, g, or t
tatttttgcataacgatgttgcttttatttttaaaatctgatgaaaaatatacttttaacatcttgacattgagaacattataagtatctgacaggagttcagcctgagctgtgtggtttttaaggctctagcttagaggcgcacttgaatgttgaagcaccgtagtctctgcctcatggctgagtgccggatccccaaggtcgtgaagagcaggaactgattcacttgagtttggggcagaccacagaagaccacacagctcaggtttaaccacagactcatctaaatacacattttaggaactttgaagaacccagtctcctctccacccccctcacttgcctcagactaaaaaaccacatctcaaatcattgnaatgaccaagaa

SEQ ID NO: 1273 - DNA, 366 bp, Homo sapiens
  I.1273 (N48388)
gagctgctccttgtcatttatgagacgtgggatatgaagagtgcaacagtgagccaaacacattttggtatagttatttttttcttcttttgttttctttcttttttaacacttagtaagcatgagaggagaggtagaaaaatacccttttttcaacatatagttgtcagatgctttgtgcatgcaaatcatgctttaggcagtgcggtatttcttaaaaactggccaattcaccataaccaatttctcttatggatggactaggctggtatatacatatttgaaaagttttacttcaaagaattccatcgaatagaataggggtaaaagggaggaggaaaacatgtcacagctgtaccatcccta

SEQ ID NO: 1274 - DNA, 523 bp, Homo sapiens
  I.1274 (N47688)
  misc_feature (141)..(141): n is a, c, g, or t
  misc_feature (523)..(523): n is a, c, g, or t
ctggtataatgtttatttaaatagtaatcttaaaaaggctttatacaaatcatataaacacagtttgacattgttgtttattttttacattgaagaatcacagtaaaagctctcaagttcccgtgatctggctcagccatngaatggtcgaatacctctaactgcaaaccctgaaaaagttaacctgctatgtgacaggttaactctttcccttgttttcttgtcattcatgcttattccttggaccctcatccctgtcaactcccctgccccaccaaagacagaaagcaaccctgtggccctgttgaccacctagtccgggagagtgtggaggtaatgtgtcattcagtacaaggcaaaaaggagatcaatactggcagtggggtttcccaaaggaattgactcaaggagatgggtcagctagcctacccacagataaagataacaaacacaccaaggtgtcccctggccaagtcaaaattgggcccagcgtctttctttctgtcttacgacagagcagccn

SEQ ID NO: 1275 - DNA, 328 bp, Homo sapiens
  I.1275 (N47687)
  misc_feature (6)..(6): n is a, c, g, or t
  misc_feature (15)..(15): n is a, c, g, or t
  misc_feature (21)..(21): n is a, c, g, or t
  misc_feature (83)..(83): n is a, c, g, or t
  misc_feature (87)..(87): n is a, c, g, or t
  misc_feature (151)..(151): n is a, c, g, or t
  misc_feature (235)..(235): n is a, c, g, or t
  misc_feature (303)..(303): n is a, c, g, or t
  misc_feature (317)..(317): n is a, c, g, or t
  misc_feature (323)..(323): n is a, c, g, or t
ggcttngaatgctanatagangcagggtacggagggctacatgtagataccacaccaaggctggaggctgctctgtcgtaagngaanagaaagacgctgggcccaattttgacttggccaggggacaccttggtgtgtttgttatccttancctgtgggtaggctagctgacccatctccttgagtcattccctttgggaaaccccactgccagtattgatctcctttttgcctngtactgaatgacacattaccctccacactctcccggactaggtggtcaacagggcccacaggggttgncttctggtctttgngtgggnggcag

SEQ ID NO: 1276 - DNA, 208 bp, Homo sapiens
  I.1276 (N47382)
  misc_feature (80)..(80): n is a, c, g, or t
  misc_feature (153)..(153): n is a, c, g, or t
  misc_feature (204)..(204): n is a, c, g, or t
atgaaaaataacagattatatatagtttgaactatttttcgtgtgcttttttaaacttgttaaaaagaaatttatataanatttaaaatacaaatgttaaattatccagaaatacagaatagttaatattgctagaaccaaataacctctaanatgtttttattttggtaattttgtcatgctaagcacttttgtatccgcccnattc

SEQ ID NO: 1277 - DNA, 262 bp, Homo sapiens
  I.1277 (N45675)
  misc_feature (26)..(26): n is a, c, g, or t
ttcagaccttgactttgagaaggttngtgcatacaaggaagaggcatatggaactatttcaagaactaaatcagaaatttcaaactttggacagatttcgggatataccaaatacaagcagtatggaaaaccccgcaccaaacaagaatccatgggacactttcaaaaaccccagtgaatacccgcattacaccacaatcaatgtcttagacacagaggcaaaggatgctttggaactgaggccagcagagtgggagaagtg

SEQ ID NO: 1278 - DNA, 621 bp, Homo sapiens
  I.1278 (N45368)
  misc_feature (23)..(23): n is a, c, g, or t
  misc_feature (442)..(442): n is a, c, g, or t
  misc_feature (497)..(497): n is a, c, g, or t
  misc_feature (512)..(512): n is a, c, g, or t
  misc_feature (517)..(517): n is a, c, g, or t
  misc_feature (522)..(522): n is a, c, g, or t
  misc_feature (559)..(559): n is a, c, g, or t
  misc_feature (568)..(568): n is a, c, g, or t
  misc_feature (573)..(573): n is a, c, g, or t
  misc_feature (593)..(593): n is a, c, g, or t
  misc_feature (605)..(605): n is a, c, g, or t
  misc_feature (611)..(611): n is a, c, g, or t
tgtaatcccttaggaaaccttanaactttacttgctttattatcaggtaatttccaggatgtaagccatacagccagaaggcagggtacaaaggagaggaggcagagatggtacactcatacagaagcttctcctgattgtccactgaatagaaggcaagctttccctcctcaaggttcagccagatgcccaccaccccaggtctgtctgagccaaggacagtttccttgaccatgtgccatgcagagagctggctagtccccttccattccacacaacaagagtccatagtccttcccaggacctggtcgcggctcatctcccaggaagccaccccaactgcccagtggctgcaattcctagtgtccacttcccagtaatgctttccagaagacagggcctgggaacataagacctggctgggtagaaaacctctcacagntccagcgatagggttgtgggcggtgagaaacagtcactgtacggggaaccttggngcacctccaggctgncaggnaaggntctttcaagtttaaggtttgaatggatgggccactgngccaaacgngaaantctcctgagttcagggtggntctgggtaggcnatgggnattaggaggg

SEQ ID NO: 1279 - DNA, 610 bp, Homo sapiens
  I.1279 (N45328)
  misc_feature (468)..(468): n is a, c, g, or t
  misc_feature (485)..(485): n is a, c, g, or t
  misc_feature (493)..(493): n is a, c, g, or t
  misc_feature (517)..(517): n is a, c, g, or t
  misc_feature (540)..(540): n is a, c, g, or t
  misc_feature (590)..(590): n is a, c, g, or t
  misc_feature (599)..(599): n is a, c, g, or t
tatatttttttcggtttatttctgattatatttggagaggccaattttacatgatagcttcaaaccaaccattgtacattaaccaaattttacacaagccatttgaaaaaagatctaaaaatgtgcttagttattggtattatataacataacatttatcaagcaccaagagtgtgctgagagctgtacagaacaaacatagaaaagacagtccctgccttcaagaatacccattccttcaggatcttgcacataaaatttcaccttacattccacactcttttattcataaggcataaataaggaagtttgttgcatttctcattgttacttaataaatattgaatacccttttccccaattataccaacaattacttgtatctttgcctttaaatacaaattttcatagtacagtatacagtatatactggatttgggtattcacacaattggaccacaatattcntggcagggtgggttatnatatggangcatggttggaatttcaacattcnccaatttttataccacttaacanatccttttaatggtgggcaggcttcctccggtttttccaattccagaaanaaaaaaccnccaccaagggg

SEQ ID NO: 1280 - DNA, 286 bp, Homo sapiens
  I.1280 (N45240)
  misc_feature (8)..(8): n is a, c, g, or t
  misc_feature (234)..(234): n is a, c, g, or t
  misc_feature (260)..(260): n is a, c, g, or t
  misc_feature (282)..(282): n is a, c, g, or t
acagtgtnctagagggaagtgttccctttaaaaataagaacaactgtcctggctggagaatctcacaagcggaccagagatctttttaaatccctgctactgtcccttctcacaggcattcacagaacccttctgattcgtaagggttacgaaactcatgttcttctccagtcccctgtggtttctgttggagcataaggtttccagtaagcgggagggcagatccaactcagnaccatgcagataaaggagcctctggnaaaatgggtggctcaacagaangcgg

SEQ ID NO: 1281 - DNA, 299 bp, Homo sapiens
  I.1281 (N44799)
gacaagaatgtgtatctgttggatataatcagagaactgaaaagtaatttatcagtaatttttaagagtccatgttttgtgacaaccatctctaatagccaactctttattaaacacactcctaaaaataaggaaccatgacattgtagatatttaatattgtacagtatagaaacctccatttttgccttcgaatgcatatttaagagttaacagaatgaaaaaaaaaagtcttgttggataatagtgtttgactagcgttttaagaacttgagagtaaaagcaacaataagattttt

SEQ ID NO: 1282 - DNA, 505 bp, Homo sapiens
  I.1282 (N44527)
  misc_feature (460)..(460): n is a, c, g, or t
  misc_feature (495)..(495): n is a, c, g, or t
gtccaagttagatctgctgctcttaggtgtggggctgtccacattagggaacttgcctcaaaaacagtccacagtggcaataccggacttctgttcaagctttttaaagtgctgagtcttacaaacccctgaaggaaggtgaccctttaagagaggatcatctttttttatatttattttcaccaaatagggtgatgagggttggtttttgttccctcaacccatttgggtaaaataacggatctgattagaaactgttttaaggaggggctgggctcggtggctcacgcctgtaatcccagactttgagaggccaaggcggtcacgaggtcaggagttcgagaccagcctagccaacatggtgaaacccgtctctacaaaaaatacaaaaattagccgggtgggacacgcctgtaaatcccagctactcaagaggctgaaggcaggagaatagccttgnacccgggaaggcagaggttgcagtgagccgagatntacaccactg

SEQ ID NO: 1283 - DNA, 194 bp, Homo sapiens
  I.1283 (N44584)
  misc_feature (161)..(161): n is a, c, g, or t
  misc_feature (181)..(181): n is a, c, g, or t
acatgagagagaagaagccttcaggtgattctggactccactaacatatgactgataccgcatgatacatcccaagtgagaactgccccataaatccagaaaaccacattgctatcttaagtccctaagtttggggcttatttgttccacagcaacaggtnactggaacagaggggcaagncctgatgaatggg

SEQ ID NO: 1284 - DNA, 302 bp, Homo sapiens
  I.1284 (N42662)
  misc_feature (3)..(3): n is a, c, g, or t
  misc_feature (31)..(31): n is a, c, g, or t
  misc_feature (271)..(271): n is a, c, g, or t
gcngtggtggagacactgaccctgggcagantcttctcagccctcacaggatggacaagagagtgttacagaaagggagagaataggaattcccacggagcctgactctgcagacagccatgcccaccctccagctgttgtcatttacatggtggacccgttcacgtatgctgcagaggaggactccacttctgggaacttttggctgttgagcttgatgcgctgctacacagaaatgctggataatttacctgagcatatgagaaattcnttcattctccaggttactgtttgcaagttta

SEQ ID NO: 1285 - DNA, 358 bp, Homo sapiens
  I.1285 (N42947)
  misc_feature (321)..(321): n is a, c, g, or t
  misc_feature (345)..(345): n is a, c, g, or t
tatattagcatacaaggacaattgtatatatgtaacatttttaaaattttaaaaaaatgcagctgttacacacaagtgtattttgccaaatgcctaaaaattccgtcacaatcacatcatcgtcatccatccagtgatcttcaaagactataagcaggtaatgtaaatatagtggtcaatgctgtaaatgtgtctctccataattcgtatttgtccaaaacatgtgatatccctttaacctgtgcacagtctggaggcagttttattgagtgagtagttgagtgagagaacaaaatgcccagcaaaacttctggcctccanagtttgctgaatgcaggagcccanctcttgctgccga

SEQ ID NO: 1286 - DNA, 509 bp, Homo sapiens
  I.1286 (N42103)
  misc_feature (120)..(120): n is a, c, g, or t
  misc_feature (122)..(122): n is a, c, g, or t
  misc_feature (400)..(400): n is a, c, g, or t
taaagctgttcaggggaccgacttagcttttattgcctttacagaagcgatgacacattttcctgcatctcccttctggtcagtgatgtttttcctcatgctggtcaatctaggccttgnangtatgtttggaaccattgaagggattgtcacgcctattgtggacactttcaaagtgaggaaagaaattcttactgttatctgttgtcttctggcattttgtattggcctgatatttgtgcaacgctctggaaattactttgttacaatgtttgatgattattctgctacactgcctctgctaattgtagtcattttggagaatattgctgtatgctttgtttatggcatagataagtttatggaagacctaaaagatatgctgggctttgctcccagnagatattactactatatgtggaaatatatttctcctctaatgctattatcattgctaatagctagtgttgtgaatatgggattaagccccctggctataacgcatggat

SEQ ID NO: 1287 - DNA, 368 bp, Homo sapiens
  I.1287 (N41920)
  misc_feature (7)..(7): n is a, c, g, or t
gaaatancctgttcgtgacctaggagaaacaagacagaaaacaaatctttcttcatttatgaatttcttactccatacaagcagtttatggatgtctgggcaatcatagcacttgccatttaaaaacatgctacaggggcacattttctgtggttaaaaatgatctccagaataagtgtaaactgcagttttcctttgcattgagggttttggctttttatttgtaaattaaatcaagatgttacccactccttggtgtggtggtcttgctggttcgtgttgggaagtagtatggcagcaatgcacaaattcagaatagcccaagaaatccctccttttcaacgctctgtgcctgggaaccattagag

SEQ ID NO: 1288 - DNA, 563 bp, Homo sapiens
  I.1288 (N41811)
  misc_feature (5)..(5): n is a, c, g, or t
  misc_feature (479)..(479): n is a, c, g, or t
  misc_feature (487)..(487): n is a, c, g, or t
ctcanttataaagctaaaataaccggatatatacatagcatgacatttctttgtgctttggcttacttgtttaaaaaaaaaaaaaaactaatccaacctgttagattttgcaggtgaagtcagcagcttaaaaatgtctttcccagatttcaatgatttttttccccctacctcccaaaatctgagactgttaaaacatttttcttctatgaacactgctcagacctgctagacatgccataggagtggcgtgcacatctctctctcttccagcaggaggagcccgtgagcacgcacagctgccctgtctgctcacccgaagcaccgggctcacctggacctcccaggaaagggagaagagcctcagaaactgctctgtgtttagaaggatatttttaagagtccagctttttcatttccacaatttcctatatccagatttgttttgacaatgtagtttgggaagaactaagattctnatctctgnaagaaccttatagggccttctaaaaccataagaggttcccttttggttgcttcaaaatatttggaacatttatgtt

SEQ ID NO: 1289 - DNA, 397 bp, Homo sapiens
  I.1289 (N41550)
  misc_feature (64)..(64): n is a, c, g, or t
  misc_feature (75)..(75): n is a, c, g, or t
  misc_feature (299)..(299): n is a, c, g, or t
  misc_feature (331)..(331): n is a, c, g, or t
  misc_feature (345)..(345): n is a, c, g, or t
  misc_feature (378)..(378): n is a, c, g, or t
  misc_feature (393)..(393): n is a, c, g, or t
ttgaagcttttgttatgacttagctgacttgtggcagcggggcaagcaaaaacaataacactgnttataaatggnaccacatcttgttaacctcccccccaaatactctctgaaagtcatgcacatacctatgggattttacacaccaccagcttaaaatgctatgtctctatccatcagaaatagtcattattctatttttaaggcagcaaccaagaaaagaaaaaaacacttttcctgagggatttctaaccatgtatctaatcctcccatttgggcagtataggtgtttgcttttntgttttctttttttaagaaaaacccttggaancctttggcactggnagatgtgtttgcaaggattcggctgcagtattnctaatttccatgtgnatct

SEQ ID NO: 1290 - DNA, 273 bp, Homo sapiens
  I.1290 (N41371)
  misc_feature (264)..(264): n is a, c, g, or t
  misc_feature (269)..(269): n is a, c, g, or t
acttcattagcaagtgagtttggtgttttataggtcacatatgtctgtatctacttagccagatgcttggcctggtgggaccagggctccacagaggccacaaaatgttgcaagtcatgatggatggaaatatgttctaacagcatctgcctctattcaatttaattcttatttctgtgttactcatgtacattggtctttctacatagttattctatcactggcaatatttgttctggtttagtgttctgtattttaaggtgnacgtntcat

SEQ ID NO: 1291 - DNA, 344 bp, Homo sapiens
  I.1291 (N41340)
  misc_feature (18)..(18): n is a, c, g, or t
  misc_feature (20)..(20): n is a, c, g, or t
  misc_feature (330)..(330): n is a, c, g, or t
cactggctgttgtcagcncncctctgaggtttcaggctcttggcggtgaaggtcagagtgcagacctgagaccactgctcaccgacttcagactccagtttatctgtgccccagcttcctcacttagtctcagaagacttaggctgaggctcagaaggagatctccatcctttgtccagagcagaacaggatggccatgtcccaggaatcattgaccttcaaggacgtgtttgtagacttcaccctggaggagtggcagcaactggactctgcccagaagaacctctacagggatgtcatgcttgagaactaaaagccactgggtgtccngttggggtatctaa

SEQ ID NO: 1292 - DNA, 410 bp, Homo sapiens
  I.1292 (N40091)
  misc_feature (63)..(63): n is a, c, g, or t
  misc_feature (68)..(68): n is a, c, g, or t
  misc_feature (70)..(70): n is a, c, g, or t
  misc_feature (72)..(72): n is a, c, g, or t
  misc_feature (404)..(404): n is a, c, g, or t
cggttatctagctcacgaactgcatcttttgtcctctgtatgaggtcaatgaggacacgtagngcgantncntcggtcgaacaaagtcatgccttaatagttctgctgatgttggcctttcctgaggtattttctgcaagcagtaatcaacaaatctcctaaaggagtctgtccattcattagactgtaacgttggggagtcattctgggcaatgtgatataaggcactcattgcattcatgttgaaaaggggcggcttccgttccgccaattcaatacaagtgatgccaagtgaccaaatatcaactttcccatcatactgtccttcatccatagctaagatcacctctggagccatccagtaaggtgtgcccacgaaggagttggccaggagaagccattgnagcaga

SEQ ID NO: 1293 - DNA, 393 bp, Homo sapiens
  I.1293 (N39886)
  misc_feature (318)..(318): n is a, c, g, or t
  misc_feature (375)..(375): n is a, c, g, or t
  misc_feature (380)..(380): n is a, c, g, or t
tactagccaacagagttttactattttgattgtctggttggtttaacaaagagcctagctgactttccttctgtaaagtcctccttgtaggcttttttaaagtactgtacatatttgcaatcacattgtgcatagattcttaatggtagatatgatttcttttgtcaggctacaacaatgaactgcagattccttgtttgtaatgtaaatgattgaatacattttgttaatatgtttttattcctatgttttgctattaaaaattttataacatttccaagacaaaaattccaagtttatgctttgaagaatttatgnaaattaaaatttcactaaacctaaacccttttagttttagggaattcaatttggggntttgnccaccgggaaggt

SEQ ID NO: 1294 - DNA, 547 bp, Homo sapiens
  I.1294 (N39164)
  misc_feature (449)..(449): n is a, c, g, or t
  misc_feature (475)..(475): n is a, c, g, or t
  misc_feature (534)..(534): n is a, c, g, or t
  misc_feature (544)..(544): n is a, c, g, or t
gaaatgcagaaatatttattttggtttccttcattgtttttggaaattttgttttggtttataaaacatagaaatagccaacacttaaagcaaacattcaaaaccccaaggtgacaaattattgactttttgtgcaattaagaatacatatatgaagttaggctaccaagtagtgttattacaatgacaattctttagtgcaagccctgttgtgcttgtatataatacatgtactctcacagaccccaaaacagctgctttaaatgtacaaatgacagctcaattcagtcaaatgtggcaaagactcacaataaagtgaactgctgttaatttcccaaattaactttaaaaaatccctggagaagtgaatcccaggaaatgaactttccagatttctacatcctagaattttgggctggtcaaacacatttcatagaaatcaggtagcnttataaggacctttgcctattactgnccatttccataagtactccagtatatactcccttatagccttaaaggaatgcctggccngagagtttanttt

SEQ ID NO: 1295 - DNA, 531 bp, Homo sapiens
  I.1295 (N38920)
  misc_feature (374)..(374): n is a, c, g, or t
  misc_feature (436)..(436): n is a, c, g, or t
  misc_feature (448)..(448): n is a, c, g, or t
  misc_feature (456)..(456): n is a, c, g, or t
  misc_feature (499)..(499): n is a, c, g, or t
  misc_feature (522)..(522): n is a, c, g, or t
tttcagacgatcttcctttaatacaaagtcgatatatctacatacacgggggtgggaaaaccaccggctgcttccgctggaataaacagtgttgaaagtaaccgcagacctgcccttgtacaaagaggaacaactcgcttgctcagggtaggcgggtagaggggggcctgtccttctggttttgctcccaaactgccccacagtcccagggggaaagggtccctgatgtggggcagcacagccatacagccactgtccccgaagaagtaggatcctctctgtctccttgggggcgggagacggggagacagctcaggttctcagaggaggaccacttgtcatctctctcctcttacagcagggtccccctcaancggacccaacgccactgggtccgagctccccatgaccttaccctcagaaattgtattttganatgtctgaaaanttaatttnttaaaaatgaaccaaaaaggggggaaaaaaaaaagcccagaanggaaaaaggggaatcccattttnttttgggaa

SEQ ID NO: 1296 - DNA, 361 bp, Homo sapiens
  I.1296 (N36640)
caatattcctttgcaagttcattaagaaacactgtaatttaatggggcgtacaatatggaacgatcttcttttgctatagtgctgttcgctgaatagaaccgacctttgcaaagatttcaactggggtgtaacctatttacacagtagtagctcctggtttgagtggtaaaattggtgctatgtgatatcctcttcttccgaacagtaatcccgacccttttcaattttttcatccagcattctgaagaattcttgttggctttcagagatgtgcatgtttgctctgggttgatgaactaatcccggaacctctttattagttttaaagtcttacatttgagctggcacttttttccaagg

SEQ ID NO: 1297 - DNA, 423 bp, Homo sapiens
  I.1297 (N35493)
  misc_feature (252)..(252): n is a, c, g, or t
gttaaacattttatttatgtggcactctgaaacgagcaacctatgaaggcataaaataaaaagattttttttttaactcgggaggtaaagctagatatatcaattaggaactgattcatggtgtgatgtacacgacatgttgaaagaatgccaaaaaggcgcaaaccatcatacattaatacaaaggacaaaaacaaaaaaaaccccagcatcttcttgctatgaggcaataaggcactgctaagagacttnagcaccaaaatgattctctacaaattccttcctttttatactgcaaatactgcattattatattcaaacctttaaaaactaggtaatacttaagatttagagtcaacttactttgtgggaaattctatttgctgcttcttttaaaaacagattaaaataagctcttaaaaa

SEQ ID NO: 1298 - DNA, 469 bp, Homo sapiens
  I.1298 (N34637)
  misc_feature (322)..(322): n is a, c, g, or t
  misc_feature (424)..(424): n is a, c, g, or t
  misc_feature (449)..(449): n is a, c, g, or t
catcagtcacaatatttaatagtggtctctaaactattcgataaaatagctattgtttataaacagataaatagccaactctagtgaccaaaccaggaaaaggaaatcctgaagcaggatcctaaaacctgtcactgtgcattttcatattctcagcagttcgatgtatggaaatggtaaaagtgtggtgtgggttgcttttgaagcagctagcacccagactgcgtcagttctgattggctgcaaagtacagagtgttaatggcataaagccagctttttacgtcactttcagtcatagaattgttttgttgttgttgttnttgttttttgagacagagtcttgctctgttatctaggctgggagtgcagtggcactatctcggcttattgcaacctccaccttccaggttcaaagagattcntcctgcctcagcctcccaagtagcngggattacaggcgcccaccg

SEQ ID NO: 1299 - DNA, 464 bp, Homo sapiens
  I.1299 (N33763)
  misc_feature (304)..(304): n is a, c, g, or t
  misc_feature (341)..(341): n is a, c, g, or t
  misc_feature (415)..(415): n is a, c, g, or t
  misc_feature (427)..(427): n is a, c, g, or t
gagacggagcctcgctctgtcacccaggctggagtgcagtggtgtgatctcggctcactgcaacctctgcctcccgggttcaagctattctcctgcctcagcctcttgagtagctgggattacaggcgtgtcccacccggctaatttttgtattttttgtagagacggggtttcaccatgttggctaggctggtctcgaactcctgacctcgtgaccgccttggcctctcaaagtctgggattacaggcgtgacacccgaagcccagccctccttaaaacagtttctaaatcagaatccgttantttacccaaaatgggttgaagggaacaaaaaaccaanccctcatcaaccctaatttgggtgaaaaataaatataaaaaaaagatgatcctcctcttaaaagggtcaccttnccttcagggggntttgtaagactcagcactttaaaaagcttgaacagaa

SEQ ID NO: 1300 - DNA, 433 bp, Homo sapiens
  I.1300 (N33041)
  misc_feature (404)..(404): n is a, c, g, or t
  misc_feature (430)..(430): n is a, c, g, or t
catttttaaactttgtttatttgtagattaaaatgtaatgcattacaattttaacaatcacttaaaaatgatttatatttgcataaaacagaagcaaaacagaaatatattaattaaaatgccatcttgcttcaagttttcaaattagtactttaagtacttaaatgcattgcaagtatattgtataaatatactatgaataatcttgaaaccacaataaatatcaagtaggtttttaggcacacggcataagaaaagatgcagaatctgcataattccttgagagtgctgagtaactcactcttagttcattttcacacatatattttacacaaaatatacagccatcactcacatgattctcagtcacctctggaatctcatctttcatccccagcggttangtgccttctcatggctttggattgcnatt

SEQ ID NO: 1301 - DNA, 670 bp, Homo sapiens
  I.1301 (N32857)
  misc_feature (503)..(503): n is a, c, g, or t
  misc_feature (530)..(530): n is a, c, g, or t
  misc_feature (564)..(564): n is a, c, g, or t
  misc_feature (669)..(669): n is a, c, g, or t
gttattggacgaggtgtattaaaataaaatcaaaaatagaaatattaggtatatacacaacagcataagtgaaacacatcatgtgatacagaagtttccattcaaagcttacaggagaaaaatttagtgaacagaaccgcttgaacctcctgccaccgtggcttattagagccttgtagtcacttatgttccttcatatccttgggtataaatagtctcatacacatgctacacaatttagaaaagattgctgaatcataaaaatagccccgaatgtggcactttagctttctagagtacaactaaaattaatacttgatctttaacataatgttcaaatatttgaagcaacaaaggaaactcttatgttttagaaggccctataaggttcttcagagattagaatcctagttcttccaaactacattgtcaaaacaaatctggatataggaaattgtggaaatggaaaagctggactcctaaaaatattccctctaacaccngagcagtttctggaggctcttctcccnttcctgggaggtccaggtgagcccggtgccttcngggtgagcagacagggcagctgtggtgctcacgggctcccctgctggaagagagagagtgtgccgccactcctatgggatgtctagcaggttgagcagggtcaana

SEQ ID NO: 1302 - DNA, 595 bp, Homo sapiens
  I.1302 (N32583)
  misc_feature (570)..(570): n is a, c, g, or t
  misc_feature (584)..(584): n is a, c, g, or t
aaagaagttcgaaatgtttaatatttcatgcagttaacatgcttcaaagctttaagtctgaagttttagacttatcccaaatccttgctaagaagtcaagaccactatggaattcacactgctttctatagacttccactgacttgcagctaatggtccttacacagcaaagttgggatttctagacgtctccttccaggttcggaaaagcctcactaggcaagtggcaagactgtgaagacaatgaaggttcagaattcagtcaaatggaaacaagatcaggaaacaagatcaaggactcatctgtccgcctggcaccactttagttttgaaggtgacgccaccacgcatccccgcagcacacactccttcctgtgccgactcccgctatttgcttgcctgagccagttcatgtttcagtaagaacgatttttctcccaacagtgccagttttcttattcccaattttgagagttgaccccaaattgtgggctatgagggatgggttttaaaactcctctaatgggtcccaggcacagagcgttgaaaaggagggattcttggctatcngaattgtgcatgcngccaactactt

SEQ ID NO: 1303 - DNA, 530 bp, Homo sapiens
  I.1303 (N32057)
  misc_feature (3)..(3): n is a, c, g, or t
  misc_feature (69)..(69): n is a, c, g, or t
  misc_feature (173)..(173): n is a, c, g, or t
  misc_feature (393)..(393): n is a, c, g, or t
  misc_feature (509)..(509): n is a, c, g, or t
ctngaactgcagcgggtggcagtagagaagagcatcacagaagttgctcaggagctgacagagctggtnggaacatcttgtagacattgtcagaagcctgcagaatcagaggcccctatcagaatctggaccagacaacgaactgagcatcctgggcaaggctttttcttctnggggtggatctttccatggcttctccaaagctggtgacttccgacacagctgcagggaaaatcagagatattctccatgacctagaagaaattcaggaaaaattacaagaaagcgtcacctggaaagaggctcctgaagcacaaatgcagggagaactcctgggaagcccccgtcttcctcctcatggcccatttgccttggaccaagagccacccttgnactcaagggagagcttctcgggttttgctcagttgggccatccatccaacctttaactttgaagagcctttcctgcagccttggaggtgtccaaggattcccggtacagtgactgngttttcaccggcccaaaaccc

SEQ ID NO: 1304 - DNA, 423 bp, Homo sapiens
  I.1304 (N31603)
  misc_feature (418)..(418): n is a, c, g, or t
actctgataacttatttcaatcttttaattttacaagatagcttcagttaaagtgacattaaaacgaaacccaaacatccgaagcattgtttttcatctatatagaattttttaaaaaatcattacactataaagctgtcaaaggtgcagtgaaaataagcatactcattcactgatgaaaggaaataagtgtaacctcttttggaatggaatttggcaatatttgtcagcatctaagaatccatgttaaaaatgacctgaaatgtgaaaaataagattatacataaacgtgtcctatggctttatttataacagtaaagaagtggagatataggaatgactatggaaaatatgcagtccttaaaaatgttgcttgtaagaatttaaataatatgaaaatggtgttaatggaataacnttagg

SEQ ID NO: 1305 - DNA, 383 bp, Homo sapiens
  I.1305 (N31467)
  misc_feature (33)..(33): n is a, c, g, or t
  misc_feature (42)..(42): n is a, c, g, or t
  misc_feature (351)..(351): n is a, c, g, or t
  misc_feature (371)..(371): n is a, c, g, or t
ttgagtatcactactcctgaagagatgattganaaagccatnggggaaactgcctatctgccatgcaaatttacgcttagtcccgaagaccagggaccgctggacatcgagtggctgatatcaccagctgataatcagaaggtggatcaagtgattattttatattctggagacaaaatttatgatgactactatccagatctgaaaggccgagtacattttacgagtaatgatctcaaatctggtgatgcatcaataaatgtaacgaatttacaactgtcagatattggcacatatcagtgcaaagtggaaaaagctccctgggtgttggcaaataaggagattccatcngggtaggtccttggttaagnccttccaggtgc

SEQ ID NO: 1306 - DNA, 561 bp, Homo sapiens
  I.1306 (N30843)
  misc_feature (465)..(465): n is a, c, g, or t
  misc_feature (477)..(477): n is a, c, g, or t
  misc_feature (505)..(505): n is a, c, g, or t
  misc_feature (534)..(534): n is a, c, g, or t
  misc_feature (552)..(552): n is a, c, g, or t
  misc_feature (557)..(557): n is a, c, g, or t
gattaaaaagagaaaatatactgtaaaatatttatttaataaaaataattttataatctatacagaattgaataaaaagtacaacaaattattttcacttatttacaaaactgcatacagtacaacttgcacattgagttcagcattctataaatatggccacataccaagatgtgaacatattcttgtcttatataagaaaaggctcaggttgtatgccacaaactttgaattaaattccagggaaatattgctttggtaacatgaacaatttgtaccacattccattaaaaaaagatttaataaaatccctcaaacagcacttttctacttgtttcggagtacacaattcccaaattagcacaaacaaaacaaagcaaaaaaagaaaaacagacagaatgtaaaatgaaggttgctacttttatggatatcacttcccctttcccttccttagctagtggtcntttcccttcccntaatagtaagggtggtggatagaaatgncctattcttatccccatccatttgcttcnagggttccggcttaaccnaatgngtat

SEQ ID NO: 1307 - DNA, 424 bp, Homo sapiens
  I.1307 (N30728)
  misc_feature (110)..(110): n is a, c, g, or t
  misc_feature (396)..(396): n is a, c, g, or t
  misc_feature (414)..(414): n is a, c, g, or t
ttcaaaccagaaaataaatttattatgtgacaaaaatgaagaagaaatttaaagtgagggagtgaacagaaattgaagctgtgtggctttgcagttgggggactaaggcnctaatcatgagtgtgaggtgaattctaggccacagggcacaaatgtgcagagaattagaattgagctacctgcttaaagctgggagtcacaaaggacatctctgtgtgtaaaataggaactacaaagatgtcacccactggctaatgaaaaatgttaagaagaatcaggggttacttacaagaagtcaagaaccacagtcctgtaccacatgtagggagtgcattccaaatgggacattttgaagtataataccaaaaccccccggaagttggataaattcccccnattaaattggttccccgnattaggtgaa

SEQ ID NO: 1308 - DNA, 226 bp, Homo sapiens
  I.1308 (N30552)
  misc_feature (46)..(46): n is a, c, g, or t
  misc_feature (56)..(56): n is a, c, g, or t
  misc_feature (127)..(127): n is a, c, g, or t
  misc_feature (175)..(175): n is a, c, g, or t
  misc_feature (177)..(177): n is a, c, g, or t
  misc_feature (179)..(179): n is a, c, g, or t
  misc_feature (205)..(205): n is a, c, g, or t
  misc_feature (217)..(217): n is a, c, g, or t
agagaaaaaccattctattttattagttaaaacattatatctatgntacattctgnataaaacattagcaaaatgtgcttcaagcagataatgtgagttctactaaagaatatgttactctacttcngttgattaaactcttcactctgacaactactctctcttcagtttttcntnantcttctttagatggagttttgttctngttgcccaggcnggagtgcaa

SEQ ID NO: 1309 - DNA, 430 bp, Homo sapiens
  I.1309 (N29801)
  misc_feature (424)..(424): n is a, c, g, or t
tcttggtaaaaagtcactttatttgctacatctttcaatctgtctgcccttctgttcttggcttgagctatgtggcaacactgcccaacactcacccaaaccttggcctgatggatcgctttatggtcatatcaacaatcacatcccttcctgtcatgaaaaatgctgttttacattatgtaattttggatcattaaattgctttccaaacatttcaaagactttcaaaagagaggtccattacagaagacataaacacacagtataaaatgctgccttctaactcggcccttcagtttgggcatgatatgtaatcaaatttgattacatatgaagatgatatggattttgtccatggatactatgggagaggatcaaatttaagagagtatatctgaaaacctgtctggcagattccattccncttaag

SEQ ID NO: 1310 - DNA, 375 bp, Homo sapiens
  I.1310 (N29761)
gtggattttccttttaatgcaaaatgttgcaatacaaaacaatgtggagaaagtcctgttcctcaggacactgaagggaggagtgaggaagagaggacagagctggacgtctcctcctatttctccctccccaagtcactctgaggggaagaacactgctgcctgctccctgggcctgccgcatacaaggttagagccctgggtctggggcatccttagcctgaaatttgttgacatggggcaggagagcaggagggaacattgagggttttgactcttcgggctctaaaaggattactcaggatctgggagttccgtatgaaacaaaggagctgaaagaatttgattgccattgctaaaaaatatagaggattt

SEQ ID NO: 1311 - DNA, 447 bp, Homo sapiens
  I.1311 (N29354)
  misc_feature (212)..(212): n is a, c, g, or t
  misc_feature (334)..(334): n is a, c, g, or t
  misc_feature (343)..(343): n is a, c, g, or t
  misc_feature (385)..(385): n is a, c, g, or t
  misc_feature (392)..(392): n is a, c, g, or t
  misc_feature (404)..(404): n is a, c, g, or t
ttagctggcaaaggcgtttaatagaaatgagatgagggcaggccgccctcccccgcccagctagcgcaggaagttcctggggtagagctggaagagctttccctcctgtgtgggctcgaagccgtacttttccaggttgtcagggtcgaaggtaccgtccttgaagtccttttcgatggcaggcgccacggcttcgctgaagagctgcgcgnccgtcagggcgtctcctcgctctcaggggcgaggtagctcacgtagggcttgagcttgaagccggtcagatccgggacgacgaactccgggaccatctccttgatcttgcacgaacctccancccgaggtnaggaagccgatgcccttgggccccgggcccttgcggcccctnaaagctngcgcgtgccccntttgctcgtccacttgctcattcggtccgcaccccggaccagg

SEQ ID NO: 1312 - DNA, 494 bp, Homo sapiens
  I.1312 (N29120)
  misc_feature (39)..(39): n is a, c, g, or t
  misc_feature (84)..(84): n is a, c, g, or t
  misc_feature (98)..(98): n is a, c, g, or t
  misc_feature (123)..(123): n is a, c, g, or t
  misc_feature (125)..(125): n is a, c, g, or t
  misc_feature (136)..(136): n is a, c, g, or t
  misc_feature (140)..(140): n is a, c, g, or t
  misc_feature (181)..(181): n is a, c, g, or t
  misc_feature (314)..(314): n is a, c, g, or t
ggtggctggtctgcagggttgacctgcgcaatgcagagngctgcaggtagtgctgggccacctgaggggtccggccgattccgntggattgccgcacngtcgccttgcctgagcggtgccccnangcctcggcgcngacngtggtggtggtgcacgggcggcgcacggccatctgccgggnggccgcggcggcttcaaggacaccacccccgacgagcttctctcggcagtcatgaccgcggttctcaaggacgtgaatctgaggccggaacagctgggggacatctgtgtcggaaatgtgctgcagcctgggncggggcaatcatggcccgaatcgcccagtttctgagtgacatcccggagactgtgcctttgtccactgtcaatagacagtgttcgtcggggctacaggcagtggccagcatagcaggtggcatcagaaatgggtctttatgacattggcatggcctgtgggggtggaagtccatcccagt

SEQ ID NO: 1313 - DNA, 390 bp, Homo sapiens
  I.1313 (N28965)
  misc_feature (310)..(310): n is a, c, g, or t
  misc_feature (338)..(338): n is a, c, g, or t
  misc_feature (384)..(384): n is a, c, g, or t
tgaaaacttcactattccatattgggactggcgggatgcagaaaagtgtgacatttgcacagatgagtacatgggaggtcagcaccccacaaatcctaacttactcagcccagcatcattcttctcctcttggcagattgtctgtagccgattggaggagtacaacagccatcagtctttatgcaatggaacgcccgagggacctttacggcgtaatcctggaaaccatgacaaatccagaaccccaaggctcccctcttcagctgatgtagaattttgcctgagtttgacccaatatgaatctggttcnatggataaagctgccaatttcagctttngaaatacactgggaagggatttggctaagtccacttaactggggantagcgg

SEQ ID NO: 1314 - DNA, 372 bp, Homo sapiens
  I.1314 (N27914)
  misc_feature (336)..(336): n is a, c, g, or t
  misc_feature (347)..(347): n is a, c, g, or t
  misc_feature (359)..(359): n is a, c, g, or t
ccacaaagaaatgtaattattattaaaacataagttgtcataagagaaaaaaagaagctggcagaagtttcgtatttctcagtaattctagaaaagctatgcaaatatatagataagaaggtattttaaaaatcagaaatggtagtatttaaaaattcaatgtagttacaggaattattatagacaagaaagcttaagctgttggttccttcaaactttatttgaattaaattcattttgaggaaaatacttccatctctttggcttaattaaataatattaggataagtgtacagtttacctttttttcttttggatatgtaactgagttttggnatattggtggnatagcctggttnagaagttggtttt

SEQ ID NO: 1315 - DNA, 538 bp, Homo sapiens
  I.1315 (N27783)
  misc_feature (1)..(1): n is a, c, g, or t
  misc_feature (371)..(371): n is a, c, g, or t
  misc_feature (427)..(427): n is a, c, g, or t
  misc_feature (462)..(462): n is a, c, g, or t
  misc_feature (483)..(483): n is a, c, g, or t
  misc_feature (513)..(513): n is a, c, g, or t
ntgactgcaaaagtaagggacctgcagactcaacttgaggagctgcagaagaaataccagcaaaagctagagcaggaggagaaccctggcaatgataatgtaacaattatggagctacagacacagctagcacagaagacgactttaatcagtgattcgaaattgaaagagcaagagttcagagaacagattcacaatttagaagaccgtttgaagaaatatgaaaagaatgtatatgcaacaactgtggggacaccttacaaaggtggcaatttgtaccatacggatgtctcactctttggagaacctaccgaatttgagtatttgcgaaaagtgctttttgagtatatgatggggtcgtgagctaaagnaccatgggcaaaaggttattaaccaccgtaactggaagttccctgatggatcaggnctcaggaaaatttttgggaaaggagaaggatgctncggctggatggtcatgggctnccgatcttccatcttggaagaagaagttgncattggggtgacttgctgccttggg

SEQ ID NO: 1316 - DNA, 489 bp, Homo sapiens
  I.1316 (N27514)
  misc_feature (69)..(69): n is a, c, g, or t
  misc_feature (73)..(73): n is a, c, g, or t
  misc_feature (401)..(401): n is a, c, g, or t
gcgctgctctttgtggggaacagcacatcctgaagtgaaaatccatgttccctgcacttggccagcatnctanagcctgaccatccctgattggagagggtgggagagccctgggtttctgctaagttccaggcagtgatggggtgactgaggctgtctgtataccccactggagatgcctttctctcctagggaactgtttaattatgactgtttttggttgtaagccacagagacccatgcccaggtgcttcaacacaaaagcatgatcattcatggggtgcatagaactggccagtccaggagggcttgctttcaggtaaggctagatccagggtcctcaacatggagtctcgattccccccgcgagtggaggctgctgtgtctgccctggggaaatnatgactctggaacttaggttcaatattgacatgagttcccctagttactacacaggagcgtcttgggtctccttggggcctgaggact

SEQ ID NO: 1317 - DNA, 454 bp, Homo sapiens
  I.1317 (N27153)
  misc_feature (35)..(35): n is a, c, g, or t
  misc_feature (38)..(38): n is a, c, g, or t
  misc_feature (41)..(41): n is a, c, g, or t
  misc_feature (95)..(95): n is a, c, g, or t
  misc_feature (98)..(98): n is a, c, g, or t
  misc_feature (104)..(104): n is a, c, g, or t
  misc_feature (196)..(196): n is a, c, g, or t
  misc_feature (200)..(200): n is a, c, g, or t
gcgacacgcgggagggtccttgtggcgccgggcgnggngtncctgcgtggagagtgggacgcaacgccgagaccgcgagcagaggctgcgcacancgnatccgnactcagcgaccggacccaaggatccgccggggaacaagccacaggagagcgactcaggaacaagtgtgggagaggaagcggcggcggcggcngtgncccagggggtggtgacagcaggtctgaggttgcatcataaatacaaaggactgaagttataaaagagaaaagagaagtttgctgctaaaatgaatctgagcaatatggaatattttgtgccacacacaaaaaggtacttgaagatttaccccccaaaaaaaattgttcaattgagaaattaaagcttaacttgatattcaaaaagcagagccttgctcttacttggccatcatgcgtaaagggggtgctgaagg

SEQ ID NO: 1318 - DNA, 473 bp, Homo sapiens
  I.1318 (N26928)
  misc_feature (181)..(181): n is a, c, g, or t
  misc_feature (194)..(194): n is a, c, g, or t
  misc_feature (294)..(294): n is a, c, g, or t
  misc_feature (322)..(322): n is a, c, g, or t
  misc_feature (344)..(344): n is a, c, g, or t
  misc_feature (456)..(456): n is a, c, g, or t
  misc_feature (462)..(462): n is a, c, g, or t
  misc_feature (467)..(467): n is a, c, g, or t
ctgatccatgcatcctttattccattaccaaccactgtgccgcatccaagcaacagtacacaaactggcaatcaaccgcagtccagttgtacaacgatctgaggcttacagtacatttaaggcttttaaatgtggaaaaaaaaattaaaaccaaagaacccccaaatccaaaccccttacnaacacaagtagtntagcaatgttaagcatctcctatttctgatgcttatttgggcgcaacttccagtgtcaaaacccaaataattcctaaactaaaaagattagtttaagtgnaattttaattacataaattcttcaaagncataaacttgggaatttttggncctgggaaatggttataaaaatttttaaataggcaaaaccatagggaataaaaaccttatttaaccaaaatggtattccaatccatttaccatttaccaaaccaggggatcnggcagntccantggttg

SEQ ID NO: 1319 - DNA, 492 bp, Homo sapiens
  I.1319 (N26008)
  misc_feature (22)..(22): n is a, c, g, or t
  misc_feature (27)..(27): n is a, c, g, or t
  misc_feature (28)..(28): n is a, c, g, or t
  misc_feature (31)..(31): n is a, c, g, or t
acactttagttgggagctgcgnccgcnncangttactggagagctggccgcgcgccgccgcctcccgcacgcttgcacgcgggcccggcttcggggttttgggttcttactccaagcggcggggaggagggggagccccggacacactgtggggaggaggaggaagaagaggaggagggaggaagaaaaaagacgaggaggacaggggcggggggcgggaggcttgccaccttcagcccccccgcgaacgcccaaggtgcacacatctttgaccaactcagcagcaaggtggattttctttgtgtttaaagaaaaaaaatgtcccctgtgtctgtagagatgattttgcagttcagcccggcttgaagctggaccgaatgaagactatgggctgtgcttcccgccaagcatgttgccactgttcaaaatgaagaggaagcccagaaagggaaaaacttaccagaacggagatgtgtttggcgatgagtatag

SEQ ID NO: 1320 - DNA, 319 bp, Homo sapiens
  I.1320 (N25352)
  misc_feature (4)..(4): n is a, c, g, or t
  misc_feature (5)..(5): n is a, c, g, or t
  misc_feature (7)..(7): n is a, c, g, or t
  misc_feature (8)..(8): n is a, c, g, or t
  misc_feature (190)..(190): n is a, c, g, or t
aagnntnnatcaccttcacaaaactaagacaaactttttcaaagctcagcttgatttgctggaactacacagagacatgtttgatcacacaacagcaactgtacatcctcccaagtctggaatacagaattgatggaggacacttaacttgcttaaaatgtatttgattattctgcatttattataaaanatatcatccagggattatattcaagagggtaaatttaggattacatgtttctagaacatataatatgtaacaccatccaaaaacaacaacaacataaagcactggaaccaaagaaccacttaaaattta

SEQ ID NO: 1321 - DNA, 565 bp, Homo sapiens
  I.1321 (N21235)
  misc_feature (532)..(532): n is a, c, g, or t
cagagtgcaaagaatctattttgttcagatacctgagaagcggacagagagccaacaggaaggtgggcaaggctctctcccagcaggaagaaggatgtatctgaaaagatgacactttctctcttccttgggtttggggttgaggctggcgtagatataagtttcctggccctgcattgctgagcctgcataaagatgattcttgtggccacaaaaccaccccttggctcagttactgcagcagagatgagccccaactctaagcaaggccaggagacaagggtaccagccactgctgacagagccatgtcagtgagactcctgccacgcagtccatgaggatgtgtaatgtgggctgggcgcaagtcaatggggtagggactggcgtggcacatccaggggtgcagaggttgttgtcttcatgcaacatagtgaccccatctgctggtgctcccaatgcctaagggaagccagaatcctgatttcgatgcgaatgccccatttttaaaccattctaaaggcaaaaagcacnctaaagcagccagatcagcttcaattggtgacc

SEQ ID NO: 1322 - DNA, 429 bp, Homo sapiens
  I.1322 (N21161)
  misc_feature (85)..(85): n is a, c, g, or t
  misc_feature (99)..(99): n is a, c, g, or t
  misc_feature (249)..(249): n is a, c, g, or t
  misc_feature (292)..(292): n is a, c, g, or t
aaattcatgcacttttactatgcccattgcacttctcatccatggatttgccttgccttaagaattaaccatggccttgtggctngggtgacccaggcngcttttatcttgcacagctaaagagggtctgatgggtggctcaacaccccacccactcctataccatgtcatcagtgttcacattttccaaatgagttgaagtgccttgatctgtccactgccaccaccaccagtgctgagttttcccangtggttttgcttttgtggtgttactgccttgctgctagagcanagcgactgtctgcgtacgcctccagcctgggacctcactcagttcccagggtattcaaagacggcagcggctcccattccagtcccgatgcacatggacaccactccgtatgccctcttcccacggcgcttcagctc

SEQ ID NO: 1323 - DNA, 460 bp, Homo sapiens
  I.1323 (N21079)
acttatcatgacaactcaaggtgacatgaatatttaatgaaaatttagaatataacaacatatgactctcattctgtggacataaaaggaaaaatacagtaattcattttactcattacattttacaaaatcagcccaatgaagcagtattttttaataaaaacagtaatttaatttcaaacaaatatattaccatcctattcctttatcttgtatatatgtatctaattggcaaaacatactttactgaaatcagtaacaatccaatccatgatacttcaattgcttcgatcaataaacatcttaaatttgaaactcatttttcttatgccataagcctgattatcagttctataaaaacgctacaccctattgcttggcccattaagtgtaactagtcttctgcacaaggctaagtgggctaaggtacttttgaacaaccacacacaattcatcaagc

SEQ ID NO: 1324 - DNA, 584 bp, Homo sapiens
  I.1324 (N20922)
  misc_feature (1)..(1): n is a, c, g, or t
  misc_feature (125)..(125): n is a, c, g, or t
  misc_feature (264)..(264): n is a, c, g, or t
  misc_feature (346)..(346): n is a, c, g, or t
  misc_feature (422)..(422): n is a, c, g, or t
  misc_feature (492)..(492): n is a, c, g, or t
  misc_feature (505)..(505): n is a, c, g, or t
  misc_feature (532)..(532): n is a, c, g, or t
  misc_feature (552)..(552): n is a, c, g, or t
  misc_feature (557)..(557): n is a, c, g, or t
  misc_feature (581)..(581): n is a, c, g, or t
nttttttatatagtaaataaactctatttatctgtttctcagagatgacactgccaacaatcacagatttgcatacaatacagttatgtattggctattcacaatttacagtagtgttttttccnctgaaaaatataagtacaaaagctaagtaaacaatgaggtactgccatttgggattttttacatgtcttagcttaaagaactggtctttagcaaatattcaacagatcaacctgaataaaatagtcaattaaatgctcnaatttatcagaaaaaatccactaagtttcacctcaaaatgtattgcacaagtctttttaaaaaatcaccctaaaaataaatnggaaaggtaagccgttctttaaaaaaatgggatgaaaggaatattatgtaagcccataaagcaggttaagttatcnaaatatcttttaaacaacataaaactcttcccaagagaaaactggagaaaaaactatcaccatttctccnctggataaaatcnattttaaaggcagtctgcaacttatcngtgggccagattttcctggnccttnggctacatgaggggcccggatggncac

SEQ ID NO: 1325 - DNA, 436 bp, Homo sapiens
  I.1325 (N20574)
  misc_feature (113)..(113): n is a, c, g, or t
  misc_feature (194)..(194): n is a, c, g, or t
  misc_feature (212)..(212): n is a, c, g, or t
  misc_feature (213)..(213): n is a, c, g, or t
  misc_feature (227)..(227): n is a, c, g, or t
  misc_feature (302)..(302): n is a, c, g, or t
  misc_feature (326)..(326): n is a, c, g, or t
  misc_feature (341)..(341): n is a, c, g, or t
  misc_feature (361)..(361): n is a, c, g, or t
  misc_feature (385)..(385): n is a, c, g, or t
caattttttaaaataagagcactttaattcacatacaaataacagttcctcattaccaaatagcatcctttccttagacatatgggcttaggggaaaatgttaaaagggctgngtgaaaacagcaagacaaagacaggtgtgttctacctgagttggaagaaggctacactttgtattaggttacaattttgcnaatggtctttacagaaanntaccagcagatatnctctgggaacctggacattactttgagttagagtgacggtcaggctttttggccctactctattgcctaagcctnttataaatggctctgatacaagcngtggtaatcctcttnctccatgaggagtggctgcntttcttcaggaagctgctttctcntgggacgacacagcaagctcacaagccctgccagcaggcagttgaggacgg

SEQ ID NO: 1326 - DNA, 572 bp, Homo sapiens
  I.1326 (H98244)
  misc_feature (427)..(427): n is a, c, g, or t
  misc_feature (536)..(536): n is a, c, g, or t
  misc_feature (542)..(542): n is a, c, g, or t
  misc_feature (564)..(564): n is a, c, g, or t
  misc_feature (572)..(572): n is a, c, g, or t
cacttttagtcagagggtttttattaggagtaaattttcctaggttctcgataataaaggttaatatatttttttcaaaggcacaacgaagcatcctttcaggtcaccactgatttcaaaacaaaacaaaacaaaacaaaacagaaatttcctgatttgatgtgtaaaaggtcaacatctgctgatgctcagatatggggaatgtggtggaggcggccgaatgggatgtcgagtgagcagtacagttagaggggccatgcaacatacaactgacactccaaacagaaagacaccccaacgccaaagaactacttttccatccatccatttctgaaactttctgacaggccagatcactatagcagcctcaataatctgtgtcagcttgcttctacttgcttccctgttgactaaaatggcacgtgcnaatgcaattgtcaagggcctgaaaggagcacattgtgggggatatataccgttagggcaatgccaagggggatactaaagccgaaaattagactattagagctgaaggntttcanttgcaagttttaacctggtgcnggttccan

SEQ ID NO: 1327 - DNA, 353 bp, Homo sapiens
  I.1327 (H97716)
  misc_feature (18)..(18): n is a, c, g, or t
  misc_feature (27)..(27): n is a, c, g, or t
  misc_feature (37)..(37): n is a, c, g, or t
  misc_feature (38)..(38): n is a, c, g, or t
  misc_feature (48)..(48): n is a, c, g, or t
  misc_feature (56)..(56): n is a, c, g, or t
  misc_feature (61)..(61): n is a, c, g, or t
  misc_feature (67)..(67): n is a, c, g, or t
  misc_feature (84)..(84): n is a, c, g, or t
  misc_feature (103)..(103): n is a, c, g, or t
  misc_feature (120)..(120): n is a, c, g, or t
  misc_feature (123)..(123): n is a, c, g, or t
  misc_feature (161)..(161): n is a, c, g, or t
  misc_feature (180)..(180): n is a, c, g, or t
  misc_feature (257)..(257): n is a, c, g, or t
  misc_feature (326)..(326): n is a, c, g, or t
  misc_feature (345)..(345): n is a, c, g, or t
aatatgaccgtcacctgncccaccaanctttgctccnntgggaagccngtagtagncaaantagacncggagtatgcaaggttncagaatggccgatttgtancccgaataaaccgctcnccnatgtgtgaatatatgatccacttcatccacaagctcanacacttaccagagaaatanatgatgaacagtgttttggaaaacttcacaattttattggtggtaacaaacagggatacacaagaaactctactctngcatggcctgtgtgtttgaagttttcaaatagtgaacacggagcacaacatcatatttacaggcttgtnaaggactggaacatggttnatttgata

SEQ ID NO: 1328 - DNA, 342 bp, Homo sapiens
  I.1328 (H97429)
  misc_feature (14)..(14): n is a, c, g, or t
  misc_feature (16)..(16): n is a, c, g, or t
  misc_feature (23)..(23): n is a, c, g, or t
  misc_feature (27)..(27): n is a, c, g, or t
  misc_feature (40)..(40): n is a, c, g, or t
  misc_feature (41)..(41): n is a, c, g, or t
  misc_feature (50)..(50): n is a, c, g, or t
  misc_feature (60)..(60): n is a, c, g, or t
  misc_feature (70)..(70): n is a, c, g, or t
  misc_feature (71)..(71): n is a, c, g, or t
  misc_feature (96)..(96): n is a, c, g, or t
  misc_feature (128)..(128): n is a, c, g, or t
  misc_feature (226)..(226): n is a, c, g, or t
  misc_feature (249)..(249): n is a, c, g, or t
  misc_feature (294)..(294): n is a, c, g, or t
  misc_feature (297)..(297): n is a, c, g, or t
  misc_feature (308)..(308): n is a, c, g, or t
  misc_feature (317)..(317): n is a, c, g, or t
  misc_feature (330)..(330): n is a, c, g, or t
  misc_feature (337)..(337): n is a, c, g, or t
gttgccgctgccgntnccgccancgtnccagcccctcggnnctccgtgangccgggtgangctccagaannggagataagccaatttgggagcagnttggatccagcttcattcaacattactaccanttatttgataatgatagaacccaactaggcgcaattaacattgacgcgtcatgccttacgtgggaaggacaacagttccaggggaaagctgccattgnggagaagttgtctagccttccgntccagaaaattcagcacagcatcaccgcgcaggaccatcagcccnctncagatagctgnatcatcagnatggttgtgggcnagtttanggcgg

SEQ ID NO: 1329 - DNA, 439 bp, Homo sapiens
  I.1329 (H97358)
  misc_feature (119)..(119): n is a, c, g, or t
  misc_feature (236)..(236): n is a, c, g, or t
  misc_feature (359)..(359): n is a, c, g, or t
  misc_feature (439)..(439): n is a, c, g, or t
agtagagccagggttcaccatgttagccacgatggtctcgatctcctgaccttgtgatcctcccgcctcagcctcccaaagtgctgggattacaggtgtgagccaccgcgcctggcaangtgcctatgattattaaggtgttatatacgtattaccttatttaatcatagaatcttatgtcagtatgattgctccttttataaatgggaatctgagacttggagaggagaaaatanggatgagcagcaaaactacaatttggatctgtttctaattctaacactcatgttttcctgaacaatgtactgtttctagttgataaaggagggaaatgtatgcatccttgccatgctcatttngaaaacagacaacgtatctaaaagatgtatagagtgattggttcaggtcacagggcgttaactaaaggacagtgattctn

SEQ ID NO: 1330 - DNA, 380 bp, Homo sapiens
  I.1330 (H88328)
  misc_feature (313)..(313): n is a, c, g, or t
  misc_feature (361)..(361): n is a, c, g, or t
  misc_feature (373)..(373): n is a, c, g, or t
  misc_feature (379)..(379): n is a, c, g, or t
ccaaatactgaaaggagactaagcaaggaagctggatatgaaatgtctaccttcttgacttacgggtcatgttgtggtccttcctatttccaccttaaaattgacaaggcctcgctcaaatttgtgctaccaatgatacagagtttatagcaaattttctaagggaagtatctgtggaaattttctcatgattcatgaaaaatgttattagaagtacaagtatcctgggaatcagtcatcagggtcctccctctaaggcccactggggaacaaactggaggtggtggttttatggaaaggattccttactggntagtgggtaagcagggctggtagaaaggccccatcatccttaggaagnagattccttccnactaant

SEQ ID NO: 1331 - DNA, 289 bp, Homo sapiens
  I.1331 (H94925)
  misc_feature (16)..(16): n is a, c, g, or t
  misc_feature (17)..(17): n is a, c, g, or t
  misc_feature (29)..(29): n is a, c, g, or t
  misc_feature (277)..(277): n is a, c, g, or t
attcacgcaccctcannagtgtgggtganacatatacagcctgttagacctgaaggcagatggctcttcttaaggccaataaggatctcatttccgcagattgaaggagttcagcgttctgctgaatcagcaggtcttcaatgatcctctcgtctctgaagaagacatggtgactgtggtggaggactggatgaacttctacatcaactattacaggcagcaggtgacaggggagccccaagagcgagacaaggctctgcaggagcttcggcaaganctgaacactctt

SEQ ID NO: 1332 - DNA, 563 bp, Homo sapiens
  I.1332 (H94872)
  misc_feature (111)..(111): n is a, c, g, or t
  misc_feature (401)..(401): n is a, c, g, or t
  misc_feature (406)..(406): n is a, c, g, or t
  misc_feature (412)..(412): n is a, c, g, or t
  misc_feature (436)..(436): n is a, c, g, or t
  misc_feature (476)..(476): n is a, c, g, or t
  misc_feature (519)..(519): n is a, c, g, or t
  misc_feature (527)..(527): n is a, c, g, or t
  misc_feature (540)..(540): n is a, c, g, or t
  misc_feature (557)..(557): n is a, c, g, or t
ttccaacaaaaccagcactggtctttattgaggtgtcagggtagagtggcaggagcacagcctaaggacatgaaggtcagagtttctcagagaggaggggctgggtccctnagctaggaggagggcggtgggtgactcgggagctcatgagacttcaggaagtccctgtacttggccaggaaagggttggcaagagtgttcagctcttgccgaagctcctgcagagccttgtctcgctcttggggctcccctgtcacctgctgcctgtaatagttgatgtagaagttcatccagtcctccaccacagtcaccatgtcttcttcagagacgagaggatcattgaagacctgctgattcagcagaaaccgctgaacttccttcaatcctgcggaaatgagatncctantggccntaagaagagccatctggccttcanggtctaacaggctgtaaatgtctcacccaaactctttganggtgcgtgaatccccgtgccgaattcttggccccaaggccaanttcccaanagtgagtcgtatnaattcgtaatcagtcanagcgtt

SEQ ID NO: 1333 - DNA, 321 bp, Homo sapiens
  I.1333 (H92945)
  misc_feature (36)..(36): n is a, c, g, or t
  misc_feature (38)..(38): n is a, c, g, or t
  misc_feature (189)..(189): n is a, c, g, or t
  misc_feature (277)..(277): n is a, c, g, or t
  misc_feature (295)..(295): n is a, c, g, or t
ggacctgattctggtggtggaggctgctttttctangngctcactaggagtggttttgggaacttcttttcttggcggtcctgtagtaggtggctgaggcgggatgaccagtgctggctgggagacctgcttgcttgacttcctggaagctggagtggtggcctgtttggattcaggcccaggggcganggacattcccttcttcactcttttcctcgacgggctttcgtggaggaggctcactactgcttttctttggggcaggatcctctcttgnctgatggggtaggtttcngactagagtccaccaagttcttcaca

SEQ ID NO: 1334 - DNA, 157 bp, Homo sapiens
  I.1334 (H92944)
  misc_feature (3)..(3): n is a, c, g, or t
  misc_feature (9)..(9): n is a, c, g, or t
  misc_feature (10)..(10): n is a, c, g, or t
  misc_feature (13)..(13): n is a, c, g, or t
  misc_feature (22)..(22): n is a, c, g, or t
  misc_feature (29)..(29): n is a, c, g, or t
  misc_feature (32)..(32): n is a, c, g, or t
  misc_feature (34)..(34): n is a, c, g, or t
  misc_feature (40)..(40): n is a, c, g, or t
  misc_feature (63)..(63): n is a, c, g, or t
  misc_feature (65)..(65): n is a, c, g, or t
  misc_feature (70)..(70): n is a, c, g, or t
  misc_feature (73)..(73): n is a, c, g, or t
  misc_feature (74)..(74): n is a, c, g, or t
  misc_feature (87)..(87): n is a, c, g, or t
  misc_feature (97)..(97): n is a, c, g, or t
  misc_feature (98)..(98): n is a, c, g, or t
  misc_feature (119)..(119): n is a, c, g, or t
  misc_feature (147)..(147): n is a, c, g, or t
gtntgcagnngancagctgttncccttgncgnanaacganctgtgtttcctgatgacatgccnancctgngtnncttaccatgggangaacgagaanngattttgtcttccatggggantgatgacaagtcatcaattgctggctcngaagatgctg

SEQ ID NO: 1335 - DNA, 363 bp, Homo sapiens
  I.1335 (H92450)
  misc_feature (279)..(279): n is a, c, g, or t
  misc_feature (331)..(331): n is a, c, g, or t
  misc_feature (352)..(352): n is a, c, g, or t
gggtgattgcatagtgtcctttgagctcgtgcagggcccacatgatgtcctgactactgagcactttgaagtcggccatgaggaggtcagcagcttggatgaagcagtgctggtcaagaggagtcaatttagaatagtcaaaaaagtcttattttaggcaactttgtctcatcttggctggccagcagactgctactgggatttataatgattctgtcttctctctttggataatctgggttttccagaagaaaattacaaagtcttgtccccgatggnagtgaaagttgttcaagtgaattacctcttcattgttgtttcccacttccantttcaaatgcagacatgcacntacgggaccgg

SEQ ID NO: 1336 - DNA, 333 bp, Homo sapiens
  I.1336 (H92449)
  misc_feature (17)..(17): n is a, c, g, or t
  misc_feature (18)..(18): n is a, c, g, or t
  misc_feature (19)..(19): n is a, c, g, or t
  misc_feature (48)..(48): n is a, c, g, or t
  misc_feature (66)..(66): n is a, c, g, or t
  misc_feature (196)..(196): n is a, c, g, or t
  misc_feature (257)..(257): n is a, c, g, or t
  misc_feature (302)..(302): n is a, c, g, or t
  misc_feature (310)..(310): n is a, c, g, or t
  misc_feature (330)..(330): n is a, c, g, or t
cgccggggcaaagcggnnnggagtgcagcggctgccacggagctcgtncctgcagctgtcggaggngtcagcggcgtggtagcgaaggtcgccgaacccgcctggctagccggcgagttgagtggcgactcttttgaaacagatggtcaccatgtttagatattagcagtcccgtatgtgcatgtctgcatttganaatggaagagggaaacaacaatgaagaggtaattcacttgaacaactttcactgccatcgnggacaagactttgtaattttcttctggaaaacccagattatccanagagagangacagaatcattataaatcncag

SEQ ID NO: 1337 - DNA, 353 bp, Homo sapiens
  I.1337 (H88129)
  misc_feature (294)..(294): n is a, c, g, or t
  misc_feature (303)..(303): n is a, c, g, or t
cctgtttatttggcacttaaggtgattctgaaaatcctttaaacttaaagtagatggaatcttaagtatggggccttttagtgtccgtaaagaaaaactgcatgcaacaaaatatagcaggtcctcacttgttgagattcatggaaattgtgactttaaatgaaatgacatggctgggcatggtggctcacacctgtaatcagcactttgggaggccacggcgggtggatcacgaggtcaggagttcaagaccagcctgggccaacatgggtgaaaccccgactctactaaagntacaaaaanttaggccgagcatgggtgggtgcacgcctgttaatgggaggctgaggccg

SEQ ID NO: 1338 - DNA, 427 bp, Homo sapiens
  I.1338 (H88128)
  misc_feature (3)..(3): n is a, c, g, or t
  misc_feature (14)..(14): n is a, c, g, or t
  misc_feature (426)..(426): n is a, c, g, or t
atntcggaacaggngagaaactgtgaaagcctataggaaaaacgttttggcaaaatgttatggtggtgatattacccgaaaaatgaagcttttgaagagacaagcagaagggaaaaaaaagctgaggaaaattggcaacgttgaagttccaaaagatgcttttataaaagttctgaaaacacaatcttctaaataattggtgggaaaacaaagaattttcattgcaatttgtaatatgctgacaacagaaagaaaattataaaatttgcttgttactttcagggtattcaggttcaaattaacctactagtctttcgttgaaagggagtagttagtggggtaggccaagagcttaggttttgaagccctgttgcctgttcttcaaatttctgttcccaccactcacttgttaaggtgaccctgggnt

SEQ ID NO: 1339 - DNA, 307 bp, Homo sapiens
  I.1339 (H88121)
  misc_feature (82)..(82): n is a, c, g, or t
  misc_feature (138)..(138): n is a, c, g, or t
  misc_feature (141)..(141): n is a, c, g, or t
  misc_feature (253)..(253): n is a, c, g, or t
  misc_feature (273)..(273): n is a, c, g, or t
  misc_feature (302)..(302): n is a, c, g, or t
cgctgtgcacgcccggctacaacgcccgcgcgcccctgcactacctagcgccgctgctctccaacctcagccaacgccctgngcgcgggccttcctactggaccccgacaggtgaagcccaggggcccgcgggggggnagngggacggaagttaggggggacggccctaagtgacacctcccaacaggtgcgtggtccagcggctgctgccccttacccagtaccccgactcctctgtacgcaggggcgggtngtggggacgctgcggaattnctgtttcgagcaccgtgagttgttgggtntttgg

SEQ ID NO: 1340 - DNA, 414 bp, Homo sapiens
  I.1340 (H88120)
  misc_feature (34)..(34): n is a, c, g, or t
  misc_feature (95)..(95): n is a, c, g, or t
  misc_feature (221)..(221): n is a, c, g, or t
  misc_feature (367)..(367): n is a, c, g, or t
  misc_feature (400)..(400): n is a, c, g, or t
  misc_feature (414)..(414): n is a, c, g, or t
gccttgagtgcttcaagtagtgtgtgttggggtngtgcttattgcagcagggctcctgctcaccagcatgatggcttcaacaagcatcttgcggnatgtctgcatcaggttctcgctgcttgtctggtggcaggtactcaagtcgacaggcagccctaggggtgagtgtgtgggagccactgtgtcccttggctgggcagctgagccaggctctgctgtgntgaagtcccacctgtgctcagcaactcactgctgcaaagtttcaggagcctgtggcctgggacacctctctctccctccactggcctccctcctcttccggccaactctgaggctccacactagccactcacgttccatttttttnctcggagaaattcctcagggcccagccaagggnagggagcaaaaatn

SEQ ID NO: 1341 - DNA, 477 bp, Homo sapiens
  I.1341 (H87933)
  misc_feature (369)..(369): n is a, c, g, or t
  misc_feature (395)..(395): n is a, c, g, or t
  misc_feature (462)..(462): n is a, c, g, or t
aactcactgtcttttctccacacttgtcctaagccaaggtagatttgtacgtagacagactggtgagcaagcattatattttatttttacccttgcatgacattttcattttaatcaataacattatttggcctgagcttgtgggtctgttcagactgtctcctctcatggtttgaaactgcatctgaatgcctgccttcaatcctggccaagttggagtagactggtatgagaaaactatgattagttcacatttactggtgcatccttgatcctctcacagatagaggtcttaaaggttggatcatgtaacattggcttagttagaagaatcttcttctaaggatgatgggctttctacagcccgcnttaccactaacagtaaggaatccttncataaacacacctcagtttgttcccagtgggcttagaggggaggaccggatgactggattccagggntactggtaccttcca

SEQ ID NO: 1342 - DNA, 256 bp, Homo sapiens
  I.1342 (H86732)
  misc_feature (151)..(151): n is a, c, g, or t
  misc_feature (225)..(225): n is a, c, g, or t
  misc_feature (234)..(234): n is a, c, g, or t
aaaagagtgtcatcacacatttccaagattggtttctagatacagtaccgataactggttaggtaactttcactactagaatcttcaaaccagtgcaatgcttgtacatttttttttttcaagtacacacgtgaaggcccaacagtgatangaagcttggcatcaaaaatcactagaaagtctcatgctttttatcgctatttaatccaagtgactgtcacttanttttaatantgctaaacaaactaggtttgag

SEQ ID NO: 1343 - DNA, 356 bp, Homo sapiens
  I.1343 (H86731)
  misc_feature (278)..(278): n is a, c, g, or t
  misc_feature (299)..(299): n is a, c, g, or t
  misc_feature (352)..(352): n is a, c, g, or t
taaaatacaaatgttggccccagattcttttaacgtcaaggaaatgaataacagcttgtcagagacttcctatggaagaaagaattttttagatactatcattaggttggatatggtaatagatatatttcagaatagcaagtggtggtatatcttatccatatctttaggctgctgcagaattttaaggttatagataaagctgtgatattttatgcaaagactggctctaggtatttgaggagcacaatacagagattttaaaaagtgattttgtnaaaatctacactacggtctcngtttctccaaagtaagtgtttgtgatttgttcctcatactgcagtgagtaaanaagt

SEQ ID NO: 1344 - DNA, 327 bp, Homo sapiens
  I.1344 (H86026)
  misc_feature (280)..(280): n is a, c, g, or t
  misc_feature (286)..(286): n is a, c, g, or t
  misc_feature (307)..(307): n is a, c, g, or t
  misc_feature (322)..(322): n is a, c, g, or t
ttttttttttctctcattacaaaagttgatgttatttctcgtggtaaattcagaaaaacatcagggagtaaacaatgccaacatctgagcaaacattttggggtatatctctattttcatgtttacattgtcgtttaaaaaacaatcaaacgacattagcagttttacaacattttcctttccagttaaaactgtataccgttaccattttcccatcatactcttcacctacgatactgttttaagtgggctgtatagatttcccactttcacaacaganttagcnggattcccaaaacttggaatnatttaatttttaaanaaatt

SEQ ID NO: 1345 - DNA, 387 bp, Homo sapiens
  I.1345 (H85890)
  misc_feature (157)..(157): n is a, c, g, or t
  misc_feature (192)..(192): n is a, c, g, or t
  misc_feature (194)..(194): n is a, c, g, or t
  misc_feature (222)..(222): n is a, c, g, or t
  misc_feature (231)..(231): n is a, c, g, or t
  misc_feature (250)..(250): n is a, c, g, or t
  misc_feature (256)..(256): n is a, c, g, or t
  misc_feature (351)..(351): n is a, c, g, or t
  misc_feature (370)..(370): n is a, c, g, or t
  misc_feature (382)..(382): n is a, c, g, or t
ggtgagcggtccgggaggaaacacgcggccggccaagggccagggtgcggcgggagattttgggtgaagaggtgcgctgaccggccgagcttcctgcgcgtcctgggctcgttgtgggcgggggcgggacgactagcccgttacacgcgggccgcgncgctgagggggagggaggagctcgctcgaggcctnanggacagactgtacactgggggcttgccntttgaggangatggttaagatagctaantccttnggtagcgccaatgccaaataacccgttcgcctttttttctctgaaaatgttcccccaaaatggaggatttcgcagacttctgaagagcctgcttntttaagcagcgtttctttncttttcccagtnttttc

SEQ ID NO: 1346 - DNA, 491 bp, Homo sapiens
  I.1346 (H84851)
  misc_feature (1)..(1): n is a, c, g, or t
  misc_feature (63)..(63): n is a, c, g, or t
  misc_feature (66)..(66): n is a, c, g, or t
  misc_feature (255)..(255): n is a, c, g, or t
  misc_feature (343)..(343): n is a, c, g, or t
  misc_feature (391)..(391): n is a, c, g, or t
  misc_feature (454)..(454): n is a, c, g, or t
  misc_feature (472)..(472): n is a, c, g, or t
ncttgaaacgtttgccccatggaaacgtatgtgttgcaggagcctccctgcacggcccaaggnttncgttttcagtcttctgactgtcacctcgtggggttcagtagagaattcatgtgactagcgcctggccttgtgtggcttggaggaaatggtactgcccaaataggaggaaaacacagcctccctgagcctgcattctgcacgctgcccaggggctttcagaaaaggagtggccacagcaccccgaagagncatctgtttaactggcagtggctctcagagcagcagaacgggttcagttttagactctgaagttggttgtgattgacagaaccctttnggagcaaactagttagagttggattaaaattctggggtgaaacctttntcttcccacacaaattagtttttagtgattttttttcaattggtccattaatttgccaggggnagtttttttaggcagcantttttgattagatttacgt

SEQ ID NO: 1347 - DNA, 163 bp, Homo sapiens
  I.1347 (H84807)
  misc_feature (85)..(85): n is a, c, g, or t
  misc_feature (104)..(104): n is a, c, g, or t
  misc_feature (124)..(124): n is a, c, g, or t
  misc_feature (156)..(156): n is a, c, g, or t
taatattgcatgaaatgtttttgaagtagaaatgattatctgacaaaaaaactccttacactttgaccatctaaaaggttatttnctataaaattatataaatntttccatgtccatatatgancacaacgtttatgggcctaaaagttttaaaantcaacag

SEQ ID NO: 1348 - DNA, 387 bp, Homo sapiens
  I.1348 (H84048)
  misc_feature (1)..(1): n is a, c, g, or t
  misc_feature (2)..(2): n is a, c, g, or t
nntaagatggagtttcactccagcctggacaacagagtgaaaccctgtctctaaaaagtaaaatataaaaataaaactaaagttgaaaagacagcccaggccaaatcttagactattttaaattagccatggttaaacataggtgagttaaacattgtgcctttccaaaattaaggtttgcagttagaaacataaacatttgataaaacttctcaaaattaattatgagtggcttattcatgtcctttggattccagacacacactaggaaaaagtaaacgttaaagagggtgatattttgggaaagcatccctaggtactggaaaaggcatccctaggcactggaaaaaaggcatccctaggtactggaaaaggcatccctaacac

SEQ ID NO: 1349 - DNA, 409 bp, Homo sapiens
  I.1349 (H84047)
  misc_feature (313)..(313): n is a, c, g, or t
  misc_feature (357)..(357): n is a, c, g, or t
  misc_feature (396)..(396): n is a, c, g, or t
  misc_feature (407)..(407): n is a, c, g, or t
aggttgtggtgagccaaggttgcgccactgcactccagcctgggcaacaagagtaaaactccatctcaaaaaatatatatatatatataaatagggaattttttttaatgtttgctccttgagttttcaagatgaaataaggagaaaccccataactttttagctctcttttaaaaataaatgtctccttctgtgttctgtaatatgaggataaataatctacttttgatagcatgctttgagatatttgtattcttaatttaatattgaaggaaggggttggttcccatagtacctgggccagagggttatnataccatcctgtctctgggcccactgtgggtaattccacatccngggtaccaccgccatttcaggagttgtcttcaccccttnttcgtggcctntt

SEQ ID NO: 1350 - DNA, 463 bp, Homo sapiens
  I.1350 (H82897)
  misc_feature (4)..(4): n is a, c, g, or t
  misc_feature (79)..(79): n is a, c, g, or t
  misc_feature (302)..(302): n is a, c, g, or t
  misc_feature (358)..(358): n is a, c, g, or t
  misc_feature (403)..(403): n is a, c, g, or t
  misc_feature (410)..(410): n is a, c, g, or t
  misc_feature (435)..(435): n is a, c, g, or t
  misc_feature (440)..(440): n is a, c, g, or t
  misc_feature (446)..(446): n is a, c, g, or t
  misc_feature (458)..(458): n is a, c, g, or t
atancatttaaatattaaagtaactttatttgaaaggaattttagaagcttgtgtgcagagaagttgtgaggacctggnggacaccaattatatgcttaaataaacacttgaacactactgcaaacacatagtatgaatattgtggacctgtgaatggttttttaaatctcacttcccctaaaaatggggatttaatattacttaatattcaagtaatttagcagacaacgatgcctttgataagaatagggaaaaaagccacacatttaatttcatcttcatccagtttgggcctaggggncaccacaaatcttacagggccaggttggatgttcgctttttcatggctccgtcgcnggggctaagcttgaggcagctacagggctctaggggcccgggttngaagggncttttgaggccggggcagagttttntttgncaaccnttgctccccttnaccac

SEQ ID NO: 1351 - DNA, 404 bp, Homo sapiens
  I.1351 (H82896)
  misc_feature (355)..(355): n is a, c, g, or t
  misc_feature (365)..(365): n is a, c, g, or t
  misc_feature (388)..(388): n is a, c, g, or t
  misc_feature (394)..(394): n is a, c, g, or t
taatattttatacatggatgaatcagccagtgcagattcaatcaggatatgtgattttgggtttgcaaaacaacttcgaggagaaaatggacttctcttaactccatgctacactgcaaactttgttgcacctgaggttcttatgcaacagggatatgatgctgcttgtgatatctgggagtttaggagtccttttttacacaatgttggctggctacactccatttgctaatggccccaatgatactcctgaagagatactgctgcgtataggcaatggaaaattctgctttgagtggtggaaactgggacaatatttcagacggagcaaaggatttgctttcccatatgcttncatatgggancccacatcaggcgggtatgactnggctgnaaccaaatat

SEQ ID NO: 1352 - DNA, 341 bp, Homo sapiens
  I.1352 (H82822)
  misc_feature (88)..(88): n is a, c, g, or t
  misc_feature (122)..(122): n is a, c, g, or t
  misc_feature (277)..(277): n is a, c, g, or t
  misc_feature (292)..(292): n is a, c, g, or t
  misc_feature (329)..(329): n is a, c, g, or t
aatttactaaaggcactattgttaaacatcaaactaataacttgttgccaataaggtacatcgttgtaaacataacaaaattttaagngatacatggctaataagcaaacaatacaattttnagttacagctttcctacttacaagatcatgtcccttccagccattacaagggcatacagtgatgccattgctcccaacagttacctgggaagggagcttggagctcctaattggtttgagatcatgactgccaaggtctttaaggggctccaaangtcttcactcataanggtcaattctaaaattgctgggtttaggaaatcaagntacttggcttta

SEQ ID NO: 1353 - DNA, 421 bp, Homo sapiens
  I.1353 (H82767)
  misc_feature (7)..(7): n is a, c, g, or t
  misc_feature (352)..(352): n is a, c, g, or t
  misc_feature (393)..(393): n is a, c, g, or t
  misc_feature (407)..(407): n is a, c, g, or t
agtgctnttgacagatttacgtatgggctgatgaagaggccttcttaagttccagagtgctataatctagatgtaatgttgtcactaattaattgccattactcccagttagttacccttgtcatttggcattattttcagaaccacattttaaacctttgggtaatcagatttccaacttatgccttccagaaaaaaacactactgcctaacacaaatctgtgataacaacaggctgtgcttattttgataattttctgattccctagaagagaaccctctactttttgtaaggcactactgactctcgctgtatttaaggatggctgggtgaaggagctttttgctcttngcattaggatttggagggtggttttacattgtttggtttanttggttaaggtatncacttggcctaaaa

SEQ ID NO: 1354 - DNA, 271 bp, Homo sapiens
  I.1354 (H81747)
  misc_feature (139)..(139): n is a, c, g, or t
  misc_feature (146)..(146): n is a, c, g, or t
  misc_feature (174)..(174): n is a, c, g, or t
  misc_feature (238)..(238): n is a, c, g, or t
  misc_feature (249)..(249): n is a, c, g, or t
  misc_feature (254)..(254): n is a, c, g, or t
  misc_feature (261)..(261): n is a, c, g, or t
aacttgggagaaaagctgacattctccactgaatgggttaaaaaggaatgtaaaactacaaaatacttaagtgtgatttctaaattatggcaaacagaacaataaataccttgccatttttctttctaattttccaagntagattncattataaaaattgtttgataacaattnaagaagggaaaacaagggatactcataaaaaacattttactttaattatagggtacaaataagngtcttaacacngaaancctaccncctatttaag

SEQ ID NO: 1355 - DNA, 399 bp, Homo sapiens
  I.1355 (H81746)
tgtatttgagtaaagatgagtagtattaagaaaaacacacatttcttcacaaaatgtgctaaggggcgtgtaaagaatcaaaagaaactattaccaataatagttttgataatcacccataattttgtgtttaaacattgaaattatagtacagacagtattctctgtgttctgtgaatttcagcagcttcagaatagagtttaatttagaaatttgcagtgaaaaaagctatctctttgttcacaaccataaatcaggagatggagattaattctattggctcttagtcacttggaactgattaattctgactttctgtcactaaggcacttgggtatttgggccatctcccattccggaggccaccaaacgggtttaacacggatggtcccactagg

SEQ ID NO: 1356 - DNA, 307 bp, Homo sapiens
  I.1356 (H80355)
  misc_feature (76)..(76): n is a, c, g, or t
  misc_feature (165)..(165): n is a, c, g, or t
  misc_feature (168)..(168): n is a, c, g, or t
  misc_feature (238)..(238): n is a, c, g, or t
  misc_feature (241)..(241): n is a, c, g, or t
ttcggcacagtatagaactgagcaagcagctgtggccagatgccagtgcaagggtcctgatgcccactgccagcgntggccagccaggctgccatccaacccgtgcctccatgggggtcgctgcctagaggtggagggccaccgcctgtgccactgcccggtggntancaccgaacccttctgcgacgtggacaccaaggcaagctgctatgatggccgcgggttcagctaccgcctnggnccaggaccacgctctcgggtgcgccctgtcagccgtgggccttcggaggcaccttaccggaacgtg

SEQ ID NO: 1357 - DNA, 431 bp, Homo sapiens
  I.1357 (H80259)
  misc_feature (43)..(43): n is a, c, g, or t
  misc_feature (45)..(45): n is a, c, g, or t
  misc_feature (334)..(334): n is a, c, g, or t
  misc_feature (388)..(388): n is a, c, g, or t
  misc_feature (430)..(430): n is a, c, g, or t
cattttcaaagcactttattgagttcctgcgccatcctggcangnctggcagcactgggggaatgggacacaatcttgccttccatgccccagccactctctcactgcggaatcaccaaggagggaaagatgagtccctgagcaatcaggaaacggtgtgctcccggatccaggccaggtagtaggccacatcggtgtagacgcctggcttgttgcggtcaccacagcccgatccccagctgatgatgccttgcagggtgagccggcgctctgcagcttggtcctcacacaccagcgggcctccggaatcaccctgggcacgcatcggtgccgnccctcgaggaaccctgcgcagagcatggccggggaggatggaggatccgtgcangtccggggttgagcagcgttcagggagaggaacggtacttgng

SEQ ID NO: 1358 - DNA, 432 bp, Homo sapiens
  I.1358 (H79534)
  misc_feature (152)..(152): n is a, c, g, or t
  misc_feature (155)..(155): n is a, c, g, or t
  misc_feature (302)..(302): n is a, c, g, or t
  misc_feature (380)..(380): n is a, c, g, or t
  misc_feature (389)..(389): n is a, c, g, or t
  misc_feature (401)..(401): n is a, c, g, or t
ttactgaagaaaatgtactttattaaacagaaggctttctctcaaggccaagcccagtccccatgtgcagaaggagggtgtcagggtcacaggaacacctgcaaactggaagagaactcagtggtacttatgggccagggcaatggcgacanagnacaccagcttctgccagggcagcctgcacttcaggggtgaactccttgccaaagtgagtagccagaataatcaccatcacgttacccgggagcttgaagttctcaggatccacatggcagcttgtcacagtgcagcttcacttcagnttaggcaaagggcgggctttgagggttgtccatgttttttaataggcattttccaaaggggaggttcaggcacctttntttgacctnggggcttttganccttgggggtttgcccggggttggccagagg

SEQ ID NO: 1359 - DNA, 400 bp, Homo sapiens
  I.1359 (H79533)
  misc_feature (350)..(350): n is a, c, g, or t
  misc_feature (370)..(370): n is a, c, g, or t
gacacagctgcaatcactagcaagctctcaggcctggcatcatggtgcattttactgctgaggagaaggctgccgtcactagcctgtggagcaagatgaatgtggaagaggctggaggtgaagccttgggagaactcctcgttgtttacccctggacccagagattttttgacagctttggaaacctgtcgtctccctctgccatcctgggcaaccccaaggtcaaggcccatggcaaggaaggtgctgacttcctttggagatgctatttaaaaacatgggacaacctcaagcccgccttttgctaaagcttgagtgagctgcactgttgacaagctgcatgttggatncctgagaactttcaaagttnctgggtaaacgtgatgggtgaattattctt

SEQ ID NO: 1360 - DNA, 454 bp, Homo sapiens
  I.1360 (H79517)
  misc_feature (2)..(2): n is a, c, g, or t
  misc_feature (3)..(3): n is a, c, g, or t
  misc_feature (189)..(189): n is a, c, g, or t
  misc_feature (203)..(203): n is a, c, g, or t
  misc_feature (279)..(279): n is a, c, g, or t
  misc_feature (358)..(358): n is a, c, g, or t
  misc_feature (380)..(380): n is a, c, g, or t
  misc_feature (406)..(406): n is a, c, g, or t
  misc_feature (429)..(429): n is a, c, g, or t
  misc_feature (441)..(441): n is a, c, g, or t
  misc_feature (447)..(447): n is a, c, g, or t
  misc_feature (453)..(453): n is a, c, g, or t
anncctaaaaattatatttttaattatagaatattgttagaataatacaaacactaggataactgtgaccaataccataaggaaaactgttctacatattgatttgttcattaattctccacaaccatagaaaacaggcacaaagtgttcacgggatgtgcagaggcagccaggggacttgggagcagnaaggcatgcaaaanggcattaggtgaagggagtctgatgcatgagttctatacaaagttcaacacaggcaaacggggcaacaattgggcnggaaagagggaggacagctgggtgtgggcccttgtcccctttaaggtttccccggctaggattgtttcatggttggggngataggctggggtgcttaggangccttgtttttaggccctttcacctnccagggaggcccaaagcaggcgncgggactggttnggggtngggggnc

SEQ ID NO: 1361 - DNA, 445 bp, Homo sapiens
  I.1361 (H79419)
aatatgtggcagggttaaattgatttataaactccagggagtccagctgatgcccagaccagatggatcacttcacatctgctcagggtggttcctccagagccctgaactggtcacagacattaagctggaagtctgacattggcttgtcctgtgagcttgcctttttgggtctgagccttcccattagtcaatgcaaaaaagtgttgagctgccctggacattgttttggaaattattgatgtgctctgaatgttttcaggttcttaagtgaaaggtacaatccatttaaaaaagaatgtgtttgttttgcaaagctcagtacacaatattttccatttctggcggttccaagttccatttcacttcttcattggccaaatggggtggaactttccaaggcgctttttaaaaggtttaggccagtgaggagttatccggattt

SEQ ID NO: 1362 - DNA, 399 bp, Homo sapiens
  I.1362 (H79306)
  misc_feature (1)..(1): n is a, c, g, or t
  misc_feature (170)..(170): n is a, c, g, or t
  misc_feature (258)..(258): n is a, c, g, or t
  misc_feature (343)..(343): n is a, c, g, or t
  misc_feature (366)..(366): n is a, c, g, or t
  misc_feature (383)..(383): n is a, c, g, or t
ntcaaccataattagcaaatcatctcagctacctttaaaacacacatacacataaacacacactaaaatcttccatgatgaaatacatggagcacacatacaagctacatgaaaaagtagtttctgtgaattgctttattttctttttaaagccacctttgtagtacttngcttataatttgttaataaaatcaaccaccaatcacatgtgatagcatcttagagatcagtgccaatgactttcctttgagtttcttngtttgtaacttgtccactttccccagttagtcccatctggaagggtcccggggttttcgagggaggagggcaatttaatccagangttctcaattctttttgaaaatntttcagcaggtgaaggngtaggctctaggccat

SEQ ID NO: 1363 - DNA, 446 bp, Homo sapiens
  I.1363 (H78743)
  misc_feature (1)..(1): n is a, c, g, or t
  misc_feature (382)..(382): n is a, c, g, or t
  misc_feature (430)..(430): n is a, c, g, or t
naaatgtcaaagttctcctgttgcttctgtgagccactatgggtatcagcttgggagtggccatagatgaccgcatttccatgacctaactgtatttcacccccttttccttccctactgttcttgccccaccccaaccagttcctgctgctgcttttggcttcttggaggtgaagggcttaaaacaaggcttctaagcacccagctatctccatacatgaacaatctagctgggaaacttaagggacaagggccacaccagctgtctcctctttctgccaattgttgcccgtttgctgtgttgaactttgtataggaactcatggcatcaggactcccttcactaaatgctttttgcatggccttttggctcccaagtccngggctggcctctggcacatcccgtggaacattttgtggcctgtttttntatgggttgtgggaga

SEQ ID NO: 1364 - DNA, 400 bp, Homo sapiens
  I.1364 (H78362)
  misc_feature (337)..(337): n is a, c, g, or t
  misc_feature (351)..(351): n is a, c, g, or t
  misc_feature (362)..(362): n is a, c, g, or t
  misc_feature (398)..(398): n is a, c, g, or t
ataccaatgaaagaaattggtttaaatttcacagcattaacattactttttaagtaaaacagttcattgaagaaagtatgtatgcagcagtggaacatgggcctgtgctttgcagtgactccaacatcctgtgcctgtcctgggaaggggacgtgtcccaagagtgagaaggagaagcctgtgtgcagggagacgctactatgagggaaggctggctggccacgggcaacgggcgaggagtggttggggtgactttcacctctagtcactgtcgcaggggacaggagtacttccacagagggataaattttcaacctccgggggccacaattggcgnggttttgttaggantccggggcctnccagccgttgattattctggttgggtttcccggaantt

SEQ ID NO: 1365 - DNA, 333 bp, Homo sapiens
  I.1365 (H78361)
gcagactttctttacccgtgcagaccatatggaaaactggccattagtgatgtatttttctccccgggctcctgagccactggtgtcaagttgctccatctgattcttaaattaattttcatcagttgtaaaactctcaagtgtgcacaagaatgagcctgtcttcccgtgtgaatgtgtaagtacagaaagaaggttttaaatgcacatagacacacactcttcaactgccatacgaagcgtctgcttccccagtcatttcaggaaccatcagattattcacggctgggaggccctgggagttcttacaaatctcgctattgtggccccgga

SEQ ID NO: 1366 - DNA, 380 bp, Homo sapiens
  I.1366 (H77893)
  misc_feature (344)..(344): n is a, c, g, or t
atgaatgttctaaagaaaatttatgaagatggagacgatgatatgaagcgaaccattaataaagcctgggtggaatcaagagagaagcaagccaaaggagacacggaattttgagactttaaagtcgttttgggaactgtgatgtgatgtggaaatactgatgtttccagtaagggaatattggtgagctgcatatataaatttgacagatagctatttacatagccttctaagtaaaggcaatgaattctccatttcctactggaggatttatttaaataaaatatgcttattaaacactcctggcaaagatggttttattagtacccgggtccattttgttncaagggaaggggttatattgcattcttcacgtggaa

SEQ ID NO: 1367 - DNA, 417 bp, Homo sapiens
  I.1367 (H77844)
  misc_feature (214)..(214): n is a, c, g, or t
  misc_feature (313)..(313): n is a, c, g, or t
  misc_feature (314)..(314): n is a, c, g, or t
  misc_feature (340)..(340): n is a, c, g, or t
  misc_feature (386)..(386): n is a, c, g, or t
agagacaggttctcaatctgttacccaagctgcagtacagtggcatcatcatagctcactgcagccttaaactcctgggctgaagtgatcctccagccttagtagctgggattacgggcgccacttcatgcctggcttcaattgctttctctgatctaactgtgttggctaatacctccaggaaaataaagtaatggagatcacaggcactggntcctgacttcagggggaataggagtaattcctactaaaagcctgatttttctgacatactcctaggacaaataaatcataaaactgttctaatgaaggnnaaacttaactttattgagcctagggnataggacggggctttcaaattattttttggctttatgggtattacntttataaacctctggtccccggcaaactaac

SEQ ID NO: 1368 - DNA, 129 bp, Homo sapiens
  I.1368 (H77652)
  misc_feature (116)..(116): n is a, c, g, or t
  misc_feature (123)..(123): n is a, c, g, or t
aaactctggtgaaataggtttccataggacatcccattcaaaaaaaaaaattaatgtaaaccaacctgcctgtgggttagtcacactatacagacttcatcagagtgtttacaganacctagngtattt

SEQ ID NO: 1369 - DNA, 422 bp, Homo sapiens
  I.1369 (H77651)
  misc_feature (11)..(11): n is a, c, g, or t
  misc_feature (13)..(13): n is a, c, g, or t
  misc_feature (54)..(54): n is a, c, g, or t
  misc_feature (74)..(74): n is a, c, g, or t
  misc_feature (85)..(85): n is a, c, g, or t
  misc_feature (129)..(129): n is a, c, g, or t
  misc_feature (146)..(146): n is a, c, g, or t
  misc_feature (284)..(284): n is a, c, g, or t
  misc_feature (308)..(308): n is a, c, g, or t
  misc_feature (342)..(342): n is a, c, g, or t
  misc_feature (347)..(347): n is a, c, g, or t
  misc_feature (383)..(383): n is a, c, g, or t
aactgaaagananagagaagatggaagggaagggccagtgcaactgggcgcttnggccactccagccagaaagnctccggggganccctgctccacttccagaagccaggactaggacctgggccttgnctggctatggaatattnagagagattttttaaaaaagattttgcattttgtccaaaatcatgtgcttcttctgatcaattttggttgttccagaatttcttcatacctttttccacatccagatttcatgtgcgttcatgggagaagatcacttnagggccatttggtacacatctctnggaggctgagtcggttcatgaggtctcttatcanaaatnttactcagttttgcaagactggcattgttaactttnagcatacactgttgacttgacgtttcttcaaagttgcag

SEQ ID NO: 1370 - DNA, 420 bp, Homo sapiens
  I.1370 (H74219)
  misc_feature (1)..(1): n is a, c, g, or t
  misc_feature (10)..(10): n is a, c, g, or t
  misc_feature (359)..(359): n is a, c, g, or t
natcagtaanattacatctgcaaaacagctgggtttagcctaatattcctgagctggcttaaagagaaatctgagtctttcaggtaaagatgagcatgaaaattaatttgtatttattttttgtcagctactattttacccaaaaggatcaaacgttatagatatactacaaatcactttaaaacaagaggttcctcagtcagtcccaatccaaggatatgcattaaatctgaattactgttatatctatatactttaacccagcatgaggtctgggttaaccaaatgccaaagcaggttttgtgggtaagggcccatcatgaaaaaactaaggtcattattctacaaatctttaaggntttgtcttaaataaattcactgttcacactaaatttgtcttaaattaaattccaatggtaa

SEQ ID NO: 1371 - DNA, 356 bp, Homo sapiens
  I.1371 (H74205)
  misc_feature (229)..(229): n is a, c, g, or t
  misc_feature (252)..(252): n is a, c, g, or t
  misc_feature (264)..(264): n is a, c, g, or t
  misc_feature (330)..(330): n is a, c, g, or t
  misc_feature (351)..(351): n is a, c, g, or t
cagaaaagtctcaacaccacaatttatctgtttaatgttttcatttacatttggctttatcccaaaaagggtttaacagtgtcaccaagttaccaggtctctgtttcatcatatttacacaagatgaaggaaactcaatctgttcgtatttgccccaggtaataggttctatgtagtgacaggcatttcactatttgacttagtgtttgccaaaatgaagtaagggganttgggtccagagctgaggacagntccatttgggantgaaaggcataataaccttgaaggttattccagtgacaaaaaatgatccagtgaaaggttttctangggccaggccgggttgagggnggctg

SEQ ID NO: 1372 - DNA, 445 bp, Homo sapiens
  I.1372 (H73724)
  misc_feature (363)..(363): n is a, c, g, or t
  misc_feature (391)..(391): n is a, c, g, or t
  misc_feature (429)..(429): n is a, c, g, or t
  misc_feature (436)..(436): n is a, c, g, or t
ctgctagcaaatttactgcttttggccagaaaagaaatgctgaggacatggggttaactttctaatttgagaagactattttggtgaatcaccttcagtgaacaaatgcctgttatttactgaccaccttgagtctttaaaattgaattattcttgtcgtttacaaaaagtaacactttaaaagatcacagaatctctcacatacacacacacacacacacacacacacacacacatggcacacacacactcaaaaggtaccaaatcgggcccggcaggctggcggagaggttacattcataactcggctgtgccggggggtttaccccacttccacatggggcggcatttcagggttagggnaaatccatggggcgggcacatttgggtncggcggtttctttttttttggggttttttcggggggtntttgganacaaacggt

SEQ ID NO: 1373 - DNA, 471 bp, Homo sapiens
  I.1373 (H73294)
  misc_feature (202)..(202): n is a, c, g, or t
  misc_feature (206)..(206): n is a, c, g, or t
  misc_feature (257)..(257): n is a, c, g, or t
  misc_feature (267)..(267): n is a, c, g, or t
  misc_feature (369)..(369): n is a, c, g, or t
  misc_feature (382)..(382): n is a, c, g, or t
  misc_feature (390)..(390): n is a, c, g, or t
  misc_feature (407)..(407): n is a, c, g, or t
  misc_feature (412)..(412): n is a, c, g, or t
  misc_feature (454)..(454): n is a, c, g, or t
  misc_feature (465)..(465): n is a, c, g, or t
gaagcacacgcagctcgtggagcagctagatgagagctctgtctgagcccagcctcccagaacaaatgctcttccaagccagcctatctgtcccaggctgggccactgctccctaacacagccaccctcccttcattacccccactccatacccttctcccaactttttgatgtccctgtagggctggccagtcaggccagncaanagccccctcctcagtctccacagacccacatgtgagcagcccaggcccatnggtgctcctnagaggcagggctctgcagggtccatatggggctcaatgtcaccaccctctgcatggccctgtgtgctgggatgggtcctggaaaccagacaagtccttttgncagccacctaagncctgggtnaacatttcacatggcanaaatnggaaggaatgttttattgggtggggctggcagttgaccccanccttcaacttnttctgg

SEQ ID NO: 1374 - DNA, 434 bp, Homo sapiens
  I.1374 (H73962)
  misc_feature (92)..(92): n is a, c, g, or t
  misc_feature (308)..(308): n is a, c, g, or t
  misc_feature (410)..(410): n is a, c, g, or t
  misc_feature (415)..(415): n is a, c, g, or t
  misc_feature (433)..(433): n is a, c, g, or t
gtggggaaaaagggtgtttattaaccaacggcagggggaggagctgagcccaggctccccactctgtcacatgcctgtcccacccacctggntgtaagtgggggcattcctaaagaagtgtagccattctcacaataaatacattcattgtggggtggaggtgggagaggttgggtgaagggcagtaaaaacccgtgggattccacgttctcagctacaaaaataacagtcatcctcacccgaggggaatgggggagctcagtcagaattgattgtcccatataggcctagagacttcagaggccccngcccctgaaagtgccccggtgaggtagggacaggggtagggagctaagcgttccaaactcccagcctctgcccttttgcatagtttccaagaatggggtttnatgtngccagtttgagacatcang

SEQ ID NO: 1375 - DNA, 514 bp, Homo sapiens
  I.1375 (H73703)
  misc_feature (1)..(1): n is a, c, g, or t
  misc_feature (355)..(355): n is a, c, g, or t
  misc_feature (426)..(426): n is a, c, g, or t
  misc_feature (437)..(437): n is a, c, g, or t
  misc_feature (495)..(495): n is a, c, g, or t
nttcggcacaggcgatgcggatatacctctggaattggtgttccatttgccagtcaattatccttcatgtctacctggtatctcgattaactctgaacagttgaccagggcccagtgtgtgactgtgaaagagaagttacttgagcaagcagagagccttttgtcggagcctatggttcatgagctggttctctggattcagcagaatctcaggcatatcctcagccaaccagaaactggcagtggcagtgaaaagtgtactttttcaacaagcacgaccatgggatgatggattgtggataactcttttgcatttagatcacatgagagcaaagacttaaatatgtcaaaattntggagaagtgggcttcagattttaagggcttgacagggaaggactgatgttcatggggttaaaattattantgattttaacnacagggagacagaaacaacctcaaggtgccaaaaagtttaaatgttgagtatggatcngggccttttctgcttttaa

SEQ ID NO: 1376 - DNA, 602 bp, Homo sapiens
  I.1376 (H73128)
  misc_feature (1)..(1): n is a, c, g, or t
  misc_feature (100)..(100): n is a, c, g, or t
  misc_feature (395)..(395): n is a, c, g, or t
  misc_feature (404)..(404): n is a, c, g, or t
  misc_feature (410)..(410): n is a, c, g, or t
  misc_feature (472)..(472): n is a, c, g, or t
  misc_feature (480)..(480): n is a, c, g, or t
  misc_feature (486)..(486): n is a, c, g, or t
  misc_feature (506)..(506): n is a, c, g, or t
  misc_feature (546)..(546): n is a, c, g, or t
  misc_feature (591)..(591): n is a, c, g, or t
nttcggcacagcattgatcatttttatatgaaataaaaagatcctgcatttatggtgtagttctgagtcctgagacttttctgcgtgatggctatgcttngcacacaggtgttggtgatggggctgttgagatgcctgttgaaggtacatcgtttgcaaatgtcagtttcctctcctgtccgtgtttgtttagtacttttataatgaaaagaaacaagattgtttgggattggaagtaaagattaaaaccaaaagaatttgtgtttgtctgatactctctgtgtgtttctttctttctgagcggacttaaaatgggtgcccccagtgggatttggaagcggccgtgtacttccctcagggatgggacacaggctggtctgataactccagactgncagcttgtncaagtnaggcatgaggtgctccggggcagtgagggctgtgcaagggggaacactgagcagataccttnggcccctnccagcntttactgacagagagtttcngggtagacaccttaaaaaccaccctttgttctgagggggngaggttggaataggttgtacagtcagcaagggtttagtggtggtncccacgagttt

SEQ ID NO: 1377 - DNA, 434 bp, Homo sapiens
  I.1377 (H73225)
  misc_feature (360)..(360): n is a, c, g, or t
  misc_feature (397)..(397): n is a, c, g, or t
tggaaattgatgagaaaacagcttctgcatagtagctaatgcttatgtccatgtgtggttcttttgtagcgtgattggactcccaggagaagaagactggcctagagatgttgcccttcccaggcaggcttttcattcaaaatctgcccaaccaattgagaagtttgtaacagatatcgatgaactaggcaaagacctacttctgaagtgtttgacatttaacccagccaaaagaatatctgcctacagtgccctgtctcacccatacttccagggacctgggaaaggtgcaaagaaaacctgggattcccacctggccgcccagccaggaacaccttcgggagctggattacagccttnaggccttcaggcaggccgcctttaaggttgattcctngcgggagaacacctttggttggctttttggggttccc

SEQ ID NO: 1378 - DNA, 448 bp, Homo sapiens
  I.1378 (H73815)
  misc_feature (39)..(39): n is a, c, g, or t
  misc_feature (421)..(421): n is a, c, g, or t
aagttctgaaaatctccttccagggccccagctaactantgccataggtgagattcaaaccttcatccttctgtctccagggcctgatctttaccactgcaggggctgcaggccgttaagtggacaggaagtggccccacatagcccgagcagggtctggaagcatcctgtgctgtgcaacctgctctctcctctctcccaggcaggcagctgcaggcgctctcctccttctctgcctgtttccctcctctcttcctttccaccctggtgtgggttctcctgttctctctgtgctcttgcatttcttctcattccctttttcctctatttgagcagagcctgggagttttgagactatgggaatccaaaccttccccatttgcaaaagatgggggaaaattgagggtttagggaagagaantgaaatttgtgggagagtttataacag

SEQ ID NO: 1379 - DNA, 312 bp, Homo sapiens
  I.1379 (H73589)
  misc_feature (34)..(34): n is a, c, g, or t
  misc_feature (54)..(54): n is a, c, g, or t
  misc_feature (165)..(165): n is a, c, g, or t
  misc_feature (180)..(180): n is a, c, g, or t
  misc_feature (189)..(189): n is a, c, g, or t
  misc_feature (253)..(253): n is a, c, g, or t
  misc_feature (277)..(277): n is a, c, g, or t
  misc_feature (294)..(294): n is a, c, g, or t
gcttctccaaaattagtttttaatacattcaggnaggttatacaaagagttggncccgaggcctgggctgcggctgggcctgggaagtgacagcagccctgtgtagtgttttcaaagatcaggcgtggggacccacaccttggcctccaggctaaaggaggagtnttacgtgcagtagcncccgtgggnttgatcccaaccaggactgggtctgcctgggtgctccacacaccaccagggcctagccggcttnctgcccatttgactttcccttaanttcctctgggccttggngttctcctctgtaaaatg

SEQ ID NO: 1380 - DNA, 372 bp, Homo sapiens
  I.1380 (H62838)
  misc_feature (108)..(108): n is a, c, g, or t
  misc_feature (144)..(144): n is a, c, g, or t
  misc_feature (178)..(178): n is a, c, g, or t
  misc_feature (201)..(201): n is a, c, g, or t
  misc_feature (219)..(219): n is a, c, g, or t
  misc_feature (264)..(264): n is a, c, g, or t
  misc_feature (277)..(277): n is a, c, g, or t
  misc_feature (297)..(297): n is a, c, g, or t
  misc_feature (317)..(317): n is a, c, g, or t
  misc_feature (331)..(331): n is a, c, g, or t
  misc_feature (338)..(338): n is a, c, g, or t
  misc_feature (357)..(357): n is a, c, g, or t
  misc_feature (369)..(369): n is a, c, g, or t
ttttagaaaatttattatgaattccgagaagtctgctcatcatatacctcccccagccccaaataaaacaaacaacatgtttgtacataaagcctgggtttacttggnacaaaatttgagtctttgaaaaaaatagttaatggnaaatctcaataaaaattcattttgaaagtaaccngtactgttcaggaaataaggggngtcatgttacttgaggangtcaaacagttttattacaggaactatgtgtatatattttggggnttaaaacttgccnataggctgtttggaaagggntaggctcataatttattccnaatagggtattttnttaatcnaatgtttttggggttatcnaccataaccccntgg

SEQ ID NO: 1381 - DNA, 364 bp, Homo sapiens
  I.1381 (H62778)
acacaggataaagttattcttgtcattttgaactgtagagtcctatttcagtgtgatgaatcactgttgctttgaaaaatctcattatttctgggccgggcatggtggctcacccctgtaatcccagcactttgggaggccaaggcgggtggatcatgaggtcaggagatcaagaccatcctggccaacatggtgataccccgtctctactaaaaatacaaaaaaattagttgggcatggtggcatgcacctgtagtcccagctacctgggaggctgaggcaggagaattgcttgaacctgggaggcagaggttgcagtgagccaaaatcatgccactgcactcccgcctgggcaacagagcaa

SEQ ID NO: 1382 - DNA, 407 bp, Homo sapiens
  I.1382 (H62486)
  misc_feature (10)..(10): n is a, c, g, or t
  misc_feature (38)..(38): n is a, c, g, or t
  misc_feature (54)..(54): n is a, c, g, or t
  misc_feature (71)..(71): n is a, c, g, or t
  misc_feature (79)..(79): n is a, c, g, or t
  misc_feature (137)..(137): n is a, c, g, or t
  misc_feature (181)..(181): n is a, c, g, or t
  misc_feature (213)..(213): n is a, c, g, or t
  misc_feature (247)..(247): n is a, c, g, or t
  misc_feature (270)..(270): n is a, c, g, or t
  misc_feature (304)..(304): n is a, c, g, or t
  misc_feature (326)..(326): n is a, c, g, or t
  misc_feature (331)..(331): n is a, c, g, or t
  misc_feature (340)..(340): n is a, c, g, or t
  misc_feature (366)..(366): n is a, c, g, or t
  misc_feature (377)..(377): n is a, c, g, or t
  misc_feature (383)..(383): n is a, c, g, or t
  misc_feature (389)..(389): n is a, c, g, or t
  misc_feature (396)..(396): n is a, c, g, or t
  misc_feature (404)..(404): n is a, c, g, or t
gcataaaaancactacaaaaaccttacaaaagagcctnaaggagctcatggganccttccctgcctcggtncctgagcncccgggcagaggagggagacaggagaggaaggaagggaaatgctggcagtgttggganctcgaggagccgtgggaagtctggcgtgacaaggcacagggggnaggatggaggctgatgggactctcggcaggtnaggccacagccagggctgtgccaggacacgagtnccacgcggggctgaggacaacgnttcgcctcccgagccaccaccaggggcccgtctntccccaccctaggcctagggtntcccngggacaagntccaaagggcagcccttttccccccnccctttttacnctgggnaaaaanaaaaggncgggggtnttc

SEQ ID NO: 1383 - DNA, 614 bp, Homo sapiens
  I.1383 (H62455)
  misc_feature (478)..(478): n is a, c, g, or t
  misc_feature (530)..(530): n is a, c, g, or t
  misc_feature (541)..(541): n is a, c, g, or t
  misc_feature (575)..(575): n is a, c, g, or t
  misc_feature (585)..(585): n is a, c, g, or t
  misc_feature (593)..(593): n is a, c, g, or t
ctgacaccctgaggtctattcactgcatcccagtgatacaaagtggaggccactgccttctgacatctggctcaaaagcccagtgtctgtttccatttatttccctggaatttcatttaaaattggtatagagaaaaaaaggatgtgacagaagcagagatgaccagaaagcacaggggcagggttctgactggcgtgtgggagaccctgtggccggcacccacctccacacgaggactaagctctgatttttttatcttgcccaaattcctacctaaggggtctagggagtcgcgccttacaaatcataaattctcatcagatgggttttatttgaccctgtatatcatgacttatttttaatctgactatgggcataacattacaagacgaggcaaaaatattttaacccccaaatatattttccttggccctaccttggaacttggcctggcagagtctcttgtgagggaggatncacatcctattaaaggaagcccttttcccctttgttttccttcctttctttncagttcagggngttcatcaattaggggcagggaccctttttaagntcggttaggnacagtttnaaacctgttctttcttttttg

SEQ ID NO: 1384 - DNA, 320 bp, Homo sapiens
  I.1384 (H61825)
  misc_feature (28)..(28): n is a, c, g, or t
  misc_feature (31)..(31): n is a, c, g, or t
  misc_feature (188)..(188): n is a, c, g, or t
  misc_feature (212)..(212): n is a, c, g, or t
  misc_feature (223)..(223): n is a, c, g, or t
  misc_feature (237)..(237): n is a, c, g, or t
  misc_feature (248)..(248): n is a, c, g, or t
  misc_feature (274)..(274): n is a, c, g, or t
  misc_feature (304)..(304): n is a, c, g, or t
ccgttacaaatagcaccgagcccttggntgncccctgtggagagggatccccctcctggacccccacctcctcccctgagctacccatgtagtgtctgggagctggcacacggcccagggtccctctggaagctgggccaggccaaggggttaggcccaggcccttcgtggggtgggcccagggcagnctgtggcagatgtgcaggtaggtnagcggcagctntcagatgagcacantggccacgggnacgcgggtggagcggccccttgggancccacaatccggtcgtttgtgggaccctgnttcgtgcagcaggccc

SEQ ID NO: 1385 - DNA, 377 bp, Homo sapiens
  I.1385 (H61824)
  misc_feature (41)..(41): n is a, c, g, or t
  misc_feature (259)..(259): n is a, c, g, or t
  misc_feature (263)..(263): n is a, c, g, or t
  misc_feature (296)..(296): n is a, c, g, or t
  misc_feature (374)..(374): n is a, c, g, or t
ggagagaccctcctgtccatgaactgggccatcgtggcgancattctgctgtacgtggtgatccctacccgacgctccaccgccgaggccttccagatcgtgctgtcccacctgctgggtgatgctgggagcccctacctcattggcctgatctctgaccgcctgcgccggaactggcccccctccttcttgtccgagttccgggctctgcagttctcgctcatgctctgcgcgtttgttggggcactgggcggcgcantttnctgggcaccgcattcttcattgaggccgaccgncggcggcacagctggcacgtgcagggcctgctgcagtaagcagggttccacagacgtaccggattgtggtgccccagnggg

SEQ ID NO: 1386 - DNA, 195 bp, Homo sapiens
  I.1386 (H61518)
  misc_feature (12)..(12): n is a, c, g, or t
  misc_feature (50)..(50): n is a, c, g, or t
  misc_feature (131)..(131): n is a, c, g, or t
  misc_feature (171)..(171): n is a, c, g, or t
  misc_feature (183)..(183): n is a, c, g, or t
tgtcccaggtantggccaacctgagttgggacaccctgcacccacctctngtgtgggagaggcccaccaaggtccggctgcctaagctgtatctgaaacaccaaatggacctggttgccaccctcagccanctgggcctgcaggagttgttccaggccccagacctgcgtngggatctccgancagagcctggtt

SEQ ID NO: 1387 - DNA, 440 bp, Homo sapiens
  I.1387 (H61449)
  misc_feature (303)..(303): n is a, c, g, or t
  misc_feature (313)..(313): n is a, c, g, or t
  misc_feature (385)..(385): n is a, c, g, or t
  misc_feature (392)..(392): n is a, c, g, or t
  misc_feature (399)..(399): n is a, c, g, or t
  misc_feature (423)..(423): n is a, c, g, or t
  misc_feature (428)..(428): n is a, c, g, or t
tgagccaaatatgagtggccatggccgtgacacagacctcaggagggcctgggaacatgtgcccaaggtggtcgaggtacagcttggttttatacattttagggaggaatgaggcatcaatcaaatacatttaagaaatacattggttgagttcagaaaggcaggacaactcgaagcagcgggggtgggtgcttccagggctgtaggtaaatttaaacattttctggttgacaattgggttgagcttagctgaagacctggggatcaatgggaaagggaatgttcagggttaaggataaaggntccgtgggangcccaagtttttatttgtgcagggggaagctctcagccagacttccaggaggaggaggagagagccgggttnttaaacncttttcnttatcccacttttaaaagggggtnccccnggggttctttag

SEQ ID NO: 1388 - DNA, 238 bp, Homo sapiens
  I.1388 (H60621)
  misc_feature (59)..(59): n is a, c, g, or t
  misc_feature (66)..(66): n is a, c, g, or t
  misc_feature (102)..(102): n is a, c, g, or t
  misc_feature (128)..(128): n is a, c, g, or t
  misc_feature (136)..(136): n is a, c, g, or t
  misc_feature (164)..(164): n is a, c, g, or t
  misc_feature (210)..(210): n is a, c, g, or t
  misc_feature (222)..(222): n is a, c, g, or t
  misc_feature (231)..(231): n is a, c, g, or t
tgtattttgttttatttttatttagaagtagagaatacagtaatagtgaggcaggagancaggganttaggatagccaggggtaggggcataagcaaaggantagcaggtgcagccagtttgcataancaagagancagcaggtgcagccggttctaggaagancaggcagcatgcaggccacatcctcatgcctttatcagtcggcgantactgtaagaanttaagaggntcgttcc

SEQ ID NO: 1389 - DNA, 464 bp, Homo sapiens
  I.1389 (H60620)
  misc_feature (385)..(385): n is a, c, g, or t
  misc_feature (418)..(418): n is a, c, g, or t
  misc_feature (423)..(423): n is a, c, g, or t
  misc_feature (435)..(435): n is a, c, g, or t
  misc_feature (441)..(441): n is a, c, g, or t
gcaggaaccagctcatgatctcaggatgtatggaaaaataatctttgtattactattgtcagaaattgtgagcatatcagcattaagtaccactgaggtggcaatgcacacttcaacctcttcttcagtcacaaagagttacatctcatcacagacaaatggagaaacgggacaacttgtccatcgtttcactgtaccagctcctgtagtgataatactcattattttgtgtgtgatggctggtattattggaacgatcctcttaatttcttacagtattcgccgactgataaaggcatgagggatgtgggcctgcatgctgcctggatcttcctaggaaccgggctgcacctggctgttctcttgtttatggcaaactgggctngcacctgctatttccttttgcttatggcccctnacccnggggctattccnaatttncctgtttttcctggcctcactat

SEQ ID NO: 1390 - DNA, 333 bp, Homo sapiens
  I.1390 (H60210)
  misc_feature (43)..(43): n is a, c, g, or t
  misc_feature (45)..(45): n is a, c, g, or t
  misc_feature (48)..(48): n is a, c, g, or t
tggagtgatagcccccaaaccccagtcccaccaggccctgagncnctnttgtcactggatctgataagaaacaccacccctgcagccccctcccctcacctgaccaatggccacagcctggctgggcccagctccctgtatataaggggaccctgggggctgagcactaccaaggccagtcctgagcaggcccaactccagtgcagctgcccaccctgccgccatgtctctgaccaagactgagaggaccatcattgtgtccatgtggggccaagatctccacgcagggccgacaccattcggcaccgaggattttgggagaggctttttcct

SEQ ID NO: 1391 - DNA, 364 bp, Homo sapiens
  I.1391 (H60168)
  misc_feature (2)..(2): n is a, c, g, or t
  misc_feature (6)..(6): n is a, c, g, or t
  misc_feature (141)..(141): n is a, c, g, or t
  misc_feature (151)..(151): n is a, c, g, or t
  misc_feature (175)..(175): n is a, c, g, or t
  misc_feature (244)..(244): n is a, c, g, or t
  misc_feature (289)..(289): n is a, c, g, or t
  misc_feature (309)..(309): n is a, c, g, or t
  misc_feature (331)..(331): n is a, c, g, or t
  misc_feature (347)..(347): n is a, c, g, or t
  misc_feature (360)..(360): n is a, c, g, or t
antatnttcattggtttattggcgcattacgggttaagtggggctggggaacctccaggacgggggaggggccgcagctgtcctgggggtcccggagcggcgctcagcggtacttctcggtcaggacagaggatacgaccnatagaacttntcccaggcggcgtgggcctcggcntgaagtcggcggggaagcgcgcggccagggtgaccagcaggcagtgggacaggagcttgaagttgaccnggtccacgcgcaggatttagggcgtgcagcttcgcttcagctttnggacaggggcgccgccaatnttcgttcgatgctctttcaccncgttcgcccacgggcncaacaaacctttnggag

SEQ ID NO: 1392 - DNA, 250 bp, Homo sapiens
  I.1392 (H60027)
  misc_feature (23)..(23): n is a, c, g, or t
  misc_feature (99)..(99): n is a, c, g, or t
  misc_feature (136)..(136): n is a, c, g, or t
  misc_feature (185)..(185): n is a, c, g, or t
  misc_feature (196)..(196): n is a, c, g, or t
  misc_feature (223)..(223): n is a, c, g, or t
  misc_feature (245)..(245): n is a, c, g, or t
ttacctttaacaggctccgcagncactgaacgcctgcagacactgcttcatgtgccctttaatgctgatcaatttccagattcaacagttacacaaatnacattgtcatgaaaaacagaagaaaaagccccaaagnctttttcagacctcccctccttacccaaaatacagacacacaggcaagnactctcataanttcaaattcatcatttgagaggttgangcctccaagggcttcttctagnctcca

SEQ ID NO: 1393 - DNA, 435 bp, Homo sapiens
  I.1393 (H53259)
  misc_feature (23)..(23): n is a, c, g, or t
  misc_feature (55)..(55): n is a, c, g, or t
  misc_feature (259)..(259): n is a, c, g, or t
  misc_feature (282)..(282): n is a, c, g, or t
  misc_feature (312)..(312): n is a, c, g, or t
  misc_feature (380)..(380): n is a, c, g, or t
  misc_feature (390)..(390): n is a, c, g, or t
  misc_feature (409)..(409): n is a, c, g, or t
  misc_feature (432)..(432): n is a, c, g, or t
gcagaataaagcctatccttganagccctgaatcatgggcaagaggctcagtggnatctggaggacagggcactggccactgcagtcaccatcttctgccagggagcctgcacctcaggggtgaattctttgccgaaatggattgccaaaacggtcaccagcacatttcccaggggcttgaagttctcaggatccacatgcagcttgtcacagtgcagttcactcagctgggcaaaggtgccttgagatcatccagggngctttatgggcatctcccaaggnagttcaggcaccttcttgccatgtgccttnactttgggggttgcccatgatgggcagaggcagaggacaggtttgccaaagcttttaaaggacctttnggtcctgggntagacaaccgggggccttnccagggttttcctccagcttttncaa

SEQ ID NO: 1394 - DNA, 424 bp, Homo sapiens
  I.1394 (H53258)
  misc_feature (283)..(283): n is a, c, g, or t
  misc_feature (295)..(295): n is a, c, g, or t
  misc_feature (366)..(366): n is a, c, g, or t
  misc_feature (402)..(402): n is a, c, g, or t
  misc_feature (419)..(419): n is a, c, g, or t
aataagctcctagtccagacgccatgggtcatttcacagaggaggacaaggctactatcacaagcctgtggggcaaggtgaatgtggaagatgctggaggagaaaccctgggaaggctcctggttgtctacccatggacccagaggttctttgacagctttggcaacctgtcctctgcctctgccatcatgggcaaccccaaagtcaaggcacatggcaagaaggtgctgacttccttgggagatgccataaagcacctgggatgatctcaagggcacctttncccagctgagtnaactgcactgtgacaagctgcatgtggatcctgagaacttcaagctcctggggaaatgttgctggtgaccnttttgggcaatccattttcggcaaagatttcacccntgaggtgcaggtttctnggcag

SEQ ID NO: 1395 - DNA, 353 bp, Homo sapiens
  I.1395 (H52723)
  misc_feature (28)..(28): n is a, c, g, or t
  misc_feature (29)..(29): n is a, c, g, or t
  misc_feature (286)..(286): n is a, c, g, or t
  misc_feature (325)..(325): n is a, c, g, or t
  misc_feature (344)..(344): n is a, c, g, or t
agaatataaaaacagccctgttccaggnnctggctgttaaaacgtgactgcacagccttaaccccaaaggaaaagcaaccctttcccaccccgaaacagcctcttcctgcacatgcccctccccaccccctggaaatagacgataaggcaacccccatgcaccctgcccccagcaccagaagagtcctaaggatggtcccagggccaggctcctcagtctccctcttcagaggcgagtaggagctccttgcagaagacagacccccacctgacttccatctgcagnaatatgccagcaccctggggaaagcaggttcatgtatgnaccctgctaggaggtcctnaggttttag

SEQ ID NO: 1396 - DNA, 411 bp, Homo sapiens
  I.1396 (H52721)
  misc_feature (20)..(20): n is a, c, g, or t
  misc_feature (59)..(59): n is a, c, g, or t
  misc_feature (71)..(71): n is a, c, g, or t
  misc_feature (108)..(108): n is a, c, g, or t
  misc_feature (138)..(138): n is a, c, g, or t
  misc_feature (206)..(206): n is a, c, g, or t
  misc_feature (227)..(227): n is a, c, g, or t
  misc_feature (364)..(364): n is a, c, g, or t
  misc_feature (378)..(378): n is a, c, g, or t
  misc_feature (385)..(385): n is a, c, g, or t
  misc_feature (396)..(396): n is a, c, g, or t
  misc_feature (402)..(402): n is a, c, g, or t
ttcccctcactgcagcaggnaaccagccccatctccactcccttccgacctagacctgnccagagcagganacctcctcaccccaccctggggccctgcctgagtcantctccgtcccccttcccccaccccaggcantggggtccgggagacagtcccagccgggctgagggagggaggcagccacagcctcccagtccctccantctggccgtccagactcagtnttccagggccagaagggaagcagggaggctggaggacagggtaaaacatttgcccagggtagtgttaaacagctggaaattgctgctagaggaggaggcttggctgaatgactgaattaataggacatgtacagggnttacgaaaggactnaaatgtnaaaattttggnttgggngatttaccc

SEQ ID NO: 1397 - DNA, 209 bp, Homo sapiens
  I.1397 (H52446)
ttagaacatttaacttgtaggaaaagaagaggcaaaacatttctgggcaagaggaaagcagttgcagtaccaaaatctaaacacttttggcaaggcttctaaacagcaaatgaactaattatatatccaaaacaaatccattgaaaaatgccatttttgtttcatagacagagaataatgggcatgctcatattaggatattatatata

SEQ ID NO: 1398 - DNA, 509 bp, Homo sapiens
  I.1398 (H52445)
  misc_feature (356)..(356): n is a, c, g, or t
  misc_feature (406)..(406): n is a, c, g, or t
  misc_feature (438)..(438): n is a, c, g, or t
  misc_feature (447)..(447): n is a, c, g, or t
  misc_feature (457)..(457): n is a, c, g, or t
  misc_feature (472)..(472): n is a, c, g, or t
  misc_feature (482)..(482): n is a, c, g, or t
  misc_feature (487)..(487): n is a, c, g, or t
  misc_feature (498)..(498): n is a, c, g, or t
tgacagattaaacagattgtgggaaccaaacacccagaagactccctgtgagatggtgcctaaaacatgtcactgttgatatttttaacagcccaggtcattcctttactttcaaatcttcaagaattggatttatcagccaacaaaaagatgggcagttcttctgaaaacttactcagcaggctccgatttttaccagcattgaagtcattagttatcaacaactgtgctttggagagtgagacttttacagctcttgctgaagcctctgttcacctctctgctctggaagtattcaacctttcttgggaacaagtgtgttggtggcaacttgaagctgcttctgggaaacactnaaagctttccatgttctcttcaagttgctgaggctgagcagctgtttccngggtgacagagggttgttggcttttctggggntccggtcanaacagtcggntcatttgggccaaantgcaaaagcnggacncgaggtacatngacagcttttt

SEQ ID NO: 1399 - DNA, 430 bp, Homo sapiens
  I.1399 (H52104)
  misc_feature (33)..(33): n is a, c, g, or t
  misc_feature (42)..(42): n is a, c, g, or t
  misc_feature (46)..(46): n is a, c, g, or t
  misc_feature (82)..(82): n is a, c, g, or t
  misc_feature (275)..(275): n is a, c, g, or t
  misc_feature (285)..(285): n is a, c, g, or t
  misc_feature (301)..(301): n is a, c, g, or t
  misc_feature (405)..(405): n is a, c, g, or t
  misc_feature (421)..(421): n is a, c, g, or t
  misc_feature (429)..(429): n is a, c, g, or t
acactttcctgggctttcctaatatggtctggnctctttccngggncttctttgcaggcccacccacctccactttaccttngaacatcagccttcctaatgacttaattgtagctcttcttttcttctcccaaggctttagttgctatttatatgctggcaacttccaaatttatctcttcagcccagttttctttctgagcctctaaaattacaaataaacatattcaaggacatctcagatgcatcatgtacaaactgaatttataattctnttataccttngcaactcattcctttngggccttttgggacgtagtgaggtaaccaggccttcttgatgggggaactcaagggatacatctcaaatcccttcacttctttttacatcccttaggggaaggncactgttctttacaanggggtagng

SEQ ID NO: 1400 - DNA, 402 bp, Homo sapiens
  I.1400 (H51984)
  misc_feature (173)..(173): n is a, c, g, or t
  misc_feature (272)..(272): n is a, c, g, or t
  misc_feature (303)..(303): n is a, c, g, or t
  misc_feature (347)..(347): n is a, c, g, or t
  misc_feature (395)..(395): n is a, c, g, or t
tgctataaacttcgtgctttttcaagcaattgcggttctcctgtctagcccgctgccactggactatgctgtaagtcctctctataaactctatgtcttgcttactggctctgggtctcctctgtagcctctcaaacatggggccatccctaaaagtcaacagggctccaggntgatggcacatggagctctactaattctctcaatgtatacacctctgagactgaactctaattcctgtaaacctgaactactttcaactttccagtggntttgggccaaaaaccttaggtcattcttcanttctctctcttcacaattgcagggcatttctgtcaaaaaatccntttcattttaactggcaaaatgttgtccaggaaggctggacccctttnaaaaact

SEQ ID NO: 1401 - DNA, 414 bp, Homo sapiens
  I.1401 (H51953)
  misc_feature (4)..(4): n is a, c, g, or t
  misc_feature (7)..(7): n is a, c, g, or t
  misc_feature (203)..(203): n is a, c, g, or t
  misc_feature (264)..(264): n is a, c, g, or t
  misc_feature (298)..(298): n is a, c, g, or t
  misc_feature (313)..(313): n is a, c, g, or t
  misc_feature (337)..(337): n is a, c, g, or t
  misc_feature (357)..(357): n is a, c, g, or t
  misc_feature (366)..(366): n is a, c, g, or t
  misc_feature (398)..(398): n is a, c, g, or t
aagnagngagggcctaagaggctcactgccctatctgccttctttcctcacgcccttccaaggactccggcttcccaggacctgtgttcctacccacactctgttcaggagttcctaccacttgcatcctctgctggtaagggagccactgttgtcctctcctgggccctgggcacaaactttgccctcacccccaggtcccnagaacttattattttggagtgagaaggttgagagttggggtgtttctgtccatctatggtnctgttcccgccatcaagttcatactctcttactnacatttctgggatgnaagcagggcagggggttctttgtnttccatggaaagggggaaantggttatcntgaggttggttttttggaggaaacatggggcntagggaaaggtgaacc

SEQ ID NO: 1402 - DNA, 209 bp, Homo sapiens
  I.1402 (H51950)
  misc_feature (51)..(51): n is a, c, g, or t
  misc_feature (99)..(99): n is a, c, g, or t
  misc_feature (145)..(145): n is a, c, g, or t
  misc_feature (157)..(157): n is a, c, g, or t
  misc_feature (173)..(173): n is a, c, g, or t
  misc_feature (191)..(191): n is a, c, g, or t
caacttttcgttcagtgggacttgcttcacgtcccctgcctcaagattctncctcagcaaaggcctggggctgggcattgtggctggctcacttctagntaaagctgccccaggtgtttaaaatcctgggagccaagagtgcctnaaggtttaagtntccatcctgtaaatgntggaactagtggccattnactgggaccatggttaca

SEQ ID NO: 1403 - DNA, 459 bp, Homo sapiens
  I.1403 (H51678)
  misc_feature (344)..(344): n is a, c, g, or t
  misc_feature (449)..(449): n is a, c, g, or t
  misc_feature (459)..(459): n is a, c, g, or t
aacaacataggtcactttaaatgttctagtagcaacttttaaaaacataaaaagaagcaggtgaaaatgttaataaaagtttatttaatccaacatttgccaaatatttcaacatataaaaatatattagtgagacattttacattctctttttcatactaagctttcgaaatctggtgtgtattttacactttctgcacatctccatttggatgctaatgttcattggacatacttgatctgtatttagatttcatacaacttacagttgaaaacagattctcatatcaagtagctaagacaaaagtttttttcaagaattgaaataagtatcagtttaaaantttatattaaatttattaaaattaaaatcccagttcccttgttgcctggggacacagtgccaaatgcttgataaggcacctgtgggctagtggcccgccatattnggaccgcctn

SEQ ID NO: 1404 - DNA, 354 bp, Homo sapiens
  I.1404 (H51585)
aaagggtgtggccggccgaggagtgcgggggagtgtgcgccgcgggcactgcagcagccgcaccacctcctcccgtagccctccctccgtccagcagccgcctctgtcgcgctgcagtctggcggctggaggcttgaaggtggctgcccgagggtcgtccaggggccggggctgggtcctagcgggtacccggggataaaagcgagaaaagagagaaccgtatggctttaagtaggtaaaaagtctcgaggaggatgggaaagacttagggaaacctttgagaggtaacgggaccagggatttccagggagcagcaaagccgcgagtggcaccaaaagcaagagggacgtttca

SEQ ID NO: 1405 - DNA, 461 bp, Homo sapiens
  I.1405 (H51092)
  misc_feature (2)..(2): n is a, c, g, or t
  misc_feature (3)..(3): n is a, c, g, or t
  misc_feature (6)..(6): n is a, c, g, or t
  misc_feature (7)..(7): n is a, c, g, or t
  misc_feature (202)..(202): n is a, c, g, or t
  misc_feature (308)..(308): n is a, c, g, or t
  misc_feature (416)..(416): n is a, c, g, or t
  misc_feature (428)..(428): n is a, c, g, or t
  misc_feature (436)..(436): n is a, c, g, or t
  misc_feature (443)..(443): n is a, c, g, or t
  misc_feature (461)..(461): n is a, c, g, or t
anncanncctcagcatcatttaatctgttgctcacaacatttataacacaagaaccaactgtagaaaatacagagtagaggtgagtttcaagaagcactgggcaagcacttgaataactgattttgatggtaagagctccagtcatcccaaggcagaccctcttctgggagaaaaccaaagattcaccttcaaaacgaggtntttcaggagccccaaagcataacattctatttcctaaggaaacacactctatatttctgttaaaacaatttaaaaaatgggtacacatttaggtaggaaaatgganttgtggaaacactggcactaggcaacatcatttctcaagggacacatgaggaagtacttttcatgtttcacggacatttcttttggggggactccaagtcctttaacntttttttttttngagacggngctcggntctgtcgccgggggtttn

SEQ ID NO: 1406 - DNA, 303 bp, Homo sapiens
  I.1406 (H50923)
  misc_feature (27)..(27): n is a, c, g, or t
  misc_feature (78)..(78): n is a, c, g, or t
  misc_feature (141)..(141): n is a, c, g, or t
  misc_feature (208)..(208): n is a, c, g, or t
  misc_feature (236)..(236): n is a, c, g, or t
  misc_feature (250)..(250): n is a, c, g, or t
cgatctccaggagagggccccagccanaccccatggaccagccctctgctccctccgaccccactgaccagccccccnctgctcacgcaaagccagacccaggttctgggggccaacctgctggccctggcgcggcgggtnaggccctggcggtgctgacttcattcgggaggcggttgctggtgctgatacctgtgtatttggccgnggcagtgggactcagcgtgggtttcgtnctcttcggcctcgncctctacctgggctggcgccgggtccgcgacgagaaagaacggagccttcgag

SEQ ID NO: 1407 - DNA, 438 bp, Homo sapiens
  I.1407 (H50623)
  misc_feature (11)..(11): n is a, c, g, or t
  misc_feature (16)..(16): n is a, c, g, or t
  misc_feature (262)..(262): n is a, c, g, or t
  misc_feature (304)..(304): n is a, c, g, or t
  misc_feature (420)..(420): n is a, c, g, or t
  misc_feature (426)..(426): n is a, c, g, or t
tccatgttttntaatnatttaataatgtaatgtgtttgtggcacaggaggagtacagatgcatgggaggaaggaagcgttaggtaaaggggagcacaaaacttggaagatgaggggctgccatcaatgctgggacttcaggccaaaggatgagctgaggcagccacaggggaggacattttctgcagagttgctgaaccagtagcaaccaggtccggagaaaggtctctcttgtggaagaatgagagccaagcggggaagtntttcatcctgcaaagctggggcagaaggtttttccttgaatntggtcatcttcacttcagctcaggaatcctgttggctgaagtccagagtgtcctttctgattcctgaagtagatgaacaacccggccccaagggaagagcaggcccagcacaaagnccccgntttccattcagc

SEQ ID NO: 1408 - DNA, 457 bp, Homo sapiens
  I.1408 (H50622)
  misc_feature (408)..(408): n is a, c, g, or t
  misc_feature (427)..(427): n is a, c, g, or t
  misc_feature (437)..(437): n is a, c, g, or t
gtatcctgccaagactcagcccctgcagcaccacaacctcctggtctgctctgtgagtggtttctatccaggcagcattgaagtcaggtggttccggaacgccaggaagagaaggctggggtggtgtccacaggcctgatccagaatggagactggaccttccagaccctggtgatgctggaaacagttcctcggagtggagaagtttacacctgccaagtggagcacccaagtgtgatgagccctctcacagtggaatggagagcacggtctgaatctgcacagagcaagatgctgagtggagtcgggggctttgtgctgggcctgctctttccttggggccgggttgttcatctacttcaggaatcagaaaggacaatctgggaatttcagccaacaggattcctnaggttgaagtgaaggtgancacattcaanggaaaaactttttgccccag

SEQ ID NO: 1409 - DNA, 289 bp, Homo sapiens
  I.1409 (H50334)
  misc_feature (37)..(37): n is a, c, g, or t
  misc_feature (166)..(166): n is a, c, g, or t
  misc_feature (232)..(232): n is a, c, g, or t
  misc_feature (257)..(257): n is a, c, g, or t
  misc_feature (264)..(264): n is a, c, g, or t
  misc_feature (273)..(273): n is a, c, g, or t
taaacaagttagttttattttactccctttcctcttnaggctgggtctgaattaggggggaggacagacaggccacaggaggaacccagagccccattcccccagcatggccaagcccccaggccctgaccaccacccattgggtccaagctgcaaggcatatcancatctctgcagaacttcaagcctcccagaggaacggaaggccggcatcgcagaagctcaaagaggntatggtcctgtccaccctaggtttnccagctncccagtctntctcagtttggggttt

SEQ ID NO: 1410 - DNA, 378 bp, Homo sapiens
  I.1410 (H50266)
  misc_feature (370)..(370): n is a, c, g, or t
gagggttcaccatcttggccgtgctggtcttgaactcctgaccttgtgattctcctgcctcagcctcccgagtagctgggactacaggcgcgcgcgcaacgcccggctaatttttatatttttagtagagacggggtttcaccatgctggccaggctggtctcgaaccccgacctcgtgatccgccctccttagcctcccaatcctctcttaaaaaagtgatagctcagaaacatttgtaaaagcaaggtttttatttcattttgggctctgtcattttcagagggcaaagaagttgggcctgtaaaataggagtgctaggagctcttacggcccctcccttcttcccaactttcctatttcctaggccntttattca

SEQ ID NO: 1411 - DNA, 383 bp, Homo sapiens
  I.1411 (H50255)
  misc_feature (322)..(322): n is a, c, g, or t
tccattgggatatctgattgacccagcatcattttctaaaagatgcctttcctcattgcactgcggcgcctcctgtgtgcttttgacagggatgacagggatgaggatgataaagaataggcatagcgtgtctttctcttgtgagacacagggattccaactcctattctcaatcttaaaaagaagttatttttcctcctccaagtgggaattttactagtgcttctgcttccagggataccaagggttcgagttttgggaggatgaagaggggtcgaaggacattgaattgttcagatgacccttatgactgcatacggantaagtgtgggagaatgtcccctgcattgtcactctgtggcaagatgggttattcggcatgt

SEQ ID NO: 1412 - DNA, 357 bp, Homo sapiens
  I.1412 (H50231)
  misc_feature (201)..(201): n is a, c, g, or t
  misc_feature (238)..(238): n is a, c, g, or t
  misc_feature (242)..(242): n is a, c, g, or t
tattttaccatcatgcataaaaaggaagacaaatatgccaatggtacacttccaatttgtcagagcaatttcacagtatttaagcaatttaggaaaaaagatatatcacttactaagttgttaccagggaaaattatcatgtaagacaatcaattaaaccatacttttgtagattatttttccatgaaggcaatttgacangcctaacaaagaccaagttgttcaaactatgtttctnggantatagtttaacagaaacaagaacaagttgaaaactgttatgactattcatatgtctctatattgtacagggcaagtaagactgttgttcttccaaatgttcccaattgaaatcaa

SEQ ID NO: 1413 - DNA, 532 bp, Homo sapiens
  I.1413 (H50222)
  misc_feature (6)..(6): n is a, c, g, or t
  misc_feature (8)..(8): n is a, c, g, or t
  misc_feature (10)..(10): n is a, c, g, or t
  misc_feature (143)..(143): n is a, c, g, or t
  misc_feature (153)..(153): n is a, c, g, or t
  misc_feature (172)..(172): n is a, c, g, or t
  misc_feature (176)..(176): n is a, c, g, or t
  misc_feature (228)..(228): n is a, c, g, or t
  misc_feature (237)..(237): n is a, c, g, or t
  misc_feature (271)..(271): n is a, c, g, or t
  misc_feature (413)..(413): n is a, c, g, or t
  misc_feature (435)..(435): n is a, c, g, or t
  misc_feature (448)..(448): n is a, c, g, or t
  misc_feature (464)..(464): n is a, c, g, or t
  misc_feature (484)..(484): n is a, c, g, or t
  misc_feature (496)..(496): n is a, c, g, or t
  misc_feature (502)..(502): n is a, c, g, or t
accatnananagcctttaattttacatgtacaaatgctgctgtaaattcgtaacagcgaagaaaaatatatacgaaccggtttaaaaggaaaagtaaaaaacaatccacagttgagcagttgatgtgcaaatcatcccagggntccaactttntgtctcttgggccccaggntttnttccttgtgcacaacactctgcaaggaggcatgcagtaccttgcccacacgnttgccagtntccatcatctcgaagatgctctctgggtccaggntgcccttccccactttcctcatgcacgtcacaactcccttgctgggtcaccgacaccaggcaagctggccagcgagcaggcctcctcctgaagagtaggcatccaccacatgccgatagccaattttggcacagagtgacantggcaggggacattttccacanttagtcgtattgnagtcataagggtcatntgacaattcaatggtccttngacccctttttnatcctncaaatttggacccttgggtttcctggggtg

SEQ ID NO: 1414 - DNA, 359 bp, Homo sapiens
  I.1414 (H50201)
  misc_feature (96)..(96): n is a, c, g, or t
  misc_feature (355)..(355): n is a, c, g, or t
catcaccattgcggttgcggggaggcccaggcatgttgagcaaaacaagcttggcgtcccgggatttcttcacgatgacctcgttcagccgcacgncgtgtgcatgcgccgcacgttggactggttcaagttctcccactccggcttcatgctgaagaagtccttgatgccctcagaggagacaggactggggcccttattcttctctgccaccgacttgtccttggtccagggtgagatgcaccttctccggatctgtctccccttccccctcaggctcctcccctggggaacggggagctgctggggcattggggaagcactctgattcgtggatcagctgcacctcctcctntggg

SEQ ID NO: 1415 - DNA, 413 bp, Homo sapiens
  I.1415 (H50200)
  misc_feature (314)..(314): n is a, c, g, or t
  misc_feature (352)..(352): n is a, c, g, or t
  misc_feature (403)..(403): n is a, c, g, or t
cgtggaggaacttcattgagctggtccgggaaaccacagctggccacttagccctgctggtcaccaagaacgtttccatgtttcctgggaaccctgagcgcttctctgagggcagcatcgacgtttggtggattgtgcacgatggaggcatgctcatgctgctgcccttcctgctgcggcaccacaaggtctggcggaagtgcaagatgcgtatcttcactgtggcccagatggatgacaatagcatccagatgaagaaggatctgaccacatttctgtatcatttacgcatcactgcggaggtcgaggtggtngagatgcatgagagcgacatctcagctttacacctatnagaagacttggtgatgggagcagcgtttcccagatcctcaaacagatggcntttaaccaag

SEQ ID NO: 1416 - DNA, 413 bp, Homo sapiens
  I.1416 (H50095)
  misc_feature (12)..(12): n is a, c, g, or t
  misc_feature (17)..(17): n is a, c, g, or t
  misc_feature (33)..(33): n is a, c, g, or t
  misc_feature (40)..(40): n is a, c, g, or t
  misc_feature (59)..(59): n is a, c, g, or t
  misc_feature (68)..(68): n is a, c, g, or t
  misc_feature (96)..(96): n is a, c, g, or t
  misc_feature (104)..(104): n is a, c, g, or t
  misc_feature (257)..(257): n is a, c, g, or t
  misc_feature (326)..(326): n is a, c, g, or t
  misc_feature (353)..(353): n is a, c, g, or t
tatacatataantttantgggatagggtttccngtctaanacatgaagaggtaactcancattccttncagtgccacaggttaagaccttggaganctggcttncctgaggagcttctagctcagaggttgtacatgctcatggcagcaacaacccattgaccacttcttcaaagtagttcactgccaaggagaatcaaaattcaatttggattcccaatactcagcctaccttcaatttcccatcaagcctatatncttaggcctttagtttaagtgtggggttatcttaacaggtcacttgggccttagttcaaagtgaaattncctgaggtccttgaaagaaggtagggnaacccaatcaatgagtttttctcttggggctctaatttgtgaggaaggggtaaatttcta

SEQ ID NO: 1417 - DNA, 357 bp, Homo sapiens
  I.1417 (H50094)
  misc_feature (164)..(164): n is a, c, g, or t
  misc_feature (278)..(278): n is a, c, g, or t
tgctctacgtgggcacctggcactaagggagtaccttattatcctacatcgcaaatttcaacagctacattatatttccttctgacacttggaaggtattgaaatttctagaaatgtatccttctcacaaagtagagaccaagagaaaaactcattgattgggnttctacttctttcaaggactcaggaaatttcactttgaactgaggccaagtgagctgttaagataacccacacttaaactaaaggctaaggatataggcttgatggggaaattnaaggtagggctgagtattggggaatccaaattgaattttgattctccctgggcagtggaactacttttaaggaagtggg

SEQ ID NO: 1418 - DNA, 365 bp, Homo sapiens
  I.1418 (H50025)
cagaacctgctcccacctcaggcccaggcaaccgtgcactgctgcaatgggctctgagctggagacggcgatggagaccctcatcaacgtgttccacgcccactcgggaaagagggggacaagtacaagctgagcaagaaggagctgaaagagctgctgcagacggagctctctggcttcctgggatgcccagaaggatgtggatgctgtggacaaggtgatgaaggagctagacgagaatggagacggggaggtggacttccagggagtatgtggtgcttgtggcttgctcttcacagtggcctgtaacaatttcttcttggggagaacagtttgagcagacagccacatttgggcagcgcttt

SEQ ID NO: 1419 - DNA, 330 bp, Homo sapiens
  I.1419 (H49983)
  misc_feature (53)..(53): n is a, c, g, or t
  misc_feature (54)..(54): n is a, c, g, or t
  misc_feature (57)..(57): n is a, c, g, or t
  misc_feature (112)..(112): n is a, c, g, or t
  misc_feature (153)..(153): n is a, c, g, or t
  misc_feature (223)..(223): n is a, c, g, or t
  misc_feature (311)..(311): n is a, c, g, or t
  misc_feature (326)..(326): n is a, c, g, or t
gaagcctttaatgaaagatgagttgcaggcttggaccgctactcttgcgcccnnggngggggtgggggtggggtgggcaggggtggggttatggagagggataagtggggtnaggtggaagcagggggaagaggcaggtctgggagggtgganaggaagggcgctgccaatgtggctgtctgctcaacttttctcccagaagaaatttttacaggccactttnagagcagccacaagcaccacatactcctgggaagtccacctccccgtctccattctcgttctagctccttcatcaccttttccacagnatccacatccttctngggc

SEQ ID NO: 1420 - DNA, 230 bp, Homo sapiens
  I.1420 (H48923)
  misc_feature (194)..(194): n is a, c, g, or t
  misc_feature (202)..(202): n is a, c, g, or t
  misc_feature (218)..(218): n is a, c, g, or t
  misc_feature (223)..(223): n is a, c, g, or t
catctccttgcccaagggtgtggtggaggtgacccatgacctgcagaaacacctggctgggctgggctgactgaggccattgacaagaacaaggccgacttgtcacgcatgtcaggcaagaaggacctgtacctggccagcgtgttccacgcacccgcctttgagttggacacagatggcaacccctttgaccngggccatntacgggcgcgaggagntgcgnagcccca

SEQ ID NO: 1421 - DNA, 448 bp, Homo sapiens
  I.1421 (H48922)
  misc_feature (323)..(323): n is a, c, g, or t
  misc_feature (396)..(396): n is a, c, g, or t
  misc_feature (448)..(448): n is a, c, g, or t
cattggaaaagttttattgaaaaaaaaaatgtacaaataagttcttggattgatagcaacaaaggctcatgttcccccttccctccctatctttgaagaactaaaaaaggaagaaacaaaacaaaaagttcatccccacaacgccagacacgatgcttcttgaccagagtctgcccagaagcccctcctgggagctccttctcaatccgcctcactgcggccaggtcattctgggggtgcctggtcccaggggctgcagcacctagttttatagttgggagaggttgggatagagctggggaggcagctgaggtgttttagtntcagaagagggctggctgacccccctgagctcaatttggttttcacaggtgagaaaggtaccgggttattaanttggaatactgattgaggcaggcttgatctggggatttcaggggcaggcagn

SEQ ID NO: 1422 - DNA, 435 bp, Homo sapiens
  I.1422 (H48329)
  misc_feature (9)..(9): n is a, c, g, or t
  misc_feature (131)..(131): n is a, c, g, or t
  misc_feature (260)..(260): n is a, c, g, or t
  misc_feature (264)..(264): n is a, c, g, or t
  misc_feature (315)..(315): n is a, c, g, or t
  misc_feature (370)..(370): n is a, c, g, or t
  misc_feature (376)..(376): n is a, c, g, or t
  misc_feature (385)..(385): n is a, c, g, or t
  misc_feature (396)..(396): n is a, c, g, or t
  misc_feature (402)..(402): n is a, c, g, or t
  misc_feature (421)..(421): n is a, c, g, or t
  misc_feature (430)..(430): n is a, c, g, or t
  misc_feature (435)..(435): n is a, c, g, or t
agcaacgcnagcgagacattctgcgagatggtgaagtccaaccggctgtgcgaacggaagctcttcattcagttctgctgccgcacgtgcctcctggccgggtaagggtgcctagctgcccacagagggcngtcactcccatccatccatccgtccaccttcctccagactgtcggccagagtctgtttcaggagcggcgccctgcacctgacagctttatctccccaggagcagcatctctgagcacccaagccaggtnggtngtggctcttaaggaggtgttcctaaaatggtgatatcctctcaaatgctgnttgttggctccagtctttcgacaaactaacaggaacaaaatgaattttgggaatncacagntttggtttnggagcagtttntgggancataagtttattgaatttnaagaccaantattn

SEQ ID NO: 1423 - DNA, 368 bp, Homo sapiens
  I.1423 (H48238)
  misc_feature (270)..(270): n is a, c, g, or t
  misc_feature (276)..(276): n is a, c, g, or t
  misc_feature (348)..(348): n is a, c, g, or t
ttaatttagggttaacattgtacttgcttcattgatttctctttcagagttgtagattcaataaacaacatctgggttctctccagctcacaggtgacaaggcaaatgcactgtcgtcaaacaggggagcaggacaatatggagaaagacgaggtcgaaaaaatttaaggcaaatgttacttccctattcaagggaattgatcaagcagatctgtgcatttcaatgaaaatatatgaaatatttgtcaaaataattaacatcggtaaaanttagancatgtagcttataaaatgcctacacaggtttgggcagattaaatccaactgtgtcatgtagggcttgtaatntacacaggcacaggggtttc

SEQ ID NO: 1424 - DNA, 450 bp, Homo sapiens
  I.1424 (R99774)
  misc_feature (364)..(364): n is a, c, g, or t
  misc_feature (421)..(421): n is a, c, g, or t
  misc_feature (443)..(443): n is a, c, g, or t
attcggcacagggtcaagttttcttttataagcctttaattcatcctcagtgactctggcaaggctgcttctctatcactggctttgcacagaagtatgctctacttgcgttgctttagggcaggattctattttgagggaaaagacagtatccttattaccttttgtttgtttaatagcacaaatgcttatttgttatccaaaacaacctccttcttatctgtgataaatctatagaaagaatttagctgcaagtggacaaaggaacaagcccccagaaaagaaagggaagaactgccttcttatactacagaacatgcattagtgtggggctatatagctgtggcttcatgctacccaattncagattttctttgtcctctaaggagtttgattggctgtatatttaaaattgaacatnagagggatggggaaggaggggntctttta

SEQ ID NO: 1425 - DNA, 415 bp, Homo sapiens
  I.1425 (R99679)
  misc_feature (71)..(71): n is a, c, g, or t
  misc_feature (268)..(268): n is a, c, g, or t
  misc_feature (345)..(345): n is a, c, g, or t
  misc_feature (366)..(366): n is a, c, g, or t
  misc_feature (394)..(394): n is a, c, g, or t
tcaggagacggttttgagatcaactggtctgactaaaatttattaggtgggaatttcctcttcctaataancctgggagtgctatgggagactggggtctatttcacccctgcagtctcgaccataagagatggctacacccagggggccagttcagagacccactcccaggtgtgcattctctttctcaaggatgttccttgctgagaaaaagaattcagtgatatttctcccatttgcttgtgaaagaagagaaatgtgggctttngttccacctggctcaccggcggtcagaatttaaggttatctctcttgtttcctaaacattgctgttatcctgttctnttttcaaggtgcccagatttnatattgctcaaacacacatggctgtatnattttgtggcagtttaatgca

SEQ ID NO: 1426 - DNA, 487 bp, Homo sapiens
  I.1426 (R99573)
  misc_feature (1)..(1): n is a, c, g, or t
  misc_feature (227)..(227): n is a, c, g, or t
  misc_feature (277)..(277): n is a, c, g, or t
  misc_feature (473)..(473): n is a, c, g, or t
ntgagatggggtcttgctatgttgcctaagctggtctagaacccctgggctcaggccaccctcccaagtagctaaaactataggcatgcatcaccacatcatttcattgaagtatttattaggtaccatcatgagctaggtgcagttctaggtattgagttttatcagtaaataaacatgatcatcacagaggatgtgaaggaagcatttaataaattcaagagganttcagcctcataaactatgaaatattgggaaataattcatcatgtaaaanctggatataaagaaaaaacttttcctgcaggacattgttgcaggaagtcagggaccccaaacgggggggactggctgaagccatggcaggaaaaacatgggttgtgaaggtttcatgggacatttattagttccccaaattaatacttttataatttcttatgcccgtctttactgcatctctaaacataattgtnaaggtttcctgggt

SEQ ID NO: 1427 - DNA, 272 bp, Homo sapiens
  I.1427 (R99490)
  misc_feature (159)..(159): n is a, c, g, or t
  misc_feature (207)..(207): n is a, c, g, or t
  misc_feature (230)..(230): n is a, c, g, or t
  misc_feature (240)..(240): n is a, c, g, or t
tttttagtgaattttatgaaatccccgttccattcaacaggcacatgtttaaaagagctttgtcgttggtgttaatgggggaatgtgttccttcattgtatttgggccttttgtattgcactcttgatattaaattaaatgtgccttgaaatagttggntttttttttttttaagttcaaagaatattatgatgattttgttgtacnctttaacattttaatttggggcngggagggccngttgagagcagattcattttgggaatactgtt

SEQ ID NO: 1428 - DNA, 322 bp, Homo sapiens
  I.1428 (R99489)
  misc_feature (88)..(88): n is a, c, g, or t
  misc_feature (94)..(94): n is a, c, g, or t
  misc_feature (317)..(317): n is a, c, g, or t
tggacaggttatttctgggaatctttcttcctcaaaattagaacagaaaaacagtaaagcgaagacacacacgtgcgtgcgcgtgcanaacacncaaagcaaaacccattccaccactggaaatattccagacaggggattgcctgagccattatttgtttcaaattagtgatgtatttatagtacctgatatactctggcttacagccaattttatagaaaaaaatccatttataagtgattcaaattaaattatgattccttaatataacggaaatatactatgtaaggcatttaaaaatgtaggttgtctaggntacat

SEQ ID NO: 1429 - DNA, 460 bp, Homo sapiens
  I.1429 (R99425)
  misc_feature (335)..(335): n is a, c, g, or t
  misc_feature (374)..(374): n is a, c, g, or t
  misc_feature (398)..(398): n is a, c, g, or t
  misc_feature (405)..(405): n is a, c, g, or t
accgtgggcctttgactgagctgcagggagggatagagatggacccagtcagccagaagggttgaccatggcacttggtcctgtctgtgaacttgcaggtgtggaaaataaggttcagtgaggcgatggatgcatcgataacggagtctcactctgttgcccaggctggagttcaatggtgcaatgatctcggctcactgcaacctccgcctcttgggtgcaagtaactctcctgcctcagcctcccgagtagctgggattacagcaatggtgaaaggcagttttcctcgaatgagagcatcagacaggcatgcccgggaccagctgtgggaatnctggagagacagacatgaagcactttcgcttgggaaatngctttctttagtcttttcaatttnaacattnaaagggatgaggggatttttattcaacagcagccagtgcaatggcaaagttcatg

SEQ ID NO: 1430 - DNA, 429 bp, Homo sapiens
  I.1430 (R99333)
  misc_feature (273)..(273): n is a, c, g, or t
  misc_feature (304)..(304): n is a, c, g, or t
  misc_feature (317)..(317): n is a, c, g, or t
  misc_feature (361)..(361): n is a, c, g, or t
  misc_feature (381)..(381): n is a, c, g, or t
  misc_feature (389)..(389): n is a, c, g, or t
  misc_feature (408)..(408): n is a, c, g, or t
agctcacgggcggcaggcagaaccttccttttagtgagttgtaaagtcagagagaagctgaaaaattagagtgagaccacttattatttaatgatttttaagagcagggtcacctttaaaccagaattggcttgaaaatggagactgtgatatgcacggctaaaataagggaaatgtccatttgaactgagactagaaagcatgactttgcattgcagctggctctgttgataaaaatccctcatccctttgagtgttaaattgaaagactangaaagcatttccaaggcgaagtgcttcatgnctgtctctcaggnttcccacagctgggtcccggggcatgcctgttctggatgctctncattgcgagggaaactgccnttcacccntagctcgtaatcccagctnctcgggggggtcgagggcagg

SEQ ID NO: 1431 - DNA, 385 bp, Homo sapiens
  I.1431 (R98999)
  misc_feature (23)..(23): n is a, c, g, or t
  misc_feature (69)..(69): n is a, c, g, or t
  misc_feature (100)..(100): n is a, c, g, or t
  misc_feature (123)..(123): n is a, c, g, or t
  misc_feature (169)..(169): n is a, c, g, or t
  misc_feature (183)..(183): n is a, c, g, or t
  misc_feature (186)..(186): n is a, c, g, or t
  misc_feature (191)..(191): n is a, c, g, or t
  misc_feature (196)..(196): n is a, c, g, or t
  misc_feature (211)..(211): n is a, c, g, or t
  misc_feature (217)..(217): n is a, c, g, or t
  misc_feature (228)..(228): n is a, c, g, or t
  misc_feature (284)..(284): n is a, c, g, or t
  misc_feature (327)..(327): n is a, c, g, or t
  misc_feature (337)..(337): n is a, c, g, or t
  misc_feature (343)..(343): n is a, c, g, or t
cagttcttgaatatttatttccnttaagagaatatcaaactgatgtcaccaaatctaaacccacttgangaccaatagctattacagttgtactacagantaggtcaaagtcaccgttagaantattacactttattgaattctggagcagctaatctaccctcccctnttgaccaatgacangantggangaaantatacaatggttaangaaagngtctataaccnctgtttgtttaaaatgttgaaacaactttcactgtactgggtgaaacaggttttantaccctaacatacacaggtaatggattcattcttggtttaaancagggggtgntttcgncttgggggttgggggtttttattttttgaggtgggggttttg

SEQ ID NO: 1432 - DNA, 431 bp, Homo sapiens
  I.1432 (R98960)
  misc_feature (2)..(2): n is a, c, g, or t
  misc_feature (4)..(4): n is a, c, g, or t
  misc_feature (361)..(361): n is a, c, g, or t
  misc_feature (382)..(382): n is a, c, g, or t
  misc_feature (414)..(414): n is a, c, g, or t
gncnttaaccgttaaacatttttattgtgcaggcttgtaacctttacaggacatgcatgataaaaaattgtaaaatatatcagtaagcatataaaatttcagcaatcttttggaccagtaattgatttgcatgagggactaagcatctatgtagaacagacatgtcttggaatacacagtttacagattgaatcacaaagccatttcctaagcgattttcttcatataaagataaaaatatctttacatttaaaaagtatgcagtatagcacattttcagttatgtacacagtttaaaaggtaaaactatatccatgccagtgtctgttttaaatggcaaaaaggtcaaagtagggtaacnggttgggtaattaaagtgtcngggaagactgggaggagggcaaaattcaagcngggtttcccataagtgt

SEQ ID NO: 1433 - DNA, 447 bp, Homo sapiens
  I.1433 (R98949)
  misc_feature (392)..(392): n is a, c, g, or t
  misc_feature (400)..(400): n is a, c, g, or t
  misc_feature (431)..(431): n is a, c, g, or t
  misc_feature (439)..(439): n is a, c, g, or t
  misc_feature (445)..(445): n is a, c, g, or t
gtcaaaagaacacaattttaatgactttatcaagccttaggacagagatgagagaaacacctttccaatgatgcatcaagttaacgtctaagcaaaagatcagcagagatcagagattgttgggtacacacgtatcttgtgatgtcttctgagaaccaacttattcctctttctctgagaagaacttgacccctcgccccggggctgagtgcttggcagccacatttgtgttgagatcttgattcctgctctaactacacagggctgggatggacacctgctccaagtttggccagtcatttatttttccagtaatttaaagctgtgactagggagacacagcctctgtggggttgtgagggttgaggtggatataaactcagggagctgtncgggtggncatgtttcactgaggaagggcagtcagtccncagggggngaccantt

SEQ ID NO: 1434 - DNA, 484 bp, Homo sapiens
  I.1434 (R98872)
  misc_feature (1)..(1): n is a, c, g, or t
  misc_feature (360)..(360): n is a, c, g, or t
  misc_feature (398)..(398): n is a, c, g, or t
  misc_feature (428)..(428): n is a, c, g, or t
  misc_feature (434)..(434): n is a, c, g, or t
  misc_feature (447)..(447): n is a, c, g, or t
natccaactaatgccttactcttcttgaaattttaacctatgatattttctgtgcctgaatatttgttatgtagataacaagacctcagtgccttcctgtttttcacattttccttttcaaatagggtctaactcagcaactcgctttaggtcagcagcctccctgaagaccaaaattagaatatccatgacctagttttccatgcgtgtttctgactctgagctacagagtctggtgaagctcacttctgggcttcatctgggcaacatctttatccgtagtggggtatggttgacactagcccaatgaaatgaattaaagtgggaccaataggggcttgaggttcttctgtggggctnggcagtccggggaaggccagcttttccctggcctcttnatcaactggaattgagggttaggcatgttntatttnaggtttcgttttntttttcaaggaataattcacggtttttccggaattcc

SEQ ID NO: 1435 - DNA, 263 bp, Homo sapiens
  I.1435 (R98865)
  misc_feature (1)..(1): n is a, c, g, or t
  misc_feature (2)..(2): n is a, c, g, or t
  misc_feature (223)..(223): n is a, c, g, or t
  misc_feature (229)..(229): n is a, c, g, or t
  misc_feature (249)..(249): n is a, c, g, or t
  misc_feature (260)..(260): n is a, c, g, or t
nnggaaagggggatcccaaggtctgaggtggactaggaaggctttctgaagaacctgggtctgttagggcatcagcaatcaaggtacaagtaaatagaggcaaaatgagggtttgaactgtgagcagttggtcctggaaaagaaagaaaccaagagattatggggactcaatgggcttcttaagagagaataagttgaaatcaatgaccagaagaccctgatngaagtngatgagaatcatctcaggcnaactttttgtnttc

SEQ ID NO: 1436 - DNA, 462 bp, Homo sapiens
  I.1436 (R98776)
  misc_feature (3)..(3): n is a, c, g, or t
  misc_feature (4)..(4): n is a, c, g, or t
  misc_feature (309)..(309): n is a, c, g, or t
  misc_feature (352)..(352): n is a, c, g, or t
  misc_feature (395)..(395): n is a, c, g, or t
  misc_feature (447)..(447): n is a, c, g, or t
  misc_feature (460)..(460): n is a, c, g, or t
ttnnttagagataagcaacttttttttccatttatttgaaataatatacaagaatatagtgtgcaaaatttaggggcaacatcatgaagaagtgtgatgaactgaaatcaattttacagctgtgattcctaaccagaaacaccacttggtaagtaacatgaaaagccatgattgtagctcagagcaaaagcagctgtattgccaatgtatttgctctaattttagacagttggaggaaaattaaagtgcaagtgttgcactgcagtaagtgcaaagtctgcccccaccataaagattatgatgacaaantatatttaaggatacatgggctgaggagatacaggaacacggngttaaaaaatacaatgggtgttgactgtttgttaatagcaccnttacagtgactatatcccatggctttaaccaacttacctggccggggtaggnctccttgggatantt

SEQ ID NO: 1437 - DNA, 396 bp, Homo sapiens
  I.1437 (R98775)
  misc_feature (305)..(305): n is a, c, g, or t
ccaatgaatgccttcatgctttttgccaaaaaatacagagttgaatatactcagatgtatccagggaaagataacagagccataagtgtgatccttggtgacaggtggaagaaaatgaagaatgaagagagaagaatgtacacattagaagcaaaggctttggctgaagaacagaaacgtttaaatcctgactgttggaagagggaaaaggaaccaatttcaggctcacaacaacattaaaccagggtgctttatgttcttaagtctatatttggcatattacattggactcttgatgggaaagnctttaaggaagattcaaggtcttcacccttttgttcctcatttcgtgttgaccttaaggttattgattaggcttgagtcttggaaatgaat

SEQ ID NO: 1438 - DNA, 413 bp, Homo sapiens
  I.1438 (R97344)
  misc_feature (101)..(101): n is a, c, g, or t
  misc_feature (227)..(227): n is a, c, g, or t
  misc_feature (291)..(291): n is a, c, g, or t
  misc_feature (324)..(324): n is a, c, g, or t
  misc_feature (333)..(333): n is a, c, g, or t
  misc_feature (382)..(382): n is a, c, g, or t
  misc_feature (395)..(395): n is a, c, g, or t
  misc_feature (408)..(408): n is a, c, g, or t
tgagatgtaagaagcttttcttttcctgtggcattgattctgacttagagctgaagtaaagatcactgaaacatcacgtcaagttgaagtcactcataggnctttgtcctttaggcaggacaggagagtcattaagaagcatttcactgtagcattctatcacaatatcatctggaattgttttctttgcccagaaagccttaacttgcctctagagaatccctggnattacaacgatattgcggcattagaattccaactcttctgctgtggaagtttgaagcgactgcnaggcaaaaccagagaatttcctcaagtggcctntaggtgccntgttatcttatgcccccacccctccctcaacaatatgagtgatccaganctggcccaaacanctcaggtctggtnccctt

SEQ ID NO: 1439 - DNA, 303 bp, Homo sapiens
  I.1439 (R97309)
  misc_feature (34)..(34): n is a, c, g, or t
  misc_feature (111)..(111): n is a, c, g, or t
  misc_feature (213)..(213): n is a, c, g, or t
  misc_feature (221)..(221): n is a, c, g, or t
  misc_feature (238)..(238): n is a, c, g, or t
  misc_feature (247)..(247): n is a, c, g, or t
  misc_feature (265)..(265): n is a, c, g, or t
  misc_feature (274)..(274): n is a, c, g, or t
  misc_feature (286)..(286): n is a, c, g, or t
  misc_feature (292)..(292): n is a, c, g, or t
tacccacatacatgctaggaaaaccagttcaganaacacaggggactgactcttccaaaaggagcagctgtctactctgcggcctgcttccaagggccactgtgggaggangtctgggctgcagcgttccgaggcagcagcagcagaggggaaggaaggaagcaggccttgcttgtgtgggattccagtttcctctcccagcaggggccagantccccttncttagcttcaactacantttgggganagaacttctagtgtaatngggggcagngaggggttgggngccgtnagagggttact

SEQ ID NO: 1440 - DNA, 431 bp, Homo sapiens
  I.1440 (R97143)
  misc_feature (357)..(357): n is a, c, g, or t
  misc_feature (401)..(401): n is a, c, g, or t
atttgccttggtgcagaaggcctctgggggcagtccctgaccactaggcttcccacttagacctgctccagcagcaccacccctcgccactgcctggtcctttccttcacccttgattctgtcttcttttgtccttctccaggtcttggcagcacctgtctcctttcaccccagggcctgagcctggccagcctacaatggggatgttgtgtttctgttcaccttcgtttactatgcctgtgtcttctccaccacgctggggtctgggaggaatggacagacagaggatgagctctacccagggcctgcaggacctgcctgtagcccacttctgcttcgccttgagcactaccactnctgccaaggagggattccattttgcagagtttctttccagggtncccagctatgacctgttgccttgggttttt

SEQ ID NO: 1441 - DNA, 344 bp, Homo sapiens
  I.1441 (R97095)
ataaactatcttgcatttaatcaatcattacaaaaagtattcatgccacatacaactttgtaacacccaggtgcgtgaccatctataaaaggggggaaacccaacctctatcccttttccacgtgggcaagccaagggttctgagggctcatccacagggctcgccggcctggcctcctgctgcgtcccgggatgtggaccactgacccagaggcttctgagtcctgagcacagataagggctcctttcaggcctttccttgagctgcacgtgaacctgtgtggggcagggcagcgtttgcagggcgtgtttacggggcagggcagcgttttgcagggcgtgtt

SEQ ID NO: 1442 - DNA, 517 bp, Homo sapiens
  I.1442 (R96713)
  misc_feature (1)..(1): n is a, c, g, or t
  misc_feature (87)..(87): n is a, c, g, or t
  misc_feature (382)..(382): n is a, c, g, or t
  misc_feature (397)..(397): n is a, c, g, or t
  misc_feature (411)..(411): n is a, c, g, or t
  misc_feature (420)..(420): n is a, c, g, or t
  misc_feature (433)..(433): n is a, c, g, or t
  misc_feature (443)..(443): n is a, c, g, or t
  misc_feature (463)..(463): n is a, c, g, or t
  misc_feature (468)..(468): n is a, c, g, or t
  misc_feature (482)..(482): n is a, c, g, or t
natccccatgcacctccttccccagctccacgaccacgctgcttacttagtagacaacctgtgggactgtgcagggactcagctganggactgggagggtctgacaagcctgctgctggagaaggaccagagcacgtgccacatggagccagggccagggaccttccacctcctagggtgaaaccaggagagattgcttgcttcacttgtacaaggcaggaacggtggcatggggtgggggaaacttggagttggaaggtggctaatctttgattctatgtttttgatcctcctgggcactccagacctgggtgatgtgcaggagagcacactgatagaaatccttgtgtccagttgcccagcaactcctgcctcagccttnccgagccagctgggnattacaggcgcccncacccacgntgggtaaattttntctatttttnagttagagaaggggttttcnacctntttgggccagggtnggtctttgatctttttgaactttttgattccaact

SEQ ID NO: 1443 - DNA, 533 bp, Homo sapiens
  I.1443 (R95730)
  misc_feature (16)..(16): n is a, c, g, or t
  misc_feature (427)..(427): n is a, c, g, or t
  misc_feature (433)..(433): n is a, c, g, or t
  misc_feature (496)..(496): n is a, c, g, or t
  misc_feature (501)..(501): n is a, c, g, or t
  misc_feature (519)..(519): n is a, c, g, or t
tgtactaattaattgncagcagctgttcacttcagtcctccgactctgtgcctgttggtctttgcaaaggttctctgactcgaacacactgggaaaagtttgtctctgtgacttgtgacttctttgaatcacaggctccagccactggaagtgaaaactctgctgttaaccagaaacctacaaaccttcccaaggtggaagaatcccagcagaaaaacacccccccaacagactccccctccaaagctgggccaagaggatctgtccaatatcttcctgacttggatgataaaaattcccagggaaaagggccctcaggaggcctttcctgtgcatctggacctaaccacggaatccccaggggagaaaaccctgggatatttccttcctctttcctgggagcctatggagggagaagctggttgtnctggcntttccccagaggaaaaagcacggattgttgagtgcccaggggcagccaaggattgccagcctnttgtnctttccgccttgaggatnacacagagtttttt

SEQ ID NO: 1444 - DNA, 477 bp, Homo sapiens
  I.1444 (R95729)
  misc_feature (415)..(415): n is a, c, g, or t
  misc_feature (444)..(444): n is a, c, g, or t
  misc_feature (449)..(449): n is a, c, g, or t
  misc_feature (464)..(464): n is a, c, g, or t
ttgttagggaaagtatctttactcatgcaatgctttcatgctgagatttcagcacatatatactgctgaaaagataagtatctttataagtgagtggctgaagacataagagaggcatctctccatggtatgagactgctcagtttaggaggtgatgcagctcagggtacaaggcagtgtacagggtagagtgcagcccaagccgagggtcagtctcattatttccaatcccagtcaacatgctgagaccaagaagagtcaaaaaggcgtccttcactagccactctacgtgtgcacgctctgtctctgtccatcgtccccatcgcctcccatgtcatgcggcgcaccataccccttacagaagacttctgtgttgatttttcatgggcggaagggacaagagggctgggcattnttggttgggcccggggcacttcagcagtncgtgntttttctttgggggnaagggcaggacaa

SEQ ID NO: 1445 - DNA, 477 bp, Homo sapiens
  I.1445 (R95145)
  misc_feature (240)..(240): n is a, c, g, or t
  misc_feature (283)..(283): n is a, c, g, or t
  misc_feature (302)..(302): n is a, c, g, or t
  misc_feature (324)..(324): n is a, c, g, or t
  misc_feature (358)..(358): n is a, c, g, or t
  misc_feature (368)..(368): n is a, c, g, or t
  misc_feature (375)..(375): n is a, c, g, or t
  misc_feature (382)..(382): n is a, c, g, or t
  misc_feature (390)..(390): n is a, c, g, or t
  misc_feature (411)..(411): n is a, c, g, or t
  misc_feature (422)..(422): n is a, c, g, or t
  misc_feature (451)..(451): n is a, c, g, or t
  misc_feature (466)..(466): n is a, c, g, or t
aatcttcgctcctccaatctccgctcctccacccagttcaggaacccgcgaccgctcgcagcctctcttgaccactatgagcctcctgtccagccgcgcgcccgtgtccccggtccttcgagctccttgtgcgcgctgttggtgctgctgctgctgctgacgtaccagggcccatcgtcagcgctggtcctgccgctgctgtgttgagagagctgcgttgcgtttgtttacagaccacgnagggagttcatcccaaaatgatcagtaatctgcaagtgttcgncatagggccacagttgttncaaggttgaagtggtagccttnctgaagaacgggaaggaaattttgttcttgattncagaagaccnttttttntaaaganagtcattncagaaaatttttgggacggtnggaaacaaggnataattgattaaggagaaatgaggcacgnatgggaaaagttttnccagtttttca

SEQ ID NO: 1446 - DNA, 111 bp, Homo sapiens
  I.1446 (R95077)
  misc_feature (43)..(43): n is a, c, g, or t
  misc_feature (44)..(44): n is a, c, g, or t
  misc_feature (60)..(60): n is a, c, g, or t
  misc_feature (71)..(71): n is a, c, g, or t
  misc_feature (72)..(72): n is a, c, g, or t
  misc_feature (83)..(83): n is a, c, g, or t
  misc_feature (88)..(88): n is a, c, g, or t
  misc_feature (93)..(93): n is a, c, g, or t
atatattaaatttaatatatatctaattactcataacaaaatnntcaaaacctttaaaanatacacaatanncatctaaaaanctcancaatnctaaatatataatatata

SEQ ID NO: 1447 - DNA, 392 bp, Homo sapiens
  I.1447 (R94450)
  misc_feature (244)..(244): n is a, c, g, or t
  misc_feature (273)..(273): n is a, c, g, or t
  misc_feature (313)..(313): n is a, c, g, or t
  misc_feature (336)..(336): n is a, c, g, or t
  misc_feature (378)..(378): n is a, c, g, or t
gctgttaaacaaaacttgctggcattatgcatcccatccactgggggtgggctgggaacaaacaggtttcgatggttcttcacaaggagacaaacaatctgaattatcttttacaaacagtgaaaatgacaagatgtttgtctctcagtatgcattttaaaacaacataaatagaatacacttcttttaacaaagcctggccttggtggctttctagcttgcagtctaagtaacgtttggtttncagaagggattccctgggagacggctgtntggggcaacctcacttactggttgtgtgttctccatgggnaaagcaccagatggggaagcccnggggtcagatgtaagctgccaagcttcctttctctcttcaanctgcttgtccactg

SEQ ID NO: 1448 - DNA, 286 bp, Homo sapiens
  I.1448 (R94449)
  misc_feature (12)..(12): n is a, c, g, or t
  misc_feature (126)..(126): n is a, c, g, or t
  misc_feature (182)..(182): n is a, c, g, or t
  misc_feature (192)..(192): n is a, c, g, or t
  misc_feature (279)..(279): n is a, c, g, or t
tattgacacagnattaaaggttgaagactcacagcccatcgatttgagtgcatgcctgttgcacttcacattttccagctgaatgaagatggccccagcagtgaaaatctggaggaagagacaganaacataattgcagcaaatcactgggttctacctgcagctgaattccatgggctttnggacagcttngtatacgatgtggaagtcaaatcccatctcctcgatttatgtgatgacaactttactgttttcagacaagaacgtcaacagcaaccncatcacc

SEQ ID NO: 1449 - DNA, 415 bp, Homo sapiens
  I.1449 (R93541)
  misc_feature (340)..(340): n is a, c, g, or t
  misc_feature (358)..(358): n is a, c, g, or t
  misc_feature (398)..(398): n is a, c, g, or t
  misc_feature (404)..(404): n is a, c, g, or t
ttcaaagccagctaataaaacatgttggaagcgtatcaaatttcagttcagagtctaagagtgatattcttgaagatctctcccataagtaagttgcaagaaactttgtgacatctcctctggcagctgaaaggcctttaagacgtaattcctgatttttttgctttgccagagaggtaacttctggataaatgaccttttcactaaccctccatgtactctacctgtccttaaaaaggctattagaagtgggaccatggatgtaaaagcactttaaaaaggcataaactgtgaaataggtattgtttagcccatgtatctataaagaaacacacacagntgggccaaattgaatcanccccaatgtttttatttaatttaaaggtttaaagggcagnggttangcccttatgga

SEQ ID NO: 1450 - DNA, 571 bp, Homo sapiens
  I.1450 (R93540)
  misc_feature (336)..(336): n is a, c, g, or t
  misc_feature (466)..(466): n is a, c, g, or t
  misc_feature (488)..(488): n is a, c, g, or t
  misc_feature (535)..(535): n is a, c, g, or t
  misc_feature (543)..(543): n is a, c, g, or t
  misc_feature (557)..(557): n is a, c, g, or t
  misc_feature (565)..(565): n is a, c, g, or t
aagagttataaatgatggtttagttctcaggcagctacaaatgcctatttattccctaatgtacctgaacactagtaccatagaactgaaccaccatctgtatcagcgcttggggagtgtgcattctgaggtctaacccggggtgccaggaacacacacatcctccatcccagcatagagaatggggactccctgagtaatgggagttctttcatgtcctctgcttggggtgggggagtcagcagcacccatttgtacatataggtcattcatacatcacattttaaattggggactgtgtgtgctggtgtgtgtgtgagttctacgtttctaccntatgtgatccagtttaatagtaactttatttattttaaaaaaaaggaaacacaattagttactgttaaactgataaagggtgtttatttttacttttaggattggtccctggagagtaggaagtgagtcntgcactgacgtgggccagctcntcgtggccaaagttggaaaggggttggtttccgtatatatatgttgnatatcccncgtacctacattcntatatatncattat

SEQ ID NO: 1451 - DNA, 461 bp, Homo sapiens
  I.1451 (R92548)
  misc_feature (29)..(29): n is a, c, g, or t
  misc_feature (360)..(360): n is a, c, g, or t
  misc_feature (432)..(432): n is a, c, g, or t
  misc_feature (447)..(447): n is a, c, g, or t
  misc_feature (459)..(459): n is a, c, g, or t
ctttgtatgctcagtgtgttgtgaaagtntggaaggtcagacctttttctccaagaaggacaagcccctgtgtaagaaacatgctcattctgtgaatttttgaaagtcaacagttcaggagaagagaaggaatttgaagagaaaaaggaaaattaaaattactaattaatttttagattcaatatttatatggagttttgaaaaataatagtggccctgaaggaataaattccagctttaaaaaccaagtctgaggaaatatttggcttcataaagtaaagagacggtttggcatttattattactttttcctgtattttatgcccattaaaataagcttttattaaaaaccaatttccnggatgggactatttaaattgcatctttggaataaattagtggaggattttaattttaggattaattattccnttctggaattatttntaccctcttttntt

SEQ ID NO: 1452 - DNA, 354 bp, Homo sapiens
  I.1452 (R92455)
  misc_feature (184)..(184): n is a, c, g, or t
  misc_feature (343)..(343): n is a, c, g, or t
  misc_feature (351)..(351): n is a, c, g, or t
gtaaaaggcaaaaatttgagacttataagctatatggtagcttatttttgggtggggaagaaatgagaaaagaatataacatctcttactggcatgacacattttgataaaaaatcttattgtcctttcctactaggaatgatccactgtaagggcaaaaataatatacaaggcaaagtttttntttgggaggacagagtctcactctgtcacccgggctgggagtgcagtgggtacgattcttgggctcactggcaacctctccctcccggggttcaaggtgattcttcgtgcctcagcctcttgagtagctgggggtttacagggcgcgtgccactgcgtnccggctanttt

SEQ ID NO: 1453 - DNA, 496 bp, Homo sapiens
  I.1453 (R92331)
  misc_feature (152)..(152): n is a, c, g, or t
  misc_feature (158)..(158): n is a, c, g, or t
  misc_feature (394)..(394): n is a, c, g, or t
  misc_feature (408)..(408): n is a, c, g, or t
  misc_feature (418)..(418): n is a, c, g, or t
  misc_feature (442)..(442): n is a, c, g, or t
  misc_feature (471)..(471): n is a, c, g, or t
  misc_feature (481)..(481): n is a, c, g, or t
  misc_feature (492)..(492): n is a, c, g, or t
actggtgtgagctccagcatcccctttgctcgaaatggaccccaactgctcttgcgccactggtggtcctgcacgtgcgccggctcctgcaagtgcaaagagtgcaaatgcacctcctgcaagaagagctgctgttcctgctgccccgtggntgttgncaagtgtgcccagggctgcgtctgcaaaggggcatcggagaagtgcagctgctgtgcctgatgtgggaacagctcttctcccagatgtaaatagaacaacctgcacaacctggatttttttaaaaatacaacactgagccatttgctgcatttcttttttatactaaaatatgtgactggacaataaaaacaatttttggacttttaaaaaaaaaaaaaaaaaaaagaatctttanttaaaggcggccgnaagctttttncccttttgtgaggggttaattttnggcttgggcactgggccttcgttttacancgtcgtgatnggggaaaaccnggtt

SEQ ID NO: 1454 - DNA, 339 bp, Homo sapiens
  I.1454 (R92222)
  misc_feature (4)..(4): n is a, c, g, or t
  misc_feature (223)..(223): n is a, c, g, or t
ttanagaatagtcaaaattgtttttattgtcagtcacatatttagtataaaaaagaaatgcagcaaatggctcagtgttgtatttttaaaaaaatccaggttgtgcaggttgttctatttacatctgggagaagagctgttcccacatcaggcacagcagctgcacttctccgatgcccctttgcagacgcagccctgggcacacttggcacagcccacgggnagtcaggaacagcagctcttcttgcaggaggtgcatttgcctctttgcacttgcaggagccggcgcacgtgcaggagccaccagtggcgcaagagcagttggggtccatttcgagc

SEQ ID NO: 1455 - DNA, 476 bp, Homo sapiens
  I.1455 (R92076)
  misc_feature (5)..(5): n is a, c, g, or t
  misc_feature (97)..(97): n is a, c, g, or t
  misc_feature (362)..(362): n is a, c, g, or t
  misc_feature (397)..(397): n is a, c, g, or t
  misc_feature (412)..(412): n is a, c, g, or t
  misc_feature (424)..(424): n is a, c, g, or t
  misc_feature (436)..(436): n is a, c, g, or t
gcatngtgctattaaaaattgttccaaatgtccataaatctgagacttgatgtattttttcattttgtccagtgttaccaactaaattgtgcagttnggggcttttcccccttaccatagaagtgcagaggagttcagtatctctgttttaaagacgtatagaatgagcccaattaaagcgaaggtgtttgtgcttgtttgtgtgtatcagctgtaccttgttgagcatgtaatacatcctgtacataagaaattagttctttccatgggcaaagctattaccttgtacgatgctctaatcatattgcatttaattttattttgcacagtggaccttgtaggccacatgaggaaaggcactnctgtgtttttgttcgggttctccaggatttgatcngggttggagttgggngtttttgttttngggggttttttnaaattttggcgttgtttggcataggccttaaaatccagtt

SEQ ID NO: 1456 - DNA, 462 bp, Homo sapiens
  I.1456 (R92029)
  misc_feature (411)..(411): n is a, c, g, or t
  misc_feature (418)..(418): n is a, c, g, or t
  misc_feature (441)..(441): n is a, c, g, or t
  misc_feature (450)..(450): n is a, c, g, or t
aattatctatacacggaactaattcaaaaggttgtattacagttgttaaagccgcagtttatatatttatatatcccccattcatatccgtgaaaatactgaagtgcaactgaacgaggaggagaggtcctcgctctctgcaccatgtgaaaggagaaggacctctacacgaccaccagcacagcctcccgacagcgccgggagaacgcgaggggagtgagcattacagagtctttaggaggacagctagattgtgcttgaggctccccctgccccattttctgtgctgtgagcagcaggcatttttattgagagcttccaactagtgtttaaaaagacaaacagggcttcagctacagcatatctaacacacaaacgggcctgagctcctttcctatttaatctgtaggnatttccncagtctagttaaaaatgtaaacntggggattnattgcggggggg

SEQ ID NO: 1457 - DNA, 418 bp, Homo sapiens
  I.1457 (R91822)
  misc_feature (19)..(19): n is a, c, g, or t
  misc_feature (21)..(21): n is a, c, g, or t
  misc_feature (137)..(137): n is a, c, g, or t
  misc_feature (248)..(248): n is a, c, g, or t
  misc_feature (282)..(282): n is a, c, g, or t
  misc_feature (300)..(300): n is a, c, g, or t
  misc_feature (318)..(318): n is a, c, g, or t
  misc_feature (339)..(339): n is a, c, g, or t
  misc_feature (356)..(356): n is a, c, g, or t
attagcagtgatttaattntnttagatgctaaaccttatgggtgaaagtggattaaatgtagccaaatgcaacatcaaaatcttcaggcacaaaaacccattaactttttaatactctcagaagatgaacctaattncaaatgaaagctgcctccagaatatattgttaagcatatcctagatataattcattctagcaaacattctgtagaaattcacataacattttactgtactaaaagtaaatngcccatgtaacaaaaactatctttccataacttncaaatgaattttaaaggntgactgaccgtccttggnaggagaaacagtaaacaaatnaggtttataggcaatgntgtatgagttagggaattgcagttccgggccgggcgcggtggctcacacccgtaatcccagc

SEQ ID NO: 1458 - DNA, 448 bp, Homo sapiens
  I.1458 (R91202)
  misc_feature (382)..(382): n is a, c, g, or t
  misc_feature (404)..(404): n is a, c, g, or t
  misc_feature (419)..(419): n is a, c, g, or t
tacttttatttttgcttacagaaaaacggggggagaattaagccaaagaagtatatttatgaatcagcaaatgtggtgcctgattatagaaatttgtgatcctatatacaatataggacttttaaagttgtgacattctggctttttcttttaatgaatactttttagtttgtatttgactttatttcctttattcaaatcatttttaaaaacttacattttgaacaaacactcttaactcctaattgttctttgacacgtagtaattctgtgacatactttttttttcttataggcaatacactgtaatatcagaaatggttgggcctgaggcaacctagtaaggacctcgtcttctactaattaattaaaaaaactggcngggcatgggtaggcacacaccngtaggtcccagatantggggaggggccaggggcgggaggggttg

SEQ ID NO: 1459 - DNA, 391 bp, Homo sapiens
  I.1459 (R91154)
  misc_feature (233)..(233): n is a, c, g, or t
  misc_feature (381)..(381): n is a, c, g, or t
  misc_feature (386)..(386): n is a, c, g, or t
cccaggctagagtgcagtggtgccatcatggctcactgcagccctgactgattgctaggtctcaagcaatcctcctgccttggcctcccaagtatctgggactacaggtgtgtgctaccatgccagctagttttttaattattagtagagacgaggtcttactaggttgctcaggccaaccatttctgatattacagtgtattgctataagaaaaaaaaagtatgtcacaganttactacgtgtcaaagaacaattaggagttaagagtgtttgttcaaaatgtaagtttttaaaaatgatttgaataaaggaaataaagtcaaatacaaactaaaaagtattcattaaaaggaaaaagccagattgtcacaactttaaangtccnatatt

SEQ ID NO: 1460 - DNA, 470 bp, Homo sapiens
  I.1460 (R89861)
  misc_feature (8)..(8): n is a, c, g, or t
  misc_feature (53)..(53): n is a, c, g, or t
  misc_feature (367)..(367): n is a, c, g, or t
  misc_feature (444)..(444): n is a, c, g, or t
gggaccgngtaacgccgtgctatggccctgtaccacactgaggagcgcggcgnaccctgctcgcagaattaccgcctcttctttaagaatgtaactggtcactacatttccccctttcatgatattcctctgaaggtgaactctaaagaggaaaatggcattcctatgaagaaagcacgaaatgatgaatatgagaatctgtttaatatgattgtagaaatacctcggtggacaaatgctaaaatggagattgccaccaaggagccaatgaatcccattaaacaatatgtaaaggatggaaagctacgctatgtggcgaatatcttcccttacaagggttatatatgggattatggtaccctccctncagacttggggaagatccccatggaacaaggttaagggcacggaactgctttgggagattatggttcccattgatgntttgcggaattagggttcaaaggttc

SEQ ID NO: 1461 - DNA, 481 bp, Homo sapiens
  I.1461 (R89823)
  misc_feature (310)..(310): n is a, c, g, or t
  misc_feature (361)..(361): n is a, c, g, or t
  misc_feature (369)..(369): n is a, c, g, or t
  misc_feature (386)..(386): n is a, c, g, or t
  misc_feature (404)..(404): n is a, c, g, or t
  misc_feature (411)..(411): n is a, c, g, or t
  misc_feature (420)..(420): n is a, c, g, or t
  misc_feature (442)..(442): n is a, c, g, or t
  misc_feature (447)..(447): n is a, c, g, or t
  misc_feature (470)..(470): n is a, c, g, or t
tagctcaaaaagtttgaaaaaatgaagttttaacaggaagtcagtaaatgctcatagacccccttgtctctagcacttggggaaaaagagtcttggagtccttagagatgggaatcttgacagcagaatttcagatgtttcaatcacttgccaaggaagtgccacacttgctcttcttcattactttctttatttggtgaagatgataccgattcaactaatgatcttgcttcctcttgagtgcaagggaaagggctatcagatatctgcacgtttgtgcaatttataggctcctccattacaattcttnataaggcaatggtttccaacattgatgagtggggtttaataacttcaaggngcaaaagncttgtttttggaatttntccattaaaaggcaaatngggtttntggggtttncatttggggaccttatataatntaaancatttaggggtaggtttcggggnaaccggttttt

SEQ ID NO: 1462 - DNA, 355 bp, Homo sapiens
  I.1462 (R89811)
  misc_feature (32)..(32): n is a, c, g, or t
  misc_feature (123)..(123): n is a, c, g, or t
  misc_feature (275)..(275): n is a, c, g, or t
  misc_feature (312)..(312): n is a, c, g, or t
  misc_feature (349)..(349): n is a, c, g, or t
tcagcaaggcagggaatggtgggaaccagggntgtcccgctggagggtcaggagggagccacaagccgcctgggaggccgtatccggtcgttgatccagtccacatagttggccacgcgggtntagacccccggcttgtggagccgcccgcagccgtcaccccagctgatgatgccgtagaggtaagccacgccgttcttctcgcaggccaggggccccctgagtccccctggcaggcgtcggacttgcagtcgaagtagccggcacagagcatnttggggctgatgttcggcgccgtagacctcagggctnctgcacttgtgggtcggcgaccaggggggaccagggntttccc

SEQ ID NO: 1463 - DNA, 399 bp, Homo sapiens
  I.1463 (R88267)
  misc_feature (10)..(10): n is a, c, g, or t
  misc_feature (14)..(14): n is a, c, g, or t
  misc_feature (80)..(80): n is a, c, g, or t
  misc_feature (156)..(156): n is a, c, g, or t
  misc_feature (160)..(160): n is a, c, g, or t
  misc_feature (162)..(162): n is a, c, g, or t
  misc_feature (361)..(361): n is a, c, g, or t
  misc_feature (380)..(380): n is a, c, g, or t
cgcccacggnccgnctgatgtgggccgactcgttcttgccgttgatgagctgcagcccgaggatgccgtctggggcgtangcaggggcgttccccgagatctcgcgctcgccgaccagccacacgtacccggagcccgtcatgttcagcatcgcgnctgncngttatacagtggcagcatcgtcctcgctggcagaaaggatgatgacccgggcctccagctctttcgcctccatcagcagggccgtcacgttcttggtccctgggtcaaactgcagcaccttctctgccttggactcacgctcctccagcagcgtctccaggcgtttctgagccgcccggccctcgtggtcgtcgctgancagcaggatgatgtggttncagctgtagaacacggatc

SEQ ID NO: 1464 - DNA, 385 bp, Homo sapiens
  I.1464 (R88266)
  misc_feature (14)..(14): n is a, c, g, or t
  misc_feature (52)..(52): n is a, c, g, or t
  misc_feature (55)..(55): n is a, c, g, or t
  misc_feature (57)..(57): n is a, c, g, or t
  misc_feature (326)..(326): n is a, c, g, or t
  misc_feature (346)..(346): n is a, c, g, or t
cccgtgccgcgtgnaccccaagatcgtcaacattggcgcggtgctgagcagngananacgagcagatgttccgcgagccgtgaaccaggccaacaagcggcacggctcctggaagattcagctcaatgccacctccgtcacgcacaagcccaacgccatccagatggctctgtcggtgtgcgaggacctcatctccagccaggtctacgccatcctagttagccatccacctacccccaacgaccacttcactcccacccctgtctcctacacagccggcttctaccgcatacccgtgctggggctgaaccacccgcatgtccatntaattcggacaagagcattncacctgaagcttcctggcggcaacgtggccgccctaatt

SEQ ID NO: 1465 - DNA, 251 bp, Homo sapiens
  I.1465 (R88053)
  misc_feature (37)..(37): n is a, c, g, or t
  misc_feature (62)..(62): n is a, c, g, or t
  misc_feature (64)..(64): n is a, c, g, or t
  misc_feature (154)..(154): n is a, c, g, or t
  misc_feature (236)..(236): n is a, c, g, or t
ccacccgtcctgccagaggaaggccctggcgacactnaccgtcgcacacggccaccaacttntncagccccatctcgccgcccagccccctcacgcccaagtacggcagcttcatcagcagggacagctccctgacgggcatcagcgagttcgnctcatcctttggcacggccaacatagacagcgtcctcattgactgcttcacgggcggccacgacagctacctggccatccgngggagcgttcccagg

SEQ ID NO: 1466 - DNA, 281 bp, Homo sapiens
  I.1466 (R88052)
  misc_feature (258)..(258): n is a, c, g, or t
  misc_feature (279)..(279): n is a, c, g, or t
gcgcttgtcatttattattttatcacatatttacattccagtaggcagcctgtccccctgtccaacaaggccctttggtcctcactggtcggcctgctccagacccccaggtgcaggcgcgtgtccggagtcgaggctccgcgatgtcagacgttcagcaggaggggccggtgctcctcgtctgcagcgtcgctgggaggaatttcataaatgacaaacagggaggagtacaggcagcccaggaaggacacgaggctngagaagtacatcaccccgttngg

SEQ ID NO: 1467 - DNA, 394 bp, Homo sapiens
  I.1467 (R87714)
  misc_feature (10)..(10): n is a, c, g, or t
  misc_feature (58)..(58): n is a, c, g, or t
  misc_feature (333)..(333): n is a, c, g, or t
  misc_feature (342)..(342): n is a, c, g, or t
  misc_feature (377)..(377): n is a, c, g, or t
  misc_feature (384)..(384): n is a, c, g, or t
agatggcggntgcagatgctgctggaagaggaaatcccggggggccgccgggcttttntcgacagctacacaaatctggaacgggtggccgattactgcgagaacaactacatacagtcagcagataagcagagagccctagaagaaaccaaagcctacaccacccaatccttagcaagtgttgcctatctgataaacaccttggccaacaatgtcctgcagatgctggatatccagggcatcccagctacggaaggatgggaatcttcaatcaatcatattttcacaaacagttgatatttcataaaggggaaagtttgcaaggaagggggnaatttgggnatttttggacttaccccatttaaaaaccatttttnaaggggncacattaggg

SEQ ID NO: 1468 - DNA, 325 bp, Homo sapiens
  I.1468 (R87713)
  misc_feature (116)..(116): n is a, c, g, or t
  misc_feature (134)..(134): n is a, c, g, or t
  misc_feature (295)..(295): n is a, c, g, or t
tgacatacataaaaatggtcattttatttcaatccagacagctcagcattgtacaaatgatggcagaaagatccatttgttcagactcagcttgctttgtttttaatactggggantaaaccaaaaaaaaaagngtaatttttatcatttgtatccttcattctactttactggagtggaatccccagggccttcagataatctgggaagacctgactattcctgtgaggcaagcacagccctgctgagctttactcagattaatgcatgatagactcaacgtaattcccagggnaaaagcccagtcactccattccataactcc

SEQ ID NO: 1469 - DNA, 486 bp, Homo sapiens
  I.1469 (R87370)
  misc_feature (81)..(81): n is a, c, g, or t
  misc_feature (89)..(89): n is a, c, g, or t
  misc_feature (317)..(317): n is a, c, g, or t
  misc_feature (420)..(420): n is a, c, g, or t
  misc_feature (449)..(449): n is a, c, g, or t
  misc_feature (481)..(481): n is a, c, g, or t
ctgaagtgggtcttgacaaagttgaggatgtcatccggcaaggcgctggaggcattgtactgcatcccgggggctgcgcanacccggcncggggtcgaggcacctgatcctccggcaccggcgtccagatggactcgggggacttctgctctcggaagcggccttcaaacacagctgccacctgtgtcaggtcaaaggcgcagacagccgagccagggatgctgttgctgggcgtggaaaaaacggccaggaccacgggccggcccccgaggcttgaccacgcccgtgacagcctgcagcacgttgaagtagaaatnggagttttccgggtacagagcagtttgagccgcgcctttcaggaaggacgttccactgctttttcagcacgcgggggggagcctttccacgttcgtttttttncaaaattggggccaagcggggaacaacancaacttttttcaggtagttaaatttcattcgnaattt

SEQ ID NO: 1470 - DNA, 172 bp, Homo sapiens
  I.1470 (R87331)
  misc_feature (19)..(19): n is a, c, g, or t
catgcagaccccgcgagcntcccctccccgcccggccctgctgcttctgctgctgctactggggggcgcccacggcctctttcctgaggagccgccgccgcttagcgtggcccccagggactacctgaaccactatcccgtgtttgtgggcagcgggcccggacgcctgacc

SEQ ID NO: 1471 - DNA, 240 bp, Homo sapiens
  I.1471 (R87218)
  misc_feature (29)..(29): n is a, c, g, or t
  misc_feature (31)..(31): n is a, c, g, or t
  misc_feature (34)..(34): n is a, c, g, or t
  misc_feature (77)..(77): n is a, c, g, or t
  misc_feature (79)..(79): n is a, c, g, or t
  misc_feature (89)..(89): n is a, c, g, or t
  misc_feature (154)..(154): n is a, c, g, or t
  misc_feature (157)..(157): n is a, c, g, or t
  misc_feature (230)..(230): n is a, c, g, or t
tgacctcacggtttgcagggcagcgcagngncancaggcagaggagcatgcagagcgcgtggcacgggtgcacagcnantggcgaaggncccctgcccgggcacctcctctggaccgcccctgcacgccttgggaccctcgggccagccggccnctncctcccaacaacccccagaggtcctgggtgagcaaacagagtggccggggcaggcttggcaccagggctggtntgagcccaga

SEQ ID NO: 1472 - DNA, 401 bp, Homo sapiens
  I.1472 (R87217)
  misc_feature (92)..(92): n is a, c, g, or t
  misc_feature (329)..(329): n is a, c, g, or t
  misc_feature (371)..(371): n is a, c, g, or t
gctaccctctgtgccaccacagcttccgccgggccttcaccaagctgctctgcccccagaagctcaaaatccagccccacagctccctgganactgctggaagtgagtggcccaccagagcctccctcagccacgcctctctcagcccaggtctcctggaattctggccctgctgccccctacccggctcgttcccccaggggtgagccccgccgtgtctgtggccctctcttaatgccacggcagccaccctgccatggaggcgccttcctggggttggccagagggcccttcactggctggactggaggctgggtggccggccctgncccccacattttgggtccaccgggaggaacagtctggaggtnccagacattgttgcccaccccttgctggtg

SEQ ID NO: 1473 - DNA, 486 bp, Homo sapiens
  I.1473 (H39991)
  misc_feature (296)..(296): n is a, c, g, or t
  misc_feature (399)..(399): n is a, c, g, or t
  misc_feature (404)..(404): n is a, c, g, or t
  misc_feature (417)..(417): n is a, c, g, or t
  misc_feature (429)..(429): n is a, c, g, or t
  misc_feature (435)..(435): n is a, c, g, or t
  misc_feature (447)..(447): n is a, c, g, or t
  misc_feature (459)..(459): n is a, c, g, or t
  misc_feature (464)..(464): n is a, c, g, or t
caacctttatagtgttatgtcaaataggtctgacataagcttaaataaatatatactttaaaaattataaaatattttaagttataatttaaaattctcaataaaactcaaacacaaaccacactggtatttcacacagctaatttctaatgcagtttacataaatatttacaacacttaaacaatttcaaagaaaataacactgtattccatacatagcctgatcacagtagttgttctctcttatttcccagagtttttctgcccctttaaaaggaacctctggctgttctganccttatcacatctctgttttgactgttgggctttggttggttgccagtggttcggccaggaacttctctgggaaactttttttttcaacactggctagggtanggggngtgtagggggggnggtttggtttcntcacantccctcagggtngggggcgggttnggggnattaccggcggggggttttttc

SEQ ID NO: 1474 - DNA, 478 bp, Homo sapiens
  I.1474 (H39560)
gcctactatgccagatgcctttatggctgaaaccgcaacacccatcaccacttcaatagatcaaagtccagcaggcaaggacggccttcaactgaaaagactcagtgttccctttcctactctcaggatcaagaaagtgttggctaatgaagggaaaggatattttcttccaagcaaaggtgaagagaccaagactctgaaatctcagaattccttttctaactctcccttgctcgctgtaaaatcttggcacagaaacacaatattttgtggctttctttcttttgcccttcacagtgtttcgacagctgattacacagttcctgtcataaggaatgaataattaattatccagagtttagaggaaaaaaatgactaaaaatattattaacttaaaaaatggacaggtgttggatgcccacaggcaaatgcatgggggggttgtttaatgggtgcaaatccctacttgaatgctctt

SEQ ID NO: 1475 - DNA, 321 bp, Homo sapiens
  I.1475 (H39057)
  misc_feature (85)..(85): n is a, c, g, or t
  misc_feature (313)..(313): n is a, c, g, or t
tttttttttttttcacaggaacaattcttttattgtacattggagaaatagccctgtgtgctggttcaaggtgcaacatacagantattgaattaagaaaagagggaacggggaagggaagggaaacctcttgaggtccaaagttgcaaacaaaaaatggtaaaagatttcctcacgcaagaggcatttttgcaaataccatgcaaaacaggcagctggtgtgccttaagagaatccctataaataacagaaaagacactccaagcattcctgtacgtggactcagagcacagaggagaaggaaactaaaatnccttttgg

SEQ ID NO: 1476 - DNA, 434 bp, Homo sapiens
  I.1476 (H39034)
  misc_feature (409)..(409): n is a, c, g, or t
  misc_feature (417)..(417): n is a, c, g, or t
  misc_feature (429)..(429): n is a, c, g, or t
ttgaagatgataggattgatgacgtgctgaaaaatatgaccgacaaggcacctcctggtgtctaactcccccaaagacaatgagttaagggagagaataagaacggcggtaacagttattggcaaaaagcatgaaaagagaaagcactttgaaatttattactagcttgctacccacgatgaaatcaacaacctgtatctgggtatcaggccgggagacagatgaggcgagaggaggaggaggaggaggagaaggctctgggctcctctgcaaaaataaaaataaaaaaataaataaaatttttaaaaataataaaaatttcactatattacacatataaaggaattaaaaggaagtctcagtttgcagctttttgttcaaatttattttccctttcctttttattttnccggtggnttttttgccgcnttttt

SEQ ID NO: 1477 - DNA, 293 bp, Homo sapiens
  I.1477 (H38679)
  misc_feature (173)..(173): n is a, c, g, or t
  misc_feature (174)..(174): n is a, c, g, or t
  misc_feature (279)..(279): n is a, c, g, or t
tctaaggaggctctgggaaattatgtcatttgtccaaagccacacgtctaataaattacagacccaggatgagacccagctatatcttcctgcaacacctgtgttgccagtttattggcagcctctgcagttcaggaggacctagcttgtcccttgggaccacctgaccaggnngcctgggatgaggaactgggaggccttgaactaggcatccttcacttgaattatcaggtcagcctttgagcctgggagaccaacaggagacaggggccctatggnatcacaacccaggt

SEQ ID NO: 1478 - DNA, 427 bp, Homo sapiens
  I.1478 (H38522)
  misc_feature (1)..(1): n is a, c, g, or t
  misc_feature (333)..(333): n is a, c, g, or t
  misc_feature (384)..(384): n is a, c, g, or t
ngttctccaatccatgaagcaatcctgaaaagacagtgttttattacaaaattaggcaaatgttccgtctccatcctttctttctttttctggtatgtgtgtatgggtgtgtgtggttttttttttttttttctcccttctctcctttgccctcacaacacggcgacaggaagccaatcacatttttcagtttattaacctgggctggcagtccaatcacactgcagagtgaaaaaggcttctgggcagcccagctctgcccagctcactgtgccttgggaggcggtgggtgggtgggtgggacggcagccccgctgggcaggagggccactnttggaaggaggagagttctgggatgggactcaggcagagggtgggagggtnggccctgaaggctgggctaacagggtgccaggagtttcccccg

SEQ ID NO: 1479 - DNA, 386 bp, Homo sapiens
  I.1479 (H38521)
gtaaccgccgccagaaagaaaaaagaatcaacccaccaagcagtggtgggaccagcagctcacctattaaagcaattttccccagcccaacttcactggtggcgaccacaccaagccttgtgactagcagtgcagcaactaccctcacagtcagccctgtcctccctctgaccagtgctgctgtgacgaatctttcagttacaggcacttcagacaccacctccaacaacacagcaaccgtgatttccacagcgcctccagcttcctcagcagtcacgtccccctctctgagtccctccccttctgcctcagcctccacctccgaggcatccagtgccagtgaggaccagcacaacacaggaccacctccattccttttgttcctt

SEQ ID NO: 1480 - DNA, 524 bp, Homo sapiens
  I.1480 (H38087)
  misc_feature (10)..(10): n is a, c, g, or t
  misc_feature (11)..(11): n is a, c, g, or t
  misc_feature (24)..(24): n is a, c, g, or t
  misc_feature (26)..(26): n is a, c, g, or t
  misc_feature (31)..(31): n is a, c, g, or t
  misc_feature (33)..(33): n is a, c, g, or t
  misc_feature (34)..(34): n is a, c, g, or t
  misc_feature (35)..(35): n is a, c, g, or t
  misc_feature (38)..(38): n is a, c, g, or t
  misc_feature (48)..(48): n is a, c, g, or t
  misc_feature (426)..(426): n is a, c, g, or t
  misc_feature (442)..(442): n is a, c, g, or t
  misc_feature (460)..(460): n is a, c, g, or t
  misc_feature (468)..(468): n is a, c, g, or t
  misc_feature (505)..(505): n is a, c, g, or t
  misc_feature (513)..(513): n is a, c, g, or t
cggggctggnncgcctgcagggantntaggntnnnagnttgcccactnactacgggaaacacggaacgccacagaagtatgatcccactttcaaaggacccatttacaatagcctggactcatggagaccctcgaaaggtgatctaccccactgatagccggggcaggttctgcgggcagaagggcacaaaaaacgagaacaaaccctatctgttttatttcaacattgtgaaatgtgccagccccctggttctgctggaattccaatgtcccactccccagatctgcgtggaaaaatgccccgaccgctacctcacgtacctgaatgctcgcagctcccgggactttgagtactataagcagttctgtgttcctggggttcaagaacaataaaggagtggctgaggtgttttcgagatgggtgantgccctgctgttcctnattccccagcaaaccttnggcccggngatgtttccccgttattccaaggttacaagggtgtcntgatggtngggaatgagga

SEQ ID NO: 1481 - DNA, 348 bp, Homo sapiens
  I.1481 (H30677)
  misc_feature (156)..(156): n is a, c, g, or t
  misc_feature (162)..(162): n is a, c, g, or t
  misc_feature (169)..(169): n is a, c, g, or t
  misc_feature (219)..(219): n is a, c, g, or t
  misc_feature (252)..(252): n is a, c, g, or t
  misc_feature (280)..(280): n is a, c, g, or t
  misc_feature (344)..(344): n is a, c, g, or t
cacagagccaggcactgctgcacgcccaacccatcatcagcatccgcgtgtggggcgtcgggcgggacagtggaagagagagggactttgcctacgtagctcgtgataagctgacccagatgctcaagtgccacgtgtttcgctgtgaggcacctnccaagnacatcgncaccagcctgcatgagatctgctctaagatcatggccgaacgggtaaatncccgctgcttggtaaatggactctccctgggancactctaaacttgttggatgtccctttncaagtggaatttccagcggctaagaaatgagttggtccagaagtttccaagtcttatttacctngggg

SEQ ID NO: 1482 - DNA, 409 bp, Homo sapiens
  I.1482 (H30045)
  misc_feature (11)..(11): n is a, c, g, or t
  misc_feature (363)..(363): n is a, c, g, or t
  misc_feature (386)..(386): n is a, c, g, or t
  misc_feature (394)..(394): n is a, c, g, or t
actgcaatganaattcagagtctttaatatgcaaatgttaagaaaaggatacagtatgccacatttcccaaacttatttgtccatagacacttctatttacagaactgtgttaatgtctcttgaaacaatggtcatagaacagtttgggttaaagctatttaaaaatgaacaggctgtcttctaaaggagtagggtcaggttcacatcaagatatctggaaaaactggttggtctggctgccgctcttatatttctgaaatgcttgtcattaaaactgaagtatataaagtttggggcacttaggagcaatttctcttacctgttaacagtaaccattatctgttaatattaacagggtgccngttaacctggaccattgttacgnatttaacnttaaccggtatgggg

SEQ ID NO: 1483 - DNA, 479 bp, Homo sapiens
  I.1483 (H30044)
  misc_feature (50)..(50): n is a, c, g, or t
  misc_feature (95)..(95): n is a, c, g, or t
  misc_feature (181)..(181): n is a, c, g, or t
  misc_feature (469)..(469): n is a, c, g, or t
aattcggaacgaggggtcatgaaaaaaaattgagaaacattacctcatanacaatgaatgaatcagaggacagacacgggaatggcacgactgtnaggtgtgttactaggaaaaaagttcagaatcactgttctagagagcttcatttccattggttttaaaacattattctcatgtagancagtgttgggtctcatactgttaatgttaatacgtaacaatgttcatgttaacaggcacctgttaatattaacagataatgttactgttaacaggtaagagaaattgctctaagtgcccaaactttatatacttcagttttaatgacaagcatttcagaaatataagagcggcccagacccagcccagtttttccagatatcttgatgtgaacctgaccctacttcctttaggaagacagcctgttcatttttaaatagcttttaaccccaaactgttctatggaccnttggtttcaa

SEQ ID NO: 1484 - DNA, 483 bp, Homo sapiens
  I.1484 (H28741)
  misc_feature (20)..(20): n is a, c, g, or t
  misc_feature (23)..(23): n is a, c, g, or t
  misc_feature (25)..(25): n is a, c, g, or t
  misc_feature (478)..(478): n is a, c, g, or t
gggagttgcgcgggctgacngancntattgtagcgggtttcgggcgggccacggtgcgggacaggaacccaaccccagccgaccttgagctccaggagttcgtctcttacgtctgcggaagtgcagctgcctcagttcttagcgcaggttgacaactacaggcacaagccattgaagctggaatgtcctgttgctggtatttcaattgacttaagccaactatcccttcagttacaataggaaagtgcctctaataaggccaaatatgcgtactaacttgtagcaaccacgtgtccgtgcagtgccacaggagctagagcagtgacaatgctggtggcaacagggcagtgtagcaggtgcttcatgttcaacttttcaaccttttcatttaattgtcacaattcggaggtgggattcttgttagggacaggctgccccagggaccaattccgcccccggttaactcaatgcagctgancctta

SEQ ID NO: 1485 - DNA, 462 bp, Homo sapiens
  I.1485 (H28769)
  misc_feature (236)..(236): n is a, c, g, or t
  misc_feature (299)..(299): n is a, c, g, or t
  misc_feature (341)..(341): n is a, c, g, or t
  misc_feature (372)..(372): n is a, c, g, or t
  misc_feature (400)..(400): n is a, c, g, or t
  misc_feature (446)..(446): n is a, c, g, or t
aagtaagtttattaacctgccaggcttctccaccagtcggaggtggcagccctgagcttacaaaatgaggggtttatatgggggagagagaccctggggttgttagtcaattaactttaccacatataatctcatgaccggcttacaatatattatcttgtgaaaataggattttacaagggggtgtaatccacgtttctcatgacctcccccgtgccacccagagggcttcggtntagcaagtctggtgaccttgctatagcgcctagataacggttcaggaatgcagctgcagagtnttcagggtaagggtcagctgcattgagttagcgggggcggantggtcctgggggcagcctgtccctaacagantccacctccgagttgtgacaattaattngaaaaggttgaaaaggtgaacatgaagcacctgctacactgccctnttggccaccagctttt

SEQ ID NO: 1486 - DNA, 369 bp, Homo sapiens
  I.1486 (H28119)
  misc_feature (269)..(269): n is a, c, g, or t
  misc_feature (355)..(355): n is a, c, g, or t
  misc_feature (360)..(360): n is a, c, g, or t
  misc_feature (366)..(366): n is a, c, g, or t
ttagtgatatcaatacagcagaggtgcccatggagcagggggaagggacccatgcctggaccagtcccttcctccttctgcccctgctgggtccaggaggatgaggcctggcctggaccagttcctcctgttccacctgaaacacatggggatggagaaccagggctggccttgcttcctgctcctcttgttaccactccagtgttatcacttccttgaagggattagatctctccctccccagctcctaggcagggaaccgtagctantggggaggggcatatttgggaggcctgaggctaagggaatagcctctagacccctccctgacccacaacctttagttccctggggnccaanaaaagnagg

SEQ ID NO: 1487 - DNA, 338 bp, Homo sapiens
  I.1487 (R84486)
  misc_feature (56)..(56): n is a, c, g, or t
  misc_feature (118)..(118): n is a, c, g, or t
  misc_feature (260)..(260): n is a, c, g, or t
  misc_feature (306)..(306): n is a, c, g, or t
  misc_feature (334)..(334): n is a, c, g, or t
ctagggggttatggtgagaagggggaaggatccaggacccacatcttaggccatgngggcagctcaggagtccctcttgggctggatagtctgcacagaagattgcccaaaggggctntgcgggtggcgagaaccatgactggccactggcattgcggaaaatgggtgacaactgctgactctggctcatccccgaagacctccacgtggctgtcggcttcggggtccaagggctctgcttggtgtcctggctcagccgnactatcatggcccagaagaggcagatggcgagcagaactccagctngccacacagagcgctgtgcctgccaggngaca

SEQ ID NO: 1488 - DNA, 475 bp, Homo sapiens
  I.1488 (R84393)
  misc_feature (324)..(324): n is a, c, g, or t
  misc_feature (340)..(340): n is a, c, g, or t
  misc_feature (370)..(370): n is a, c, g, or t
  misc_feature (450)..(450): n is a, c, g, or t
attccaagccccccccggtcccctatccaaggacaaatgtagggcctctaggatgtcccagacccacctcggagggccagtcagttcaggtaggtcaggcccagttctcttccctcccgacagaccccgggcccggaaagcaccgaagaccatgatgctggctggagtgaagacactcgtttccgtatcaagagctgagcctaagaaatgctcatcgttggtcaggctgggtctgggccaaagggacagacagaaagaaatactgtctccacgggaggaagagggagaggagggaggatggagagcggtgggcatgcagggganttggcagggcagggtngagaaggtgggaccactggggaggggaccnaggtaagagtggctcttcagagcagggtgaagagtctgtggcctaacggaaacagaaaggagcgcccccaacccccattnctttttggttcattcattattggtt

SEQ ID NO: 1489 - DNA, 386 bp, Homo sapiens
  I.1489 (R84392)
  misc_feature (380)..(380): n is a, c, g, or t
ggatctccgcttagccattgcgctgggtgatgcggtcaaccatccgactcccatggcagctgcagcaaatgaggtgtacaaaagagccaaggcgctggaccagtccgacaacgatatgtccgccgtgtaccgagcctacatacactaagctgtcgacaccccgccctcacccctccaatcccccctctgaccccctcttcctcacatggggtcgggggcctgggagttcattctggaccagcccacctatctccatttccttttatacagactttgagacttgccatcagcacagcacacagcagcacccttcccctgaggccggtggggaggggacaagtgtcagcaggattgggcgtgtgggaaagctttttgagctngggcaa

SEQ ID NO: 1490 - DNA, 354 bp, Homo sapiens
  I.1490 (R83896)
  misc_feature (7)..(7): n is a, c, g, or t
  misc_feature (28)..(28): n is a, c, g, or t
  misc_feature (38)..(38): n is a, c, g, or t
  misc_feature (49)..(49): n is a, c, g, or t
  misc_feature (61)..(61): n is a, c, g, or t
  misc_feature (95)..(95): n is a, c, g, or t
  misc_feature (103)..(103): n is a, c, g, or t
  misc_feature (104)..(104): n is a, c, g, or t
  misc_feature (173)..(173): n is a, c, g, or t
  misc_feature (228)..(228): n is a, c, g, or t
  misc_feature (250)..(250): n is a, c, g, or t
  misc_feature (323)..(323): n is a, c, g, or t
  misc_feature (338)..(338): n is a, c, g, or t
aataatngaggcacaactacctcctgcnttcccaacancttaataaaanagacaataaggnttaacagtgaaattaaaattaaaaaatacaaaancctaaggnnctggagacaaaactgactagagtctatgtgtagccaagttgtgaatgacagtttagccttgcagagttnccttctcctccaattacaatgtgttacagaatttggaagggggtgtctttaaaancgttctaattcaccccggtcangggggggaggaggaggaagtccagctcagcaaggccaagtgcctcggccagggcggtggggtcagcgctgagngggtcaagagcccgngcccgggggccatccc

SEQ ID NO: 1491 - DNA, 464 bp, Homo sapiens
  I.1491 (R83895)
  misc_feature (386)..(386): n is a, c, g, or t
  misc_feature (403)..(403): n is a, c, g, or t
  misc_feature (446)..(446): n is a, c, g, or t
gacagccgtgcctgttcgccgctctccctaagtctgattctcatcgaggcccctcgcttctatgactgtgcttgcagaagagtaaacactctcggatgccgctgtcctgggggagcccgcgggagcctgtgaatgttgatacgagctggccagtcctgggcccagctcacttgtccagctacctgccaggtggctttcactgtgtttaaaatacattgcattccaagctggtcccctctgtgtatcactctactgagaaatcctgcctagtgtgttttgggatgtgtcctagcatttacaagaaaatgaaaagcgtcctcttaattgggcacccgaatgttggctgtggctcagtcacatattcccaggggccctcgttcccgagnccgtggttgccccgagnccccgaggccctttggcagctcaccttgggttgttttttccgnaaacccgtaaacggaagc

SEQ ID NO: 1492 - DNA, 378 bp, Homo sapiens
  I.1492 (R83833)
  misc_feature (352)..(352): n is a, c, g, or t
  misc_feature (368)..(368): n is a, c, g, or t
gacagtggcgtttatcaccctcaaccaggcctggcttgggcttcactgtaactgtgtgacgtggggccagtggatcacttgggtgcctcaatttggcctcttctacccatgtgcaggctggtagggcagtcgggttgggcatctggtgaggttccccctattgtacccagttacggccccactccccaccatttcccagcctcctgttgcccctctccctgtggagacgctgcctgtggaaaggggcctccttctgggctcatgggctcccttcttgcagctgggagggaatggggagctcaaaaagaacttcctagtaggcagccagtcagcatcttcgaaaaggagcgtntcccctcagggggctnggcaattggg

SEQ ID NO: 1493 - DNA, 409 bp, Homo sapiens
  I.1493 (R83832)
  misc_feature (357)..(357): n is a, c, g, or t
  misc_feature (388)..(388): n is a, c, g, or t
aagaatgaattcattcattcatccatattctgggagcaaaggaaattggagttaacaaaaccaacccagaaactccttcctggtcctctatcaagtgcagcagaaggtcatggaacaaatgacttcaagagtgttacttgttactgaagggtcagtaagagataatgacctttaggatctatttttgcacatcaagggtgggcaaaagcaacccgcaaatggagtcttaaaaggtgcctaggtgtctgctggcctacaagggtgggaaggtgttccagggctgtgggcctggcttgagcagtggcctgggaggtgagactcagcctgggcatgcaccctcgagaccctcttggccanttcctgtttccccagtgtgagtttccagtgnccatgagcagccctgggcccc

SEQ ID NO: 1494 - DNA, 489 bp, Homo sapiens
  I.1494 (R83394)
  misc_feature (423)..(423): n is a, c, g, or t
  misc_feature (449)..(449): n is a, c, g, or t
  misc_feature (485)..(485): n is a, c, g, or t
tttgtactgctaaagaagcagctttggaggaagcagaattagaaagcctggacccaatgaccccagggccctacacgcctcagcctcctgatttgtatgataccaacacatccctcagtatgtctcgagatgcctctgtatttcaagatgagagcaatatgtctgtcttggatattcccagtgccactccagaaaagcaggtaacacaggaaggtgaagatggagatggtgatcttgcagatgaagaggaaggaactgtacaacagcctcaagccagtgtcctgtatgaggatttgcttatgtctgaaggagaagatgatgagggaagatgctggggagtgatgaagaaggagacaatcctttcttctgctattcccagctgagtgaaagtgggaagtgactcttgatgttgggttcttggtnggattaaggacccaaacaaccccgcntgtttccagggagaacacaaggttggacttgggaantgtt

SEQ ID NO: 1495 - DNA, 486 bp, Homo sapiens
  I.1495 (R83300)
  misc_feature (1)..(1): n is a, c, g, or t
  misc_feature (4)..(4): n is a, c, g, or t
  misc_feature (5)..(5): n is a, c, g, or t
  misc_feature (71)..(71): n is a, c, g, or t
  misc_feature (85)..(85): n is a, c, g, or t
  misc_feature (106)..(106): n is a, c, g, or t
  misc_feature (122)..(122): n is a, c, g, or t
  misc_feature (446)..(446): n is a, c, g, or t
  misc_feature (458)..(458): n is a, c, g, or t
  misc_feature (471)..(471): n is a, c, g, or t
ntanntttaggagaggtgatttattatcatttacttactacttttaaaaaggctaaggtgttagttaattncatgatttcaggancagatactgtacaaatatgancaaattggggaaaggngaaccacctaggctggagaacagggaaggctgaccaaggaggcccaaaggaagcctcattcatcagagtccaagtcactgtccccagcaatggagtggaaatcctcactgtcctcctcgtcctctgacaggtggacctggcttagtacgctcggcccagagcgctgctcttcctcctcctcatcttcttcctcctctgatacctcatacccaccgatgctgctgaagcttgtgtcttgggtgttcgacttgggatcaggctcctcatagctcccataaactgatgttgctatcctccaaaccatggggaaggctccccaccgtntccctcataggncattcatggtttntttcattttccattt

SEQ ID NO: 1496 - DNA, 310 bp, Homo sapiens
  I.1496 (H46671)
  misc_feature (28)..(28): n is a, c, g, or t
  misc_feature (45)..(45): n is a, c, g, or t
  misc_feature (47)..(47): n is a, c, g, or t
  misc_feature (173)..(173): n is a, c, g, or t
  misc_feature (187)..(187): n is a, c, g, or t
  misc_feature (287)..(287): n is a, c, g, or t
  misc_feature (289)..(289): n is a, c, g, or t
  misc_feature (290)..(290): n is a, c, g, or t
aataatcatgtgatgatttatttatatnctgggaaaatatttatntncaaatactcatatgcaaagaaaggaatcagtttgagaaatcctgacctcaaacaattcgaaatcttgtttgaaagcggggggttcagggtgtcctccacacactcatgagcggggaatgacacagngtttgtaacgtggngggatacagccaaacccaatatgtatagggctgaggtcgatatcctttgggtcaacgagaggcttcaaattaaaatgctgcaaaatggcacacaacaaangnnacaactccatgcgagccagg

SEQ ID NO: 1497 - DNA, 501 bp, Homo sapiens
  I.1497 (H46670)
  misc_feature (316)..(316): n is a, c, g, or t
  misc_feature (357)..(357): n is a, c, g, or t
  misc_feature (387)..(387): n is a, c, g, or t
  misc_feature (425)..(425): n is a, c, g, or t
  misc_feature (433)..(433): n is a, c, g, or t
  misc_feature (471)..(471): n is a, c, g, or t
  misc_feature (500)..(500): n is a, c, g, or t
gatccctgccatcaaggataggcaagagatgccctacatggatgctgtggtgcatgagattcagcggttcatcaccctcgtgccctccaacctgccccatgaagcaacccgagacaccattttcagaggatacctcatccccaagggcacagtcgtagtgccaactctggactctgttttgtatgacaaccaagaatttcctgatccagaaaagtttaagccagaacacttcctgaatgaaaatgggaaagttcaagtacagtgactatttcaagccattttccacaggaaaacgagtgtgtgctgggagaaggcnggggttcgcatgggagttgttttctttttgttgtgtggccnttttgcaggcatttttaattttgaaaggcntttcgttggacccaaagggttattcgaacctcaggccnattacatnttggggtttggctgttattccccaccacgtttacaaantttgtggtcaatttccccgttcaggagtnt

SEQ ID NO: 1498 - DNA, 352 bp, Homo sapiens
  I.1498 (H45618)
  misc_feature (10)..(10): n is a, c, g, or t
  misc_feature (11)..(11): n is a, c, g, or t
  misc_feature (15)..(15): n is a, c, g, or t
  misc_feature (177)..(177): n is a, c, g, or t
  misc_feature (190)..(190): n is a, c, g, or t
  misc_feature (199)..(199): n is a, c, g, or t
  misc_feature (203)..(203): n is a, c, g, or t
  misc_feature (207)..(207): n is a, c, g, or t
  misc_feature (256)..(256): n is a, c, g, or t
  misc_feature (263)..(263): n is a, c, g, or t
  misc_feature (277)..(277): n is a, c, g, or t
  misc_feature (313)..(313): n is a, c, g, or t
  misc_feature (318)..(318): n is a, c, g, or t
aaattcgaanntatnttattaaatataaattgtctaaacaccaattaaaagacagatatttttagactggataaaaattatacccaactacatgcagtctgtaagaaacacattttaaatacaataatatagatatatttaaagtaacatgatggaaaaagatataccacaaaaacnctaatcaaaaganagttgaccngggngtgntggctcatgcctgtaatcccaggcactttgggaggccgaggcgggtggntcacaangtcaggagtttganaccaacctgacgaatgtgggggaaaccccgtctctncgggnaattacaaaaattaggctggggcgcagtgggcct

SEQ ID NO: 1499 - DNA, 352 bp, Homo sapiens
  I.1499 (H45617)
  misc_feature (253)..(253): n is a, c, g, or t
gatctggctaaatggacatcatgttttctggtgatgcccaaagaggagagaggaagctctctttcccagatgccccagcaagtgtaaccttgcatctcattgctctggctgagttgtgtgcctgtttctgaccaatcactgagtcaggaggatgaaatattcatattgacttaattgcagcttaagttaggggtatgtagaggtattttccctaaagcaaaattgggacactgttatcagaaataggagagtngatgatagatgcaaaataatacctgtccacaacaaactcttaatgctgtgtttgagctttcatgagtttcccagagagacatagctgggaaaattcccc

SEQ ID NO: 1500 - DNA, 288 bp, Homo sapiens
  I.1500 (H45374)
ggcctgtttgaccatccctgaatgggaacgagacacaacgatccttggggtcttctcattgtaggaagagctggctttcacatttgaaccaccatctaccattgcccaagctgtatattcggaaaatggcttatgtataactcctagcatgggtttaccatttacagccacacacaccatagtagtgacgtactttcgaagatcctctgtatattcctgtgtagcatcaagtggggtcaatccagacagtaacactttctgctgggtacctctttagggagtagttac

SEQ ID NO: 1501 - DNA, 545 bp, Homo sapiens
  I.1501 (H45298)
  misc_feature (7)..(7): n is a, c, g, or t
  misc_feature (17)..(17): n is a, c, g, or t
  misc_feature (36)..(36): n is a, c, g, or t
  misc_feature (39)..(39): n is a, c, g, or t
  misc_feature (67)..(67): n is a, c, g, or t
  misc_feature (498)..(498): n is a, c, g, or t
gggcttngggggcaccntagacttgcgcgagaatgncangctgtgtcagtgctggccgcagtccgcnggcgaacgaggtgaggcgcgtccggagagcaacgtcctccacgagaagtccaaggggaagacgcgcgagggagccgaggacaagatgaccagcggcgacgtgctgtccaaccgcaagatgttctacctgctcaagaccgccttccccagcgtccagattaatactgaggaacacgtggatgcagctgatcaggaggttatcttgtgggatcataagattcctgaggatatcctaaaggaagtaactactcctaaagaggtaccagcagaaagtgttactgtctggattgacccacttgatgctacacaggaatatacagaggatcttcgaaagtacgtcactactatggtgttgtgtggctgtaaatggtaaaccctggttaggattatactaagccttttccgatatacagttgggcatggtaggtggtngttcaatgtgaaagccagttttcctacatgaggaggcccaaggttcc

SEQ ID NO: 1502 - DNA, 384 bp, Homo sapiens
  I.1502 (H44908)
  misc_feature (24)..(24): n is a, c, g, or t
  misc_feature (41)..(41): n is a, c, g, or t
  misc_feature (45)..(45): n is a, c, g, or t
  misc_feature (51)..(51): n is a, c, g, or t
  misc_feature (87)..(87): n is a, c, g, or t
  misc_feature (353)..(353): n is a, c, g, or t
  misc_feature (358)..(358): n is a, c, g, or t
gtttgtgcgcggccagggctgggngcctccgctgcccggancaanccagancttccagctgcctctcatgtacttgtctgttggggntttgtgttgatcaggagtgaattcacagtctaccatgaattggaaggttcttgagcacgtgcccctgctgctgtatatcttggcagcaaaaacattaattctctgcctgacatttgctggggtgaaaatgtatcaaagaaaaaggttggaggcaaaacaacaaaaactggaggctgaaaggaagaagcaatcagagaaaaaagataactggaagattcttgccatgttaaatgtccagctttgagtgggacttccagctggaggangttcngagaaggaaaggactttaattgattt

SEQ ID NO: 1503 - DNA, 449 bp, Homo sapiens
  I.1503 (H44819)
  misc_feature (9)..(9): n is a, c, g, or t
  misc_feature (10)..(10): n is a, c, g, or t
  misc_feature (12)..(12): n is a, c, g, or t
  misc_feature (46)..(46): n is a, c, g, or t
  misc_feature (91)..(91): n is a, c, g, or t
  misc_feature (103)..(103): n is a, c, g, or t
  misc_feature (126)..(126): n is a, c, g, or t
  misc_feature (139)..(139): n is a, c, g, or t
  misc_feature (153)..(153): n is a, c, g, or t
  misc_feature (179)..(179): n is a, c, g, or t
  misc_feature (198)..(198): n is a, c, g, or t
  misc_feature (202)..(202): n is a, c, g, or t
  misc_feature (265)..(265): n is a, c, g, or t
  misc_feature (280)..(280): n is a, c, g, or t
  misc_feature (291)..(291): n is a, c, g, or t
  misc_feature (309)..(309): n is a, c, g, or t
  misc_feature (327)..(327): n is a, c, g, or t
  misc_feature (403)..(403): n is a, c, g, or t
  misc_feature (413)..(413): n is a, c, g, or t
  misc_feature (429)..(429): n is a, c, g, or t
  misc_feature (447)..(447): n is a, c, g, or t
gctagatannanagccatttaatccataaacacaaagacacatgantgggcaaattctgtaaatgaaagcaatctggcaaaagcccttggnggtgagcttggnctccctcacaggcaatgacagtnttggccatgggtntagacaacacacanttccaatgcagcctaggaggacattntggaagtgagctgggaganccantgatgcagaaagtagactcaggagaggcacagagattgcaccccctgccccaagtgcagtggntcagagagctcagancagagaagagntgaggagctcatggcctntcgtaggcctagcctagngcacacttactgctcactatcttattgtccatcattttaaggtcaaacatccccagttcagtgagggtttacattntccatttttncccccctaagggaagntgggggtaaccctaaagntt

SEQ ID NO: 1504 - DNA, 447 bp, Homo sapiens
  I.1504 (H44818)
  misc_feature (322)..(322): n is a, c, g, or t
  misc_feature (373)..(373): n is a, c, g, or t
  misc_feature (391)..(391): n is a, c, g, or t
  misc_feature (440)..(440): n is a, c, g, or t
gagactgcgtctcaaaaaaacaaaacaaaacaaaacaaaaatccatgaacaagtggacctgcccagttcaaatcattgttgttcaagggtcaattgtatattattttcactggaagttttgaaattccagaaatatgcttggaaatccccgcttgaaatctccttggttggaaaccagtccagtgggtgactgggcccagaatgatgcttctcctcggtggaccccctgggctgagcagcctgtgttcctgcctcaactcccctgaaccctcctgaactttctacacacatgtggggcactgggctttgatactgggcattngggaaggggcacttggggaaattcaggaggaagttacccattatttaaggntaaaatggatgttttatncaatggaaggcaggacttttttcatttcttttttattggattctttcangtttttc

SEQ ID NO: 1505 - DNA, 180 bp, Homo sapiens
  I.1505 (H44193)
  misc_feature (43)..(43): n is a, c, g, or t
  misc_feature (55)..(55): n is a, c, g, or t
  misc_feature (68)..(68): n is a, c, g, or t
  misc_feature (117)..(117): n is a, c, g, or t
ctccagggcccctgcccccacggcttctcccacttgtctggancaggggagaccnccactttgaagancaatatggggtgggagcttccaatgtgcattctgctaccagcctcaggnttagcagcaagatgccaacagcaacagcaacagcaacagcaacagcaacagcaacagcaacaa

SEQ ID NO: 1506 - DNA, 413 bp, Homo sapiens
  I.1506 (H44192)
  misc_feature (234)..(234): n is a, c, g, or t
  misc_feature (397)..(397): n is a, c, g, or t
ctggaacgcacgccctcgccggagcctgttgacaaggacttctactccgagtttgggaacaagaccacagggaagatggagaactacgagctgatccactctagtcgcgtcaagtttacctaccccagtgaggaggagattggggacctgacgttcactgtggcccaaaagatggctgagccagagaaggccccagccctcagcatcctgctgtacgtgcaggccttccaggtnggcatgccaccccctgggtgcttgcaggggccccctgcggccccaaggacacttccttgcttcaccagcttccgagatctttcctcctgggatgaggactgtgtccacttacccacttgcccgagttttgccaaagagccgccgcagagaagacaggttaccngcttggacgatgggcc

SEQ ID NO: 1507 - DNA, 462 bp, Homo sapiens
  I.1507 (H43471)
  misc_feature (4)..(4): n is a, c, g, or t
  misc_feature (66)..(66): n is a, c, g, or t
  misc_feature (125)..(125): n is a, c, g, or t
  misc_feature (141)..(141): n is a, c, g, or t
  misc_feature (395)..(395): n is a, c, g, or t
  misc_feature (428)..(428): n is a, c, g, or t
tcanaaacaagagagaggctctatgcccgcaagtccttcacctggatggactgccagctggagcanccgacggagcagcagccacctttgcttgtcttctcgtgatcatgtacggcgccacgtgngtgctgccctgcgtantaccgagaacagaagcgctacaaaggcagccgagaacagcccggaagttacagtgatgcaccggaatatctgtggtctggaactctttgagatcttccggaacctaaatgtgaacgcacattgtttctctcaaaaagacaggtcttttaaaactccgcattagacaactatggttttcacacacttgactttataaatgctctctttggactgaggcaaagttaaagattgaggacgggcatggtggctcatgnctgttaatcccagcatttggggaggctgaggtngggcggttcattgaggtcagcagattgagtccag

SEQ ID NO: 1508 - DNA, 369 bp, Homo sapiens
  I.1508 (H42549)
  misc_feature (22)..(22): n is a, c, g, or t
  misc_feature (30)..(30): n is a, c, g, or t
  misc_feature (62)..(62): n is a, c, g, or t
  misc_feature (99)..(99): n is a, c, g, or t
  misc_feature (149)..(149): n is a, c, g, or t
  misc_feature (245)..(245): n is a, c, g, or t
  misc_feature (269)..(269): n is a, c, g, or t
  misc_feature (286)..(286): n is a, c, g, or t
  misc_feature (310)..(310): n is a, c, g, or t
  misc_feature (316)..(316): n is a, c, g, or t
  misc_feature (321)..(321): n is a, c, g, or t
  misc_feature (350)..(350): n is a, c, g, or t
tcaactttccggtatgcaagancttctttncatggagtgtcacggaggccctgagggaggancggtaaactggggcaggggtgtgcatagctctaggancaggtttaaggtctaggctttagagttggggaaaggggagctattacagntttcaaaaaggccataactggccttaacctgtgcaaaatcttgggggtgaaagggcagacagggagtcaggctggaggtgatggagaagtgaggantatggggaggtcgtggtagtaganttcacattgagtggatntgggttctgagtcagggaagggtngtggcnctttntgtgttgagactgggttggtagaagaacngagctcaccacatctctgg

SEQ ID NO: 1509 - DNA, 417 bp, Homo sapiens
  I.1509 (H42548)
  misc_feature (87)..(87): n is a, c, g, or t
  misc_feature (360)..(360): n is a, c, g, or t
  misc_feature (367)..(367): n is a, c, g, or t
  misc_feature (391)..(391): n is a, c, g, or t
gcctggtttggctgacgtgctcagcaaaaccccatgtgccctgctcctgtgtgcagttggggtaggggcagctggcatggtcaggtnacactagtggcccagccccgcagacccacaagccctacccgtgctggggcttgcttcccgaggtatttcacctcttaagagggaatcttccacaagcccagcacaagctgccaggcctgagctacttgaagggggccatctaggtccccaacccatggactttgcctccattttcagctccgccttttttctcctattttctctctggcttttttcagccatgactcacaactaaaaacataaaacactgggaggttagtgggaggccccttncccaagncagggagcctggggatgggcaggngagtgattagccaaactccttggtca

SEQ ID NO: 1510 - DNA, 425 bp, Homo sapiens
  I.1510 (H42488)
  misc_feature (1)..(1): n is a, c, g, or t
  misc_feature (69)..(69): n is a, c, g, or t
  misc_feature (251)..(251): n is a, c, g, or t
  misc_feature (356)..(356): n is a, c, g, or t
  misc_feature (363)..(363): n is a, c, g, or t
  misc_feature (387)..(387): n is a, c, g, or t
  misc_feature (407)..(407): n is a, c, g, or t
nctgttacattatgagaacagtccagggtaatgagattactatctacctttgaagacctactctatggngcactgtcagggaatgcagaaatgaaaaagcctccagtatgcttcagggtctaataaaatctactgtcctatcttttttgttgtagttgttgtttttgagacagagcctcgctctgttacccaggctggagtgcagtgacgtggagtggagtttgctcactgcaacctctgcctcccagggntcaagtgattcttgtggtttagcctcctgagtaactggggattacaggcgtttcaccaccaagcccagatgattttttgtatttttttgagacggagttccgctncttgttngcccgggtgggagtgcaatgggtntcggctcactgcaacctttngcctcccgggtttaagat

SEQ ID NO: 1511 - DNA, 393 bp, Homo sapiens
  I.1511 (H41851)
  misc_feature (93)..(93): n is a, c, g, or t
  misc_feature (185)..(185): n is a, c, g, or t
  misc_feature (214)..(214): n is a, c, g, or t
  misc_feature (232)..(232): n is a, c, g, or t
  misc_feature (248)..(248): n is a, c, g, or t
  misc_feature (335)..(335): n is a, c, g, or t
  misc_feature (345)..(345): n is a, c, g, or t
  misc_feature (361)..(361): n is a, c, g, or t
  misc_feature (370)..(370): n is a, c, g, or t
gattcctgaaccagcagcacctgccccaccccaggcccctgctctgctcccagccgcccttccctccatcccacgacagctaggaattacgtngggcaggacacgcagccatcgccatgttcatagaagccaggcaggcaggtcccacagtcagtatctctgcgggaacagagtagccgtgtgtngcggttcagggccccgcagtctaggcatngttggcagtagaagggtnaactgctgacacactnggctgacctgggcactccacaaaccagcctgggcttacagccacagcgggtgtcggccactgcttgaaacagtttttccagcgccancttgggaggnctgctcattcacaggncttggcagncggggcaaaattcaattatttat

SEQ ID NO: 1512 - DNA, 361 bp, Homo sapiens
  I.1512 (H41579)
  misc_feature (11)..(11): n is a, c, g, or t
  misc_feature (17)..(17): n is a, c, g, or t
  misc_feature (352)..(352): n is a, c, g, or t
actttaataantaaccntgtattctgccatgtaaagaacctttccaaattatgtatcagtctatttgcatcatgtcaaattttcaaatctccatattttcacaagatatatattctcctttggaatctttctgcacatttatatgaataaattaaatagtatctctacaaacatattcaagtaattatttgttttgggttattatgtaacatgaaataattatatatcaatgcaggtatttttttcatatgtgacagtgaaacaagggtttttaaacaaaaaactggattttattaaaataaaatttacataaattatggaacggtctatttgtatggaaggcccctcttcngggtatatt

SEQ ID NO: 1513 - DNA, 427 bp, Homo sapiens
  I.1513 (H41330)
  misc_feature (70)..(70): n is a, c, g, or t
  misc_feature (117)..(117): n is a, c, g, or t
  misc_feature (125)..(125): n is a, c, g, or t
  misc_feature (207)..(207): n is a, c, g, or t
  misc_feature (235)..(235): n is a, c, g, or t
  misc_feature (299)..(299): n is a, c, g, or t
  misc_feature (321)..(321): n is a, c, g, or t
  misc_feature (332)..(332): n is a, c, g, or t
  misc_feature (388)..(388): n is a, c, g, or t
  misc_feature (398)..(398): n is a, c, g, or t
  misc_feature (420)..(420): n is a, c, g, or t
accgttatcagtgcctaggaatgttcaaagcccaggctggggttcagacctgcagaggaaaacatcagcnggctgggtcaaggcaccatgtgttacttggtcaggacagagacaganatgagganaactaggggaccccacacacatgtggctaccatactcctgaacaggtctagctagttatttgtttttttggaagttaatctngggtagaaatgtatggtgatttttattntctctgtctgaagaaccagccatttttaaaaaggttattattgacatcccaatattttgtcttngtgggcttactcataagtccanacattttattntcaacaggtgtaaaacaggcagagattctaaagccacatggtagtgctttggtggnggactgcttncacttagaaacaaactctgagnagtaggc

SEQ ID NO: 1514 - DNA, 460 bp, Homo sapiens
  I.1514 (H40035)
  misc_feature (5)..(5): n is a, c, g, or t
  misc_feature (20)..(20): n is a, c, g, or t
  misc_feature (119)..(119): n is a, c, g, or t
  misc_feature (284)..(284): n is a, c, g, or t
  misc_feature (324)..(324): n is a, c, g, or t
  misc_feature (337)..(337): n is a, c, g, or t
  misc_feature (358)..(358): n is a, c, g, or t
  misc_feature (456)..(456): n is a, c, g, or t
agcangccttatagttcctnctttattaaatgacggagtagggatgttgtgattacagttgaaggcgacgtgttagaaaggacaggtgcatgaaggcagagagtgcccacagactcggnctctcgaaccggggcaggagggaacaaggtgagctgtgcagcccacaggacgggcgggcctgggtggacacagccccccaagttggccaagctgagtctctggggcgagtggctcccaggagaggcctggctgagcaggcagagcaccctgggaccccagggcanaaggacccctgccctccagtccccaagacccaggcccgtntccactcatacanggcacctacatgtgacgtcanccctgaaaaggtaacaggaaagttagaacaaaaacaaaaccccaaaagtaaaaaggctacgtgtagcagagtaattccggaaacgtttttttaaaggnggta

SEQ ID NO: 1515 - DNA, 160 bp, Homo sapiens
  I.1515 (H30366)
  misc_feature (120)..(120): n is a, c, g, or t
  misc_feature (130)..(130): n is a, c, g, or t
  misc_feature (149)..(149): n is a, c, g, or t
cgccatggacccgcagaccaccaacctcctgttatctggagctgggagacaagcccgcgcccaacaccttctatgtaggcatctacatcctcatcgctgtgggcgctgtcatgatgttcnttggcttccnggggttttaagggggcatncgggggggtcc

SEQ ID NO: 1516 - DNA, 493 bp, Homo sapiens
  I.1516 (H29373)
  misc_feature (323)..(323): n is a, c, g, or t
  misc_feature (372)..(372): n is a, c, g, or t
  misc_feature (486)..(486): n is a, c, g, or t
  misc_feature (492)..(492): n is a, c, g, or t
ccaacctctgcccatggatgtggatggaacaacagccctgtttgcactgagtgggcagccagtcattggcctggagctgatggtcaccaacctgccatcggacccagcccagccccaggtgattggggatgatgcccatgaagcccagctcctggtcatgcttcctgactcactgcactactcaggggtccgggccctggaccctgcggagaagccactctgcctgtccaatgagaatgcctcccatgttgagtgtgagctggggaaccccatgaagagaggtgcccaggtcaccttctacctcatccttagcacctccgggntcagcattgagaccacggaactgggaggtagagctgctgttggccacgntcagtgagcaggagcttgcatccagtcttttgcaagagcccgtgtttttcattgagctgccactgttccattgcaggaatggccatttccccagcaatttttcttcttttggtnttggtna

SEQ ID NO: 1517 - DNA, 518 bp, Homo sapiens
  I.1517 (H29352)
  misc_feature (94)..(94): n is a, c, g, or t
  misc_feature (179)..(179): n is a, c, g, or t
  misc_feature (415)..(415): n is a, c, g, or t
  misc_feature (441)..(441): n is a, c, g, or t
  misc_feature (447)..(447): n is a, c, g, or t
  misc_feature (455)..(455): n is a, c, g, or t
  misc_feature (472)..(472): n is a, c, g, or t
  misc_feature (491)..(491): n is a, c, g, or t
agtgacaaagttgattcacccctttttggggaccttaatatattttttaagggatgtgcctatgcattgatgcctgaaaaatatgtataaaganatgaggttgactcttctgagcagttcatcttttccagaggtaagggtaggaggccaacttcaggatctgggtctaagcccgtggnaaagccctggccgagtgagctccaatgctaactcatgtgccgatctctagagcagtgggaaactaccccgctgcaccaaatcaagtagcttcaccttgtgtatgcaggccccaagttattttttagcaatcttacgagtgaaatgttctggtggggttgaaaaacgttcttatttttaaaagaaaggttgtgctcgctacactgctgggtgtttgcgttctgagacctctttgtantccaatctgtgaagggatatgtgtanttaatnccgtacanccgtataggcctcaatntttgtctggaaggcacttnaaattctgacccataaagggaagttaa

SEQ ID NO: 1518 - DNA, 496 bp, Homo sapiens
  I.1518 (H29284)
  misc_feature (364)..(364): n is a, c, g, or t
  misc_feature (401)..(401): n is a, c, g, or t
  misc_feature (454)..(454): n is a, c, g, or t
  misc_feature (462)..(462): n is a, c, g, or t
  misc_feature (495)..(495): n is a, c, g, or t
ttttttttgttctcaaatattttttaataaatagacgaaaccacgaaaccactagactgatggcagcaaactaaggtcagatgagaggggaaactagagaaggagcagcctgagtcagtgacacaacctcctccccgaccctctaggttaaggcacttccggggaggcaggtccttggggtcctgttacacagggtgaatgggagaggaagggattaggatcccttctccccacctttgcatcaggacacccctgcccttctcaccctaccccatggccctgtccctgatttacccactctcatctcacagcactctaaggggaagttgggtgggaggagttcttgtgggttgggagaggtctnttgcccctgaggaagcccgattcctgccaaatcttgnatgcggacaccagcagcccaatttttaccctttttcatcccaagggagccatntttggggnaaagggttggagggcagccacaggccagggttng

SEQ ID NO: 1519 - DNA, 341 bp, Homo sapiens
  I.1519 (H29268)
  misc_feature (71)..(71): n is a, c, g, or t
  misc_feature (211)..(211): n is a, c, g, or t
  misc_feature (233)..(233): n is a, c, g, or t
  misc_feature (250)..(250): n is a, c, g, or t
  misc_feature (315)..(315): n is a, c, g, or t
  misc_feature (333)..(333): n is a, c, g, or t
ttttttttttgtatacggtaactactttattattttcaaatgcaaactctttgcatttagtttgctatttnacaattttacaaactaggtataaaagaccataaataaatgacataagttatgtgtacctaaagttcatgaagggaagaaaaataccttgacaaattaaaacaaaatagaaaatctatgtctaactccagaaatcactcanattttggaacgtgtgaaccgancaatgttctgttaattnctttttcagtatgaactaaattataatatgccttatacattctaatttgaaccacagtccttgcntattccaacatacttagngtgataca

SEQ ID NO: 1520 - DNA, 424 bp, Homo sapiens
  I.1520 (H29130)
  misc_feature (333)..(333): n is a, c, g, or t
cgaggtgcccagggaggctgagtgaggccacgcagccgcctgcccgggagaaccctgcctgaagctctggaaacttgtgggtggggcccagggaggatggggagggagtggcccaggctgccccttcgctcctgcctgcatttccagagctggtgccagggtcagcccagcgaggagtccctgcaataagcccctgcatttgccaagctccaaagactccctccctagtctgcctgcccgcccgcccgccacggagctgcctgagtgtccctgatcgggtctccctcctgtgcaccctcaggtccctccttttcctgctggcactgagtgcanggggtccgctccctcagtggggccggtggagatccttggccccagggattggcagacagagcaacatcctggggtcagaaggtttcatggt

SEQ ID NO: 1521 - DNA, 395 bp, Homo sapiens
  I.1521 (H29029)
  misc_feature (331)..(331): n is a, c, g, or t
  misc_feature (342)..(342): n is a, c, g, or t
ttttttttttggcggtcgttggtatacatcatacatttattagtgaatatccctctgaaatcagcaacaatattaaaaaaaataatgattgcactacttggtcaagcagaactagcaactttcattttaaaaaaagtacaaatctgttaaaaatttcaatcagtatacacatatatataatacaacatactagttatgttaaatgctacaaaccaatgtgaatccctggaatggaaaaaaccacacatttaagctttaagaaccatttttttctctatatattagcattttctcaaatacatacatggggaaaaatgaggtaactgtaaantgtgcaaggancagggcccccaaaattacatatatttctacatatatatgtattttatatatat

SEQ ID NO: 1522 - DNA, 352 bp, Homo sapiens
  I.1522 (H28868)
caatttttataccactgaaagcttcattatttattgtttgtgatttcctgtcataaaaataatcaggaatagatgtttggctttctctttttccacgtttttgattattataatctacagatccttgaggaagtggattttcttttgcctctgcaaaggagggaccttttcctgatctgctttgcatagagttatctctttttttaaaagcaccatcactatgctgaggaacctaaagggatatgaagtatctttagttctgtcatatctaggaatacgggtctatccacatttggattctgtcttcagcccatactttcagatactgaaggagtacttgggctttccagga

SEQ ID NO: 1523 - DNA, 423 bp, Homo sapiens
  I.1523 (H28738)
  misc_feature (144)..(144): n is a, c, g, or t
  misc_feature (379)..(379): n is a, c, g, or t
ttttttttttcttttcttttcttttctttttttttttttaaggggggggggtctcaagtaggaggcctccccatcacccccaccccagccccccaccacccccggcctaagcagctaccatggcccaggtggccggtcgcgggnttgtcccaggcgggttggtatctttcagatgaaggcattgaagcttgcacaagctctccagacaaagtcaatgtaaatgacatcatcctgattgctctcaatatctgagaacaattggcaagaaattcctccccagtgacatcaatagtggaaaggtagaaaaagctcgaaggtccatgtgttttgcaaattcaaaaaattcgcaatgttgctggcaccaaaggataatgaagantctcaggctggcaccaaggatgctgcgattacagatgactgatg

SEQ ID NO: 1524 - DNA, 307 bp, Homo sapiens
  I.1524 (H28710)
  misc_feature (65)..(65): n is a, c, g, or t
  misc_feature (117)..(117): n is a, c, g, or t
  misc_feature (131)..(131): n is a, c, g, or t
  misc_feature (192)..(192): n is a, c, g, or t
  misc_feature (207)..(207): n is a, c, g, or t
  misc_feature (254)..(254): n is a, c, g, or t
  misc_feature (266)..(266): n is a, c, g, or t
  misc_feature (303)..(303): n is a, c, g, or t
ttttttttttttttcccagagaccagaaatgtggcattttaattgaataacttcatacttgcttnataattgtatatttaacataaataatgtccacttgtcacatttatatttctnttaaacaatcaatnagtatttaatgaattagtgtctgtacagtgaaaaataaggtagttgttaaaaaaacttaantttttattggttttncttacataataaaaaatcagtaactatagccactttagggcaaccanaaaatcctcccngaatatataattttttacattgttatattacactttnataa

SEQ ID NO: 1525 - DNA, 203 bp, Homo sapiens
  I.1525 (H28274)
  misc_feature (80)..(80): n is a, c, g, or t
  misc_feature (173)..(173): n is a, c, g, or t
  misc_feature (177)..(177): n is a, c, g, or t
  misc_feature (179)..(179): n is a, c, g, or t
  misc_feature (195)..(195): n is a, c, g, or t
  misc_feature (200)..(200): n is a, c, g, or t
ggcctgctgagatcaaagactacagtccctacttcaagaccattgaggacctgaggaacaagattctcacagccacagtngacaatgccaatgtccttctgcagattgacaatgcccgtctggccgcggatgacttccgcaccaagtatgagacagagttgaacctgcgcatnagtntngaagccgacatcaatngcctncgc

SEQ ID NO: 1526 - DNA, 412 bp, Homo sapiens
  I.1526 (H28224)
  misc_feature (4)..(4): n is a, c, g, or t
  misc_feature (9)..(9): n is a, c, g, or t
  misc_feature (10)..(10): n is a, c, g, or t
  misc_feature (13)..(13): n is a, c, g, or t
  misc_feature (37)..(37): n is a, c, g, or t
  misc_feature (312)..(312): n is a, c, g, or t
  misc_feature (357)..(357): n is a, c, g, or t
  misc_feature (362)..(362): n is a, c, g, or t
  misc_feature (402)..(402): n is a, c, g, or t
gcanctttnnttnatgaagctgtattgattgccaggngggggtgagggtgaagcagggtccagctgtgaagtgcttgggcaggagaggggatcttccagtgggatctgtgtccacacggggggcctcctaggctgagcggggctgggcagcctcagttcttggtgcgaaggacctgctcgtgggtggacaccaccttgccatcgtgcacatccatgaccttggtgcggatttggcggctggaggaggtcacatctctggatgactgcgatccagaggagaactgggaggaggagaggtgggcgtcctcgctnccagcaggcggcggttaggtggcgatctcctgctccagccgcgtnttcangtccagcaggatcttgtactcctggttctgctgctccatntcgcagcgga

SEQ ID NO: 1527 - DNA, 427 bp, Homo sapiens
  I.1527 (H27795)
  misc_feature (52)..(52): n is a, c, g, or t
  misc_feature (102)..(102): n is a, c, g, or t
  misc_feature (283)..(283): n is a, c, g, or t
  misc_feature (307)..(307): n is a, c, g, or t
  misc_feature (355)..(355): n is a, c, g, or t
  misc_feature (397)..(397): n is a, c, g, or t
  misc_feature (416)..(416): n is a, c, g, or t
  misc_feature (426)..(426): n is a, c, g, or t
aaaaaacatctaccaaggttactcgtctgaatattgcttttagccgtgtttnataacatagacgagcagtagggtctgtttattagcaaatttcctatttgntccaatacaaactcactttattctaaagtatattaatgaaaccagttcctgtgatgtaactgtaagccttctcgacttagacttaaaaagtggtcacatagattaattttgtgactttttagtatagactgtagccataattctcaaatatgaaatgggacctaataccagtatgtgatanatgttgatgttttctgtgtacaancacattttcctatgcatgtgtctctgtgtatatggcatatcacctagnaagtatgtttctgtaagtatgtgtattttcatgtcccatttngagtaggtagggtagggtntcaaacatanc

SEQ ID NO: 1528 - DNA, 234 bp, Homo sapiens
  I.1528 (H27586)
  misc_feature (132)..(132): n is a, c, g, or t
  misc_feature (163)..(163): n is a, c, g, or t
  misc_feature (192)..(192): n is a, c, g, or t
  misc_feature (208)..(208): n is a, c, g, or t
  misc_feature (218)..(218): n is a, c, g, or t
aggcacccactgatcaaccccgtggcctttggggcctcgctgcagtacctgtacacaggccgcctggacattggcgtagagcatgtgagtgactgtgagcgcctggccaagcaatgccagctgtgggacctnctcagcgacctggaggccaagtgcgagaagntgtctgagtttgtggcgtctaagccaggncacgtgtgtgaaggtnctgaccatcnagcccccacctacaga

SEQ ID NO: 1529 - DNA, 452 bp, Homo sapiens
  I.1529 (H27516)
  misc_feature (8)..(8): n is a, c, g, or t
  misc_feature (114)..(114): n is a, c, g, or t
  misc_feature (252)..(252): n is a, c, g, or t
  misc_feature (337)..(337): n is a, c, g, or t
  misc_feature (409)..(409): n is a, c, g, or t
  misc_feature (421)..(421): n is a, c, g, or t
  misc_feature (443)..(443): n is a, c, g, or t
acagcctncttcaggcctggcagcaggtacatgtcggcgagctcagcacatcataggctgcctcgggggacagctcagtgtggtcgctgtacatgtagtagagcacgtgagtanagacgtcgggtgagatgccatgcagggtgacggctggggggccccctgaggtcgctggctcctcgctctctcggaagtggtcatccagcagggctcggaagtagtcactgcggccacagaaaaaggccttgtggcagnaggaagctgcagccagccactcggaagcagatgtcagggcagctgttgaagccgtcaggacaaggggaagggcagctcccaaagnttcaccttcggagctcggggggcagggcacaattcggccagcagcgccattttccttccccggaggcggggntttttcaggttngggggttcgatggttcagcacnttcacacac

SEQ ID NO: 1530 - DNA, 454 bp, Homo sapiens
  I.1530 (H14174)
  misc_feature (198)..(198): n is a, c, g, or t
  misc_feature (276)..(276): n is a, c, g, or t
  misc_feature (361)..(361): n is a, c, g, or t
  misc_feature (379)..(379): n is a, c, g, or t
  misc_feature (449)..(449): n is a, c, g, or t
ctgaccctgagctgatggcatctaccttggagacatgcaagggcctcctgaggtccatcttgacttactggagaccagtgatccctggtcctgaccccactcaggagcctgtggactcagccagccccgagagcgatgcgccaggccccgtatatgctgccgcttccctgggcagtcagttgggtgctgcggtcggtngccgagcacccgctcagcagggcagaggctgcaggactcattggctggcttaagagccatattttgccacaccctgtngtcgtggctgacctccttaaggacagtgccgtgaggagcagcatattcaggctgtatagccggcttctgttgggctgaggggctngcagggcttttgcaggangttggctgcctgtttcattacggtcatgttgcagttggttggttcccagggcccggcaaggagccctttncaacc

SEQ ID NO: 1531 - DNA, 351 bp, Homo sapiens
  I.1531 (H14100)
  misc_feature (70)..(70): n is a, c, g, or t
  misc_feature (200)..(200): n is a, c, g, or t
  misc_feature (250)..(250): n is a, c, g, or t
  misc_feature (251)..(251): n is a, c, g, or t
cacctaggctggagcgcaatggcacgatctcagctcactgtagcctccacctcccaggttcaagcgatanccctgccttagcctcccgagtagctggaattacaggtgtgcgccaccatgcctggctaatttttgtatttttagtagagatggggtttcaccatgttgggaaggctggtttcgaactcctgacctcaggngattcacccgccttggcctcccaaagtgctgggattatagggcgtgacanncttcacctgctgaaaaataaactttaaacatctctcttcgttttcataaaaaaaatctgataccttttgacatttcagctttaacacagatgaatctctt

SEQ ID NO: 1532 - DNA, 283 bp, Homo sapiens
  I.1532 (H24418)
  misc_feature (22)..(22): n is a, c, g, or t
  misc_feature (34)..(34): n is a, c, g, or t
  misc_feature (161)..(161): n is a, c, g, or t
  misc_feature (219)..(219): n is a, c, g, or t
  misc_feature (255)..(255): n is a, c, g, or t
  misc_feature (265)..(265): n is a, c, g, or t
ggtggcgtgttacccgggcaangggctcgggtantaagcacttgacaatccccacggcgatgggcgctgcatcaccgtatctattacctgaatcagaactgggacgttaaggtaggggtgagggtgagggtgagggtggcgctgggctagggacttgggcnggggttgcgtgcgtccactccattttccactctcagcccagattctggcattctcctntttctcttctcaacacacagcgggcagtgcgatctnccggctcttnctgggaaattgcacctcc

SEQ ID NO: 1533 - DNA, 425 bp, Homo sapiens
  I.1533 (H23976)
ttttttttgatttttgaagaaccagtttattaagagattacaccaaaagcataaacaatttatacgtcaaactccgactgaaaaaaaaataaccgataaggatgttttttaaatgtactgtactcacaaataacaagacaaatttgacctgttcaataaatagaaatgaagtggctaaaaatgtttaaatggaaatggaaaacagtcgtcttctttgtacagttttgaaggggtgccccctattcacgcctacacgtaggaaaaaccctgacaaaatcagaggttcacttaacactccaaccatatgaggcgtattaaggtttcttttcagatcttagggagatcttgtccaccttaatcccattcacagatcttagggagatcttgtccaccttaatcccttcataaaggactgttgggcttga

SEQ ID NO: 1534 - DNA, 342 bp, Homo sapiens
  I.1534 (H23378)
  misc_feature (107)..(107): n is a, c, g, or t
  misc_feature (209)..(209): n is a, c, g, or t
  misc_feature (232)..(232): n is a, c, g, or t
  misc_feature (253)..(253): n is a, c, g, or t
  misc_feature (282)..(282): n is a, c, g, or t
  misc_feature (339)..(339): n is a, c, g, or t
tcagattggagattcaagatttgttccactttacaagcaagaggaaaaaaaagcaaccttcaaactaattctccatgggggctctccatgttaccctccactccttngcccaaacctctgatggagatagacattgttggagaagtggggctgccttccccaagtggggcactgcttaagcacttattcagtggagaacacaggtgaanagcaactcaggatgagggtggtngagagggcaggggcagatgtncagtcagagaaggactcctgaagttactnctgctcagaaaaacagttcctttaatgtgggaggagccatttcataggtcataggtngta

SEQ ID NO: 1535 - DNA, 418 bp, Homo sapiens
  I.1535 (H23340)
ggcacgaggaaaatatagtatgtgattaaccaatcctgcttccatatttaagcactgggaatggaaacttaatctctgtgactacaaagggaagtttttgtgccttggtgttccagtcactgattgtggttttagaatcttctgtggctgacttcttgtattcaactctggtttattatcttaatcttcaacttcagacatatatttgtgtgtttatatgctcacaggtggactgagaaatcagttacatcttaagtgacctacagggtatatgttgggcaaaagcagactgtgtatatgtcttataaagttgaatttatgttcagtgtgtttgggaagtgtataggcatgtaaattatttcatatatggatttaaagggtaattaaaatgttcacattttaccttggaatggttttt

SEQ ID NO: 1536 - DNA, 412 bp, Homo sapiens
  I.1536 (H23267)
  misc_feature (329)..(329): n is a, c, g, or t
  misc_feature (337)..(337): n is a, c, g, or t
  misc_feature (377)..(377): n is a, c, g, or t
  misc_feature (396)..(396): n is a, c, g, or t
tttttttttttttaccaaagagcaaaatttaatgaaagccagaactgttaagtatggattcctgttgagaaaaatgtcagtctctttcagagttttcccaatgctctatttttaagaaaagtgtagtaaaaatacataatacaagttaacttttttcttgcttgtgttttcctttcatttctccattgatgaaaaagcacatttcgccagagtcttgggaccccctcataggcataggaccctcatttctaggcacaaacaagtctctttttatccgctcatgttacttgtgggggctcagtagctgggagagggcatcttactagggnccaaaggnaaaaaaggtctttgaaggcatgttggatggttaaaggggntattttccaactttttccnagggtggcaggcttcc

SEQ ID NO: 1537 - DNA, 531 bp, Homo sapiens
  I.1537 (H23227)
  misc_feature (370)..(370): n is a, c, g, or t
  misc_feature (411)..(411): n is a, c, g, or t
  misc_feature (427)..(427): n is a, c, g, or t
  misc_feature (463)..(463): n is a, c, g, or t
  misc_feature (502)..(502): n is a, c, g, or t
  misc_feature (523)..(523): n is a, c, g, or t
  misc_feature (528)..(528): n is a, c, g, or t
ttttttttagcacaaatactgtttattaaaatgtcaaggtttcatgtttacattttcttatatcaagtacaatggtatatatacttttttttgagataattattctagattccaggctttcttctagatgtaagttcctaaagcttatagtttacattgatatctagacatatatcttaaacagtctccaaattttctttaattaatcaaagtatgttaatgtcacttgggaattctacatgggaaaagccaacaaaataactaaaacttgactaatgaaggatcagcgtcactaataaaagtctggcaactgtaggtattagggttgggtgccaaaaggtaattgcgggtttttgtccatcactttcangggccaaaggccccaattacttttgcagccaactatatagntttattaaatggttcngccttttatcccacttgggctggtccaacggggganttttccatatttttaaggccggaccttccggccaaaaanggtttcaaaccggggttggcnggccnccc

SEQ ID NO: 1538 - DNA, 396 bp, Homo sapiens
  I.1538 (H22696)
  misc_feature (361)..(361): n is a, c, g, or t
  misc_feature (387)..(387): n is a, c, g, or t
ttgataggtaattttaaatattcaaaccaaatcttcccaacagttggcaagttgtttattttatattatttcttccaggacctacttgctcagatctccaagcaagcatttcttttcttttagggatgtctgaaagtcacatccagttacattactgtgttctttctaatgaaaagtaaaggttttatatagagaaacttgagtaatttttacatttctaagacattaaatcccatttaaattctgtgtgaacattaaagacagcacacttgcaaaagtatggtcaaaggaaaaaaatcccacatttcaattaacaagtaggcatgggacatttgatcaacctttagttggggattattantattccatatttgcctatggaatccnttttaaaaa

SEQ ID NO: 1539 - DNA, 428 bp, Homo sapiens
  I.1539 (H22136)
  misc_feature (7)..(7): n is a, c, g, or t
  misc_feature (10)..(10): n is a, c, g, or t
  misc_feature (15)..(15): n is a, c, g, or t
  misc_feature (292)..(292): n is a, c, g, or t
  misc_feature (318)..(318): n is a, c, g, or t
  misc_feature (363)..(363): n is a, c, g, or t
  misc_feature (404)..(404): n is a, c, g, or t
  misc_feature (419)..(419): n is a, c, g, or t
  misc_feature (425)..(425): n is a, c, g, or t
tttcatnttngtttntttaatgagacaaaaacttgattcttagttcatagccatacaccaaaatgttcagcacaaatactcaagaaaaatgagatatccaccaaaagaacaagtcttattttctacttccatacttagattttcttcttaaaactttaaacagctcagcatggcaatagaagatgtctgctgaagtgggtccatattgttccaagtgtgcctgcaggtgtgtttacgtgtgtaaatgttttaccaatgtcctttatgggtgggtcccctgggtgattacttnactcccatgttgcttccagctaaatnagatttgaatagtattactgcattttaataggaagatataaaccncttttattctggaatactttggccattatgatagggaaaanggaataaataggggnttaaanggg

SEQ ID NO: 1540 - DNA, 162 bp, Homo sapiens
  I.1540 (H22135)
  misc_feature (8)..(8): n is a, c, g, or t
  misc_feature (20)..(20): n is a, c, g, or t
  misc_feature (38)..(38): n is a, c, g, or t
  misc_feature (52)..(52): n is a, c, g, or t
  misc_feature (119)..(119): n is a, c, g, or t
  misc_feature (127)..(127): n is a, c, g, or t
  misc_feature (153)..(153): n is a, c, g, or t
  misc_feature (155)..(155): n is a, c, g, or t
  misc_feature (160)..(160): n is a, c, g, or t
gattactnaaagactgtccngggttcgtgtttaccccncgatcaagggaggnacttccaccaaacttccctagtgaaatccccggaatctgccattttctggatgcttaccaacaaggnacaaactnaaaaccatgcttccaaaagaaagatntngaagntg

SEQ ID NO: 1541 - DNA, 254 bp, Homo sapiens
  I.1541 (H21038)
  misc_feature (198)..(198): n is a, c, g, or t
  misc_feature (235)..(235): n is a, c, g, or t
ttttttttttttttgattttttactaattggcaaggtaatttaatgaggaaaggataattctttcaataaacagtgttacaatgactggatacttgtatgggggaaaaaaagaaccctgatccataattcacaacatacatatcaattcaaggtagatcacaaatataaaaatataaagtttatataatagagcagantatctgaaatcttggggttaaattgggagagaaaaantatcaaacaaaaaaaaaaa

SEQ ID NO: 1542 - DNA, 394 bp, Homo sapiens
  I.1542 (H21037)
  misc_feature (340)..(340): n is a, c, g, or t
  misc_feature (354)..(354): n is a, c, g, or t
  misc_feature (385)..(385): n is a, c, g, or t
aaaaacttcctagtaagcatctacttcaggccaacaaggttatatgaatatatagtgtatagaagcgatttaagttacaatgttttatggcctaaatttattaaataaaatgcacaaaactttgattcttttgtatgtaacaattgtttgttctgttttcaggctttgtcattgcatctttttttcatttttaaatgtgttttgtttattaaatagttaatatagtcacagttcaaaattctaaatatacggtaagggtaaaggactaaagtcacccttccaccattgtcctaggctacttgggttcccctcaggaaaaaaattcatggatactcattcnttatggatcttccngggggtttttgagtcccctttcaaatccccntttttaaat

SEQ ID NO: 1543 - DNA, 496 bp, Homo sapiens
  I.1543 (H20648)
  misc_feature (411)..(411): n is a, c, g, or t
  misc_feature (430)..(430): n is a, c, g, or t
  misc_feature (437)..(437): n is a, c, g, or t
  misc_feature (449)..(449): n is a, c, g, or t
  misc_feature (456)..(456): n is a, c, g, or t
  misc_feature (467)..(467): n is a, c, g, or t
  misc_feature (488)..(488): n is a, c, g, or t
  misc_feature (496)..(496): n is a, c, g, or t
gatccttgctcccaacgtctacttctcctacctcaacaggggtccagggtgcagtgaactcagttcttggcccttgggtgaggattcatggatgaatgaaagctagacctgatggggaggcattatgactaaataggcccagcctccttcccttccagctctgtcctaggagcataggcgggaaatctgagtagagtctgactgcagtttttgcttatgatttgtaaaagccgtcatggggtcaataagaaaataggggtgatggagggggagaagcccaggactgggagaatcgcacgtgccccaggggttttcaccaaggattttcaagacaaactggagtaagaattaaagccccagaggatttaattatcctggttttgcaaaagagcctcccatggccagttaccncccagcctttggagggccnggaattnttcatgggcccntttggtnttgtttgtccnttcagcccttgcccagcaganaacctttn

SEQ ID NO: 1544 - DNA, 452 bp, Homo sapiens
  I.1544 (H20615)
  misc_feature (253)..(253): n is a, c, g, or t
  misc_feature (412)..(412): n is a, c, g, or t
  misc_feature (418)..(418): n is a, c, g, or t
tgggccgcagcattggcatgatgggccaggggtcccacaggcgagtggagccccagcaaccccctcagccttgcgtgcctgtgtactggtgttctccctggccctccactccgtgttcgaggggctggcggtagggctgcagcgagaccgggctcgggccatggagctgtgcctggctttgctgctccacaagggcatcctggctgtcagcctgtccctgcggctgttgcagagccaccttagggcacaggtngtggctggctgtgggatcctgttctcatgcatgacacctctaggcatcgggctgggtgcagctctggcagagtcggcaggacctctgcaccagctggcccagtctgtgctagagggcatggcagctggcaccttctctatatcaccttttttggaaatnctgctntttcatcccaaatttaagggggtttcaagaagaa

SEQ ID NO: 1545 - DNA, 61 bp, Homo sapiens
  I.1545 (H20590)
  misc_feature (17)..(17): n is a, c, g, or t
  misc_feature (27)..(27): n is a, c, g, or t
  misc_feature (35)..(35): n is a, c, g, or t
  misc_feature (44)..(44): n is a, c, g, or t
  misc_feature (45)..(45): n is a, c, g, or t
taagcggtgctaatttnctgatatcanctaaagtnttaatctcnngagacaaaccaccatg

SEQ ID NO: 1546 - DNA, 456 bp, Homo sapiens
  I.1546 (H20524)
  misc_feature (402)..(402): n is a, c, g, or t
  misc_feature (452)..(452): n is a, c, g, or t
ttttttttttgtctagaaacatcttttatttgggtaacaggtcccaaaacaggtcagttaataaaatagattctaaagaatatgtccctatgcacagccctccctccccaaaaataacgctgggggtaggcattgcccttcccccttgggctcctcgggtgtatttaaaaaaatgttttggcagctcagtgtttatcatctgggcatgggacaccatgtccatgtccccatattcctagggtacagcagcagtagatggctgcaacaaccttcctcctaccccagcccagaaaatatttctgccccaccccgggatccggggaccaaaataaagaggcaaggcagggccccctttcactgaggtggctggggtaggggcttcagtggccacatttactgtgnttttgaggaaaggagggaagggggattttgttttgggcatttttaaaatnagga

SEQ ID NO: 1547 - DNA, 268 bp, Homo sapiens
  I.1547 (H20502)
  misc_feature (52)..(52): n is a, c, g, or t
  misc_feature (56)..(56): n is a, c, g, or t
  misc_feature (108)..(108): n is a, c, g, or t
  misc_feature (115)..(115): n is a, c, g, or t
  misc_feature (122)..(122): n is a, c, g, or t
  misc_feature (127)..(127): n is a, c, g, or t
  misc_feature (139)..(139): n is a, c, g, or t
  misc_feature (142)..(142): n is a, c, g, or t
  misc_feature (230)..(230): n is a, c, g, or t
  misc_feature (265)..(265): n is a, c, g, or t
gacatcggcggccctgcctctcctccctcgcccccggccttccccatgtgancggncttaatcctggccgtgtgtgcgcgcgtggggctccattccgcggtgctgggnctccgtnccggggngggtnctcgtgtgtgcnctnctcctccccatcccccttcccccaagagtaaaagaagaaccgggagtcgtgctcagaaaataaataaataaccaccacacacgcgcanccggagcgagtcggcggggctggcggcacagcggnagg

SEQ ID NO: 1548 - DNA, 434 bp, Homo sapiens
  I.1548 (H19335)
  misc_feature (222)..(222): n is a, c, g, or t
  misc_feature (359)..(359): n is a, c, g, or t
  misc_feature (413)..(413): n is a, c, g, or t
  misc_feature (432)..(432): n is a, c, g, or t
tttttttttaagttgaattagctaaacgaatccttgtatttatttttcacacagcacaaatgcaggtagtacacagtaagttcataattccccacaaaacttataaacttaacaaatgggaatctaaacataatattctgaatcacccatagctatccactgtgtgaatccattctacagcagcagaggagtaccttaatttaaagcaccaagtttccaggncattactacaaatatcttcttttcattctctaatacatgcagtcaaactgcctatgaagcaaataccaattcatcttacgctttaacagataaggtaaaggcacttggggaaattcaacattatttcttaagtctgnaaagtgattctacctcttttaccttatttattattttcctcccatggaattttnaaactttttatgggagttnat

SEQ ID NO: 1549 - DNA, 394 bp, Homo sapiens
  I.1549 (H19097)
ctggtggaggacggctcctgtcgatacgcagcccaagaaaacttggaatataacgtggagcctcaagaaatctcacaccctgacgtgggacgctatttctcagagtttactggcactcactacatcccaaacgcagagctggagatccggtatccagaagatctggagtttgtctatgaaacggtgcagaatatttacagtgcaaagaaagagaacatagatgagtaaagtctagagaggacattgcacctttgctgctgctgctatcttccaagagaacgggactccggaagaagacgtctccacggagccctcgggacctgctgcaccagggaaagccacttccaccagtagtgctggttgcctcctacttaagttttaaataccgtgtgct

SEQ ID NO: 1550 - DNA, 435 bp, Homo sapiens
  I.1550 (H19079)
  misc_feature (387)..(387): n is a, c, g, or t
  misc_feature (400)..(400): n is a, c, g, or t
  misc_feature (426)..(426): n is a, c, g, or t
gggtagtgcctcttaaaccattaacagtactttagacattggcactttatttttctcgtagatctttagctactttggggaggagggaaggtgctgataccttcaatttgttacttttcaagatttttaaaaataactagtgtagcttatcttaaacattttataaaaccttcagatgtctttaagcagattggaagtatgcaagtgcttccttagcagggacagtggataatccttaatggtttatcatagatttcaccctccccccttctcagaagagtgagtatgctcttaaatgtcaaacacatttttgttgttttgttttttaaatgatccagtgtctatttggatgtgatgcagatcttattaaatttggggaattattantattggacatttnctgtgatttttatatatgtaatgtcntaattgagg

SEQ ID NO: 1551 - DNA, 521 bp, Homo sapiens
  I.1551 (H19045)
  misc_feature (271)..(271): n is a, c, g, or t
  misc_feature (278)..(278): n is a, c, g, or t
  misc_feature (446)..(446): n is a, c, g, or t
  misc_feature (465)..(465): n is a, c, g, or t
  misc_feature (481)..(481): n is a, c, g, or t
  misc_feature (496)..(496): n is a, c, g, or t
gcagatggccgcgcttgcaccgctgcccccgctccccgcacagttcaagagcatacagcatcatctgaggacggctcaggagcatgacaagcgagaccctgtggtggcttattactgtcgtttatacgcaatgcagactggaatgaagatcgatagtaaaactcctgaatgtcgcaaatttttatcaaagttaatggatcagttagaagctctaaagaagcagttgggtgataatgaagctattactcaagaaatagtgggctgtgcattntggaganttatgctttgaaaatgtttttgtatgcagacaatgaagatcgtgctggacgatttcacaaaaacatgatcaagtccttctatactgcaagtcttttgatagatgtcataacagtatttgggagaactcactgatggaaaatgtggaaacacagggaagtttggccagntgggaaggccaaccttacntccttaattgttttancggatggggggagantcctcaagccgggccctgttgggat

SEQ ID NO: 1552 - DNA, 309 bp, Homo sapiens
  I.1552 (H18997)
  misc_feature (18)..(18): n is a, c, g, or t
  misc_feature (276)..(276): n is a, c, g, or t
taaggttcattaatggtnttttttcctgattacaaaagcaaaacctcattttttggtctttgaagaccatggagtatgacttctaagagcaaacattaacatcagatttgtatgtctcactacaaaaagaacccatcactgatgtaagacctactcatgatactgaagtagattttttaaattaaaaaataaaagtagtcatttaaaatggaggaattgtagatgagtatggaaaaatccattcacaaagttcactatttgcattttctaaaaganttttatgtaataaaatagaaaactaatgattta

SEQ ID NO: 1553 - DNA, 376 bp, Homo sapiens
  I.1553 (H18981)
  misc_feature (162)..(162): n is a, c, g, or t
  misc_feature (178)..(178): n is a, c, g, or t
  misc_feature (240)..(240): n is a, c, g, or t
  misc_feature (261)..(261): n is a, c, g, or t
  misc_feature (277)..(277): n is a, c, g, or t
  misc_feature (287)..(287): n is a, c, g, or t
  misc_feature (332)..(332): n is a, c, g, or t
  misc_feature (347)..(347): n is a, c, g, or t
cattaataattttattttgaattacaatctattatcacttcaaaaagagccacttcagaaaacatccaacggatgttgacttaccagtaaaaatgtaagtcatcaatgtatgatttatactacagaatacataataaattatatttacatgcaatgactagnctatcacacacaaggnaaaaaaatacagtattttatgtacattttaaaagatttacatgttcatatacaatttataangttaaaaattctctgtacaanatcttacatgtacagngtttatatanggccccattcttatgggctgtatcaccacacaggtttgcttaaanctataatactacagncactcgggggtcttcctattccaatctgg

SEQ ID NO: 1554 - DNA, 233 bp, Homo sapiens
  I.1554 (H17879)
  misc_feature (57)..(57): n is a, c, g, or t
  misc_feature (58)..(58): n is a, c, g, or t
  misc_feature (222)..(222): n is a, c, g, or t
ttttttcttaaaaatataaatgtatttatctgcattatcacgtccctggggcacccnnctggccggcccgtggcaccagggcaggaagggaacagggcgtaagtctcagcaaggcgaaggagagctcccaggtggggatgtggggcagcctcacagggccccgtgctgggcctggtatcgggacagcacggcgcggtagtgggacagctcctggcgcacggncacaacttcct

SEQ ID NO: 1555 - DNA, 328 bp, Homo sapiens
  I.1555 (H17878)
  misc_feature (28)..(28): n is a, c, g, or t
  misc_feature (50)..(50): n is a, c, g, or t
  misc_feature (53)..(53): n is a, c, g, or t
  misc_feature (54)..(54): n is a, c, g, or t
  misc_feature (56)..(56): n is a, c, g, or t
  misc_feature (162)..(162): n is a, c, g, or t
  misc_feature (226)..(226): n is a, c, g, or t
  misc_feature (265)..(265): n is a, c, g, or t
  misc_feature (285)..(285): n is a, c, g, or t
  misc_feature (304)..(304): n is a, c, g, or t
  misc_feature (317)..(317): n is a, c, g, or t
  misc_feature (322)..(322): n is a, c, g, or t
caggctcgcccaccttgtagaaggagcngcttgagtcccctctcacccgngcnntncaaagagccgaccgcttgatctggacaccccctcgcccagattgcatgatctcccgggaccctcttgagttgcacgtttctgcaccgaggacctcaaatccccgtngctcctaggatttgcagcgttctggatactggagggttgcaggctacactcgcccgcccctggnagcacactcgtccaaaccactggagtgtgctggtgactngcaggccagcccttcgcctntccatggaacccgtgagcntggggggcaggtnccagnttgtcg

SEQ ID NO: 1556 - DNA, 544 bp, Homo sapiens
  I.1556 (H17712)
  misc_feature (33)..(33): n is a, c, g, or t
  misc_feature (393)..(393): n is a, c, g, or t
  misc_feature (466)..(466): n is a, c, g, or t
tgggggattgtgggaaaagatggcggctgcgancaatcccgggttgtccgggtcctgtcaatgtcacgttctgccattactgcaatagccacatctgtgtgtcacggcccaccctgtcgccagcttcatcatgccctcatgcctcatgggaaaggtggacgttcctcagtcagtgggattgtggccactgtgtttggagcaacaggattcctggggcgatatgttgtcaaccaccttggacgcatggggtcacaggtaatcataccctatcggtgtgataaatatgacatcatgcaccttcgtcccatgggtgacctgggccagcttctgtttctggaatgggacgcgagagataaagattctatccgacgagtagtacaacacagcaatgtnggtcatcaatcttattggacgagactggggaaaccaaaaacttttgattttgagggtgtttttgtgaaggttncccaagcaatttgctcaactgttccaggaagctggagttgaaaatttcattcatgttttcacatttgaatgcggattt

SEQ ID NO: 1557 - DNA, 536 bp, Homo sapiens
  I.1557 (H17246)
  misc_feature (53)..(53): n is a, c, g, or t
  misc_feature (120)..(120): n is a, c, g, or t
  misc_feature (434)..(434): n is a, c, g, or t
  misc_feature (461)..(461): n is a, c, g, or t
  misc_feature (468)..(468): n is a, c, g, or t
  misc_feature (480)..(480): n is a, c, g, or t
  misc_feature (493)..(493): n is a, c, g, or t
  misc_feature (518)..(518): n is a, c, g, or t
  misc_feature (523)..(523): n is a, c, g, or t
  misc_feature (532)..(532): n is a, c, g, or t
cctgctggtccctgacttctgttgagttctgtgggggaacgcacctgcggaanctcgagtcatgcaggagcttttgtgatcgtgacggaagaagccattgccaagggtatccggagattngtggctgtcacaggtgccgaggcccagaaggccctcaggaaagcagagagcttgaagaaatgtctctctgtcatggaagccaaagtgaaggctcagactgctccaaacaaggatgtgcagagggagatcgctgaccttggagaggccctggcactgcagtcatcccccagtggcagaaggatgaattgcgggagactctcaaatccctaaagaaggtcatggatgacttggaccgagccagcaaagccgatgtccagaaaacgagtgttagagaagacgaaggcagtttcattcgacagcaaccccaaccagcntctttgttcatcctgggagttggaganccggcgncttagccaaggnccttgaatgaagnctttgaagtttttcaagatgcattnccttnagatttttncctt

SEQ ID NO: 1558 - DNA, 492 bp, Homo sapiens
  I.1558 (H17140)
  misc_feature (190)..(190): n is a, c, g, or t
  misc_feature (200)..(200): n is a, c, g, or t
  misc_feature (241)..(241): n is a, c, g, or t
  misc_feature (280)..(280): n is a, c, g, or t
  misc_feature (292)..(292): n is a, c, g, or t
  misc_feature (329)..(329): n is a, c, g, or t
  misc_feature (388)..(388): n is a, c, g, or t
  misc_feature (402)..(402): n is a, c, g, or t
  misc_feature (418)..(418): n is a, c, g, or t
  misc_feature (460)..(460): n is a, c, g, or t
  misc_feature (471)..(471): n is a, c, g, or t
ttttttttttttttttttttttttttttcaggagccacagcatttattctacagacgccaaaggtgttcaaaagagccagcccctattgggaagagggatagagatcatgcggcattaagtattgcacgtggtccttttattctctgcagcaaaaacgattcctacttgctgacgcggaaagctcaggtntggagagccnttatctatagatgcgagcgtgacgatcaacagcaatgcggnggttagtggttctagacccatggcactgacgtggagggntcagggcagaantttaaggggcactgagacataggactgctcccaagtnttttccagttactgctgggttagggaggggctctttaaaggtcccaaggatttcaaatnttcttgtaggcagntgaagagctcttgggntgggacggatgggatccagtggggagcctcctcctgccccantcagttttttnacaaccccgagggcgcattgg

SEQ ID NO: 1559 - DNA, 464 bp, Homo sapiens
  I.1559 (H17093)
  misc_feature (38)..(38): n is a, c, g, or t
  misc_feature (39)..(39): n is a, c, g, or t
  misc_feature (241)..(241): n is a, c, g, or t
  misc_feature (424)..(424): n is a, c, g, or t
  misc_feature (441)..(441): n is a, c, g, or t
tttttttttttcaacctgaaatgttttaatagtggaanngtgtacaggatcctctaaagagaccgcctggctgggtgctcaaaccacatgggccgacccaaaagacgccaaaaccaagagctgctcaggaggcactaaatgttgacggtcttggccggcttcacatcctcaatttcagcagacagccagcggtaagtgcgatgacgccgcagcacctcaatggccttgagttccagtggtnttgcctgaataccaaggtcttctaagccagggcaggtgaggcaatttcatgtctgtgatgtgcatccgctccactttatcccttgttatccaggggctcaaatggggcttatttcaaaggactcttgcttacccatcgatagggcaaaaagcgggcaagggggaatggggagggaccattctnttgagccacagcaaagntgttattttcaccaggtgggaaa

SEQ ID NO: 1560 - DNA, 426 bp, Homo sapiens
  I.1560 (H16999)
  misc_feature (301)..(301): n is a, c, g, or t
  misc_feature (379)..(379): n is a, c, g, or t
  misc_feature (396)..(396): n is a, c, g, or t
tttctggttttaaaataatttatttcataggtctgttttaatttcatgtctcacagcatacattatttaaccaagaggtgctggacagagattgtaaaaagggaggaaacatttaggataagaaaccggctcaattccattagaatttgatcctatcttgtaaagtcttgctaggataaatttctataatacttcttttgtgcttacaaaaaaacattaacttctgaatttccaatgttgtaaataaaaaaattttacaattaggtatgcattcaattaacacacaagggcaaccaaatanattctgtcatcaacattaggcataatgtgtatttcccgtcactggcactaacattaaactaaactttcaaaccacaanaacattgtggactaacntttaaaagggcaggctgttagggtactcaa

SEQ ID NO: 1561 - DNA, 476 bp, Homo sapiens
  I.1561 (H16998)
  misc_feature (17)..(17): n is a, c, g, or t
  misc_feature (236)..(236): n is a, c, g, or t
  misc_feature (397)..(397): n is a, c, g, or t
  misc_feature (445)..(445): n is a, c, g, or t
ttgggacgaagacctgnacttattcttggagcgcttagtttccctgacctttggcttcaccctctgataccaactgattatattaaaaacttaccaatgtggcgatttaaatgtcttggagtccagtctgaagaggaaatgtcggaggggtctcaagatactgaaaatgactcggaaagtgagaacacagacactttgagtagtgagaaggaagtatttgaagataagcaaagctnacttcacaattctccagggaacagcaagtcactgtgatgctgaggcttgttcatgtgccaataaatattgtcagaccagcccatgtgaaaggaaggggaggtcatatggatcatattaacactgaattgaaggatatgggaacctggattggttgaacttnggcctgctggatatcgctggcactgtactggaatgtgttgttttgccntaggaggatttttggaaactgggatgttttg

SEQ ID NO: 1562 - DNA, 521 bp, Homo sapiens
  I.1562 (H16940)
  misc_feature (450)..(450): n is a, c, g, or t
  misc_feature (492)..(492): n is a, c, g, or t
  misc_feature (501)..(501): n is a, c, g, or t
  misc_feature (506)..(506): n is a, c, g, or t
  misc_feature (517)..(517): n is a, c, g, or t
cattgcgttatcttatttccaaaacgttccaactaaaaaacattttcctattaaaatagaccttccgaatagcttagttcattcattctctctgaactcaggctgcaggtagggattggatggtgctgggtgaggctgggcaggacttctctatgtctccgtgagctgcttagagcctcttggaagaagtggtgttttggtcacccgtcgctgtacaagccaaggcttggtggcttaaatcagccattttacattgttcacgattttgtgaggcatttgggatgggctcagctgagcagtttgtctgatctgtgtggcattaactgcaggacccacttccaagatggcaccggctctcctgtctggggtctcagtgctcctcaggctgtacgtagcacctcctcaggcagggcccacagcgtggctttgcactgccccacagtgagcttnccgagagtgttcccgagagacccaagcagatgctacgagggnttccatganccagnctcagaaattncatt

SEQ ID NO: 1563 - DNA, 470 bp, Homo sapiens
  I.1563 (H16897)
  misc_feature (15)..(15): n is a, c, g, or t
  misc_feature (394)..(394): n is a, c, g, or t
  misc_feature (425)..(425): n is a, c, g, or t
  misc_feature (435)..(435): n is a, c, g, or t
  misc_feature (451)..(451): n is a, c, g, or t
accattgagcgggangctatgacagatcttgagggatctgggtggcattgtcctggccaatgcttgtggcccctgcattggccagtgggacaggaaggacatcaagaagggggagaagaacacaatcgtcacctcctacaacaggaacttcacgggccgcaacgacgcaaaccccgagacccatgcctttgtcacgtccccagagattgtcacagccctggccattgcgggaaccctcaagttcaacccagagaccgactacctgacgggcacggatggcaagaagttcaggctggaggctccggatggcagatgagcttcccaaagggggagttttgacccaggggcagggacacctaccagcacccacccaagggacagcagcggggcagcntgttgggacttgagccccaccagccagcgcnttgcagttcntggggagctttttttnacaattggggttgggcaag

SEQ ID NO: 1564 - DNA, 500 bp, Homo sapiens
  I.1564 (H16865)
  misc_feature (451)..(451): n is a, c, g, or t
  misc_feature (479)..(479): n is a, c, g, or t
  misc_feature (491)..(491): n is a, c, g, or t
  misc_feature (496)..(496): n is a, c, g, or t
tcaaaggtgacttcagaataacagcacgtgacgagtgggtatttgctgacatggacctactgcataaagttgtagctccagctatcaggatgtccctgaaacttcaccaggaccagttcacttgccctgacgagtatgaagacccagcagtcctctacgaggccatccagtccttcgagaagaaggtggtcatctgccacgagggcgacccggcctggcgggcaggtgctgtccaacaaggaagagctgctcaccctgcggcacgtggtggacgagggtgccgacgagtacaaggtcatcatgctccacagaagcttcctgagcttcaaggtgatcaaggttaacaaagaatgcgtccgaggactttgggccgggcagcagcaggagcttatatttcttcgcaaccgcaattccggagcgcggcagtattccagaacattaagcaggttcntgcgggaacttgattaacttcttcctgncgatcagccctngggtnaccc

SEQ ID NO: 1565 - DNA, 499 bp, Homo sapiens
  I.1565 (H16854)
  misc_feature (441)..(441): n is a, c, g, or t
  misc_feature (499)..(499): n is a, c, g, or t
ttccagaaggcaaaaagacattaccatgagtaataagggggctccaggactccctctaagtggaatagcctccctgtaactccagctctgctccgtatgccaagaggagactttaattctcttactgcttcttttcacttcagagcacacttatgggccaagccaggcttaatggctcatgacctggaaataaaatttaggaccaatacctcctccagatcagattcttctcttaatttcatagattgtgtttttttttaaatagacctctcaatttctggaaaactgccttttatctgcccagaattctaagctggtgccccactgaatcttgtgtacctgtgactaaacaactacctcctcagtctgggtgggacttatgtatttatgaccttatagtgttaatatcttgaaacataggaggatctatgttactgtaantagtgtgattactatggtctagagaaaagtctacccctgctaaggagttctcatcccn

SEQ ID NO: 1566 - DNA, 490 bp, Homo sapiens
  I.1566 (H16843)
  misc_feature (465)..(465): n is a, c, g, or t
gagaattgtacagtttttgcctcataagcaaacttgaatcacctgtgtatgaacagggaatgaacacattgcaatggctttaaatgctcttttatctcgttgtaaaggtaaggcaagattttgatgtagtaggatgtaggtaatgtatttaaatatttcatatgaccatatcgtgtccaaactcagtctgagaatgtgacagctttccgcctaactagaatgcagaccagaatgagttcaactcattctgtgcaacttcacagggggtttattagaatgctcagtgtagaggacattcctgtcatccatgccaactacctaactcgttatcagagctgatagagcatgggaaaagtctgtccagcgattcagttgttcccctccttccaaaaacagcctccaataccacaacctggaaaagaggccgaatgggttatttttacagcatacaaggtttttgttccngtatggttattttttattgcctagg

SEQ ID NO: 1567 - DNA, 400 bp, Homo sapiens
  I.1567 (H16832)
  misc_feature (381)..(381): n is a, c, g, or t
ttttttttttttctggttctgcagaattcttttattaatcacttattctggactgaagcctggataggtaattatcagccttagatttctactcaagcaaaattagcagaatcccacctttccccgttggatcaagcgtgccatgaaatccatgccttctttattccttcctgttggctcctgtgccacgctgccttgctggggatttgtctgtgcaattgtcaagaggccacgactgtgtgcccacgtttgcatggcacgtaagcacatcacacccaactgcaggcatgcagcccggtgggtcaggtcttccccccagagcactgcgtaactgcagaaaacacacccagttttcatccacgcaggatgggcttgggatgnccccttgcccgtggcccag

SEQ ID NO: 1568 - DNA, 468 bp, Homo sapiens
  I.1568 (H16787)
  misc_feature (351)..(351): n is a, c, g, or t
  misc_feature (353)..(353): n is a, c, g, or t
  misc_feature (355)..(355): n is a, c, g, or t
  misc_feature (389)..(389): n is a, c, g, or t
  misc_feature (410)..(410): n is a, c, g, or t
ttttttttttggttttggattcttgttttccttgcaagaacaaaaggttctctagaatccttcagccaccaatgaaatgatcaggcaggagaaaaactttagatgggagtcttgtcatcaaaaataaatacagttgcatggagctgcttaagatctgaaccaaactcaaaataggaagacgggggctaaaaagttattttaagaacccccccaccacaaccacagtcactccgtgggctaagcggggagcaggaagcatgtctggtcacaccatcttggaataggaagccatggctggaacggatcggatccactgatggcacacgtgggagctgaacttgacgccagcgngngncgggggagggcactgccctcactgtttgcagttnccttcattctgttgagggcantgccagcgcggaaccattcattttgcgtttccttgaaggtttggttcaggaggatggt

SEQ ID NO: 1569 - DNA, 395 bp, Homo sapiens
  I.1569 (H16756)
  misc_feature (142)..(142): n is a, c, g, or t
  misc_feature (162)..(162): n is a, c, g, or t
  misc_feature (215)..(215): n is a, c, g, or t
  misc_feature (230)..(230): n is a, c, g, or t
  misc_feature (269)..(269): n is a, c, g, or t
  misc_feature (314)..(314): n is a, c, g, or t
  misc_feature (332)..(332): n is a, c, g, or t
  misc_feature (351)..(351): n is a, c, g, or t
  misc_feature (360)..(360): n is a, c, g, or t
  misc_feature (369)..(369): n is a, c, g, or t
ttttttttttcaaaaacctgagatcagttctgtgttctggaacagctctccttttccacaggaggagtccctcatggatcgcggtattggttggttgtggtgatttggggagcacgagggagagcaatgcaggtgggaggtntgggggagccagcctcccgncccggccgcacgcccgtcactgctcgtctgacacactttgctgcgaggccgtntcgtccaggcccatntcctcctggcttgctctcctgcagacaaccccgagagtntccgccacagcctcagccagacatcggtcatgaagctgcccctgntcggtggcatcagggggntcacatgggctcggagagntgccgagtngcctgggtngcagccctgggttagggggcccatca

SEQ ID NO: 1570 - DNA, 429 bp, Homo sapiens
  I.1570 (H16746)
  misc_feature (200)..(200): n is a, c, g, or t
  misc_feature (422)..(422): n is a, c, g, or t
ttttttttttaaatgaatgtaacaagcatttattaaaaactgtgctgcacaaaacatgttagaaactagaccaggtgctaggagtctaatcaaggcaggggcagggtaaaaacatgggaatattacatggacaagcttgtctagcatggcagtctataacccttgagggtttacataaaataaaggaacatttttgtggnctcaggctccccagagttctctttatgtttgggcagagactgcccatcccttagtgatcccaccttagagccaggttttcaaagtcatttctcccagtatatctgtctctgtatgcaagtttcctctggttgccttgagcaaaaacaatcatccaagtcaaatttgctagccctatgctgggccagcccacgtttcccgtaggacatctgtagggtaagttnagccccg

SEQ ID NO: 1571 - DNA, 425 bp, Homo sapiens
  I.1571 (H16736)
  misc_feature (125)..(125): n is a, c, g, or t
  misc_feature (361)..(361): n is a, c, g, or t
ttttttttttaagaatttgtcttatttttaatgcatggaaaatagcaaaattatcatgccaacatgaggaatatatactataattcataaatgcctaattatcaaaataatgacatagtcatggnttagatgcaacctagaaatcttacataagatgcaactacatattgtatgatcattcctcttatatatgacattcaatcctcatcaaattcagctatgtataaatggcattatgaaataaacacttaatatcacaatagggtcatagtctgctactgtacaaccatgggcatgcaagtaactatggcattagctgttaaacagtaaagtgtcataaccttccagaaatccaaaggantgtggaaaaggtacatatatagtactaaacatcaattgtatttaaaggaccttcatatttaaca

SEQ ID NO: 1572 - DNA, 494 bp, Homo sapiens
  I.1572 (H16716)
  misc_feature (213)..(213): n is a, c, g, or t
  misc_feature (339)..(339): n is a, c, g, or t
  misc_feature (373)..(373): n is a, c, g, or t
  misc_feature (405)..(405): n is a, c, g, or t
  misc_feature (455)..(455): n is a, c, g, or t
  misc_feature (465)..(465): n is a, c, g, or t
ttttttttttactgattacaagtgctttaatccaggaatgaaaaggaagaggagttctgattgggtggacccttctcttggagagaaggcaaagctgccaggcagaaggtgggagggggaggaagaggagagaggaagctcccttgacaggcataaaacgtccctgtgattgcggacaagtggctactctcaggccacattcagccgaggctnggtgaggctggtcgggaagagggagacggaggtggaagcgggttcaagttttgacgggtggtcacctcagaaagggctccttctgtttagcaaaactccccaatccttcgcctggcttgcggaagnaacagcttgctttgaaaagcaaaggctgttcatncctgtaatttaaattcttgagacccccccccntgttgacgtttgagatgaagccattttacataacgcgattaaaattaagntgatgaaggntgcacatttacatttttttgccttccagc

SEQ ID NO: 1573 - DNA, 429 bp, Homo sapiens
  I.1573 (H16715)
  misc_feature (395)..(395): n is a, c, g, or t
  misc_feature (402)..(402): n is a, c, g, or t
  misc_feature (420)..(420): n is a, c, g, or t
  misc_feature (426)..(426): n is a, c, g, or t
aagagacaggccaggcttatgggctgggcatccagagatcgccctgacgccagctccaggtggagttaggagggcactcttgtcccgacgcatttacagaccactccctcttcttgttcccctcgactctgagagtgtggtggggtagctgtggaacctgactgcttgcctgaaggttgggcagcgtggctagaaattgcggcccagacctgggatctcacccacacctctatgagacgtcctgaaggaaaccatcgactgagcggagaggcttcgctttgcccgcctcctcccagggaaggaagagcggaagagggcgtcgcagccaccgagactgccagccaccaccccctcccagactctctgttccccaccccagaccagggttcactttntttcctngcattgggggttggggtncggtangtt

SEQ ID NO: 1574 - DNA, 458 bp, Homo sapiens
  I.1574 (H16605)
  misc_feature (338)..(338): n is a, c, g, or t
  misc_feature (365)..(365): n is a, c, g, or t
  misc_feature (370)..(370): n is a, c, g, or t
  misc_feature (379)..(379): n is a, c, g, or t
  misc_feature (446)..(446): n is a, c, g, or t
  misc_feature (452)..(452): n is a, c, g, or t
ttccctcatctttctctactgtaaagtgattttgtttgcaggtaagaaaataatagatgactcaccacacctctacggctggggagatcaggcccagccccataaaggagaatctacgctggtcctcaggacgtgttaaagagatctgggcctcatgtagctcaccccggtcacgcatgaaggcaaaagcaggtcagaagctaatactctgccattatctcaaaaatctttttttttttttttgagatggggtcttcctctgttgcccaggctgggagtgcagtgggtgcaatcttgggctcactgtaacctccgcctcccagggttcaagtgatttnttcttgcctcagcctcccgagtagctnggggnttacagggnttgcaccaccgtacccagttaatttttgtattttagtagagacggggtttcaccagttggctgggtnggtttngaactc

SEQ ID NO: 1575 - DNA, 456 bp, Homo sapiens
  I.1575 (H16564)
  misc_feature (235)..(235): n is a, c, g, or t
  misc_feature (329)..(329): n is a, c, g, or t
  misc_feature (430)..(430): n is a, c, g, or t
tttttttttttttttttcttttcatctgcctttacttctcatttcaaggtttcacagagtgctggtctcaacccacatcagtgatacttaactaacttgccttccccagacagaaacatgaaatgacttaaaaaaatagaaaatattcttctcgccaggcacacaagactgtacacccaaaaccagaaacgctgtggctttgcaaagtgtgctcccacacccgcgcacacaggcnacttaaataaataacgcgcacgcacggctttccccatttcgaaacagggcagacggtctagtgagtttcagcacttgctggggaacagggcgtntgggccaggggaggtgccccgcgggtgggcaatgactactgacggaccctgggtgaattcaggaacagagttgggcacctgagccgtttgaggggcggctnacttctggctctgtttgagttttgga

SEQ ID NO: 1576 - DNA, 474 bp, Homo sapiens
  I.1576 (H16557)
  misc_feature (344)..(344): n is a, c, g, or t
  misc_feature (390)..(390): n is a, c, g, or t
  misc_feature (424)..(424): n is a, c, g, or t
  misc_feature (433)..(433): n is a, c, g, or t
  misc_feature (443)..(443): n is a, c, g, or t
  misc_feature (452)..(452): n is a, c, g, or t
  misc_feature (463)..(463): n is a, c, g, or t
ttttttttttttttttttaactggaacatgctctaatctttagtttatttctggttaaaaatatagcaatccagtgcagtgtagtaaagaagtctgctcgaaaggtagcagagaaacagctaaacataagcaaagcaaggcagagtccataagacgggctggccccaaggacgaccggatggggaatccctgcagcgcctccccgggcacaggggtcctgcgtatggccgtgcccggacccctcaggcacgtccatgcacacgagagccagggccagggggcacttcgggacatcctgggcaaaccttgttcttttgtttggggtgatgggagcgacccgggtnggagaagggcagaaacataaggaacctgttttttgtttgggacttnaacaagttacattgttacatttttaggggggttnggatatgcntacaattttntcagggaantttcaagccantgggttttgaa

SEQ ID NO: 1577 - DNA, 456 bp, Homo sapiens
  I.1577 (H16556)
  misc_feature (10)..(10): n is a, c, g, or t
  misc_feature (87)..(87): n is a, c, g, or t
  misc_feature (90)..(90): n is a, c, g, or t
  misc_feature (394)..(394): n is a, c, g, or t
  misc_feature (425)..(425): n is a, c, g, or t
  misc_feature (431)..(431): n is a, c, g, or t
  misc_feature (442)..(442): n is a, c, g, or t
ctatcctggnggtcatggtgatcttgctcaacatcggagtcgccattctgtttattaactttttcatctgatgagatgtcgcggtanaanaaatagagaaagggtagaaaaaagggacattaaaattaaaagcaaaaccacaagaagggaaagaccgcaactcggacagcccagcgacttccaagtcctctcacagaagaaccacacgattgggtatcactcacagtttgcctttttttctgggtaatgttttttggattttagccaaaattctttgcttgtataacactctgctgtgtggcatggcagaaggaggccagcacgcagcccctccagctccacgtgggagacagaagggatcccggcacatcagtgggtaacagcggacgttgtnctcgttggtcacaagttcccgtctttgggtnttgggntggaagggcanccccgggcagagct

SEQ ID NO: 1578 - DNA, 414 bp, Homo sapiens
  I.1578 (H16146)
  misc_feature (392)..(392): n is a, c, g, or t
  misc_feature (402)..(402): n is a, c, g, or t
  misc_feature (413)..(413): n is a, c, g, or t
cccagtcccctcagagcagcttcccccagccagccgctgtgtatgccatccaccaccagcagctgccccacggcttcaccaacatggcccatgttacccaggcccatgtccaaactggaatcacagcagccccgccccctcaccctggggctccccacccgccccaggtgatgctgctgcacccaccccagagtcatggggggccccccaaggcgcggtgccccagagtggggtgcctgcactctcagcttccacaccctcaccctacccctacatcggacacccccaaggtgagcagcctgggccaggggcctgggatttccagggaggagccgattgacaggatttccttccctttctaaccccccggggaaacttgaaaggatttgttncttgggccgngaacttgaagnt

SEQ ID NO: 1579 - DNA, 430 bp, Homo sapiens
  I.1579 (H16000)
  misc_feature (20)..(20): n is a, c, g, or t
  misc_feature (66)..(66): n is a, c, g, or t
  misc_feature (408)..(408): n is a, c, g, or t
gggaagatggcggcggcgtntccacagcgggcgtggaccgtggagcagctgcgcagtgagcactcncagagaagaacataaattattaggaaacattaaaaatgtggccaagacagctaacaaggaccacttggttacagcctataaccatctttttgaaactaagcgttttaagggtactgaaagtataagtaaagtgtctgagcaagtaaaaaatgtgaagcttaatgaagataaacccaaagaaaccaagtctgaagagaccctgggatgagggtccaccaaaatatacttaaatctgttctgaaaaagggagataaaaccaactttcccaaaaagggagatgttgttcacttgctggtattacagggaacactacaagatggggactgtttttggatactaatntttccaaacaagtggcaaggag

SEQ ID NO: 1580 - DNA, 295 bp, Homo sapiens
  I.1580 (H15838)
  misc_feature (67)..(67): n is a, c, g, or t
  misc_feature (111)..(111): n is a, c, g, or t
aagttagtttaaaattttattttttttatttattttttaatatttttatgtaataaaaagtaaaagnccttgtccagccatcctcgtggggcatctgtctgtctctcacanaggtcactcaagttaatgggaaagaaagaacagggggcccaagtctgaagttataaataatagaaaataaaagatcttccgtctccagcgggggaatagatgagaggatgggagggcaagactgggtggggacgggcaggggcagagcaggaaccccccacccctgctggaccctggccctgcc

SEQ ID NO: 1581 - DNA, 474 bp, Homo sapiens
  I.1581 (H15677)
  misc_feature (462)..(462): n is a, c, g, or t
tttttttttttttaagagtaaacggtgtttattttttgttgatttttttcaatcaaatggaattgcttaattaaaaaaaacttatctcttttctccttaaatactacagacaacctcattttatcgcagcagacacctaggaacaaaacactggacccaccagagaaaactgggcaataaaagcatcagaagttcaagtcaactatggaagaattactgttagctggcagctttcaattctaaacagaagtgtcccaaacctattgggtttgacaaaagtttcttagaactggggagctgggaatgttggactccttttaattctattccaatcatttcctgtatagggaaattaaagtcaatgcatcaaataaagacccaaaggaaacatttaaaaacttgtttgactagtattcagtatgtggaggttatttaagtaataacttgttccacccagttaancctgtccggggt

SEQ ID NO: 1582 - DNA, 570 bp, Homo sapiens
  I.1582 (H15676)
  misc_feature (451)..(451): n is a, c, g, or t
  misc_feature (497)..(497): n is a, c, g, or t
  misc_feature (533)..(533): n is a, c, g, or t
catcaactccatatctgtcaacagcgactatgaaacctacatgtccgctgatgacctgaggattaacctatggaactttgaaataaccaatcaaagttttaatattgtggacattaagccagccaacatggaggagctcacggaggtgatcacagcagccgagttccacccccatcattgcaacaccttcgtgtacagcagcagcaaagggacaatccggctgtgtgacatgcgggcatctgcctgtgtgacaggcacaccaaattttttgaagagccggaagatccaagcaacagatcatttttctctgaaattatctcttcgatttcggatgtgaagttcagccacagtgggaggtatatcatgaccagggactacttgaccgttcaaagtctggggatctcaacatgggaaaaccgccccttcggaggactttaccaggttcatggantacctccgcagcaagctgtgtttccctctatggaaaatggattgcnttttgataaatttgagtgtgtgttggattggtcagncagtgtcatcatgacagggtcctacaacactttttca

SEQ ID NO: 1583 - DNA, 503 bp, Homo sapiens
  I.1583 (H15486)
  misc_feature (464)..(464): n is a, c, g, or t
aaccacactgttgactacctcattcctggtttttggcctccacatcatcttttttcttaatatttcatgttttaatttcagggtgtttatactttttgaaactagaccagaagatagtagactttatagagaaagaccagttttacctagatactaaaggaagaattaaaccgctgttagtttgaaatgcttttttttttttttttaaatggagatagggtcttaactcttgtccaggctggaggagtgcagtcgtacagtcatggctcactgaagtcttgaccccgctgcctcagcctcccaaataactggggccacaggtgtgcaccacaactctcagctaatttttaaaattttttatagaggtggggttttactatgctgtccagactgggtcttaaactcctggggcttcaagtgatccccctgccttgggcctcccaaactgggtgaggttacaggcntgaggccaccacaactggcctgaaattttaaaggtgggg

SEQ ID NO: 1584 - DNA, 488 bp, Homo sapiens
  I.1584 (H15471)
  misc_feature (2)..(2): n is a, c, g, or t
  misc_feature (485)..(485): n is a, c, g, or t
gncattatttatagacacaagcagaagggaaaggaatcaagcatgccagcagttacctacacccctgctatgagggtcgtcaatgcagattataccatttcaggaacccttcctcacagcaatggtggaaacgctaatagccactacttcaccaatcccagtcaccacacgctcacccagtgtgccacatcccctcacgtcaacaacagggacaggatgactgtcacgaagtcaaaaaacaatcaactgtttgtgaatcttaaaaatgtgaaccctgggaagagaggccctgtggggggactgcactgggacattgccggctgactggaaacatggcggctacctcaacgagcttcggtgcttttgggacttgacagaagctatttggggaaaatccttaaaaggacctggggaaaggatttttgaatataatttcaagttaactgcttcctaaggcagtttttgaggaacccctatggccattnttt

SEQ ID NO: 1585 - DNA, 485 bp, Homo sapiens
  I.1585 (H15431)
  misc_feature (443)..(443): n is a, c, g, or t
tttttttttttttttttaaaaataagaattttttattcttgccttatttcgtagcaaacataaaaccatcctgattttaaaagccaacactgttctttctcctttttccttggatcacaagttcatacagagtcaagcaagtgccccaaagaaaaaccccaaaattgaaaacaagtgtattcccttcagaaaaatcaaagctaggaatgtttagctattgaagtgttttcccccagactgaggatcaagtaacttcactgcagtggctcaagagtggatgactccctccttccaaataaagcacttattgctaattaggcaggccagaggtttaggactgggatctctcataattgggagacttcaaagtgttcaggaacttcaagccgggcctatggaaggtaaaaaaaaaaaaattttttttaagtaggattgccattttntttttctccagggaggtttttcttcaggccttaacactccgt

SEQ ID NO: 1586 - DNA, 432 bp, Homo sapiens
  I.1586 (H15416)
  misc_feature (361)..(361): n is a, c, g, or t
  misc_feature (427)..(427): n is a, c, g, or t
tttttttttttatcaattcaaattatatattttcatcttgtccctccaaaagaaaaaagaacaacgcatttttatcaagcaaaagataagtggcaataatacaaggaataacgaacatataatattttttcattaacaatccaaacactacaaaacatagaatatgcaatttaaaaatggaaatacaaattaatgaaaagttgggtacatgtcacattaggcaatgcaaaagaccagcttaagcatagtttctctaaattgacaattaataaaaggaaagttccctttctcaaatatggcacaaaaatatttcagtcacttctaggggaaaggttaattcaaaatgttccacttaattctnattattacagcctgtattactaatgggtttacggaacgtaggcggtcatcttggcttttaaatttnacaac

SEQ ID NO: 1587 - DNA, 438 bp, Homo sapiens
  I.1587 (H15202)
  misc_feature (391)..(391): n is a, c, g, or t
  misc_feature (408)..(408): n is a, c, g, or t
ttcaagctttgaaaactatgaagcaacactgagatgtccaggatctgtgactgaagacatttctgattatttctgtcctggcagcatgttccagctcttgatgtttttaaacttttttttagaagaaaaattaagtacagaaaagcccagatttaaatacatttaatatgtcattttaaaaatgattttaataattcatttcttaaaacactgaatgaattttgaagcttaatgtttttaaaggcatagttttatctttgacatctaatttaccatcaagttgtaaaattatttgggaaaaatacaggaactcgttttatttgtatacttatatggggaatctggcatgtgagggtgtttgaggggcatatgtttggaaagaggggagccntcaccacagggattccnttctgtggagggtggggaacagtgggtccc

SEQ ID NO: 1588 - DNA, 364 bp, Homo sapiens
  I.1588 (H15141)
  misc_feature (69)..(69): n is a, c, g, or t
  misc_feature (73)..(73): n is a, c, g, or t
  misc_feature (354)..(354): n is a, c, g, or t
tttttttttaaactagatttttatttttattatatttccatgtgaagacatcacccaaatgtcagcggncaanaagactttatggtcagataccaaaggcgtacagttgatcccactttggaataaatgcccagaaggtaataagcattatcagtgagtgagagctctaggcacaaaataagttctcattcagaaagtggacagagatatgaagcagtgaaacatatagctttaaaaactggaaatcattcatgacatttgttttcaaagtaaacattatctgcatttcaagaactgtaattttcaaaagtaggaatcagggcctgatttaagtaatatttatgacttacaggntaaaattacc

SEQ ID NO: 1589 - DNA, 484 bp, Homo sapiens
  I.1589 (H14699)
  misc_feature (59)..(59): n is a, c, g, or t
  misc_feature (458)..(458): n is a, c, g, or t
  misc_feature (484)..(484): n is a, c, g, or t
ttatttgtgagtttagcaaccttccagttacctgcagagttctgggtgcacagccaccnctcataagagccctgttctctgaagaccattcatatgagaacaaaggtctaggatactgcattagttaccagaaaactaggggaatttagagggaaaaaaaatccatgttttctatttcccaggtttttaaaaagtagctcttccccaaccccgttgctagcttgttgcaatataaaagccctggtgcacctgaatttactcctggccttactaatgattcataatgtgatcttgagaaatgtgtttaagctttctgagtcttaacctccttgtctctaaaatgggcaattaaaacaatcttcaagagccctgtaaggttaaatgccgataaaatgactggactccgcccttcttccttagtacgtagtattccagcaaggcatttgccccaccttgtnttgttggatgaacatattatgaagan

SEQ ID NO: 1590 - DNA, 463 bp, Homo sapiens
  I.1590 (H14396)
  misc_feature (10)..(10): n is a, c, g, or t
  misc_feature (113)..(113): n is a, c, g, or t
  misc_feature (377)..(377): n is a, c, g, or t
ctcgtgcagnagccaccatgagttcttcatgcctgggctggttgatacacacatccatgcctctcagtattcctttgctggaagtagcatagacctgccactcttggagtgtngaaccaagtacacatttcctgcagaacacagattccagaacatcgactttgcagaagaagtatataccagagttgtcaggagaacactaaagaatggaacaaccacagcttgttactttgcaacaattcacactgactcatctctgctccttgccgacattacagataaatttggacagcgggcatttgtgggcaaagtttgcatggatttgaatgacacttttccagaatacaaggagaccactgagggaatcgattcaaggnaaactgaggagatttgttgttcaggaaatggttccaaaaggaactctttttaggagttgaagcccttagttgacaccacgtttttt

SEQ ID NO: 1591 - DNA, 471 bp, Homo sapiens
  I.1591 (H14348)
  misc_feature (8)..(8): n is a, c, g, or t
  misc_feature (68)..(68): n is a, c, g, or t
  misc_feature (312)..(312): n is a, c, g, or t
  misc_feature (330)..(330): n is a, c, g, or t
  misc_feature (428)..(428): n is a, c, g, or t
  misc_feature (446)..(446): n is a, c, g, or t
  misc_feature (452)..(452): n is a, c, g, or t
  misc_feature (469)..(469): n is a, c, g, or t
actttgangcacaaaactatattatgaaagcatgtggcattcaatttctgacattcatcgccaaaganggcaaagcacaacactaacacatctctgaaatgcaaattccattaagtgcaaatttctaaaacacaaggtcaacctagaaacacgttttaaatttcaacaagttctctttttaaattagtatgctcagtatataattttcaaacacaatctgaagtgattttctaacgtttgttctcagtctaacttttgctccctcataaaaatatactctcatgggtccattttcagtcttctaatttttgncaattattaggctcaaantatctaaccttttagggaacatcttttctttccacatttttcaaatatgaaaaaggctttgcttaagtcttaccgtagggacaccaccagtaatagcnttcccttcagtttgaggntaaagnaaggtccgaggcagctnat

SEQ ID NO: 1592 - DNA, 441 bp, Homo sapiens
  I.1592 (H12983)
  misc_feature (381)..(381): n is a, c, g, or t
  misc_feature (439)..(439): n is a, c, g, or t
agaaaacacccacattctggatgggaatgcagtcgacctacaggcagaatgtgatgcctttgaagagaagatcaaggctgcaggtgggatcgagctatttgttggaggcatcggccctgatggacacattgccttcaacgagccaggctccagtctggtgtccaggacccgtgtgaagacgctggccatggataccatcctggccaatgctaggttcttcgatggagaactcaccaaggtgcccaccatggccttgacggtgggggtgggcactgtcatggatgctagagaggtgatgatccttatcacaggtgctcacaaggcatttgctcttgttacaaggccattcgagggaggggagttgaaccacatgttggaccntgttttgcctttcccagcagcatcccccgcaccgtgttttgttgttgttgacgagggntg

SEQ ID NO: 1593 - DNA, 327 bp, Homo sapiens
  I.1593 (H12960)
  misc_feature (252)..(252): n is a, c, g, or t
  misc_feature (287)..(287): n is a, c, g, or t
  misc_feature (300)..(300): n is a, c, g, or t
aaggattaatccaaagtaacttctaaaataacactgattaaataagaactggagcaagtactcttaagtgctacattaacctggttagaaaggctgttggattccagattgctattgtaaaatctccatcatgatgtgttggagtgaaggattagatggttttatccaacagtcctactagatatttggtaaccagcttcccttaactagctttttctttaaatactcgttaataagctattccacaaaccnccagttaacctaacacatgaccctaaacctaggcntttaccatacatnaaactaggctaaaggggaaaccaacct

SEQ ID NO: 1594 - DNA, 389 bp, Homo sapiens
  I.1594 (H12190)
  misc_feature (161)..(161): n is a, c, g, or t
  misc_feature (352)..(352): n is a, c, g, or t
  misc_feature (365)..(365): n is a, c, g, or t
  misc_feature (371)..(371): n is a, c, g, or t
agctgaagagacctggagccgacagacgggtctgggtctgccgcccaggatggagtacaatggtgtgatcttggctctttgcaacctctgcctcctgggctcaagccttcctcccacctgaacctcccaagtagcgggactgcagggtgaaggccatgcgnctcctgggaaagttccccgaaaggagaatctgtggctacagtgtgagtgggggtcctgctcctttgtgtgctcaaccatggaaaagttctttgagcatgtcactcagcacctgcagcagcacctgcatggctctggggaggaggaggaagaggaagaggaggatgacccatttgaggaagatttttcctgnttgtgggcaggantgtggntttgttctctgggacatt

SEQ ID NO: 1595 - DNA, 444 bp, Homo sapiens
  I.1595 (H11973)
  misc_feature (438)..(438): n is a, c, g, or t
tttttttttagctttagaggttttggctttaattatataatacaatgtctaggaattgtgttgttatgatgaatgtcaaaatgcctgcaaagtttgaacatttgctatttaccccaacaatcagaaagctgtccatagtatttttttgttaacaagtaaaagatcttcaagttcatccagtgatgtcatttaacatatatttcccattttatgaaataaggattatttagtaattccagtgtagaaatttaggatgttcactacctcacttttacatattcattattttaaagccataatgtgaacaatacatccataaagagacatttaaaggaccatctgatattcatggaaatactaaggaaatatggctgttttatggctccacatactacactcagttggggaggatggaaggtgtggcattgttggaagtcnttgtgt

SEQ ID NO: 1596 - DNA, 470 bp, Homo sapiens
  I.1596 (H11972)
  misc_feature (73)..(73): n is a, c, g, or t
  misc_feature (127)..(127): n is a, c, g, or t
  misc_feature (418)..(418): n is a, c, g, or t
tgaacaggacttctcccaaggaccttgtcccactgttcgccagaagctctggaatatcctggagaaacctggntcttccacagctgcccgtatctttggcgtcatctccattatcttcgtggtggtntccatcattaacatggccctgatgtcagctgagttaagctggctggacctgcagctgctggaaatcctggagtatgtgtgcattagctggttcaccggggagtttgtcctccgcttcctgtgtgtgcgggacaggtgtcgcttcctaagaaaggtgccaaacatcatagacctccttgccatcttgcccttctacatcactcttctggtagagagcctaagtgggagccagaccacgcaggagctggagaacgtggggcgcattgtccaggtgttgaggctgcttcagggntctgcggcatgttaaagctgggcagacattccacaggattaagttccttggt

SEQ ID NO: 1597 - DNA, 329 bp, Homo sapiens
  I.1597 (H11827)
  misc_feature (73)..(73): n is a, c, g, or t
  misc_feature (206)..(206): n is a, c, g, or t
  misc_feature (243)..(243): n is a, c, g, or t
  misc_feature (319)..(319): n is a, c, g, or t
aaagtccgaggaggccttcaactgccggtgcaaggaggagaactgcgctatcctcaaggagctggtgacgctncgggcccagaagtcccgcctgctggggttccacacgcacgccgactatgtcctggagatgaacatggccaagaccagccagaccgtggccaccttcctagatgagctggcgcagaagctgaagcccctggggnagcaggagcgtgcgttgattctggagctgaagcgtgnggagtgcgagccccggggcctgcctttcgacggccgcatccgtgcctgggacatgcgctactacatgaaccaggtngaggagacgc

SEQ ID NO: 1598 - DNA, 502 bp, Homo sapiens
  I.1598 (H11790)
  misc_feature (1)..(1): n is a, c, g, or t
  misc_feature (3)..(3): n is a, c, g, or t
  misc_feature (366)..(366): n is a, c, g, or t
  misc_feature (431)..(431): n is a, c, g, or t
  misc_feature (449)..(449): n is a, c, g, or t
  misc_feature (458)..(458): n is a, c, g, or t
  misc_feature (469)..(469): n is a, c, g, or t
  misc_feature (482)..(482): n is a, c, g, or t
ntnaaatttctaccaagagtcgggtttgccacagagatgtgaatattaaactaaactattattttttaaagaatcctcacatgcctagagcattctgacctcttcttgtttagagtgataacattttttcccagacagatgacagcaacaagatagctctacttttttatatggaaataacattatgttactgacaaggtcattttctaccagagacaattagaggactggtacttttcctaagttgtgtattactgagtcttggagtcatctctgagagcaaatgtatgttcctgaaaagctaattttacacctcatttactgtaggtaacaggaacaacctcaatttttccaaatttttgaagntttatttatgggggctagaattcccctgcataggagatttgtgtaggggggccagaattctttcnctggaaatgctatacaantctttcctntgtggggttcnccttcatccttcngttttggcaccggcattgtt

SEQ ID NO: 1599 - DNA, 376 bp, Homo sapiens
  I.1599 (H11718)
  misc_feature (309)..(309): n is a, c, g, or t
  misc_feature (347)..(347): n is a, c, g, or t
ttttttttttctattgaaatatttatactttattcaaggatatattcattttgaggctcatgagcaagagttggtaaaaattacagttcagtctatagtcttgagaaatttgctaatctcccagatcttaagcaaaaagaaaaaacaagcaaaccttttgcctggccctaaacacatctaaagctgcttgggacaatcatcctagctgttgttctcatatgacttatagcagataagcagattaggtatataaaccataccactttttcaaaaatttccaatcatttaggaaatagttactcatggganataaattttgacttacaaatttcttgggtgggtggggnaaggcaaaattaagaggaaggaaggtgtg

SEQ ID NO: 1600 - DNA, 466 bp, Homo sapiens
  I.1600 (H11661)
  misc_feature (378)..(378): n is a, c, g, or t
ttttttttttttgtgagctaaggatttaatcactgtcaagcagatcttgagggttatagttaagcctgataacagcctctttaacaagaacacacacatccaggatcccctcaaagaatccagagtcctcaggctccccacaaaatgtagtctggcagaaaagggaagtctttagagtctgcagaatgatgcaaacccaggccagagtggaccacactgctctcggcaccactcctaaaggcatccattggcaacggctgcccactaggggcactgccacttgcctggctcaaacttcaggacctggggaagaaatggtctggctctgcggccttcaaaccatctgggatctctggctcctcagctattccttgaagnttttccatgatgccccctgaaaggtggctcagggactggggggaggttccctggggctttcagacagcacatagttagacaatttttt

SEQ ID NO: 1601 - DNA, 326 bp, Homo sapiens
  I.1601 (H11571)
  misc_feature (191)..(191): n is a, c, g, or t
cagttggcaaaccagatatatgacttggtagatcgacacttgagaaagctggatcaggaactggctaagtttaaaatggagctggaagtgataatgctggaattacagaaatattagagaggcgatctttggaattagacactccttcacagccagtgaacaatcaccatgctcattcacatactccagtngaaaaaaggaaatataatccaacttctcaccatacgacaacagatcatattcctgaaaagaagtttaaatctgaagctcttctatccacccttacgtcagatgcctctaagggaaatacactaggttgtcgaaat

SEQ ID NO: 1602 - DNA, 207 bp, Homo sapiens
  I.1602 (H11543)
  misc_feature (125)..(125): n is a, c, g, or t
  misc_feature (192)..(192): n is a, c, g, or t
tccccttctcccttcttacgtttgggaagttttatgtagtgtaacaaactctagacgagttaccagaagatgtggattctagttctgattctgtcactcattggctttgagtgacatatttttanttcccgggccctgttttctcacattaaaaaagtagaagttagatgagtgatctctaagggtgaaggnaatttcagctctcac

SEQ ID NO: 1603 - DNA, 365 bp, Homo sapiens
  I.1603 (H11463)
  misc_feature (261)..(261): n is a, c, g, or t
  misc_feature (263)..(263): n is a, c, g, or t
  misc_feature (264)..(264): n is a, c, g, or t
tttttttttttttttgcaaccatttatatacagtgttacataacagctctggagtacagtacatgcagcagaatatacctgttgaatataaaatactttccttaaaatcttcatcattggaattccttgaagtctaaatcatagaatgcccattactttgagaaaatggttgaggagtacaaatgtctgcatatgttggccactgaaataatccaaggctaactgggaataatattcataggcacaccgggggtgcataantnntttacttacattattaaaatacaacccataaaattcaagttcaggatcttatagggattgtctatggtaaatcctttaggtggttgccggggaaatggcat

SEQ ID NO: 1604 - DNA, 468 bp, Homo sapiens
  I.1604 (H11433)
  misc_feature (346)..(346): n is a, c, g, or t
  misc_feature (379)..(379): n is a, c, g, or t
  misc_feature (394)..(394): n is a, c, g, or t
  misc_feature (401)..(401): n is a, c, g, or t
  misc_feature (432)..(432): n is a, c, g, or t
tttttttttttacaagtctcaagttttttattttcagaacagagtctggttttatttttaaaaagagaaggaaaaaagtgataaatgctagtgaggtgccacttccctccttcttccaggctctaaccgccagctagctctctttcacaaaacccacggatgcagaatcaggacatgttaaaatggaacagtctttagagagggtctagtctttttaaaataagtaaggatttggggactaacagagaggaagcccctgacttgctgaattgttagggagcaggcggttctcgagattctgagcccagggatccttttctgtgaaccatgcacgtgctgggcactnggccttcagggagacagtgccctgccttggctngttcaggtccacggnggaaatnttcaggttttgcccctttcactaggggattnccctaggaaagcaaagggcaaagggaagtttttagg

SEQ ID NO: 1605 - DNA, 593 bp, Homo sapiens
  I.1605 (H11366)
  misc_feature (23)..(23): n is a, c, g, or t
  misc_feature (34)..(34): n is a, c, g, or t
  misc_feature (66)..(66): n is a, c, g, or t
  misc_feature (505)..(505): n is a, c, g, or t
  misc_feature (532)..(532): n is a, c, g, or t
  misc_feature (565)..(565): n is a, c, g, or t
  misc_feature (570)..(570): n is a, c, g, or t
  misc_feature (575)..(575): n is a, c, g, or t
  misc_feature (591)..(591): n is a, c, g, or t
acttaaaccattgtcagacatgncacaatgaccntgcattgctgacagttttagaaacttggtggncacttattaatcctcttggacccctttccactgctaatggatagtgtacattcttcttaaagtccacaacagcagattttcttgcagtaaattatgcagatgcaaaatattctaattgatatatgtgttggaagactgagtattgatgggggagtggaccagacaaagaggtaagatgaaacagtagtgtgtttataattgtctgtgactattttctataataattagtactatttaatggtgagcttttaaaaatgtaggatagagggtacagtggcactgtatatactatttatagtctcagctactagggaggctgaggcaagaggcttgagaccaggagctcgaggctgtaatgtgccatgatgattgcacctgcgaatagccactgcactccagcctgggcaatatagcaagaccccatcctttaaaaaatttnagaactttttaaaatcaaagtgcagantcttgttgtaaacccaataaaggtgagtagttntattngggtntaaattgcttaaattntc

SEQ ID NO: 1606 - DNA, 482 bp, Homo sapiens
  I.1606 (H11343)
  misc_feature (240)..(240): n is a, c, g, or t
  misc_feature (286)..(286): n is a, c, g, or t
  misc_feature (317)..(317): n is a, c, g, or t
  misc_feature (324)..(324): n is a, c, g, or t
  misc_feature (332)..(332): n is a, c, g, or t
  misc_feature (335)..(335): n is a, c, g, or t
  misc_feature (357)..(357): n is a, c, g, or t
  misc_feature (368)..(368): n is a, c, g, or t
  misc_feature (374)..(374): n is a, c, g, or t
  misc_feature (440)..(440): n is a, c, g, or t
  misc_feature (456)..(456): n is a, c, g, or t
tttttttttataggaaatagtttttttctctttttattatttcaagttttcataaaaatccataattattgaaacccaagttacagagaaagttcgtaacttttttattgaattattgactctgcccgcgtgtcgttcgtcgctttcaactccagtctgtcaatgcccctgtgtaggtggggtccccaggtctgggcttctgaggtcctggtagaaggagggcaggtggtgagggctggncgggggcagcaggggacggaggcgggagggagaaagagaacgtgtntagaagggtagggaggaggtgggaaggactngagagtnagcaggtngcngccaggccccttccccttcccngccgcccgggntccctnccccccgccccggcctcatatcatcttcatgttgaaggggaaaggcacagttgcgcgggtcttttngcctctccctcgcccngctggtttgagataaagcgaaggtct

SEQ ID NO: 1607 - DNA, 361 bp, Homo sapiens
  I.1607 (H11204)
gaagaaacttccaaaaatatctaggtttgtcctcattttacaaatgaggaaactaaactctgtggaagggaaggggttgcctcaaaagtcacagcttagctgggcacagtggctcatgccgataatcccagcaattcagaaagctgaggcaggaggattacttgaggccagactgggcaatatagcaagaccccatctctaaaaaattaggcatggtggtgcatgcctgtattcccagctactcaggaggttgaggtgggaggatcacttgagcccagaagttcaaggctgcaatgagccatgattacaccacggcactacaaccttggtggcacagttgagaacctgactctttaaaaaa

SEQ ID NO: 1608 - DNA, 454 bp, Homo sapiens
  I.1608 (H11108)
  misc_feature (165)..(165): n is a, c, g, or t
  misc_feature (262)..(262): n is a, c, g, or t
  misc_feature (321)..(321): n is a, c, g, or t
  misc_feature (337)..(337): n is a, c, g, or t
  misc_feature (374)..(374): n is a, c, g, or t
  misc_feature (396)..(396): n is a, c, g, or t
  misc_feature (452)..(452): n is a, c, g, or t
tttttttttttttgaacaaatctttgttgtttattttaaaattcaagacaatttttttgcaaatgctgattcaaaacgtaccaatccccatctatcatgcctatgccaatacaatctgtcacaaaaaagtttgcttctcattgtcacatagctatggggactggnggccttctaaaatcactgtccagctgctgcaagtgtgaggccagcaacccacggcagggatgcaggagggaagccatggctaagctgtgggcctggncaaaggccacagatggggttgaaaggtgagaagcggtaagctagaggagacagacggcnttgccattaaaaacanttcaacttcattttaatgttgctatgtaagttcacantaaaatccctgggaagttcaanttggaaagggcagtttggggtcatggggctcaacattttaaaggcagttttcagtntt

SEQ ID NO: 1609 - DNA, 415 bp, Homo sapiens
  I.1609 (H11031)
  misc_feature (309)..(309): n is a, c, g, or t
  misc_feature (356)..(356): n is a, c, g, or t
  misc_feature (369)..(369): n is a, c, g, or t
tttttttttttttttgactggtgaagccgttagcttgtattcatatagaaatataacaacagaaacagtgtcaatatttactcatatacctccaacctggcaataaataaagataagccctgatcgctaggaccttctaagtgcctcaatctgtgtagagtttaatagatctcttttcaactgctttttatgcagatacatttccacctacaagttttttgaagttaggaagttgatattcattgtattcatttgctgcttaggaatattgggatgaggaggggagggttatatataggtgaaacgtgnctcagagccctattaattcctttgttttcatcctgcatggggtaccnggcattaggggtntcagggctgggaactgggagtcacgtggaccagcttggggtttcag

SEQ ID NO: 1610 - DNA, 440 bp, Homo sapiens
  I.1610 (H11029)
  misc_feature (367)..(367): n is a, c, g, or t
  misc_feature (379)..(379): n is a, c, g, or t
  misc_feature (388)..(388): n is a, c, g, or t
  misc_feature (413)..(413): n is a, c, g, or t
  misc_feature (436)..(436): n is a, c, g, or t
ttttttttttttttgatgaaatagataattcaggttgtcatttataattttagagtttgcttcacatatacaatgctgtgttacgaaacaatgaacacttttataaaaaatttatttcacacttttatacaaatatccacaggtaatttctaatcatgaaataattttacaatgctagttagtacaaaaatgtatcaaatgcaaacaggaccagtgacttggacttgaggatggacatttttaacaaccataaatctaaacaccataacatctttgtttctttgttggaaccaccctcccaacacccttttcgggacattcatcttttttttaggtaacacgggtcttaaaaacactggtcaaggtntccggctccttnggcaatctnggcaatcttaaacacttgggggggncacaggtttccccagggcagggnaccg

SEQ ID NO: 1611 - DNA, 376 bp, Homo sapiens
  I.1611 (H10689)
  misc_feature (148)..(148): n is a, c, g, or t
tttgccaaagtcctaactgactatacatagaaaaaaaaaaaaaaacactgttttcacttgattttattaaattatttttaaaagtcaattttgaaaataactgtattttattaaggagatcgtgacttaacttaaatggacaaaatanctttttaaaagaaatggatgagaagtaattgtgtttccaaaaccctcaaatatcccattcctatactggctgggatttttgctacctgtcgctcattttaatatgtcacagtatgagattcaaattctgtttaactttgttttaaaataggcttggtctcttttatttgggtttgtaatactgctgtatttttgggtgggtaagcttcaaatatccaaattttgttct

SEQ ID NO: 1612 - DNA, 432 bp, Homo sapiens
  I.1612 (H10750)
  misc_feature (384)..(384): n is a, c, g, or t
  misc_feature (407)..(407): n is a, c, g, or t
  misc_feature (413)..(413): n is a, c, g, or t
  misc_feature (418)..(418): n is a, c, g, or t
  misc_feature (429)..(429): n is a, c, g, or t
atgcacgttagctgtcccacatcacaagactatgccattggggtagttgtgtttcaacggaaagtgctgtcttaaactaaatgtgcaatagaaggtgatgttgccatcctaccgtcttttcctgtttcctagctgtgtgaatacctgctcacgtcaaatgcatacaagtttcattctccctttcactaaaacacacaggtgcaacagacttgaatgctagttatacttatttgtatatggtatttattttttcttttctttacaaaccattttgttattgactaacaggccaaagagtctccagtttacccttcaggttgggtttaatcaatcaggaattaggagcatggggagggtcatcactttggacctaaattatttacngccaaaaggaaatctttattaangtaccnggggngagttgttttnatt

SEQ ID NO: 1613 - DNA, 408 bp, Homo sapiens
  I.1613 (R68707)
  misc_feature (341)..(341): n is a, c, g, or t
  misc_feature (366)..(366): n is a, c, g, or t
cccgttcatattctaggtcatccagcaggaccacggacccaccactgccaaaatcccctgaggtttcctgctcctcttcacagctcacagcaccctgtttcctggagccagccaactcattcccatatttgtccacacaccagcactgccccgtgctgccgtggcactgtgtggctttgtaatagccctcctcattacaccgaggtatgaaggcccccaacaggcttttccccttactcagcttcttgaattctgttcatttcattctgggcaaggggagactccagggttctgggaaggcagtaggcaccattcattgtttaggaaaggtttgccatccnttgaagggagttcacaggagtttgnaaaagagggtttgattacaggggttcgttatttattcagggg

SEQ ID NO: 1614 - DNA, 339 bp, Homo sapiens
  I.1614 (R68656)
  misc_feature (308)..(308): n is a, c, g, or t
  misc_feature (334)..(334): n is a, c, g, or t
gacaatgaccagtggctgagcaccgtctcccagtacgaccgggacaagtactggaaccgctttcgagacgatgattatttcagaaactggaatcccaacaagccctttgaccaagccctgggacccatccaaggacccctgcctgaaggtaaaatgcagccctcacaaagtgtgtgtgacccgggactaccagaccgccctgtgtgtcagccgcaagcacctgctccccaggcaaaagaaggggaacgtgggcccagaaacactggggtttggacctttgaattttggtcaagttgcaagccctgttnccgttggcacagttcagccattggtnttcgg

SEQ ID NO: 1615 - DNA, 388 bp, Homo sapiens
  I.1615 (H10608)
  misc_feature (214)..(214): n is a, c, g, or t
  misc_feature (301)..(301): n is a, c, g, or t
  misc_feature (333)..(333): n is a, c, g, or t
  misc_feature (360)..(360): n is a, c, g, or t
  misc_feature (366)..(366): n is a, c, g, or t
  misc_feature (386)..(386): n is a, c, g, or t
ccttattcacagtgaaatcagtaatttagccggctttgaggtggaggccataatcaatcctaccaatgctgacattgaccttaaagatgacctaggaaacacgctggagaagaaaggtggcaaggagtttgtggaagctgtcctggaactccggaaaaagaacgggcccttggaagtagctggagctgctgtcagcgcaggccatggctgcttnccaagtttgtgatccactgtaatagtccagtttggggtgcagacaagtgtgaagaacttctgggaaaagacagtgaaaaactgcttngccctggcttgatggataaggaagctgaaatnccattgccattttccatcccttcggcnaccggnagggaccggttttcccaaangc

SEQ ID NO: 1616 - DNA, 473 bp, Homo sapiens
  I.1616 (H10527)
  misc_feature (458)..(458): n is a, c, g, or t
tgaaacatggagaccaggaaatctgtgctcagtactggggagaaggaaagcaaacatatggagatattgaagttgacctgaaagacacagacaaatcttcaacttatacccttcgtgtctttgaactgagacattccaagaggaaagactctcgaactgtgtaccagtaccaatatacaaactggagtgtggagcagcttcctgcagaacccaaggaattaatctctatgattcaggtcgtcaaacaaaaacttccccagaagaattcctctgaagggaacaagcatcacaagagtacacctctactcattcactgcagggatggatctcagcaaacgggaatattttgtgctttgttaaatctcttaggaaagtgcggaaacagaagaggtagtgggatattttttcaagtggtaaaagctctacggcaaagctaggcccgggctggttttcccacnttcgagccattttca

SEQ ID NO: 1617 - DNA, 424 bp, Homo sapiens
  I.1617 (H10400)
  misc_feature (141)..(141): n is a, c, g, or t
  misc_feature (202)..(202): n is a, c, g, or t
  misc_feature (285)..(285): n is a, c, g, or t
  misc_feature (359)..(359): n is a, c, g, or t
  misc_feature (392)..(392): n is a, c, g, or t
  misc_feature (397)..(397): n is a, c, g, or t
  misc_feature (402)..(402): n is a, c, g, or t
  misc_feature (412)..(412): n is a, c, g, or t
ttttttttttctttttttaacggtttaacattttactaaatcaactcacacaaattccaaattgcaaatataattaaggacaacagattctgctttgccttattaaatctttcattttcaaatccatcaataagacaaaangtaaccaaaaattaggtctgttgcaaattcatgattcttctgaggggggaaaccaaaagancattagagtaaaaagaacgccactgggagggatgtacaataaaggcaccacaacacacggcttacaaacggggcttcctgggntttcgggtgacagggtaaaaggacggctgttctccccactgctgtgcgttcaatcaggggttttcatttaaaantaaaacttttaaaatctcctagggttacactangttcngacanggtttggggnccacagtgtttt

SEQ ID NO: 1618 - DNA, 500 bp, Homo sapiens
  I.1618 (H10128)
  misc_feature (410)..(410): n is a, c, g, or t
  misc_feature (427)..(427): n is a, c, g, or t
  misc_feature (469)..(469): n is a, c, g, or t
  misc_feature (474)..(474): n is a, c, g, or t
aaataggagttaacctctgaaagaaagagctgctgttaccctttgtacatgcttagtacgtgcctagaaaacccaacctggggagtccaggttgctacacatgtgagcccaccgcagcacggggctgggcagagtgcgagtctgatacactgtgggtgctcagtcagcgcaggccgacgggtgcatgagggactccctggggaacctgtttctcccagctctggtcccggcagagttagctgcttgccccctgcctgcccagcactcctgtccctgggcctgcaggaccctttgaggatgccctgaagttgcatgagtgctcagtggcggcaggcgtgacagcagcccctcttcccttgggagggaccagtgggcccagccactttacccgccggggcccttgtggcccncaacgggagggaacagntgcgttcaaaggagccttggtaaccacggccggatgaagccnccggnaaggaagaagattttttgaatttatt

SEQ ID NO: 1619 - DNA, 422 bp, Homo sapiens
  I.1619 (H10101)
  misc_feature (313)..(313): n is a, c, g, or t
  misc_feature (413)..(413): n is a, c, g, or t
ggggcaactccaagtaccactactatggcctgcgcatcaaggccagctcacccctgctgcggctgatggaggaccagcagcacatggccatgcggggccagcccttctcgcagaagcagaggctcaagcccatccagaagatggaaggcatgaccaacggcgtggcggtggggcagcagcgagcacggggctgtcggacattagcgcccaggtgcagcagtaccagcaatttttggatgcctctcggagcctccctgacttcacagagctcgacctccagggcaaggtgctgcctgagggcgttcgggcccgnggacatcaaagccttccaggtcctgtaccgggaacactgtgaggccattgttcgacgttcatggtgaacctgcagttcaccctgggttgagaacgctgtnggaagacct

SEQ ID NO: 1620 - DNA, 291 bp, Homo sapiens
  I.1620 (H10072)
  misc_feature (113)..(113): n is a, c, g, or t
  misc_feature (115)..(115): n is a, c, g, or t
  misc_feature (248)..(248): n is a, c, g, or t
  misc_feature (252)..(252): n is a, c, g, or t
ttttttttttttcttgtggccattcccaggtttaattacaaaccgatccgaacatcccatctgggtcgacagctgggagggcaggattggggggaagctgctgggcgcacggncnaggcaaccacgtccttcccctgctcccaggtggagtaggggcctcacgactgcctcgatatccactgtcttggagcagcctggctaccccgagatcccaggtgacctcaaggctgcctgcacttcagcgccanatgntatcctggcctgagaaccccaaagcaccttaagcgtccc

SEQ ID NO: 1621 - DNA, 150 bp, Homo sapiens
  I.1621 (H10048)
  misc_feature (121)..(121): n is a, c, g, or t
tttttttttcttgccataaacatctatctcacaggctgaaaacactgagaaaactggaacagataaggccatgatggttggaaaaaaacccaacaagttaccaactccgctcgggcggcgntcacgaatcgcacaatagtcatggggtgg

SEQ ID NO: 1622 - DNA, 420 bp, Homo sapiens
  I.1622 (H09991)
  misc_feature (354)..(354): n is a, c, g, or t
  misc_feature (363)..(363): n is a, c, g, or t
  misc_feature (388)..(388): n is a, c, g, or t
  misc_feature (399)..(399): n is a, c, g, or t
ttttttttttttttgttttaaacactttatttataaaaaagtacatttttaatcctcagtacattttcaacccatcatttttttttaatacaagtaaaagggggtgatgcaaacaccccccaggtcagaaccaggaggatctgctgggctgtccctggaccaaaggcggaaagggcgacaagacgccgaagcaaggtagcgcatcacgctgggaggggagggtggcagcttctcctgggattcttttcatttatacaaaaaaggaaaaccaattttttcgaccaaggaatcccattcctcacaggcagggggttcagaaggaggcaggcagcaccgagtggggacagggggctnctcctgggncttcacaagtttggggcagtttttnggccagcagtnggcagccagcagagggggcct

SEQ ID NO: 1623 - DNA, 480 bp, Homo sapiens
  I.1623 (H09990)
  misc_feature (194)..(194): n is a, c, g, or t
  misc_feature (315)..(315): n is a, c, g, or t
  misc_feature (393)..(393): n is a, c, g, or t
ctctgcttggtccccttttcccccaggcaggaggcaatcccaggggcctgcctgatagaggcatttcctgtccctgtctcctcctgcatctcctttatcctgcactgccaccctctattccccattctgtgttggactttgaaggccccaagcccagccaaagcactgagttcccccttaagacacctccacancctccccacaagcaaagcacaaattttggggtccatgtagcatgggccacgtaggaggctcctgacttgccaggggcccagcctcagcatacccaccgaggcagctgccagcctggggctnagggtggggcatgagggcagggagtcagcacttgggacctaggggatgtgaggtttttttgttgccccaagttttttngggaaggttggggcactaattgcttggggcccacaagaacaacaagccagttgggaaaaaaggggaagttttaaggcccagcagaga

SEQ ID NO: 1624 - DNA, 380 bp, Homo sapiens
  I.1624 (H09934)
  misc_feature (283)..(283): n is a, c, g, or t
  misc_feature (361)..(361): n is a, c, g, or t
tttttttcattttgtttcacatgagtgaaaaaattaacagctgccctcatttctgaaaacaaaaaactataaacaatcactgttgctcccaatgggaccgttggacataagccctgaggctttggggtcaacgggctagactctagaagcccaggaccccgccaaggtcaagtctgcatacttggggcagggcgagctgttgaaccatcgcatttctctgctgcttctttacatgggaaccaacacaagaacaacacaatccctaaattgggctgctgcgggntcctacaagtaagtgaaaaagcgagaggacacagccaaggagtgcttgcctaacccagcccccttcttctaagccatnaatcccaaggggtgagtat

SEQ ID NO: 1625 - DNA, 186 bp, Homo sapiens
  I.1625 (H09933)
  misc_feature (155)..(155): n is a, c, g, or t
cttgaaggtggtctgagctttctcactccaagccagtcgtgtgggaagggacactctctgagcctcagtttcctcagctgtcaacctctcagggcttgttctagtggctccgaaagccagtgggagcaagcgcgctttgcaaagccttgggcgcncgggccttggccgcctttgccggatccttcc

SEQ ID NO: 1626 - DNA, 470 bp, Homo sapiens
  I.1626 (H09566)
  misc_feature (218)..(218): n is a, c, g, or t
  misc_feature (314)..(314): n is a, c, g, or t
  misc_feature (400)..(400): n is a, c, g, or t
  misc_feature (450)..(450): n is a, c, g, or t
  misc_feature (470)..(470): n is a, c, g, or t
ttttttttttttttttcaaaaaccctatttattctctatcatcaaaaatagcaacagggggacttatacaacttttctgtgagtacccaccagtctatttttttttcttaaaaaaaatagaagttagttaaagaaaaatgatttggtttttaaaaaataatgtaaggaaacacttaatcagatagcccaaggagtcatcagaaatatgtgtagcaagnaaagcttcattttcggccctctctggcctttgcacatcttttactaaactagaaagagattgtacagtaccaatatgttccccaacctgcttgggntcaaattgtttgtttttaaacccattattgctaaaccagagtgttgacactgaggcgccgagggagtccactcataggggataaanttgagaggctgctttccgaggactgggttctccaccggggccttttgganccgagtgcactgcaaccttn

SEQ ID NO: 1627 - DNA, 467 bp, Homo sapiens
  I.1627 (H09412)
  misc_feature (273)..(273): n is a, c, g, or t
  misc_feature (424)..(424): n is a, c, g, or t
ctggacagaatttttaaaagcaatgaagccagttccttggatatatccacgggctttgctttgagaaggaactgagtaggcagtgagaagagtcgagtgaagcctggcccgtgagtgcctcaacaactgagatgaacgtcgactcgcttgcaggcaagttgtcactcagcagcgatctgaactatatcctgggttccagaaaaggcagaggttcttaccgaaagcaggggaggaagccgcagcccaaggaggtcgtcacttgccgggaaggtngctcgggccaggctgcactcaaaacccgtgctctgtccacactgctacggggccagagccaaggaagcttccacttcttcccccagacagccccaacagcggctaccccaagggagccagcagccttgtgttcctggggattcccagcccntgcagaattgacccaccagggtctttagcatcacagccaaatt

SEQ ID NO: 1628 - DNA, 478 bp, Homo sapiens
  I.1628 (H09383)
  misc_feature (435)..(435): n is a, c, g, or t
  misc_feature (466)..(466): n is a, c, g, or t
gttcttatcacctacaatgggtagaatgtgaacttgttacctttggcaagttttcatttttccttggtggattccttctgtgactccaggtatcttgataatgggagactggtttatttgttctttaattgcccagatttctttcaactggtaaaacatcatacttcttcagcaaaaggaattcttctagcagagccttcatggatgatatctgtcacacatgccagcacctgcagtttggaaggcagtggtgaatggatccatgcaatatgtctagaagacacaaggatgagccagccacctgatcttgtcatttataaacttttaagaattactctggtttacttttggtctgaaaatggaaaggcccaaattaatggaaattaatctttttcagattgggaattttacatgggccatgaaaatatttctttnctatttcagaagactgaaatagggggaaggnttgaggagactc

SEQ ID NO: 1629 - DNA, 516 bp, Homo sapiens
  I.1629 (H09362)
  misc_feature (35)..(35): n is a, c, g, or t
  misc_feature (40)..(40): n is a, c, g, or t
  misc_feature (434)..(434): n is a, c, g, or t
gaaccactcccagggctgcggggagggccaagtgntggtnctctttgaggatgtggtccccatgaactacatggtgtacttcaacttctttgcctgtgtgctggtgcccctgctgctcatgctgggtgtctatttgcggatcttcctggcggcgcgacgacagctgaagcagatggagagccagcctctgccgggggagcgggcacggtccacactgcagaaggaggtccatgctgccaagtcactggctgcccctacacatcatcaactgcttcactttcttctgccccgactgcagccacgcccctctctggctcatgtacctggccatcgtcctctcccacaccaattcggttgtgaatcccttcatctacgcctaccgtatccgcgagtttccgccagaccttccgcaagatcattcgcagccacgttcntgagggcagcaaggaacctttcaaggcagctggcaccagtggccggggtcttgggcagttcatgggagtgacggagagcagg

SEQ ID NO: 1630 - DNA, 489 bp, Homo sapiens
  I.1630 (H09353)
ttttttttttttttttttttttttagccattcacctttatttcagagtgttccttggttacagggaggggtgtgcaagaccctgggctctgggggaggggctgagctgcccagtcagagccggcctcagccccctcagccatccagggattcgaaagggtgcttggtctcaaactaggtgctgactctgagggctttcacggtcccttgaacttctgatcctccttttcctcaaaatcagtgctaggactcataagttatggagtccaagattaacaatgctaaatcctcaagctgactgaagaatgccgagtttgactgtgaaatagaaatgttaaaatacagaaacaacccttctattgtgactacctgttaaggtcctgcaattaatacaacgaaagtaccatttttgttgaaaagtaggtggttaggggtttccaaaagccctgggtagcttttgcccacaaaggaaaacgagtttaggacactt

SEQ ID NO: 1631 - DNA, 193 bp, Homo sapiens
  I.1631 (H09323)
  misc_feature (182)..(182): n is a, c, g, or t
ttttttttttttttcatggagaaaatatttattagatttcaaattatcacataatacagatattacacaattagtcattctagaaaaaaatagtttatattaatattcataaacactgaaaaatataggacttcattttgtgacataaaatataaaaaaactcaaaggtaaattcaccaaantaaaagtttaa

SEQ ID NO: 1632 - DNA, 457 bp, Homo sapiens
  I.1632 (H09305)
  misc_feature (281)..(281): n is a, c, g, or t
  misc_feature (389)..(389): n is a, c, g, or t
  misc_feature (446)..(446): n is a, c, g, or t
ttttttttttttttcatttggacaagcttaaaacacgatgtggactcgtttttattttatctcagaaaaaaacattccctttagaaggaaaggcagttagacaaggcctctcactgggtagctctgcgctactcagcacatgccagtggcctgccagccccaacctctcccctgggacctgggcccatgctctggcactgctctgttacaactccctgtccttgatcccagctttgtcactccaagagatggccctgggactgagaagtggatggcagctntgacagcaggagaggactgcctgaggctccccgggcagaggctctggtgccaggttagcagcaggaccgacggcagacccagcagccagagagtgaaaggtaataaantaaaaagggtttcctcacatttacatttttcctgggaaaaaaagtcaaattttcacnttgggcccagc

SEQ ID NO: 1633 - DNA, 457 bp, Homo sapiens
  I.1633 (H08998)
  misc_feature (398)..(398): n is a, c, g, or t
  misc_feature (420)..(420): n is a, c, g, or t
  misc_feature (446)..(446): n is a, c, g, or t
atgctggaaccaaactagctgagtcaacaatcctgagcaagcagatgatagcctctgtacctggatgtgggactgcagcgatggagtgtgtgaggcagtacatcaacgaagtgcctggatttcatggcagacatgcacacgctgaccaaactgaagagccacatgaagacatgttcccagcctctgcatgaagatacctttgggggacatctcaaagtggggctggcccagattgcagccatggacatctcacggggcaaccacagagataacaaagctgtgatccgctatctgccttggctttatcatcccccctctggcaatgcaggcaagggacctaaagaatttcattggagtgtgtcttcccattatccgactgttgtcctggggtgctgctngggtttccctcacttcacaatngcagtgttgccccaaatggcctcctnttccctggcct

SEQ ID NO: 1634 - DNA, 413 bp, Homo sapiens
  I.1634 (H08945)
  misc_feature (306)..(306): n is a, c, g, or t
  misc_feature (323)..(323): n is a, c, g, or t
  misc_feature (332)..(332): n is a, c, g, or t
  misc_feature (362)..(362): n is a, c, g, or t
taaactgcaaatgtgcagttcagtttgtctctttgcaactcctgtaatacggtctggtgtaaaagtagtgagttaaagctacaggtcagtttatgaaacagaaaagtaggaatgcattttctgggtgaaagagtcacaccttagtgctataactctcctgcccatgatagtgtattctgtttcaggcaagcttattctttccttctttcattttaaatattgtcattacaaatcttaccaggttcacttaaaagctggctttcatccaactctaaacccacatattgaaaaaatcaaggtacaggnaaactccttgttatccntggtttccntaggctgggtatgaggacagatcgggtccngttttccatgcaccaacccactgcccatggatggttcttttgggaggtgtc

SEQ ID NO: 1635 - DNA, 517 bp, Homo sapiens
  I.1635 (H08861)
  misc_feature (86)..(86): n is a, c, g, or t
  misc_feature (269)..(269): n is a, c, g, or t
  misc_feature (445)..(445): n is a, c, g, or t
  misc_feature (473)..(473): n is a, c, g, or t
  misc_feature (489)..(489): n is a, c, g, or t
tttttttttttttttttctgcctaaacatgggaatttattgatatagtttggcacaactttagtcctatctttcccaatcccaggnatgttaacaatccttgaaaaatcatgctacattactttggaggaaaatacttccagatgaacatgtttcaagacatactagaaaattattcctatcaaaacatcctttttctgtgtcagctacctcatttctaatgcagtgcacatcaatctaatgtcagtatgaatacacatcaaccagggngctggctttctaaagtgattcctttgcagatgccaaaatgacagtcccggggcagtgtacagagaggccaagggggaagccatgcctggctgccacatgtctctgggatcatcttccctcttcctacggagtgtttcaattctttggatttaaccaattggcaagtggacccccgntagagagggggaggacagtccaggaggncaaggcaaggggactnggaaagctttggcaaaatttgcaatgtt

SEQ ID NO: 1636 - DNA, 408 bp, Homo sapiens
  I.1636 (H08256)
  misc_feature (231)..(231): n is a, c, g, or t
  misc_feature (307)..(307): n is a, c, g, or t
  misc_feature (314)..(314): n is a, c, g, or t
  misc_feature (319)..(319): n is a, c, g, or t
  misc_feature (350)..(350): n is a, c, g, or t
  misc_feature (362)..(362): n is a, c, g, or t
  misc_feature (383)..(383): n is a, c, g, or t
  misc_feature (405)..(405): n is a, c, g, or t
gaagatggcaaggcaaatttctaattagagggaatattaattttctacaaaataaagtttgttcatcaatacaaacctgctttcaaatcaaatcagaaagacatccttcggaatgtgttcagaacccaaacatcatgtcaatggcaacagaacagtcgaacctttcccagagggaacacagatggctgtatttggaatgggatgtttctggggagctgaaaggaaattctnggtcttgaaaggagtgtattcaactcaagttggttttgcaggaggctatacttcaactcctacttgttaaagaagnctgctcnggctnaaactgggccatgcaggaagtccgttccgantcggtgtaccanccagcatcacatgaagttttnccggggaacggcttcaaggtcnttt

SEQ ID NO: 1637 - DNA, 434 bp, Homo sapiens
  I.1637 (H08156)
  misc_feature (11)..(11): n is a, c, g, or t
ttttttttttntttattggactgtaggtttttattaaaacaaacatttctcatagctctaagcaaagcattagaattcatcaagcggactcacatcttttctctgcacagagagggctgaaaagggagagaaagccccttatgtatgtctagatttggtaaagcgaaggatttcagcgaatgagtcactgaggctatacacgtttgcaaattgtaaggcactggcgggcagagagcacagataaaggacttctggggtcccccatcctgtccagcaacctcccaggctcacaccttagcttctaccaagaagggtgaacacagcatccctggctatcttcacttcagaccccaggaagacacaggaaaccgcacagcttccacttcccaccataaacttattagggagataagtcacttttattcaacttggcc

SEQ ID NO: 1638 - DNA, 362 bp, Homo sapiens
  I.1638 (H07950)
  misc_feature (41)..(41): n is a, c, g, or t
  misc_feature (158)..(158): n is a, c, g, or t
  misc_feature (253)..(253): n is a, c, g, or t
  misc_feature (336)..(336): n is a, c, g, or t
  misc_feature (351)..(351): n is a, c, g, or t
tgcggctgctccggaggctcatccccaatgccacgggacanggcacctttagccctgggcttctccaggatccgaggcccggaccacgggtgacatatcggtggagaagctgaacctcggcactgactcggacagctcacctcagaagagctcgcggngatcctccttccagcccatcgagcctgagctcccccatccaggaatccactgctcccgagctgccttcggagacccaggagaccccaggccccgncctgtgcagccctctgaggaagtcacctcttgaccctcgaagatttcaagttcctgggcggtgctgggccgggtgtcattttnggaaggtgcttcctncttccgaaatt

SEQ ID NO: 1639 - DNA, 417 bp, Homo sapiens
  I.1639 (H07860)
  misc_feature (21)..(21): n is a, c, g, or t
  misc_feature (95)..(95): n is a, c, g, or t
  misc_feature (100)..(100): n is a, c, g, or t
  misc_feature (103)..(103): n is a, c, g, or t
  misc_feature (150)..(150): n is a, c, g, or t
  misc_feature (153)..(153): n is a, c, g, or t
  misc_feature (162)..(162): n is a, c, g, or t
  misc_feature (412)..(412): n is a, c, g, or t
ttttttttttccggacaaatnccaaaggacctttttaaaaactaagagctctcgggcaggggcaggggcaggggcaggggagggggctagcagcncacancgnaagtcgaagtccaggaaggctgcctgctccgcggctgtgaggggccncgntcgggcggngctcagtgtgggggcctcccggtgaactcctcgtcgaagttgctgacgtcggtgcggccggacagcgtgggcacaaagggcggtggcaggcgcgggccaacagggcttcccagcccagagtcctgaagaagggctatttcttcacatcttctgcatctctctcgctagatcccagcctccgtttctgggttcctccgaagcagcctttcttcatggatgccgatggtttcggccgacaggaagtcggggntagcg

SEQ ID NO: 1640 - DNA, 446 bp, Homo sapiens
  I.1640 (H07058)
  misc_feature (68)..(68): n is a, c, g, or t
  misc_feature (273)..(273): n is a, c, g, or t
  misc_feature (435)..(435): n is a, c, g, or t
ttttttttaattttatataaagtggttttttattaatgaaacatttcattgcattaagggtagaaatnaacatgtcaagaaccgcatgaagtgaaccaactgtataagctacatgaagagcattctggtcagtattcttgttaacaggcacaagcaatttagtgataatgtccagagggccaaggatgcggaccaccttttgcagaactcatatctcgagcagtttaaattaaaaattaggcctcccttaagttaaaaaccccaatagggttnaggtcgtgtagtgcttgttccacttgaccattaggtgatctttctaggaacatgagggaaatcaagtctgggttagaaaagcctggggagcttaaaagtgggccaaagcccatttttcctgttcctgtggcttcaactccttaatttttccctgaggaggangttgagtttaa

SEQ ID NO: 1641 - DNA, 467 bp, Homo sapiens
  I.1641 (H07057)
  misc_feature (432)..(432): n is a, c, g, or t
cccttgcaaatatgttactgtattaattaatctaatattgagtgattatttgtaaaattatgaatatgggaaatccatctatctacagcctaagttacacataagtttcagaaagtctgattagactaaagagatatttcttctgggacagccgccttcttggtaattttgaagttctttttacaagttccttcctcagtttcagttctttccagtgttttgtagctcactgtcactcactgaatagagaaacgtgtgccctatacttcctgtgacaatcattttgctgacagaatgatgggatgtttaaaatattgcacaaagtactttaaaggaaaggtctgttagggaccaggaagcagaggacaccacttttccaaagggacttcttgggttttcagccataacctaaggacagggggatttgggggngcccttcatatgttcacagtgtttcaggatttcag

SEQ ID NO: 1642 - DNA, 396 bp, Homo sapiens
  I.1642 (H06996)
  misc_feature (390)..(390): n is a, c, g, or t
ctctctctctcttatttgacagaatagcaagtgtttagataatttcagatatattctaagtattttaccagctgtggaataagttgtgtttgtccatcactgtgtagctaccgttcacatgttctggctctgtactccacgcttatcgcgtgaaccctcacatgttggactttcacagtgtgatctctcacctgtcttggaaactccttcataaagccgctcttccttaggcctgggctgtttggaagtcctggtgaaactttgcggttcacattttaaattcctgaatgaccttttcattctctctttctttatctttgtttttgtccttcattccctccttttgttcttccttcctgccttcttttcttctttcctttcttctttctntaattc

SEQ ID NO: 1643 - DNA, 372 bp, Homo sapiens
  I.1643 (H06916)
  misc_feature (288)..(288): n is a, c, g, or t
  misc_feature (361)..(361): n is a, c, g, or t
ttaaagaaacaacaatgcagtatttattttatacagctgacctgggcacattgtgaagtaagctataaaaattccaaataattatctctaaagcaaatcctttgttagttacatggctttacatattaattactctggaaagtttttgaactctgtttagtagcagatctcctttcttgatagtttcttggtactgccagttcttgctatcaggtctgttggtttctactatttcattcactttatctattttgcagtgtagtctcccgggcagcaataaacctgggncagttcctgatcaatggaattccacaccaacaccaaacggttctgccatataggccaaggggttaatggaccncatatggattc

SEQ ID NO: 1644 - DNA, 163 bp, Homo sapiens
  I.1644 (H06873)
  misc_feature (5)..(5): n is a, c, g, or t
  misc_feature (70)..(70): n is a, c, g, or t
  misc_feature (72)..(72): n is a, c, g, or t
  misc_feature (78)..(78): n is a, c, g, or t
  misc_feature (105)..(105): n is a, c, g, or t
  misc_feature (144)..(144): n is a, c, g, or t
ttccncgatgccgctggagaacctggaggaggagggtctgcccaagaaccccgacttgcgtatcgcgcantntcgttncctgctcagcctgcccgagcaccgcgnagacgctgccgtgcgcgacgagctgatggcggccgtccngataacaacatggctcctt

SEQ ID NO: 1645 - DNA, 495 bp, Homo sapiens
  I.1645 (H06557)
  misc_feature (456)..(456): n is a, c, g, or t
  misc_feature (466)..(466): n is a, c, g, or t
  misc_feature (482)..(482): n is a, c, g, or t
acaactctgaatctttgaaagtattgaatgagcagctacaatctaaagaagtagaactcctccagctgaggacagaggtggaaactcagcaggtgatgaggaatttaaatccaccttcatcaaactgggaggtggaaaagttgagctgtgacctgaagatccatggtttggaacaagagctggaactgatgaggaaagaatgtagcgatctcaaaatagaactacagaaagccaaacaaacggatccatatcaggaagacaatctgaagagcagagatctccaaaaactaagcatttcaagtgataatatgcagcatgcatactggggaactgaaggagaggaaatgtcttaattttacatctggtgacttcaagttacaagcttgaactactaaggaaaacttgaaaaaccttcaactggcattccaggaaaggcctgttgccccctgttagggnttgccgttgnaggaccttggggaggnggaccggcacaaa

SEQ ID NO: 1646 - DNA, 410 bp, Homo sapiens
  I.1646 (H06501)
  misc_feature (281)..(281): n is a, c, g, or t
  misc_feature (307)..(307): n is a, c, g, or t
  misc_feature (329)..(329): n is a, c, g, or t
  misc_feature (334)..(334): n is a, c, g, or t
  misc_feature (340)..(340): n is a, c, g, or t
  misc_feature (361)..(361): n is a, c, g, or t
  misc_feature (389)..(389): n is a, c, g, or t
tttttttttatgaacagatatttagacatttcacattttgtaaaaccacgtctacaatctccaattccattcttctgagaggcaaaattttacaattaatatagaaggcagagttttttaaacaccttaagtttacttattaattagtatagtagcatatttcagattcttagaatatggagctagagggtgctctttcatactagaaaaccaactatgttggtttttgtactattgtacagtgtgttcaaatatagatactgaagacctctgcaaaattntaatcaaaatctcctttcagtttgtnaaataatttcttgggaggaccnctganagaganaagtgtcctcatgggtgaaancgtgaatctccttcccaaattaatttcntcataaaagggcagtttctga

SEQ ID NO: 1647 - DNA, 554 bp, Homo sapiens
  I.1647 (H06464)
  misc_feature (191)..(191): n is a, c, g, or t
  misc_feature (365)..(365): n is a, c, g, or t
  misc_feature (429)..(429): n is a, c, g, or t
  misc_feature (447)..(447): n is a, c, g, or t
  misc_feature (466)..(466): n is a, c, g, or t
  misc_feature (489)..(489): n is a, c, g, or t
  misc_feature (525)..(525): n is a, c, g, or t
ggaaaactgcactgtgaggcggggcgatggggaagggccgaagcccgccagcccagctaaagcagacggctcgcactgcgacccgaagcgcgagtcatggctggggccttagtggcaacaagtgctgagatcagcgggctcagtagcaggaacacaagcacccccttgcggtgtctggaggaagcggcggnacagtctcccgctccaccgtgtcgggcctgaagaggcgctgaacgctcgcgattactgaggcatctggtaggatcgcaaggccatcaacctacaggtgaagctcgaggcgctgtggcttttgaagccggagagaagctcagtagaatcgggaaggcgctggggctgtccaactncaccttggccaccattcgtgacaacaaggaaaagatcttggcgagtttccagggagccacactncaggcggccaccaagttnacgcgtgccgaagcttgtnattgagaacattgagcagctctnagcattcggaatggagaccagagccagcgcaacatncccttaattttgttcttatttgggagaaa

SEQ ID NO: 1648 - DNA, 466 bp, Homo sapiens
  I.1648 (H06391)
  misc_feature (175)..(175): n is a, c, g, or t
  misc_feature (258)..(258): n is a, c, g, or t
  misc_feature (273)..(273): n is a, c, g, or t
  misc_feature (330)..(330): n is a, c, g, or t
  misc_feature (380)..(380): n is a, c, g, or t
  misc_feature (389)..(389): n is a, c, g, or t
  misc_feature (414)..(414): n is a, c, g, or t
  misc_feature (431)..(431): n is a, c, g, or t
  misc_feature (441)..(441): n is a, c, g, or t
  misc_feature (446)..(446): n is a, c, g, or t
  misc_feature (451)..(451): n is a, c, g, or t
  misc_feature (459)..(459): n is a, c, g, or t
tttttttttttttttaggtcaccagagccagcttataataccacaacagtgctttgtcaatttgcttcttttccataaaaattatattttctgcaaaatcagtaaaatgtaaaacttcagtaacattcacaatctacaataaaactactggaagaagatgagtcagggagatctnataactgctctttccttcccatgtcaaagactccaagtagctcaccaaggaaaatctactacaataaaaatacatacataaantaaaagtgctcacanacacaaaaagataaggttacagggcaccacaccatccaccaaactgaggacatttcntacaatctgctaattggggattagaagtcaggtgttcagtacttattttntttttaaanttaggatcatgtacctgttaataanactgtgatttctaatcntggcactcantgganctggnataaggtngcccgga

SEQ ID NO: 1649 - DNA, 509 bp, Homo sapiens
  I.1649 (H06390)
  misc_feature (335)..(335): n is a, c, g, or t
  misc_feature (418)..(418): n is a, c, g, or t
  misc_feature (442)..(442): n is a, c, g, or t
  misc_feature (469)..(469): n is a, c, g, or t
  misc_feature (484)..(484): n is a, c, g, or t
  misc_feature (490)..(490): n is a, c, g, or t
  misc_feature (503)..(503): n is a, c, g, or t
atgattggttattgtgtctggtaagtctttgaacattcaacagccagacatttgtgttttatttcatgatgttccagtcaagttccaaagccctaacacagttaagctggctcagactccaggttctagtaaaaagttggaattaatgttataaggaagtattaaaacactgaaacatttctccagaaccagcaagtaagggatatgtatgtatttatgctcagttttagttggcctaaagcagagttgaatgggctttctaaatagctaggcctgcaggtacctgccactactcccatcttcagaggtatataagggagaatgtgtagcagttngaggcttttgctgtttttaaaaaagccttatgaatcagcagcacatcgggaaaaataggctcacatagtacctgggttttccncaagtaagccaagggcatgatttnctgtggtacattttatttaacagttcnttgggttttatgaanttactnatatggaggccantccctg

SEQ ID NO: 1650 - DNA, 450 bp, Homo sapiens
  I.1650 (H06347)
  misc_feature (46)..(46): n is a, c, g, or t
  misc_feature (381)..(381): n is a, c, g, or t
  misc_feature (419)..(419): n is a, c, g, or t
  misc_feature (442)..(442): n is a, c, g, or t
ccagcagctggtgatggctcagctgctgaaccagcagtcatgcagntgaatagacttttagcccagcagtccttaaaccaacaatacttgaaccaccctccccctgtcagtagatctatgaataagcctttggagcaacaggtttcgaccaacacagaggtgtcttccgaaatctaccagtgggtacgcgatgaactgaaacgagcaggaatctcccaggcggtatttgcacgtgtggcttttaacagaactcagggcttgctttcagaaatcctccgaaaggaagaggaccccaagactgcatcccagtctttgctggtaaaccttcgggctatgcaggaatttcttgcagttaccggaagctgaaagagaccgaatatnaccagggacgaaagggaaagggagcttggaatggttgnctcggccatgggtcctgcccccntcatcagc

SEQ ID NO: 1651 - DNA, 198 bp, Homo sapiens
  I.1651 (H06292)
  misc_feature (15)..(15): n is a, c, g, or t
ggtacacactttggngcatcccgtgaacacaaattttaataccaaacaatccttgatgcttcacctggggctgccaagcagtttgtaaaacagaggaaaacatttagtgcagtctgtattatccttttccaacttttctgtttgtgcaagtttttgaagattcattggccaaacaatgaacaacaaaggttttctgag

SEQ ID NO: 1652 - DNA, 396 bp, Homo sapiens
  I.1652 (H06194)
  misc_feature (18)..(18): n is a, c, g, or t
  misc_feature (21)..(21): n is a, c, g, or t
  misc_feature (22)..(22): n is a, c, g, or t
  misc_feature (358)..(358): n is a, c, g, or t
ttttttttgagacggagntgnntctgtcacccaggctgtacccaggctttcttgtgcgagcaccacaccaagggcaggttgggcttgaaggagcccttgaggaaacacgggttctccgaggggtacaccagcagggccttcagcttaaagtcgccggctgcgttgccaccgagcaatagggtcaggaggtctccggcggctttgacccaggggccgactcatcttccacaggaaaatgaacgtcctctcggcaggcgcttacagaggaacctgggcttattcatggtgaacaccagccagagcttattcatggtgaacaccagccagagtgtgtagccgccctccggattcaccctgngcattaacgctgggttcttgcacgctgcgttcttgggc

SEQ ID NO: 1653 - DNA, 437 bp, Homo sapiens
  I.1653 (H05834)
  misc_feature (28)..(28): n is a, c, g, or t
  misc_feature (301)..(301): n is a, c, g, or t
  misc_feature (411)..(411): n is a, c, g, or t
  misc_feature (434)..(434): n is a, c, g, or t
gtaaactttggtccgaccgtggatggtnattttctcactgacatgccagacatattacttgaacttggacaatttaaaaaaacccagattttggtgggtgttaataaagatgaagggacagcttttttagtctatggtgctcctggcttcagcaaagataacaatagtatcataactagaaaagaatttcaggaaggtttaaaaatattttttccagggagtgagtgagtttgggaaaggaatccatccttttttcattacacagactggggtaggatgatcagagacctgaaaactaccntgaggccttggggtgatgttgttggggggttataattttcatatgccctgccttgggagttcacccaaggaagttcttcaggattggggggaataattgcccttttttcntacttattttttgaacacccgtnccc

SEQ ID NO: 1654 - DNA, 470 bp, Homo sapiens
  I.1654 (H05727)
  misc_feature (10)..(10): n is a, c, g, or t
  misc_feature (92)..(92): n is a, c, g, or t
  misc_feature (374)..(374): n is a, c, g, or t
  misc_feature (415)..(415): n is a, c, g, or t
  misc_feature (443)..(443): n is a, c, g, or t
  misc_feature (460)..(460): n is a, c, g, or t
tttttttttngattttctgtgcttattttaatatctcatattgacattcaattcttattttaattaggaaacataatattgtaaactatggngtacagtgtttcaatatttaattcatttaaaaaagatacctttttacgagtggtaatgaaaatacacgtgactaaaagcagagcactgataattttggggggaaaaaacttaaatttattaaggaaagaaagaaattgaaccagggccattgttttaatatgcacataattaactgtaggaactttatattgtgaaatttaattaaacacgttctagccatttggggttttggaaatgctagggtaaaatactaagtttaaaggatgtgagggattccaatnttatccttctgggcatttttgtttcaggctacataataacntgttttagtagggtgtgttaaaaaggcncccgatatttttggccntgatccaagt

SEQ ID NO: 1655 - DNA, 442 bp, Homo sapiens
  I.1655 (H05672)
  misc_feature (238)..(238): n is a, c, g, or t
  misc_feature (361)..(361): n is a, c, g, or t
  misc_feature (399)..(399): n is a, c, g, or t
  misc_feature (438)..(438): n is a, c, g, or t
tttttttttgcagagagattctcttgtaaaatgagatccatgtacaaaactaggcaacagatataaaagtttcctttcatatttttcatccatcaagaaaagaaatcatgtgacaagaaataaaaccaaaatgtggctctttcagaagaataacatgtctgtggtcaactatgacttctaatgagatagttcatatttcatctttatatggatgtatatagttttaatacttcttagnctactgtaggcatgttggttcagatgaagaaaaaataaactctattgtttgggactaggataatctaggaaaccatcaattatggcatgtctttataatgcgacatcaaaatttacccggggngatgacactgattgggccagcagtatgcattgtatccnggaacattggcataggaaagttcccttttaaaaatttcntaat

SEQ ID NO: 1656 - DNA, 496 bp, Homo sapiens
  I.1656 (H05671)
  misc_feature (381)..(381): n is a, c, g, or t
  misc_feature (410)..(410): n is a, c, g, or t
  misc_feature (467)..(467): n is a, c, g, or t
  misc_feature (473)..(473): n is a, c, g, or t
  misc_feature (489)..(489): n is a, c, g, or t
tttatgctgaatacatttgtaaatactcagttttatactgtatgtatatgattgctactctaaaggtttggatatatgtattgtaattagaattgttggcatgatgacatttcatttgtgccaaaaatattaaaaatgccttttttggaaggactaacagaaagcacctgatttgcacttgaaccagattatagatttaaaagtatatgacatgtattttgtatttaaaactagaatagccagtatttatgttttttataaaactgtgcaatacgaattatgcaatcacaatacatttgtagctcccgagtgtcctaaagggagtgcacttctttgaaggctgggtgtgttaatactatgtaattaaatgggttaactttncaaatgatgctgctgccaaaattatattnaatagtgagttttcagggccccggggatttttgtaccctggtaattatcccccgggngatgcngtttctcgttgtggcngtagtgc

SEQ ID NO: 1657 - DNA, 472 bp, Homo sapiens
  I.1657 (H05621)
  misc_feature (228)..(228): n is a, c, g, or t
  misc_feature (297)..(297): n is a, c, g, or t
  misc_feature (317)..(317): n is a, c, g, or t
  misc_feature (388)..(388): n is a, c, g, or t
  misc_feature (421)..(421): n is a, c, g, or t
tttttttttttttttgaaaatactggatttaatagaaaatatcacattgtaaacaaatccattgatccatgagcttaaaacagaatgacggcacaatcacatagaaaagctaaagacaaaacactggtaccaaacatagcccttaggcctgggctaggctctcaaaggtctttcccagaaatggaggcagcagtagcttcaaacaggcacaaaaacagccagggaggnaggcaggcatccactccatgaaggcctaaggacaatgaaaggaagccagagcaacagaccaccttgggntccggggaggaaggggtaantggggcaaaaggggttgtatttcctggatgctctcagaacatcagaccacaccatgtgattttaagcaggntttttttaagtggggggaaacatttttggaagnctttgggtgtttttttcccggggtttcacctcctagggttaagcaggtgtt

SEQ ID NO: 1658 - DNA, 377 bp, Homo sapiens
  I.1658 (H05599)
  misc_feature (319)..(319): n is a, c, g, or t
  misc_feature (324)..(324): n is a, c, g, or t
ttttttttatttaataacattgtttaataaaaaactacatatttaacagaaaagttgttaaagctccaaggtaaaggcacattgaaggagaatgctttttaaatccaattttcagggaattcactttacatgtaaataaagcagaaaatgcaggaaaattattttgaagtttttcatcacttaacaatttctgggaaacaaagttcatcctattttcccatagaggacccctgttaaaatataagattatattcccctatactagggattcaggcattcaaataaatcactagtccaacttcaatgtcgtaggaacccnagaanaatataactatcctaaaaatatataatttaaaatattaatttataggttatac

SEQ ID NO: 1659 - DNA, 491 bp, Homo sapiens
  I.1659 (H05574)
  misc_feature (333)..(333): n is a, c, g, or t
  misc_feature (373)..(373): n is a, c, g, or t
  misc_feature (397)..(397): n is a, c, g, or t
  misc_feature (444)..(444): n is a, c, g, or t
  misc_feature (465)..(465): n is a, c, g, or t
acactgtctggtttcaccgaggacatgaaactccaccttgcggggataaagagagaaaaacaaattcatcaaatggaagacacattgaaagtgtttttccttaatgcttatcctgtttttaaaccattatttccaagttgacaccttttttaaggaaaaataaatattttgcggcattaaagccatatacaaggtctatatcagaaaaatatatttggggggctgcagcacaggactgagggagcggtacatgcttaaaaggcaacagggcctggttttcagtggcgatgatgattctctatgacagtcagggaaacgtggtctctgagagtnatggggcacataaagccttagtgccagagtgcatcgcatnggtgtccagggccgagtctctgtncagatagttaggaggcctggggtctaccctgccagggagacggcgtnttttggggtaaacatggcagnttgaatttaggaacacattaatgggc

SEQ ID NO: 1660 - DNA, 481 bp, Homo sapiens
  I.1660 (H05552)
  misc_feature (37)..(37): n is a, c, g, or t
  misc_feature (62)..(62): n is a, c, g, or t
  misc_feature (85)..(85): n is a, c, g, or t
  misc_feature (440)..(440): n is a, c, g, or t
  misc_feature (472)..(472): n is a, c, g, or t
aagggcagtgacaggaattaactgccacatggatggngcccaatcgactttcctcacctgtntgtcacatcatcatttgactggnctgtcaaactgtggaccaccaagcacaacaagccgctctactcctttgaagacaatgcagactatgtgtacgatgtcatgtggtcccccgtgcatcctgcgctttttgcctgcgtggacgggatggggcgcttggacctctggaacctcaacaatgacaccgaggttccaacagcaagtgtggccattgagggggcatccgcctaaaaccgtgttcgttgggcccaagctggcaaagaagttgctgttggggactcggaaggccgtatttgggtctatgacgttggagagcttgcagttccccacaatgatgaatgggacccgatttgccagggaccttgtgggaaatttcgtgnttaacagagctgatagcgagggagggaagggnatttttgag

SEQ ID NO: 1661 - DNA, 461 bp, Homo sapiens
  I.1661 (H05449)
tttttttttgagacagggtctctctctgtcacccaggatggagtgcagtgatgtgatctcagctcactgcaacctcaacctcctggctcaaatgatactcccgcctcagcctcccaagaaactgggaccacaggcgcgcaccacgatggctggctaatattttgtatattttgtagagatggagtttccccatgttgcccaggctggtctcaaactcctgagctcaggtgatccgcccaccttggcctcccaaagtgctgggattataggcatgagccactgcacccagcctttgtccatgattttgacagcatgacctgctaattctaccagagactccagtgggaacacttcaggcaaaataggctttgacttcccacagtttccattccttttggcagataaaataagggaagtaagttacacctttgggttaaaatttgggcatttggggcagtttg

SEQ ID NO: 1662 - DNA, 396 bp, Homo sapiens
  I.1662 (H05436)
  misc_feature (360)..(360): n is a, c, g, or t
ttttttttgaatgagtataaaactgttcaaataaaattttatttgcaaaaccaggcagcaggctagagttggccatagtttgcagacccctgtcttaggctgtaaattctgttgcatgtgacagagacccaaaataatggtggcttaaataagatagaagtttctttcttagatagcaatatggaagtgggctggtatggtggctgtgctccttgaaattgacgagagacccagggctcctatcttgttgctctgtcttcccacgtgttgctcttatccttatgggtctgaggatgggctgggataccatttccgtattacagttagggaaggtgggaaaaaaggtatgttccctttctnttctttttttttaaacagtctcactctgtcacccgg

SEQ ID NO: 1663 - DNA, 601 bp, Homo sapiens
  I.1663 (H05435)
  misc_feature (16)..(16): n is a, c, g, or t
  misc_feature (419)..(419): n is a, c, g, or t
  misc_feature (447)..(447): n is a, c, g, or t
  misc_feature (460)..(460): n is a, c, g, or t
  misc_feature (473)..(473): n is a, c, g, or t
  misc_feature (478)..(478): n is a, c, g, or t
  misc_feature (505)..(505): n is a, c, g, or t
  misc_feature (511)..(511): n is a, c, g, or t
  misc_feature (520)..(520): n is a, c, g, or t
  misc_feature (529)..(529): n is a, c, g, or t
  misc_feature (535)..(535): n is a, c, g, or t
  misc_feature (558)..(558): n is a, c, g, or t
  misc_feature (571)..(571): n is a, c, g, or t
  misc_feature (580)..(580): n is a, c, g, or t
  misc_feature (587)..(587): n is a, c, g, or t
tcgggagagaaatggnttgtgtctcccttattcccagttaaatacctagctgcagattgtgccatcacccttcattcttcccagatggatgccatgggtatgggagcaaattgccctggacctttgcctgaatgggggcaggaaaggtgaggtgttgctggcctgtaatgccaccaggtgagttccagatgtggagcaacttgggcttttggggatggggcagcaaagttgggagctggaccccaattgagtgggggtagcaattggagtccttgtgtctcttttccaccccctgccatcctcacttagaggggccatggcactgagatgggcactagtcccccgataatttatgtcttcgttgaaataattttgtatatcattctagtccctgaaaatatttttttttcatatgtgtnagggtgaaatgggtattgaattaagctnaccaggattagtntctaaaaaccagnaaacntccttattaaaatgtctaaaccagggngccctnggctttttnagtggggantttccngaggaccttaaggggttttgggncaagttggggggnactccaggnccagagnttttttttggggtt

SEQ ID NO: 1664 - DNA, 428 bp, Homo sapiens
  I.1664 (H05362)
  misc_feature (416)..(416): n is a, c, g, or t
  misc_feature (422)..(422): n is a, c, g, or t
gtctgtggccttcctattgtgtcttgtgttttggtggatgtgacagggctggggcacagtctactctgtctctgctgctagagaagccacctgtggaggactgggctgtggttgggcctgaggctgttggaggaggtgagtgtagccagcagcggccgtctactcctgttctggcctgagaccaccggtgtgggtcacgaggaccctgggcccacagtgttgagggtcctctctttcgggggctctcctgggggccttcgatgggcttttcttcttgtcagtggagggagcagctccccactcagccctggggacaggccctggggactgtggtgggccggtgccctgggcccagctctggaagtgcatgttgtgtgttgctcagatcccgcatctatgcaaaggtgcaagttgcntttgangttcca

SEQ ID NO: 1665 - DNA, 439 bp, Homo sapiens
  I.1665 (H05310)
  misc_feature (256)..(256): n is a, c, g, or t
  misc_feature (332)..(332): n is a, c, g, or t
  misc_feature (399)..(399): n is a, c, g, or t
  misc_feature (408)..(408): n is a, c, g, or t
  misc_feature (413)..(413): n is a, c, g, or t
ttttttttttgctgtgttttcatgctttaattcagagttgtctgctgcaggtacaactctgtctgaacaaaaggacaaaggagacaagagtcaagatccctccccgcctccccacttcccacatcccctgaattcttcgtgaaggggatggcctaatatgggaatgcactgtgacctgtttgcattgtcccctaggtcagagagggggttgtgagttctctgggcagaggcccctgggttaggccttggccccagnaaccttgcagtttgtcccacccctccccaaagtgctgtaagatacccctgcgcttgtgggcaattggggaagggtntgtcagtgagaagctaagtgatccccttggggaggaaatctacaataaacttccactcaagcccagnttttctgtngcagnagcccggggccccagcgttccgattt

SEQ ID NO: 1666 - DNA, 460 bp, Homo sapiens
  I.1666 (H05223)
  misc_feature (11)..(11): n is a, c, g, or t
  misc_feature (154)..(154): n is a, c, g, or t
  misc_feature (359)..(359): n is a, c, g, or t
  misc_feature (381)..(381): n is a, c, g, or t
  misc_feature (420)..(420): n is a, c, g, or t
  misc_feature (426)..(426): n is a, c, g, or t
ttttttttttngtattaaaatgtctgtgattacttatttctcagcattcatctggtaacttaagcagcatgaagcaagagttgcactttaaaaaatgacaagaaaatagctattcatttagtcgacagagtaaggcccatctcatttccagggntcactagtttctgcttatgacggggtgagcatccgccagcgcggtgattgggaggcgcccctgtgtctttaggctgaggcagtgcccatagctgcagtgcctcgagtttccggagcaaccgcggggctctttcttgaggagtcttgggaggggcggtggcctgcctccccatcctagatcagcgaggtcccaagagtgcgtattnctgcggggtagctttgggagtntagacacgtttccggagtgggcttgacatcctgaggctnggggtngttttaagggaaagaaagaggggcaggtcccggg

SEQ ID NO: 1667 - DNA, 438 bp, Homo sapiens
  I.1667 (H05192)
  misc_feature (3)..(3): n is a, c, g, or t
  misc_feature (388)..(388): n is a, c, g, or t
  misc_feature (422)..(422): n is a, c, g, or t
  misc_feature (427)..(427): n is a, c, g, or t
gantacccacacaaagtgcaacaagaatcattgtccatatagactctcctagattggctttgctagaacatttcacaaggccatttcagtcaaagtcctgagaaagtaaccggtttcaattgtgccctattacaaaagaaaacgtggttattaactttatacagacaaatgccatgaattaagaatattcataaatagtttacaaattctggagaaattagaatactcaatacacttaaagtgtatttcaaggctataaatagctcaaaataaaaagattattcagactctgaaaaaacaaaaagaagtaggcaatatttcaaacaacaaaagccatacaaattatttcagtcttccattagttcatttcagtccatgtaatcaactnctgctctacttcatattcctctttatggaacacntcagnctttccattag

SEQ ID NO: 1668 - DNA, 233 bp, Homo sapiens
  I.1668 (H05152)
  misc_feature (118)..(118): n is a, c, g, or t
tttttttttttttcattttaactatgtttattgtgcacttagtaggccagatactcttctgatatttgagaatacagtggtgaataacacaaactccatgctttcaagattcccacanccagatactaagacatattaaaatttacagcaattaaaacagtgtagtttggtacaataacacatatagcaatgatacaaattaggggaaaaaaccctgggcttctataacaagt

SEQ ID NO: 1669 - DNA, 382 bp, Homo sapiens
  I.1669 (H05108)
  misc_feature (70)..(70): n is a, c, g, or t
  misc_feature (146)..(146): n is a, c, g, or t
  misc_feature (247)..(247): n is a, c, g, or t
  misc_feature (248)..(248): n is a, c, g, or t
  misc_feature (298)..(298): n is a, c, g, or t
  misc_feature (303)..(303): n is a, c, g, or t
  misc_feature (343)..(343): n is a, c, g, or t
  misc_feature (352)..(352): n is a, c, g, or t
  misc_feature (363)..(363): n is a, c, g, or t
ttttttttgcatgttaacatagataacatttttattttaaaaaactatttttttaaaacaaaaaatactntgaaaagagtggcattgtttttatatttttgcccatctctttcatgccaggcttaacagaaactcatacctgcttntgcgtgtagtctgttgcaatatcacatatcatgtaacctccggaaaaccccactgtatgcatgtgagagaaggcgaatcacatgttcgtgttgttataaanntagtgttaactttgtagaccccttgaaagggtcccagggagcccccgggnggttncagaccctaaatagtgaagggcagcatctcttcgttcctntcagggccnggcacaaagtnagttctctgaaaggcattt

SEQ ID NO: 1670 - DNA, 422 bp, Homo sapiens
  I.1670 (H05091)
  misc_feature (364)..(364): n is a, c, g, or t
tttttttttggtttgaaacattttattggcaacactgatgtcatatttaggaaccatagacttttgtcagactgtgttagcttcagtgagaagtattagtggtcaatgatatttgaaatattgttaaagtacccagaaataataggcattaaaattcatttcgttcactgcaagaaacctctaaagatttcatgtcttcagtgggaactgggcatactgtaattgctatgtgggaacttaatataacctcaacagcaggcagagagaatacagtcctctcattatgcacatgctctagggatcatttattttaatgctttcaaataaatacgttccatgcagcacactacaataaataaggggncagcaatgttcttctaggtaaatccattcataatgtgaggtcaccatgtcaaaacacc

SEQ ID NO: 1671 - DNA, 450 bp, Homo sapiens
  I.1671 (H05062)
  misc_feature (12)..(12): n is a, c, g, or t
  misc_feature (360)..(360): n is a, c, g, or t
  misc_feature (406)..(406): n is a, c, g, or t
  misc_feature (418)..(418): n is a, c, g, or t
  misc_feature (437)..(437): n is a, c, g, or t
tttttttttttnttaatcttttctgctgtgtttttattctcaaaacatattttcacatgcctcattcaaaattaaagttcttaagttttttagacatagaattcagtatatcataaatatgaaagagacagaattacagcttaattttacaatgatattaagattgaaattattcattaaaaaagtatatcagcttacagtgacttctgctgtagctgtagcttttgttcaatgatgtccgagaaacgagggaactttttttgaaatagccacacggatatcatcactcaggattaaagcagcttctgggactttgttttgaaatgtaaaagtgatggaaaatcccaactcacaaaggtntgtagttgcaaatgggcataagggtttctagggctgtctttggccngggttgggaatngccgtgattgggcacaccnggaatccccaggt

SEQ ID NO: 1672 - DNA, 407 bp, Homo sapiens
  I.1672 (H04424)
  misc_feature (3)..(3): n is a, c, g, or t
  misc_feature (84)..(84): n is a, c, g, or t
  misc_feature (92)..(92): n is a, c, g, or t
  misc_feature (150)..(150): n is a, c, g, or t
  misc_feature (161)..(161): n is a, c, g, or t
  misc_feature (175)..(175): n is a, c, g, or t
ggnaaaatgaaaataatctgggcatcagtttcattttgctaaatatctatcttcttcaaacagtatcttggtgggtgacttggnctacctgnaaaaatcttaggaggaatagtctcacaatacaataaatctgtagattctgcttagagncaaattatggntacttttattcagnacttgtttcctttctagttaacagaaatagtgacatttagaggttttaatcagaagttaggtttttctgattcaggaacatcgtaggccagccatttgtaatttttaactttgagaaacaaattttgtgagaataggtagtgggttgctggtagttaattggatttaatatttgtattaaggattaactggaaaaaaatgtgtctcagtgctaattcttggacctttaaata

SEQ ID NO: 1673 - DNA, 269 bp, Homo sapiens
  I.1673 (H04398)
  misc_feature (28)..(28): n is a, c, g, or t
  misc_feature (70)..(70): n is a, c, g, or t
  misc_feature (78)..(78): n is a, c, g, or t
  misc_feature (162)..(162): n is a, c, g, or t
atattggagaagagagataaaaggaggncctaacagataagcacactgtattaaaggtccaagaattagncactgagnacacattttttccagttaatccttaatacaaatattaaatccaattaactaccagtcaacccactacctattctcacaaatttngtttctcaaagttaaaaattacaaatggctggcctacgatgttcctgaatcagaaaaacctaacttctgattaaaacctctaaatgtcactatttctgttaactaga

SEQ ID NO: 1674 - DNA, 434 bp, Homo sapiens
  I.1674 (H03806)
  misc_feature (4)..(4): n is a, c, g, or t
  misc_feature (160)..(160): n is a, c, g, or t
  misc_feature (192)..(192): n is a, c, g, or t
  misc_feature (196)..(196): n is a, c, g, or t
  misc_feature (361)..(361): n is a, c, g, or t
  misc_feature (392)..(392): n is a, c, g, or t
  misc_feature (406)..(406): n is a, c, g, or t
gccncagtaggggtctcgggacatgaggcaaccgtggcagcccccgccatacacctcacacaggtccaggggcacctggctcacctcccactgggagctcacatacagcttcctccgctcagcatccagcgacatggtctggatggcagccgcgcgcganagggctggatctccatgatgttgaaggcgaantgtngctcctgctcccccggttccaccaccttgtggatagtgcccctgtctgtagttaggtaaagcacatgaaaggtctccccgtggctggcttgcatgcggtgaacggccactttctggtagtggtatttagagtggaacaatgggcgtctttcagaggccccatggnttccaccctcttgcggccacctctggggttnaacggtcagccacntgggaaggttttttgtggggtatcgggt

SEQ ID NO: 1675 - DNA, 464 bp, Homo sapiens
  I.1675 (H03614)
  misc_feature (42)..(42): n is a, c, g, or t
  misc_feature (47)..(47): n is a, c, g, or t
  misc_feature (95)..(95): n is a, c, g, or t
  misc_feature (375)..(375): n is a, c, g, or t
  misc_feature (401)..(401): n is a, c, g, or t
  misc_feature (420)..(420): n is a, c, g, or t
  misc_feature (438)..(438): n is a, c, g, or t
ctccgttgttggtccactgcagtgctggggtaggaaggactngcgtngtgattttgtcggagatcatgatcgcctgcctggaacacaatgaggtnctggacatcccgagagtgctggacatgctgaggcaacagagaatgatgctggtgcagactctctgccagtacacatttgtgtacagagtcctcatccagttcctgaaaagctccaggctcatctaagctcccacaatttcttacggggccagtcatgtgaagcgtttacagcttaaaaaaaaagcgcttgcctaactcatactttcccgttggacacttgatccacgcagcgtgggcactggggacgtaagttggcgcagtcttgaatgggcggcacttngaaagggaaacgtggcggacaagggncttgaaggagggggttttntaacctggggaaaggttnttcaagggaggatttggttttcaaaa

SEQ ID NO: 1676 - DNA, 427 bp, Homo sapiens
  I.1676 (H03504)
  misc_feature (9)..(9): n is a, c, g, or t
  misc_feature (15)..(15): n is a, c, g, or t
  misc_feature (211)..(211): n is a, c, g, or t
  misc_feature (366)..(366): n is a, c, g, or t
  misc_feature (417)..(417): n is a, c, g, or t
agtttaagnaaatantctatgcactttaatgattgccagaattgcccagcatagcttcagtaaaatagagaattgtctagaaaatacaatctccaaaatgtgtgcaagtactgcaaaccggacagaccggggcagggcaaggccttggaaaccaagtcctccttgagcacctttcccaggttagaaacccctcttcagcctgtgcttcgcnggtttccttcagcgtgccgccattcagactgcgccacttacgtcccagtgccacgctgcgtggatcaagtgtcaacggggaaagtatgagttagggcaagcgctttttttttaagctgtaaacgcttcacatgactgggccccgtaaggaaattntggggagcttaggatgagcctgggagctttttcagggacttggatgaggantctgttacac

SEQ ID NO: 1677 - DNA, 446 bp, Homo sapiens
  I.1677 (H02902)
  misc_feature (245)..(245): n is a, c, g, or t
  misc_feature (307)..(307): n is a, c, g, or t
  misc_feature (313)..(313): n is a, c, g, or t
  misc_feature (356)..(356): n is a, c, g, or t
  misc_feature (377)..(377): n is a, c, g, or t
  misc_feature (382)..(382): n is a, c, g, or t
  misc_feature (404)..(404): n is a, c, g, or t
  misc_feature (410)..(410): n is a, c, g, or t
  misc_feature (419)..(419): n is a, c, g, or t
gccgtctggaaaggccatgtagggcaggaccgggtggactttggccagactgagccgcacacggtgcttttccacgagccaggcagctcctctgtgtgggtgggaggacgtggcaaggtctacctctttgacttccccgagggcaagaacgcatctgtgcgcacggtgaatatcggctccacaaaggggtcctgtctggataagcgggactgcgagaactacatcactctcctggagaggcggantgaggggctgctggcctgtggaccaacgcccggcaccccagctgctggaacctgggtgaatngcactntggtcaccttggcgagatgagaggctacgcccctttcagcccngacgagaacttcctggttctnttttnaaggggacgaagtttatttcancatccngaaagcaangaattacaattgggaagatccttcgtt

SEQ ID NO: 1678 - DNA, 397 bp, Homo sapiens
  I.1678 (H02352)
  misc_feature (319)..(319): n is a, c, g, or t
  misc_feature (324)..(324): n is a, c, g, or t
  misc_feature (333)..(333): n is a, c, g, or t
  misc_feature (352)..(352): n is a, c, g, or t
  misc_feature (377)..(377): n is a, c, g, or t
  misc_feature (389)..(389): n is a, c, g, or t
ggtgatttcatattggaatcattatttgtgcaaagggacagacagatcacttagattgctatactagtggacataggctaaatgtttgcacattcacattcttatcacgtgtagaatacttcacaaaatagtcaacatctaaggccctaatttatgttttgaaagatcatgtgttcccaaagtattccctattgttggctccacagccttaaagtgctatagatttaaattcattgattagttttaatttttaattttaggactgtgtatttccataaataccctacggtactgggcatatttggaaactctttttccnggggntagggtccntttctttctcattggaatncatcttaaataggtcttggggcccnggaatttaggcncgatttta

SEQ ID NO: 1679 - DNA, 399 bp, Homo sapiens
  I.1679 (H02254)
  misc_feature (200)..(200): n is a, c, g, or t
  misc_feature (227)..(227): n is a, c, g, or t
  misc_feature (277)..(277): n is a, c, g, or t
  misc_feature (335)..(335): n is a, c, g, or t
  misc_feature (346)..(346): n is a, c, g, or t
  misc_feature (372)..(372): n is a, c, g, or t
tctagttttgcttttataaaaatcattatttcgaatttcacagtgaagaggtactaaattcctcatagaacatgaaattatataaaaatagaagacatagacatctttaaatctttaatcctttgattaagcagcaagcatatcactcttccagggccaaacactgcttaaacaaaaaagaaaaataatgacgtgcaaantatttacaaaatatgcaaagcacacantaaagacatctcactatatacatgtgtcatattactaatgaagctaacgnttttctactgtgtgctctaatgcatggtaaatcaaattaccggcacatcccctcaggntaccggcaccntgggccccctgttctggggggtaggnggggggttttttttaatggatccccat

SEQ ID NO: 1680 - DNA, 370 bp, Homo sapiens
  I.1680 (H02123)
gcttaatatgggacctgcttttaaagtaaaatatgtggtactatgaattactaaattgctatataccatgtaatagtgagtatagctaatatttagtatgccttttaaaaattttggactgcttttcggttttaacaaattctccacatgtgaactactcaagaaattttccctttttaattgcctctatagcactcataagagctagggcattaggataaactagaatattttatgtttatgaatacttgtataaacttaaaagtgttttgatttcccacaatttcccaaagggaatgtttatttattaaggagttgtgttggataatttaactgttacatttcagcagttggattcagtggacacggg

SEQ ID NO: 1681 - DNA, 373 bp, Homo sapiens
  I.1681 (H02057)
  misc_feature (368)..(368): n is a, c, g, or t
gcttttatatttaattaactgatacctttcactgtgcaatctcaagaggaagattttctaaattagacattgtctttaccttaaagaagaaaattgtctatttcagtgtcttttttagcaagattgaccaaaacaggtggtaggtgtgtaatttttaactgtcatgaaatactgtaatgcgcacctttgctaataaggaaatggtctccctttgaattatggggaagtttcttgtctgtgatatgggggtgtctgtgtacatatatgtatatttccttttttaatacagggataataatatgggggtcttgtccttcaccttttaagttcaggggaaccagtttgtccctgacccacacatatgttanccagt

SEQ ID NO: 1682 - DNA, 366 bp, Homo sapiens
  I.1682 (H02022)
  misc_feature (123)..(123): n is a, c, g, or t
  misc_feature (230)..(230): n is a, c, g, or t
  misc_feature (251)..(251): n is a, c, g, or t
  misc_feature (293)..(293): n is a, c, g, or t
  misc_feature (310)..(310): n is a, c, g, or t
  misc_feature (336)..(336): n is a, c, g, or t
  misc_feature (347)..(347): n is a, c, g, or t
  misc_feature (356)..(356): n is a, c, g, or t
gaaactcatcaattttatttggataacaaagggtctccaaattatattgaaaaataaatccaagttaatatcactcttgtaaaaaagttgagcacacttttcacaaacaatttatgtaaaagngaagaaaatacacataattttacataatatcttaaactcttttattccctaccatagacattttgtcttgttttctttcagttttctacaatttccaacttgtaccngtgtttaatactgctttaggngtgctaaagacattaactgattgctttcctaaatctaagggnttatataggttttaggnataaatatatatcatatattttcggnaaaactttggncaaaacccnaatagggcag

SEQ ID NO: 1683 - DNA, 440 bp, Homo sapiens
  I.1683 (H01969)
  misc_feature (368)..(368): n is a, c, g, or t
  misc_feature (382)..(382): n is a, c, g, or t
  misc_feature (394)..(394): n is a, c, g, or t
  misc_feature (404)..(404): n is a, c, g, or t
  misc_feature (413)..(413): n is a, c, g, or t
aggttatttctttttacttcacataagagcataattcaggccttttccatttaataacaaaaacaatctgtacagaaaacccaaaggcaaccacatagcatatgtaaaatgtgcaaatacactttaaaatgcaagttattctatagcatttgcaagatagaatttcactgtaattagggaatctagttcatcctaacttaatagtcttttgcatgtatagacaatgcaattctacaaggcacaactcagcgttgatgctaaagtatgaaacacatcctcaggattatttatttgaaaatattaaaatagcatcgtttattattttttaatgagtcatgaggctcatttctaaaggcttccataaagcnttacactggtaacntatgtgtgggcnggggcaaacngttccccgnacttaaaagggtgagggccaggccccc

SEQ ID NO: 1684 - DNA, 459 bp, Homo sapiens
  I.1684 (H00784)
  misc_feature (377)..(377): n is a, c, g, or t
  misc_feature (398)..(398): n is a, c, g, or t
  misc_feature (406)..(406): n is a, c, g, or t
  misc_feature (429)..(429): n is a, c, g, or t
  misc_feature (445)..(445): n is a, c, g, or t
  misc_feature (454)..(454): n is a, c, g, or t
gtgaacacattaacatgattctgtttgtgcagattaaaaactttatagggacttgcattatcggttctcaataaattactgagcagctttgtttggggagggaagtccctaccatccttgtttagtctatattaagaaaatctgtgtctttttaatattcttgtgatgttttcagagccgctgtaggtctcttcttgcatgtccacagtaatgtatttgtggtttttattttgaacgcttgcttttagagagaaaacaatatagccccctacccttttcccaatcctttgccctcaaatcagtgacccggggggagggggggatttaaaggggaagggagtggggcaaaacacattaaaatggaatttatttatatnctaaggtctgtaggccagggnttcatgtncgtttcttttgaccagttctttnccctttccccgtatanggccataancattg

SEQ ID NO: 1685 - DNA, 480 bp, Homo sapiens
  I.1685 (H00686)
  misc_feature (301)..(301): n is a, c, g, or t
  misc_feature (388)..(388): n is a, c, g, or t
  misc_feature (395)..(395): n is a, c, g, or t
  misc_feature (418)..(418): n is a, c, g, or t
  misc_feature (430)..(430): n is a, c, g, or t
  misc_feature (461)..(461): n is a, c, g, or t
  misc_feature (472)..(472): n is a, c, g, or t
ttattatttttttaaaaccttgttattgcatatacaggaaagagaaagaactgtcaaagaacgacatgaatcctgctacagagcttagatataataaattcattttatgtgttttgcccactccttccctttaaatccccccctcccctgggtcactgatttgagggcaaaggattgggaaaagggtagggggctatattgttttctctctaaaagcaagcgttcaaaataaaaaccacaaatacattactgtgggacatgcaagaagagacctacagcggctctgaaaacatcacaaggnatattaaaaaggacacagattttcttaatataggactaaacaagggtgggtagggggcttccctccccaaacaaaggctgctccggnaattttnttgggggacccgttaatgccagncccccttaaagntttttatccggcaccaaccgggtcctggttnattggggttcncccccgtt

SEQ ID NO: 1686 - DNA, 423 bp, Homo sapiens
  I.1686 (H00133)
  misc_feature (30)..(30): n is a, c, g, or t
  misc_feature (50)..(50): n is a, c, g, or t
  misc_feature (224)..(224): n is a, c, g, or t
gggctggctgaggggaggttgttgcggatnttctctctccaggcgcaccnagattcctgcccgggggttggacccgaggaaccgccgtctctactggttccgacggccagaggtgggccctaggctgagcggagagtgggactggagcctgaaacgggcgcctaaaagaagccctgcatcccataggcctgcgcctcaggcttggagacgggcgggcggagacnccttgagtctttttttttttttcctagcagctggcgttcttatctcacccgggaggctgtaaaaatctccgtccttaacagtaacaccatcaggtcctattcagttaagagctgcttgttattttgcatgcattcttgtaattaaatctcctaacaaccctgttaaggcaaaatttttgtgggcatttttgggaataat

SEQ ID NO: 1687 - DNA, 421 bp, Homo sapiens
  I.1687 (R74158)
  misc_feature (2)..(2): n is a, c, g, or t
  misc_feature (14)..(14): n is a, c, g, or t
  misc_feature (18)..(18): n is a, c, g, or t
  misc_feature (58)..(58): n is a, c, g, or t
  misc_feature (190)..(190): n is a, c, g, or t
  misc_feature (259)..(259): n is a, c, g, or t
  misc_feature (268)..(268): n is a, c, g, or t
  misc_feature (278)..(278): n is a, c, g, or t
  misc_feature (289)..(289): n is a, c, g, or t
  misc_feature (311)..(311): n is a, c, g, or t
  misc_feature (344)..(344): n is a, c, g, or t
  misc_feature (368)..(368): n is a, c, g, or t
  misc_feature (377)..(377): n is a, c, g, or t
  misc_feature (386)..(386): n is a, c, g, or t
  misc_feature (397)..(397): n is a, c, g, or t
  misc_feature (411)..(411): n is a, c, g, or t
gncgaatttataanggangcccagccagggaaaaagcagctcctgctcagcgcacacntgtctgctgggaaggtcaccattgacagcagctatgacattgccaagatatcccaacacctggatttcattagcatcatgacctacgattttcatggagcctggcgtgggaccacaggccatcacagtcccntagttccgaggtcaggaggatgcaagtcctgacagattcagcaacactgactatgctgtggggtacatnttgaggctnggggctcctnccagtaagctngtgatgggcatccccaccttcnggaggagcttcactctggcttcttctgagactngtgttggagccccaatcttaggancgggaattncagggcctnttcaccaaggnggcagggacccttntcctacttat

SEQ ID NO: 1688 - DNA, 408 bp, Homo sapiens
  I.1688 (R74060)
  misc_feature (159)..(159): n is a, c, g, or t
  misc_feature (316)..(316): n is a, c, g, or t
  misc_feature (374)..(374): n is a, c, g, or t
  misc_feature (383)..(383): n is a, c, g, or t
  misc_feature (392)..(392): n is a, c, g, or t
  misc_feature (406)..(406): n is a, c, g, or t
attaggaaggggaagtaggataggggacacgattacgttcctaagtgaaggtttcaagctgggctttgcagggggtataattagtatggtcactgtgtcttgtaggatgtttggctccttggtgatagagcttgccaaaatggtgtcctttgataaggngggctggggggcagggagttgaagaaattcccttgccaggctttgggatctgtaaacatttccattaatcaacaagtgtgtactaatcccgagtcttacattgcgatgcctcactatccccacagccccatccctacctctctgcccaccagggttnagctcaaatctgtgtgtttgtgggacctctgcataggccccaaggggagggagacttnagggtcagntggggactnagcagggcaggttnat

SEQ ID NO: 1689 - DNA, 356 bp, Homo sapiens
  I.1689 (R73498)
  misc_feature (235)..(235): n is a, c, g, or t
  misc_feature (334)..(334): n is a, c, g, or t
taatacatcaaaaactgtgatgttatacacttccctattctcattgcttatctcatatcagtggttgaagtttctcccaaataatttagtttacatttaaagtggcaatacagattttacttaatggacttaagttataattagaaaccagttttatatacagaaaatccataaatatagaacttttattcctattttatctttaggctatgcaaaaaatggactaaaaattttncatttgggtctttgtaataaacatgtaaatacatatttacaatggagatgcttcctgataggaaagtaaacagaagtaattttgggtcttcactaggantccatccatatctattttttga

SEQ ID NO: 1690 - DNA, 340 bp, Homo sapiens
  I.1690 (R73497)
  misc_feature (276)..(276): n is a, c, g, or t
  misc_feature (294)..(294): n is a, c, g, or t
aattcggcacgatgggaggcatactttcaacatatgtctggcctaagtactggatttcatgatgttctggctatgacaaaacaaatggaatccatgaaatactgcaaagatggtacttacatcatgtgagataactcaagaattacccctggagaataaacaatgaagattaaatgactcagtatttgtaatattgccagaaggataaaaattacacattaactgtacagaaacagagttccctactactggatcaaggaatctttcttgaagganatttaaatacagaatganacattaatggtaaaagtggagtaattatttaaattatgtgtataaa

SEQ ID NO: 1691 - DNA, 464 bp, Homo sapiens
  I.1691 (R73341)
  misc_feature (229)..(229): n is a, c, g, or t
  misc_feature (392)..(392): n is a, c, g, or t
  misc_feature (428)..(428): n is a, c, g, or t
  misc_feature (434)..(434): n is a, c, g, or t
  misc_feature (440)..(440): n is a, c, g, or t
  misc_feature (454)..(454): n is a, c, g, or t
gcacctcccctccagtctccactccctgaggatggaatcggggaaacagcatcctgccgcctcctctctgcctgcccactcaccggcaaggttgtccctctgcccagggctcagggccatgtaccagatctgtctgtgcccacccaggcacagccactgcctcccccttggctccctgctcctacccaggagagctccctatccgcctttggtcagagctgaagccatntacgactgggtgtttgtccccctactttggccccaggagtaaaaaaacttctccttttctcacttcctttcctgcctcgggaggtggcagggcagttccctgggtgagggcttttgcgccccacctccagggaccaagggccatttttagacagggtgttttnttaccagggacccgttccctagcctttcctgggctnggaagntgggtntttgcaatggcagntgtaataaca

SEQ ID NO: 1692 - DNA, 420 bp, Homo sapiens
  I.1692 (R72763)
  misc_feature (77)..(77): n is a, c, g, or t
  misc_feature (364)..(364): n is a, c, g, or t
  misc_feature (377)..(377): n is a, c, g, or t
  misc_feature (391)..(391): n is a, c, g, or t
  misc_feature (405)..(405): n is a, c, g, or t
  misc_feature (415)..(415): n is a, c, g, or t
gacagtccatgctagggcatgacaaataccatgtgtaatgtcaaccatttccatgaaaatggtaaaccttcccaggnagcccccagcagataccagctcagctcctccggccagaggtgggtcatgtccacagctaaaccagtcaagggtagggaatgaggcctgttttgggctccactattaacgattctctactgtttagagcaaggagcacaaggtctgctgtcccacttgctgtagggaccttatggggtggatagaggtggatggcggtggataaactcagtgatgtgacactgccaacagccccagggaaagttcagagtgcaatgtggggtcccgaaagcgtcccacacaccagggnacacacggggaantctccctgggggtngggtttttggggtnttgccaaggnttagt

SEQ ID NO: 1693 - DNA, 394 bp, Homo sapiens
  I.1693 (R72762)
  misc_feature (350)..(350): n is a, c, g, or t
  misc_feature (359)..(359): n is a, c, g, or t
  misc_feature (391)..(391): n is a, c, g, or t
tgcagaggccaatgcctctgttgatgacagtcgtctagaggagctcaaagccactctgcccagcccagacaagctccctggattcaagatgtaccccattgactttgagaaggatgatgacagcaactttcatatggatttcatcgtggctgcatccaacctccgggcagaaaactatgacattccttctgcagaccggcacaagagcaagctgattgcagggaagatcatcccagccattgccacgaccacagcagccgtggttggccttgtgtgtctgggagctgtacaaggttgtgcaggggcaccgacagcttgactcctacaagaatgggtttctcaacttgggncctggcttntcttttgggtttctctggaacccctttgccgnacc

SEQ ID NO: 1694 - DNA, 347 bp, Homo sapiens
  I.1694 (R72449)
  misc_feature (55)..(55): n is a, c, g, or t
  misc_feature (172)..(172): n is a, c, g, or t
  misc_feature (253)..(253): n is a, c, g, or t
  misc_feature (290)..(290): n is a, c, g, or t
gggttggcgcctgtcagtgaccatcctaatgcctctcgctcactcccaagccatnatttgagagggaggggtgttggtgccctgacagggactgggcagggtgtccaaacttggggcttcccaggcacctgcagtgtgaacactgcttggctggctcaagattagggccgcngagggggctgtgcacataccagttacttaagcagccacgagtgtcccccatgccttggtgcgggtcctgggaggcctcttnggggtgggacctttgggcagggtttgcccactgacangcccgccatggggcactggctgcatggggctcctttgaccctttagacccagcagac

SEQ ID NO: 1695 - DNA, 396 bp, Homo sapiens
  I.1695 (R72410)
  misc_feature (16)..(16): n is a, c, g, or t
  misc_feature (131)..(131): n is a, c, g, or t
  misc_feature (159)..(159): n is a, c, g, or t
  misc_feature (168)..(168): n is a, c, g, or t
  misc_feature (247)..(247): n is a, c, g, or t
  misc_feature (293)..(293): n is a, c, g, or t
  misc_feature (296)..(296): n is a, c, g, or t
  misc_feature (339)..(339): n is a, c, g, or t
  misc_feature (361)..(361): n is a, c, g, or t
  misc_feature (381)..(381): n is a, c, g, or t
ctcaactcttaaattntaagttagaaaactgataaaagcaacacaacttttggggaaagcaccatggcacgtcctttgtgctacgtgataagtgtgctttatctcaatgaagcaaccccacgggtccaggnaccctccctgcagtccccgcggccaggntcctgagtntgccagcagagccgtcccctgggaccacagccaagtgccttcgggcagctggcctgacacaggcggggtctgctgggtntacagggtccaaggagccccatgcagccagtgccccatggcgggcnttntcagtgggcaaaccctgcccaaaggtcccacccccaagaggcntccagggacccgcaccaagggnatggggggacactcgtgggntgtttaagtaactgg

SEQ ID NO: 1696 - DNA, 384 bp, Homo sapiens
  I.1696 (R72228)
  misc_feature (24)..(24): n is a, c, g, or t
  misc_feature (29)..(29): n is a, c, g, or t
  misc_feature (214)..(214): n is a, c, g, or t
  misc_feature (267)..(267): n is a, c, g, or t
  misc_feature (278)..(278): n is a, c, g, or t
  misc_feature (305)..(305): n is a, c, g, or t
  misc_feature (312)..(312): n is a, c, g, or t
  misc_feature (319)..(319): n is a, c, g, or t
  misc_feature (331)..(331): n is a, c, g, or t
  misc_feature (356)..(356): n is a, c, g, or t
  misc_feature (362)..(362): n is a, c, g, or t
  misc_feature (382)..(382): n is a, c, g, or t
attcggcacaggagaagccgctgngatgntcacttgtacagcgccggtcaacatcgcggtcatcaagtactggggcaagcgcgatgaagagctggttctgcccatcaactcctccctgagcgtcactctgcaccaggaccagttaaaaaccaccacaacagccgtcatcagcaaggacttcaccgaggaccggatttggctgaatggccgggangaggatgtggggcagccgaggctcaaggcctgcctcgggagatccgctgcctngccctgaagcngaggaactcacgggattggggacccgntgccctncagcctnagctttaaggtncacgtggcatcggttaacaactttncccacngctgtcgggtcttggctttntt

SEQ ID NO: 1697 - DNA, 378 bp, Homo sapiens
  I.1697 (R72182)
  misc_feature (38)..(38): n is a, c, g, or t
  misc_feature (40)..(40): n is a, c, g, or t
  misc_feature (42)..(42): n is a, c, g, or t
  misc_feature (294)..(294): n is a, c, g, or t
  misc_feature (331)..(331): n is a, c, g, or t
  misc_feature (369)..(369): n is a, c, g, or t
gcagacttccctgcagctgccccacagcaagctgcctntntntccggggtcaagccaccacccacatgtcccaggagtccggccagcccaccacatccgtctccctagctccggcgaggccaccccttctccaagcggcatgcggtccctgctgaggcagtcaggcagctggcttcggcaggccgtcaagacccagggaggtgggcgcaggggtcatccaggatttgaggccctggcccacctgagtgacaatgatgtatttgaccccaccgggtcgggctccatggccagcgnagcttgaagcttagctgagagagggggccggccttanctgcagcccctttagaaacgtgtcttcatttgagcctnggggaaaag

SEQ ID NO: 1698 - DNA, 331 bp, Homo sapiens
  I.1698 (R72010)
  misc_feature (10)..(10): n is a, c, g, or t
  misc_feature (11)..(11): n is a, c, g, or t
  misc_feature (15)..(15): n is a, c, g, or t
  misc_feature (136)..(136): n is a, c, g, or t
  misc_feature (210)..(210): n is a, c, g, or t
  misc_feature (214)..(214): n is a, c, g, or t
tcccgtttcnnaaanatagtttttattaaataaaagcagaggaagaggaaggcccctggtctcccgggctaggggggagagccatgggtcctcccctccctctgttcaaggtgcactgcgtcttgggcttgaggtntaagctggggagggagggcagccgggaagggtcagtggtcgggacctgcaaccctttcaccccttctggaagantcgntgggcagggagggagcctcctgggacctgggactggggcttatcccaagggatgagagccgataggtcttacaggctcggcccaggggcccctttccaccctaggaagaggaagggg

SEQ ID NO: 1699 - DNA, 327 bp, Homo sapiens
  I.1699 (R72009)
  misc_feature (79)..(79): n is a, c, g, or t
  misc_feature (169)..(169): n is a, c, g, or t
  misc_feature (245)..(245): n is a, c, g, or t
  misc_feature (290)..(290): n is a, c, g, or t
  misc_feature (314)..(314): n is a, c, g, or t
gggaaatggcccccctcagcctggcgccccttcttcttcacccactgtaaaggaggagggtccggagccgtggcccggnggtccggacctgatgtcccaggcactgatgaggccagctcagcctgcagcacagactgggtcatcccagatcccgaagaggaaccagagnccaaagagagaagggcccagcccgaagatgctgggcacgagctttgccgtgtctgtggggacaaggcctccggttnccactacaacgtgctcagctgcgaaggctgcaagggcttcttccngcgcagtgtggtccgtggttgggncaggcgctatgct

SEQ ID NO: 1700 - DNA, 381 bp, Homo sapiens
  I.1700 (R71832)
  misc_feature (351)..(351): n is a, c, g, or t
gctcgcttgctggtccattacatttacatctgccacctacagcaaaatcagagatggcataataataggacttgagaactttgggatcgttaaacacttcatctccaaaagtgttcaggcgattaagagttactctgatgtcagtggcagttacccattcctgcagcacagggctattgtcaaagttataggcgctgggccttccttccagggtagaaaaggccacgttgcccccagtgaggggagaaatgtcactgaattcatcagtacacaaggcctgctgctcgtcccctcctgtcctgatgaagccgcggtttgccttggagtaggtgttcttcgcaggaaccactngtagtacttggtaaggaatccagggcccgt

SEQ ID NO: 1701 - DNA, 369 bp, Homo sapiens
  I.1701 (R71819)
  misc_feature (21)..(21): n is a, c, g, or t
  misc_feature (73)..(73): n is a, c, g, or t
  misc_feature (76)..(76): n is a, c, g, or t
  misc_feature (88)..(88): n is a, c, g, or t
  misc_feature (183)..(183): n is a, c, g, or t
  misc_feature (185)..(185): n is a, c, g, or t
  misc_feature (189)..(189): n is a, c, g, or t
ggtgtgtgtgtgtgtgcacangtgtgtatgagtgcgcagatctgtgcctgggatcgtgcatttgaggggccanggnatggcagggctncagagggagacggtcctgctggggcttaggaaccttctcccttcttgggtctgccctgcccatactgagcctgccaaagtgcctgggaagcccancnagantctgaaacaggccctctgtggctgtgctctattagctgggttccgggaggcagagaggagtgaccgggcactggcactgcgatcaggaagactggacccccagcccccaggcccctcctccccccacttaagtgcttggtcctaggtcctcttgaggcactcatctactgaatgaccttt

SEQ ID NO: 1702 - DNA, 407 bp, Homo sapiens
  I.1702 (R71783)
  misc_feature (216)..(216): n is a, c, g, or t
  misc_feature (225)..(225): n is a, c, g, or t
  misc_feature (378)..(378): n is a, c, g, or t
agtcgctgtcatgcccgagttcgtcaacgccgcttaaaaatgtgactgtggtggccaccaacacgtgtgggactccgcccgaggaatactgtgtgcagaccggggtgaccggggtcacaaagtcctgtcacctgtgcgacgccgggcagccccacctgcagcacggggcagccttcctgaccgactacaacaaccaggccgacaccacctggtggncaaagcagnaccatgctggccggggtgcagtaccccagctccatcaacctcacgctgcacctggggaaaagcttttgacatcacctatgtgcgtctcaagttccacaccagccgcccggagagctttgccattttacaagcgcacacggggaagacgggccnggggtttcttaaccagtattacagttggt

SEQ ID NO: 1703 - DNA, 477 bp, Homo sapiens
  I.1703 (R71775)
  misc_feature (13)..(13): n is a, c, g, or t
  misc_feature (201)..(201): n is a, c, g, or t
  misc_feature (384)..(384): n is a, c, g, or t
  misc_feature (410)..(410): n is a, c, g, or t
  misc_feature (435)..(435): n is a, c, g, or t
  misc_feature (456)..(456): n is a, c, g, or t
  misc_feature (473)..(473): n is a, c, g, or t
aactattaaatcntctttagtaaagacaatttcgctcatacaaaacaacagtttacaacaatcgagtgctggacacaccatctgagacaagggaggcgctgcaggcacccagcgccttcccccatacacaaagacgaccctgggcgcccctccaccacctgcccctgagggagaggaaaggtgaagtattcctgccacctntccctccaagggaagggggagtggggggccatggcacagacagcctaccccagctgctcctcatctgtgctgggggaggcccctccccttcaccggccccgaagctgagttgtttggggtgatgggcaaatggctgatggggcaagggggcaaagtcaggacatttttgggtgcaaagacttnccccttgacccaccaggggcacacantgggatttttgagggggagtttttnaaaagtgggccttgctttttncccacaaggggtagttnggtt

SEQ ID NO: 1704 - DNA, 534 bp, Homo sapiens
  I.1704 (R70649)
  misc_feature (426)..(426): n is a, c, g, or t
  misc_feature (435)..(435): n is a, c, g, or t
  misc_feature (467)..(467): n is a, c, g, or t
  misc_feature (494)..(494): n is a, c, g, or t
  misc_feature (500)..(500): n is a, c, g, or t
  misc_feature (533)..(533): n is a, c, g, or t
gcgtttttttggggaaatcctcgacaggtgcaggaaaattgtgttattgtaacaatttaccgttatctctctttcacggctctccatcagttgtgaacatctattggtttatcccaagtcactaagcatattttcattaggtaaacctgtttttccttctacagctgtttctggagtatagggtcgcatactcataaacccagtgtaactcagaaacgcatctaatattccagtaaacccatcataacgttgaaaaatcgtaaatcaaaccatcataagtcacggtttgtccgtggatatgggcgtcatcaattccattgtattcagtaatgctgtacaccattaacaatgggcagactgattggggagtgggtattgatagcattattaaaagttcagttattaggggggttacttctttaaccnggactggangaactggttccaatggctttagtaccgtgccnggttatgtggcgatgttttgagaccgngtagtncctttgtggatggaaatttatggctttttttcnt

SEQ ID NO: 1705 - DNA, 316 bp, Homo sapiens
  I.1705 (R70541)
  misc_feature (308)..(308): n is a, c, g, or t
attgaataagatttgctcacagaaaaataagcttacatctacaatgaatgccagaccctacagcagaaagccattttctcacttttccacacacaatggttcctactaagtgaaaaaaaagccataaaatttcattcacaaatgtactactctgtctcaaaacatcgcacataatcatgcactgtactaaagccattaggatcagttcttcagtcagggttaaaggaaggtatccctctaataactgacttttataatggctatcaatatccactcccaatcggtctgccattgttaatgggtgtacnggccttac

SEQ ID NO: 1706 - DNA, 344 bp, Homo sapiens
  I.1706 (R70281)
taaatactgagctcagtaagttgtgttaggggattatttctcagttgagactttcttatatgacattttactatgttttgacttcctgactattaaaaataaatagtagatacaattttcataaagtgaagaattatataatcactgctttataactgactttattatatttatttcaaagttcatttaaaggctactattcatcctctgtgatggaatggtcaggaatttgttttctcatagtttaattccaacaacaatattagtcgtatccaaaataacctttaaatggctaaactttactggatgtatatccaaagcttctccattttgcaggacaggat

SEQ ID NO: 1707 - DNA, 223 bp, Homo sapiens
  I.1707 (R70243)
  misc_feature (100)..(100): n is a, c, g, or t
  misc_feature (145)..(145): n is a, c, g, or t
atactactcatgaaaagcaattacatttttacataaaatcattaacacatacaatagaaataataagagtaatacatctgattagaaatacaatataggnaatagattttaaaatagcatattttagtgatgaaatttatatttnctacttatttatagcagcatctgtaagattcttctatctgttcatagttaactagcagcaaaatattttaaattacag

SEQ ID NO: 1708 - DNA, 303 bp, Homo sapiens
  I.1708 (R69698)
tggtagtgtcttgatgtattttcagtggtagggtaaagaattatcaataatttatttaacagatttttttttaaagttaacagcttttaaattctttttttaaagctatttatttgggaagatttctggagaaatatctcactaatttagatgtaagaatgtgaaggtttttaaattatttttgatagtgtgtgtgttacatgtggggaagggccacagtaacagtaactagtctggactcttaaatttgatattcaggttaaagtcttaaacagggatttgatgcattaattattttaaatt

SEQ ID NO: 1709 - DNA, 421 bp, Homo sapiens
  I.1709 (R69609)
  misc_feature (180)..(180): n is a, c, g, or t
  misc_feature (399)..(399): n is a, c, g, or t
  misc_feature (405)..(405): n is a, c, g, or t
  misc_feature (411)..(411): n is a, c, g, or t
gaaatgagaaatgagggatctttcatggagttcttacacattggctacgaaagtgtttccctgcaaagagaagagtcttactgggtcatcacaaaatgatggggagtgcagagggaaggtgggatataaggtaatcaacctggataacagtatgcaccttggatgttagcaaaagcgaantaattagcttataaaaaacacatgaaatatataaaataaaatgattttcatatacatcttaatttaaaataattaatgcatcaaatccctgtttaagactttaacctgaatatcaaatttaagagtccagactagttactgttactgtggcccttccccacatgtaacacacacactatccaaaaatattttaaaaaccttcaccttcttacatctaantttagnggggtntttctcccgg

SEQ ID NO: 1710 - DNA, 389 bp, Homo sapiens
  I.1710 (R68601)
  misc_feature (313)..(313): n is a, c, g, or t
  misc_feature (382)..(382): n is a, c, g, or t
  misc_feature (387)..(387): n is a, c, g, or t
cttcaggaggacctgcaggaggacgcagacggatccctggactttgtctcacaagatgaaatgttgacgcccctggggagattggacaagtatgctgcaagtgagaacatatttaacagacaaatggtggcccggagtttgctcgataccttgagggaagtctgcgatgatgaaagagattgtattgctgttttgggaaagaattagccagattgggccgatgattcagaaccaactgtgagagcggcttgatgggaacaggtgcctcacatcgcactgtttttgttcaagaaaacccgcctttcaattaccntatgctttttttcaaaattctttacttacccatttgttgggttaggataccctttgcaggattccagantaatnca

SEQ ID NO: 1711 - DNA, 344 bp, Homo sapiens
  I.1711 (R68568)
  misc_feature (12)..(12): n is a, c, g, or t
  misc_feature (15)..(15): n is a, c, g, or t
  misc_feature (342)..(342): n is a, c, g, or t
aggtttgtagcntanctgatcgtcacttagcactcatttattcgtgtattcatacatttatgcatgtttctttcacagatcaaactgttgagggtccacaaacaggctgaagacctcgtctggagggagactgcagtgaacccaagatcgttcaaataagcgcatcgacataacaagatttagaaaagaataagcacggtgctgtgagagcagctagcgggggctggactgggtccctgcggccaggcttccaagtcgagctgccgtttgggtgggaccagaagacgggctagtctgcgccccaggatccctccctgaggacaaacagaaggccgggtcctnca

SEQ ID NO: 1712 - DNA, 368 bp, Homo sapiens
  I.1712 (R68399)
  misc_feature (360)..(360): n is a, c, g, or t
tccacatcaaatcgttcaatgagctcctgctccaacagagccagcaaagtgcctgacttgttttcctcacctgattattctgatctgcaaggtatctaaccacaataggtagtaagaattttgaaaaagcatatggtattgaaggccggttttcttgacaaaacagtgcgatgtgaggcacctgttccatcagctccgctctcacagttggttctgaatcatcggccaatctgctaattctttccaaaacagcaatacaatctctttcatcatcgcagactttccctcaagggtatcgaggcaaactccggggccaccattttgtctgtttaaatatggttcttcacttggcaggcatanttgttcca

SEQ ID NO: 1713 - DNA, 340 bp, Homo sapiens
  I.1713 (R68360)
  misc_feature (166)..(166): n is a, c, g, or t
  misc_feature (333)..(333): n is a, c, g, or t
gctcaggttcgccgccatggccgccccgcagtctccgcgccgctgctgtagcttccgggccgggccgggcgcccctttgacagccgacaagcctcgcctccgacaaccggaaaccccgccccacggcaggaagcggaaatggcaggggccagccgcacccgcggtncctagcgagctgtccggccagctggtctagcatgcaggtcccgcgaatgccgaaggacaagcgggagaagggaggacccggccttctgtttgtcctcagggagggatcctggggggcgcagattaggcccgtctttttggttcccacccaaacggcagttcgatttnggaagct

SEQ ID NO: 1714 - DNA, 412 bp, Homo sapiens
  I.1714 (R68300)
  misc_feature (6)..(6): n is a, c, g, or t
gtcatnggaaattatgaatgtagaagcaggagattccagagataccattggaaaagaaacttttcatccctttgtgccagaacaccatttaattaaaggttatctacctagaacgttttggtactggaattacaactattatcctcctgtagagggtcctggttgctgctctgatcttgcagtttcttttcactatgttgattctacaaccatgtatgagttagaatacctcgtttatcatcttcgtccatatggttatttatacagatatcaacctaccttacctgaacgtatactaaaggaaattagtcaagcaaacaaaaatgaagatacaaaagtgaagttaggaaatccttgaaagaaaatcatgaatgaacaaaggtaatatgtcttagcactgcactgaaaaagg

SEQ ID NO: 1715 - DNA, 325 bp, Homo sapiens
  I.1715 (R68266)
  misc_feature (232)..(232): n is a, c, g, or t
  misc_feature (237)..(237): n is a, c, g, or t
  misc_feature (270)..(270): n is a, c, g, or t
  misc_feature (302)..(302): n is a, c, g, or t
  misc_feature (318)..(318): n is a, c, g, or t
  misc_feature (323)..(323): n is a, c, g, or t
attttaaagtgtggttttattaatgcacttcagggtaagtgccagtcttattttagcttcttctggaagaaatactaccaattataaataatcacagcaacattttcattagacaaaaactgtgtgtgtgggtgtggtaggggggtatcatttatagcatactgcaaatataaactcaattcttgagctatattaacaacactgaggcaacaatatttctttctaaaatttnctttnctttaaggcagatctgtttattactaacatggngcagtgtagttttaggtaaatttactattttngtttctcaggtgacantaacnca

SEQ ID NO: 1716 - DNA, 470 bp, Homo sapiens
  I.1716 (R66458)
  misc_feature (392)..(392): n is a, c, g, or t
  misc_feature (409)..(409): n is a, c, g, or t
  misc_feature (421)..(421): n is a, c, g, or t
  misc_feature (445)..(445): n is a, c, g, or t
ttttttttttgaagattgatcacacaattttattagagtcttttgaacaaatgtaatcctctgtgaaaaactcttgcaaaagaggacattggagtgtactattttcaaccctgagcattaacactgcataccaggggggggtgggtcaagaagctggttagatcgaagcacaagcacaagccactgatattctctatgtgatcaggtttttacaaaaaaatacatagttttcaataaataatgcttaattttacaactttggatacagcaatgtcatacaccgtttcaacacactacactctggcatggctaggatagtctacgaggaaggacgaaactttggccatggcattttctttcccccctagtgctatcaaacacttcatcctccnggggcactgcctcgggnggctttaccttntctctgtttcacggcattgggccntgcgctgggcttgcaaactttaaaa

SEQ ID NO: 1717 - DNA, 388 bp, Homo sapiens
  I.1717 (R66024)
  misc_feature (12)..(12): n is a, c, g, or t
  misc_feature (186)..(186): n is a, c, g, or t
  misc_feature (248)..(248): n is a, c, g, or t
  misc_feature (288)..(288): n is a, c, g, or t
  misc_feature (295)..(295): n is a, c, g, or t
  misc_feature (300)..(300): n is a, c, g, or t
  misc_feature (377)..(377): n is a, c, g, or t
ctaatttaaaantgtctttatttaatgactattcatgttttcaaacaagtctctatgtacagtaaatatacataaagttctaataaacaacagtgcaatgcttcccaaagtcttaagcactagtatcagattcttacaacacagaaaccttttagtttgccaaatgattggattaaggatacagantatgtcaaatactcacttgtgggctttccagggtcaccctctcccgccaaacaaacacaaangaaacaaacaaaaaaacctaatcggcacaattaaccacantgtaaangggangttcataatcagtatttatatttttggaaatatatttcttaaattacactggctaatttccttcaggttatactccngttgggggttt

SEQ ID NO: 1718 - DNA, 459 bp, Homo sapiens
  I.1718 (R66023)
  misc_feature (368)..(368): n is a, c, g, or t
  misc_feature (392)..(392): n is a, c, g, or t
  misc_feature (399)..(399): n is a, c, g, or t
  misc_feature (415)..(415): n is a, c, g, or t
  misc_feature (425)..(425): n is a, c, g, or t
  misc_feature (431)..(431): n is a, c, g, or t
  misc_feature (442)..(442): n is a, c, g, or t
gagcataattagctggtcaatatttttgtccaaaatacctgcaagagtaataaaatacatacctttcaaacatgataattattagtttttttttttcctttctggaacatggattttggtacattagcagtagccttattttaatgctttatgtcctaaacatactaatagaaatgaaaagacgcagagagcatttcggaatactgaagtactagttttagaaatgagactttcagccaacaatctatagaaagaattttatggaccatcttgttttagttatttaatgttgatgttgttcaaatgggtaaatgtacagaaagaaaattttaggactaaacttgggaactttgggatataactagganaaaactaggttataggattagtcnggtaacncttggctaatgggacntgggctttcntctccntttttcccccnaaggtgtatgtatgtgt

SEQ ID NO: 1719 - DNA, 455 bp, Homo sapiens
  I.1719 (R64419)
gacctggtgggaggtaactaaatcatgggggcaagtctttcccgtgctgttcttgtgatagtgaggaagtctcacgagatcttttggttattataagagggagttttcctgcacaagccctcattttgcctgctgccatctatataagatgtgatttgctgctccttgccttccgccatgattgtgaagcctccccagccatgtggaactgtaagtccaataaacctcttttgtaaattacctaatctcaggtctgtctttatcaacagcatgaaaacagactaatagaatgatataggaagttcttagtcttactgaagcaagggaaagtgacattttgcttctacaccctccagaattcataaagctccagaagggaaagagggacccaagggaaaaacgtgattggcaaaatgtgttcttgttccttggcccaagtgattaacctttgctcc

SEQ ID NO: 1720 - DNA, 445 bp, Homo sapiens
  I.1720 (R64078)
  misc_feature (422)..(422): n is a, c, g, or t
  misc_feature (432)..(432): n is a, c, g, or t
  misc_feature (437)..(437): n is a, c, g, or t
agattcggaacgagggacaaaggttaagttattttttgatcgtgtataccaagcagatagaatactgtgcttagtggaacccgctaaaaacctttttctctgtttttccaaacacaggcattctgtatcatagcaaaaccttctcaaatgacagagattctgtttgctgttgagaatgttgttatttggatttctgcactgtttaacaaatgaagtaaaagaaaaacactactgcaatcacgtcttttgttatgctagtatcagtcagatgcacttagagtgaagaaacactgtaattacagcacacagattgcaagtattgcgtaccaagtgatacaactcgaaatgcagttctcatcttcctgttttgaggaatgattatttttttcacggctccgggccttcggtgcttttgattatcntgtatggttnaacanttctaggg

SEQ ID NO: 1721 - DNA, 457 bp, Homo sapiens
  I.1721 (R63971)
  misc_feature (101)..(101): n is a, c, g, or t
  misc_feature (242)..(242): n is a, c, g, or t
  misc_feature (286)..(286): n is a, c, g, or t
  misc_feature (287)..(287): n is a, c, g, or t
  misc_feature (359)..(359): n is a, c, g, or t
  misc_feature (364)..(364): n is a, c, g, or t
  misc_feature (427)..(427): n is a, c, g, or t
  misc_feature (433)..(433): n is a, c, g, or t
  misc_feature (446)..(446): n is a, c, g, or t
gcttttcattttctcacgttttactgagcagtgcaaagtcaaattgaaaaacaggaaatgacatattacgaaatagacatataaaatttaattcctttggnttaaaatacatcttcaatgatacaattaaaaataacacgcaagacaaaatcaacttcataaaaaatacaaaagttatatgacccatatcccatatcttatcttagaaaaccaggcaatttagttcccatacttcattaggnatactttaacctaagactgtaactaccaggtccatttacacggnntgacctaggtctaggttccctggaacctaaaggatacccgtggactttgttataaaattacatattttaggnatttntatatacttaaatgtggtacaaaatgttcccctggccctggtaacgggtttttgtgggttccnggatgntttctagggttgnttaacctactt

SEQ ID NO: 1722 - DNA, 397 bp, Homo sapiens
  I.1722 (R63812)
  misc_feature (7)..(7): n is a, c, g, or t
  misc_feature (11)..(11): n is a, c, g, or t
  misc_feature (12)..(12): n is a, c, g, or t
  misc_feature (13)..(13): n is a, c, g, or t
  misc_feature (118)..(118): n is a, c, g, or t
  misc_feature (341)..(341): n is a, c, g, or t
  misc_feature (390)..(390): n is a, c, g, or t
aaggtcntggnnntcaaggctgcaattcttttaatggtgatgacagtaacgtaagtctgatacacaagcagtatgtattcaacacactgatacctgatagcatgtcaggaaaaaagantaggcaatgcagtttaaggggggaaaaactgagaagtcataactactccaaagatgtgcaggaaaccacaaaagacatggacctgcttctactataaagaaaatgaagcacttctctggggttgctataccaactgtttcagcccattgtagtcttgcctctttcagggctttagccactatttcatttcatgggaaaagcaggacatctcctaacaaacagnggtgacatttacccaaaataaggggggcttctcaggtgaggaggcttanttaaagg

SEQ ID NO: 1723 - DNA, 409 bp, Homo sapiens
  I.1723 (R63253)
  misc_feature (2)..(2): n is a, c, g, or t
  misc_feature (184)..(184): n is a, c, g, or t
  misc_feature (185)..(185): n is a, c, g, or t
  misc_feature (257)..(257): n is a, c, g, or t
  misc_feature (278)..(278): n is a, c, g, or t
  misc_feature (330)..(330): n is a, c, g, or t
  misc_feature (367)..(367): n is a, c, g, or t
  misc_feature (392)..(392): n is a, c, g, or t
  misc_feature (408)..(408): n is a, c, g, or t
anattcggaacgaggcaaacaaacaagaaacagaactttcaaggcattctttgtccagtcattcttccattatttgccacacccctacagctgtacaaaatgatcagccctaatacagttgttaaaaatattaacctgaaaatactacaggaatttcattataaaaataacataaacctatggnnacaagaaaagcatttagggtctgtcttacaaacttgaaacgtttccagattttcttgtaattataatacctntctctgctaatatatagtagnaccactgagctgttccttgattgaagtaattgacaagagtctaaattgtggngggtctcttctgtacactaattctacttaagggtagncatgttacaatgcatagggtttttnttacaaaagaaaaccnc

SEQ ID NO: 1724 - DNA, 400 bp, Homo sapiens
  I.1724 (R63206)
  misc_feature (294)..(294): n is a, c, g, or t
  misc_feature (302)..(302): n is a, c, g, or t
  misc_feature (327)..(327): n is a, c, g, or t
  misc_feature (345)..(345): n is a, c, g, or t
  misc_feature (360)..(360): n is a, c, g, or t
  misc_feature (374)..(374): n is a, c, g, or t
  misc_feature (388)..(388): n is a, c, g, or t
  misc_feature (394)..(394): n is a, c, g, or t
tgtaataattagacaatttctttacttagatctatttatacaaattaaggtggtattcagacatccagccatgataagtttgactcataacacagaatggaggcaaagatatatgttatataatttagacaacagttaagaagaatgctgtctatggatttgtatactgttctgagttctgtactaggaaattgcagggcaataaatagtgttgaaatacaagtaggatactatattcttaatttgtataggattaggcttgttttttatttggggaagggataggaaatatcnctttatcnctactggggggaaaataggaggggngcctaaaggttaaaaccntttaaatattatgcntttttacccggggnttccagcccctacnttaccnttaggg

SEQ ID NO: 1725 - DNA, 463 bp, Homo sapiens
  I.1725 (R62676)
  misc_feature (366)..(366): n is a, c, g, or t
  misc_feature (388)..(388): n is a, c, g, or t
  misc_feature (439)..(439): n is a, c, g, or t
  misc_feature (457)..(457): n is a, c, g, or t
ctaccaatcaccttcactacttcataatcttcagctttcattcgtaaatctctgattttatttattgtgtctttatatctgcttaaaaagttgtcaatatttttgttttttcttaaggcaggaaaatccaaatcatataccaaagcatccaatccatccagcaaacaatccgaattcacttccgatttgggatcccgcagcaggttgtccattttttcaaatcgagtctcaaaactgtccccagtcgacatgttgctgctgctgtgacaatgccctcttaccagcaccagcagcgggaaagcaatttcaaccaacttcctccgcggtggggtttcgcagccgcggggcgaagggagccggaacctnaggggtcaacagggtgcggccnggtttccccgttttttcccttaatttaggggggaactttcgttttttcagnaacccgggggccgggggnaaattt

SEQ ID NO: 1726 - DNA, 322 bp, Homo sapiens
  I.1726 (R62623)
  misc_feature (25)..(25): n is a, c, g, or t
  misc_feature (301)..(301): n is a, c, g, or t
ctccctcccttgttgcccggagagntctccaccctgcttctctttctctacccgctcctgcccatctcgggacggggacccctccatggcgacggcggccggggccgctagactgaagcacctcgccggagcacgaggctggtggcgacggcgctgtcggctgtcgtgaggggctgccgggtgggatgcgactttgggcgtccgagcggctgtgggtcgctgttgcccccggcccgggttctggagagcggaggtcccctcagtgagggaaagaacgggggaaccggggcgcacctgggtnaccctgaggttccggcttcct

SEQ ID NO: 1727 - DNA, 170 bp, Homo sapiens
  I.1727 (R62465)
  misc_feature (167)..(167): n is a, c, g, or t
tttttttttttcaggttctttcagttttctttaatactagtctctgacattataaaacctttttttttgttttttgccctttgagaatttctaaatacaaattgagttaaaagattgttccaaaatctgctgcttcatcaaaaggcattaaaacatttcttatgtcngga

SEQ ID NO: 1728 - DNA, 392 bp, Homo sapiens
  I.1728 (R62446)
  misc_feature (25)..(25): n is a, c, g, or t
  misc_feature (295)..(295): n is a, c, g, or t
  misc_feature (310)..(310): n is a, c, g, or t
tttttttttgcggaaaaaagatgtncctttaataaaacgttatcaacatatatcgtacacaaactacaatgtatcataattacttttttttcctctcttaattcagaaccagactacaaggtaagaaaaaacacagaaacagctacaatgttcccaataatccgcacaaagtcttttttcaggcagatgatatctcacataatatgatatacatgggatcagaaagggagggagtaaaacaaagaccagctacaggggagggaggaaggagaagggcatgtcaatgtacaaaganttcgggtgtcttccnggggcaagacacaaaggtttccgtggggtgatgagggtgagtgggggccatgagcaccctcccgggagggaacagggctcca

SEQ ID NO: 1729 - DNA, 431 bp, Homo sapiens
  I.1729 (R62433)
  misc_feature (300)..(300): n is a, c, g, or t
  misc_feature (378)..(378): n is a, c, g, or t
  misc_feature (409)..(409): n is a, c, g, or t
  misc_feature (415)..(415): n is a, c, g, or t
  misc_feature (423)..(423): n is a, c, g, or t
  misc_feature (429)..(429): n is a, c, g, or t
ttttttttgaagaataaatattgcaaacgacgctttatagtcaatgcaaatacagtactttgaattacccaaaatgtataatgcacaagaactctaagtcatgtagtttacttgctgaccatctggctacagttcagtttcttctgcaaaagctgtacctagtaaccttccaaaattgtttttaaataaagttcttaaattgtagcaataaacaaaaggacaaagtacacttaaaggaatactgcagtttatcaaaagacataaggaaatttcaactcatacttgggagagttataaaantcaatgttttgggctaagttattaaacatgtttataaatggcaattatttggcattaactctaggtaatggctatggncggctatagggttggggtttctaaaaaaccnctaaanacataaantacttngg

SEQ ID NO: 1730 - DNA, 327 bp, Homo sapiens
  I.1730 (R62384)
  misc_feature (255)..(255): n is a, c, g, or t
  misc_feature (285)..(285): n is a, c, g, or t
  misc_feature (295)..(295): n is a, c, g, or t
  misc_feature (314)..(314): n is a, c, g, or t
ggaggggtatctgatcaaaagcccatcctctctctgatttggtggactaagaactcctgtgcccaaagtctaggcaaatgtggtggggatttccgacctcatgaacctagcttcagcaggatcccaaagtgagagagacttcccccaaaacagcggggacagaacagaagtcattttcctgtttgctcctctcctctgagctaacagcccccaggccagatgcacagaaggtgaacaaaaactacagtcacgaantcatttgtaaatggggaaaagaagagaggntcagaaaggncaacttccagggggaggantcccaagatgggt

SEQ ID NO: 1731 - DNA, 459 bp, Homo sapiens
  I.1731 (R62383)
  misc_feature (395)..(395): n is a, c, g, or t
  misc_feature (400)..(400): n is a, c, g, or t
  misc_feature (420)..(420): n is a, c, g, or t
  misc_feature (446)..(446): n is a, c, g, or t
  misc_feature (454)..(454): n is a, c, g, or t
aattcggaacgaggggccgggtctatactggagactgtgctggaagttcgtcagtcctgccttcctcctgttcgtggttgtggtcagcatcatcaacttcaagccactcacctacgacgactacatcttcccgccctgggccaactgggtggggtggggcatcgctgttcctccatggtcctggtgcccatctacgtcatctataagttcctcagcacgcagggcttctctttgggagagactggcctatggattcacgccagagaacgagcaccacctggtggctcagagggacatcagacagttccagttgcaacactggctggccatctgagcctgcctgggaggagaaggaggaacccccattgccaatgttccaggtcacaggcatccgntgcgntcccaccttgggacaacatnttggggatttcttccctgggaagttnttcttttntgatt

SEQ ID NO: 1732 - DNA, 401 bp, Homo sapiens
  I.1732 (R61870)
  misc_feature (260)..(260): n is a, c, g, or t
  misc_feature (392)..(392): n is a, c, g, or t
tttttttttgccatagaaacgtctttattgaagaggacaggagtcatgctgagtttggggacatgcagtgaaggggcagtcgtgagctgtccttggtggtcggggccccaggtccgccctggaccccctaggccttcaggttctccctcgagctgttggtctggcccaggtgctgtggggtcctttgaggccagtgactagaacgtagattgaaatcggggttccagggatttgagatcccctcagggccttggggcttnccatttattagagatggaggctttaggatttggggttcccttagggctggggctcttgggaatttggtgtcttgaaacccatgggactcggggcattgaaattctccagttttccagggatggggaattccngtgtggggt

SEQ ID NO: 1733 - DNA, 438 bp, Homo sapiens
  I.1733 (R61687)
  misc_feature (407)..(407): n is a, c, g, or t
tttttttttgaaattctcataattttaatgatcaatagcttctggtgggctctggatggtacagttaaacaatagacttaaagacctcccccaaagcacgtccacaccccctcggcagcgtctgcctccatcagcattccactgcccagtcggacttccacagcctcagacccccctcttgggttatggaaatccacatcttagtgtaatgagctgaaaaaccctgggtacacccgtgaatctgttattttttaaaaataacaaatactaagccaaacacctgcccagggtctgctgcctcacagagtgtgggcgatctgaatactctgttgtctcttgtgggccgggtggttttggcttcggtccctgttctactgaaatcatacgggcataggagttcgtaaatnttctttacacagtacaccaggggcgggccag

SEQ ID NO: 1734 - DNA, 495 bp, Homo sapiens
  I.1734 (R61686)
  misc_feature (24)..(24): n is a, c, g, or t
  misc_feature (32)..(32): n is a, c, g, or t
  misc_feature (435)..(435): n is a, c, g, or t
  misc_feature (461)..(461): n is a, c, g, or t
  misc_feature (482)..(482): n is a, c, g, or t
  misc_feature (490)..(490): n is a, c, g, or t
tcttggcccgggcagcagtggcgncagcccgnagagagggaaccaacagtgtttgtaatgaagaacatcagactctgagctgtaacctgaattcttgtccaaaattcagcacactggcaacgagcacatcaaacagattgccacttgtcctgtcggcgtctttgagacacacttgcccatctaggaaagcacagtgcaggtatctgtgttctgccaccgtgtgccagcccggaccagctcacagacagccctgcctgtcttacttgggctgctcggcttcactgtctcagggcccctgaacctcccagagccctccgtgattgttggaatggtgagcttgtcggccacagacttgcttacattgtggcatggagatctacaatgggggagaatgcccaaggaccagttttgagttacggagctgggagcaggccntgggaagcccattacaagttacattntgattgaggcccatttcggcntttgggcnaagga

SEQ ID NO: 1735 - DNA, 504 bp, Homo sapiens
  I.1735 (R61600)
  misc_feature (319)..(319): n is a, c, g, or t
  misc_feature (415)..(415): n is a, c, g, or t
  misc_feature (422)..(422): n is a, c, g, or t
  misc_feature (428)..(428): n is a, c, g, or t
  misc_feature (435)..(435): n is a, c, g, or t
  misc_feature (474)..(474): n is a, c, g, or t
atcactttgaatggaaaccagagcagtgacgatcaccagattgtcctctatgagtggtccctgggtcctgggagtgagggcaaacatgtggtcatgcagggagtacagacgccataccttcatttatctgcaatgcaggaaggagattatacatttcagctgaaggtgacagattcttcaaggcaacagtctactgctgtggtgactgtgattgtccagcctgaaaacaatagacctccagtggctgtggccggccctgataaagagctgatcttcccagtggaaagtgctaccctgggatgggagcagcagcagcgantgaccacggcattgtcttctaccactgggagcacgtcagaggccccagtgcagtgggagatggaaaatatttgacaaaggcaatagccactgtgantggtctncaggtnggggacntaccatttccttttgacagtgaaagaccagcagggattnaggcagcacttccaccttcattttggtttt

SEQ ID NO: 1736 - DNA, 444 bp, Homo sapiens
  I.1736 (R61546)
  misc_feature (353)..(353): n is a, c, g, or t
tttttttttttttagagttttacccagcctttatttctattaacaagcatctcagttaaaagagcaaagtttttgttttgtgccttcaaaaaccggtcttttagtacgtggggatacacatctaacccactggggaagaaggtcaatgaactattctaaaagagtgggttttgtgctgtaactcccactgactggtcttggattcaaggggtccttccactttacaatgaactgcgccattatctgtcctttgagcaataactgaaggaagctccatttctgatggaaccattcatgggaaacctttggattccctctctccatcttttctcggctgaagattgtgtcctggncactgtcaaactcagactcggataccatcagggctgggagttgtgctctgtgcttcggtgcttgataccatatttggggcctcagttccat

SEQ ID NO: 1737 - DNA, 606 bp, Homo sapiens
  I.1737 (R61440)
  misc_feature (404)..(404): n is a, c, g, or t
  misc_feature (437)..(437): n is a, c, g, or t
  misc_feature (460)..(460): n is a, c, g, or t
  misc_feature (490)..(490): n is a, c, g, or t
  misc_feature (520)..(520): n is a, c, g, or t
  misc_feature (555)..(555): n is a, c, g, or t
  misc_feature (561)..(561): n is a, c, g, or t
  misc_feature (595)..(595): n is a, c, g, or t
ggtcggctacccggacttcctgctgaaacccgatgctgtggacaaggagtatgagtttgaggtccatgagaagacctacttcaagaacatcttgaacagcatccgcttcagcatccagctctcagttaagaagattcggcaggaggtggacaagtccacgtggctgctccccccacaggcgctcaatgcctactatctacccaacaagaaccagatggtgttccccgcgggcatcctgcagcccaccctgtacgaccctgacttcccacagtctctcaactacgggggcatcggcaccatcattggacatgagctgacccacggctacgacggactgggggggccagtatgaccgctcagggaacctgcttgcactggtgggacggaggcttccttacagccgntttcctgcgaaaggctgagtgcatcgttccctnttttatggacaactttcaatgtnttacaaccaggcggtgaacgggaaacacangtttgggagaacatcgcagtatggggcggncttaagttggcttaccacgctattagagttggttncggganggccccaggagcaccatttcccggttaaatacanactgaaccagt

SEQ ID NO: 1738 - DNA, 352 bp, Homo sapiens
  I.1738 (R61395)
  misc_feature (295)..(295): n is a, c, g, or t
  misc_feature (302)..(302): n is a, c, g, or t
  misc_feature (313)..(313): n is a, c, g, or t
  misc_feature (319)..(319): n is a, c, g, or t
  misc_feature (332)..(332): n is a, c, g, or t
  misc_feature (337)..(337): n is a, c, g, or t
tttttttttttaacagtgcagtgatttattgaccagactttgcagcaagaacacagcgaaggtggggcccgtacaatccagcctggcagagggtctggcccccttagagcagaatctggggaccccagtatatttccctcacagccccccaaagtccagcctcaccctgctccaggcccctcctgaagtgaggggcagcagggggaccggagtcctggaggggctggaaggcaggtggtgcccagagcggggctggcaccgggtgcatgcctgccccggtagccagcaggaggtnattcgtncgggggcagtnggggcntgcaggcgggcancaggnttcaccacacggaac

SEQ ID NO: 1739 - DNA, 450 bp, Homo sapiens
  I.1739 (R61313)
  misc_feature (440)..(440): n is a, c, g, or t
  misc_feature (447)..(447): n is a, c, g, or t
ttttttttctcgtagatcactcatttttattaaagaagtgtgctcatgataaaaaattgtctggtatgacagcaaatgcataactatatatatagaatttatcccttaacatattttagaggataaagcaacagagggacgatttaacagtaagcgggccacctgcaggattgtcctgattctctctcagtagttactccttgctctctgcagagacttaagttctctttgccccagtgcccagacctgccttctcttcaccctgtcatcatgcacggttgggccctggttggccttttctgggcctcctcacagcagaatgtgcatcatcattcctcaagggcctcgtgctttccttgtaagtcacacagtttttgtgatttacatgcaagtaagggggaggagaaacacaaacaccttccgtgtgaatctaaagcatnggagtgntcc

SEQ ID NO: 1740 - DNA, 364 bp, Homo sapiens
  I.1740 (R61154)
attcatgtcattgttccccatttaacatcagtcctctcaagatgtcgtgaccccatggtcaccctgaagcccttagattccaacccctcaatcagagacttccttcattaacaaagacccttgttcttatccctcaagaagaaacccaccataaccagcccactgtcacccctaatttacagacaccaaaacagtcctgggaagtgctaattacaggaccccccaagtcttcctaccctctggcaccctcaagaaacccccagtgccttgtatgaagcccaccccacatgggcccacagctcctgtgctgggccagactcccaggaaaattctctatttttttaaggtaacgattttccccttt

SEQ ID NO: 1741 - DNA, 502 bp, Homo sapiens
  I.1741 (R61050)
  misc_feature (484)..(484): n is a, c, g, or t
caaagcacagtacagtagggtcacctagggaagcacttgctcaaaatctgtgacctgtcagaataaaaatgtggtttgtacatatcaaatagatattttaagggtaatattttcttttatggcaaaagtaatcatgttttaatgtagaacttcaaacaggatggaacatcagtggatggcaggaggttgggaattcttgctgttaaaaataattacaaattttgcacttttttgtttgaatgttagatgcttagtgtgaagttgatacgcaaggaaaatggtccatgtttacccacagttttcaggtactcctagactttaaagatgtcttgaacatttaagttcttcagcagttcacactacaccgtttttttgtttttttttcccccccgggaggttttttttgtaggggcagccacagcagagcagggacagggtggaatactgggatttgcacagtgggggcagtgtggggggcttctcngtaatgggagaacatttg

SEQ ID NO: 1742 - DNA, 501 bp, Homo sapiens
  I.1742 (R61035)
  misc_feature (82)..(82): n is a, c, g, or t
  misc_feature (341)..(341): n is a, c, g, or t
  misc_feature (423)..(423): n is a, c, g, or t
  misc_feature (437)..(437): n is a, c, g, or t
aaaagccatctttgcattgttcctcatccgcctccttgctcgccgcagccgcctccgccgcggcctcctccgccgccgcganctccggcagctttatcgccagagtccctgaactctcgctttctttttaatcccctgcatcggatcaccggcgtgccccaccatgtcagacgcagccgtagacaccagctccgaaatcaccaccaaggacttaaaggagaagaaggaagttgtggaagaggcagaaaatggaagagacgcccctgctaacgggaatgctaatgaggaaaatggggagcaggaggctgacaatgaggtagacgaagaagaggaagaaggtngggaggaagaggaggaggaagaagaaggttgatggtgaggaagaggatgggagattgaagattgaggaagcttgagttcagnttacggggcaagcngggccagttgaaagatggttgagggttgacgttttccgttaccaagaagcagaagacccacgag

SEQ ID NO: 1743 - DNA, 380 bp, Homo sapiens
  I.1743 (R61015)
tttttaaaatgcctgtttcataggaccttctgaaatgatttccagaatattttatctggctccaaaataaagcacatagcaactcacctcaacccctcatcatctccaggaaagtttctgccaaagctgtggcatagccaacttttgatttggttcttgccaattgttttatgtccctaaacctcatttggatccttggggtatagttttatctttctgcttcagtgatttactgtaacttttcaaatattggttctttctgtaccatttaagtatagttgatatatgtgagggcaaaaaaaggtttcagcatgggtgggtgaggggaaaaagggagcttaggaaatcccagttgggcacagctgggggccaaggcgcca

SEQ ID NO: 1744 - DNA, 372 bp, Homo sapiens
  I.1744 (R60931)
ttttttttttttttattttgcaacaattattctttcaataaaggacttgtaaattctctcccacaccacgttagacaggtaagtgacgtcacttccaaatttcaactgttacatagaagatccagaatgtcaacaccacttgcaatctccacaaggttacaaacaacacatacaccttcaattcaaaatacctgaatgaaaggtttcatcccaattatggggaaaaaacttcccatctcacaggctggttaggaaactggttctgaatacagcgtaacatacacaggcaattcaggatcttaaggaaacttcaactgttggccagttaatacagtaggtggaactttatttcggctttcacccttatttcct

SEQ ID NO: 1745 - DNA, 446 bp, Homo sapiens
  I.1745 (R60916)
  misc_feature (53)..(53): n is a, c, g, or t
  misc_feature (225)..(225): n is a, c, g, or t
  misc_feature (307)..(307): n is a, c, g, or t
  misc_feature (344)..(344): n is a, c, g, or t
  misc_feature (355)..(355): n is a, c, g, or t
  misc_feature (397)..(397): n is a, c, g, or t
tttttttttttttttgttagaacaactcagcaaaataaaattcctgtttattnttggacaacattgtttcacacatacatcaaacaggccaaaaaaaataaacagcaacttcatagacaaaaaaggaaaaaaaaagaaaccttttatctttggcctttttaaccatctcatacaaaccaactacttatagtacagctaagtacatacacaaaaaagttactggantgctcggattaagattgtttttctgttgtcatttttgctttttttacaaggttttttttctcctttgaggattataatggancatgggtcacaccacaaggtaaagtcagaagtagggncagaggaacgnctccgaggctgggtttgggtcatccggggatccatttaaaantgggctggacccctaaacaatttggtaccaaaatttttaaatggttaat

SEQ ID NO: 1746 - DNA, 354 bp, Homo sapiens
  I.1746 (R60898)
  misc_feature (346)..(346): n is a, c, g, or t
ttttttttcattttttaaatggctttattaaaggctacaagtataaaatatgactaagttacaagtcgtcagtaagaatttattacttttgaaaatgttaattaaagaaagggagacgcaaagaaagggaggctcttcctgaaatccacacaggggggtgcggctcagacgggtgacagacccccgctgttcccagtagggcagcacccccaaacccagggggccaagggaggggctcccagatgaaacagaggctggttgctgatttcttgggggaacttttgtaaaaatggaagacactgaatccttgaggctggaatcccagggtgcaggaggactggggggngaggtggg

SEQ ID NO: 1747 - DNA, 510 bp, Homo sapiens
  I.1747 (R60604)
  misc_feature (396)..(396): n is a, c, g, or t
  misc_feature (405)..(405): n is a, c, g, or t
  misc_feature (425)..(425): n is a, c, g, or t
  misc_feature (445)..(445): n is a, c, g, or t
tgggacccttataaagagttgagaggccacacagacaatatcaccagcctcaccttcagtccagacagcggcttgattgcctctgcctccatggacaactcggtgcgcgtctgggacatcaggaacacttactgcagtgcacctgccgacggttcctccagcgagctcgtgggcgtgtacaccgggcagatgagcaacgtcctgagcgtgcagttcatggcctgtaaccttcttctggtgactggaattacacaagaaaatcaggaacattaattttttaactttgttggaacggactggggtaacagtggaaagcctccagttgcaatccttcaatgagctgagattgaatcatttgactgtgaaagagccccctcctcccctctctcctggggncctcatttncggggcagggtccccctttnatttaggccccccagttttngaagggccaaggtttggggaggggaacaggagagagggcattgatgagtgattcaagatttggag

SEQ ID NO: 1748 - DNA, 463 bp, Homo sapiens
  I.1748 (R60550)
  misc_feature (99)..(99): n is a, c, g, or t
  misc_feature (200)..(200): n is a, c, g, or t
  misc_feature (360)..(360): n is a, c, g, or t
  misc_feature (366)..(366): n is a, c, g, or t
  misc_feature (420)..(420): n is a, c, g, or t
  misc_feature (435)..(435): n is a, c, g, or t
ttttttttttttttttgaaactaaatacattttaatagaaaacaaaatacaaaataactcttttcagaaaacagaaatatttaatcctttttccacaanttagaacttgctttatcctcagagcatagtttgatatgcgtgcgtacatacttacgatttgtttcacaaagtgttcattagactggtattgcagtgcaggnacgtgggagcagttcattgcaggagaaaaaggacgtgggaaaaagccacacctctggaatggtcattcaggaaattcaacatttttctaattctatcttgttacttattactccaaattattctttatcataatctttcttttgagggggagaggaattnttaagnggaagtgcagctttggggaaaggaatttttctttccccaccatcactggcgggngccccaaagtgtttntcaatcaaacccacccacccatttccag

SEQ ID NO: 1749 - DNA, 467 bp, Homo sapiens
  I.1749 (R60090)
  misc_feature (2)..(2): n is a, c, g, or t
  misc_feature (4)..(4): n is a, c, g, or t
  misc_feature (78)..(78): n is a, c, g, or t
  misc_feature (453)..(453): n is a, c, g, or t
gnanctggacctgtggttcataccttgtcaccacccgggaagctgaaggccacttcctcccagatggcctcagcaggnaccatcgccctttctcagagcagagggccaggtatagaaaccgcagtgggcctgcaagccgcccgagcctccccagcagcctcctacagagcaggaagaggcgccctgtgaaccctgagtgttgcaggcccagcagaccctgctgtcccaagcccacccctcctcccaccatcacctccctcacctcgggacagtagccctccacttctccagcctctcagccctgtgctcctgcatccagagtggaacccaggctggtgtccgcatctgttccctggggccccacccctgggaccttgcctttggtttgtgttcatcttgtttgttaaacatttcagggaggaaccaggggcagcatttgggggcttggggatnggccacagaagggg

SEQ ID NO: 1750 - DNA, 506 bp, Homo sapiens
  I.1750 (R60028)
  misc_feature (460)..(460): n is a, c, g, or t
  misc_feature (475)..(475): n is a, c, g, or t
ttttttttaatatcacaatgtgtaatgccaccatttattacttctttactacattaaaaaagtgaccctgtttctagagaccaaacagcaccacagaggcattcttggaagagaattccttttgttcccaagcctttgtgactgactttaaatcctctcacctgcagaacagagatggcttcaaagtggggagtgagggagtgagcgaggaccctgggctgagacctgtttttcttccatttctgctgtggcttcccacagcttccctggttccacaccagggccctgctctgccgcaggaaaatggattcccagggccacagagctgtcaggcctttgactttgcagagaccaagcaccccagaggctgtgcgacagggctagtccctgggtgggccggtctggggcatggggggcagggagactgggagatggggagggctggagattcgggggttcngggttattgacaaanggttcaggtttgagttttggttgcccattga

SEQ ID NO: 1751 - DNA, 413 bp, Homo sapiens
  I.1751 (R59649)
  misc_feature (128)..(128): n is a, c, g, or t
aggaaacaagatgaatggattaagtttgatgatgacaagtcagcatcgtaacaccagaagatatcttacggctttctggtggtggagactggcatatcgcttacgttctactctatgggcctcgcagntttgaaataatggaagaggaaagtgaacagtaatcttcattttagtatttatgcttagatgtgaaaataaatgttatttgttgatcatttctataatccagagctttagaggaagacacataggtgggtttatgtttcacctcatttggaacaaaagaggacagaagcagaccactctgtgcaccaacctaaaaaattacagagaagagaaaattatctttgggttgtgctgccctatattaaaggtgggcagaaagactttttaaaaaagcttattatttcttg

SEQ ID NO: 1752 - DNA, 500 bp, Homo sapiens
  I.1752 (R59591)
  misc_feature (271)..(271): n is a, c, g, or t
  misc_feature (274)..(274): n is a, c, g, or t
  misc_feature (342)..(342): n is a, c, g, or t
  misc_feature (416)..(416): n is a, c, g, or t
  misc_feature (472)..(472): n is a, c, g, or t
  misc_feature (478)..(478): n is a, c, g, or t
  misc_feature (484)..(484): n is a, c, g, or t
  misc_feature (497)..(497): n is a, c, g, or t
ttttttttgagacagagtctctctgtcacccaggctggagtgcagtggtgtgatctcagctcactgcaacttctgccttccaggttcaagcaattctcccacctcagcctcccaagtagctgggatcacaggtgtgcaccaccacatccagctaatttttatatctttagtagagacagggtttcaccatgtggcccaggctggtctcgaactcaacctccagtgaaccacctgcctcagcctcccaaagtgctgggattacaggcgtganacncgttgcccagccaagatttggggaattaagaaaggaaatacaaacacaactgaggccaaaggaaagantctgacttgattaacattcactggcatttcaggcattccaaaggaatttccatttatttttaacaacttttgtnattttcttttttaaattacagggcagggcaaaggaggttaacaattttttttaatnggttgnttaacnggcacgtgtttanttt

SEQ ID NO: 1753 - DNA, 475 bp, Homo sapiens
  I.1753 (R58958)
  misc_feature (68)..(68): n is a, c, g, or t
  misc_feature (342)..(342): n is a, c, g, or t
  misc_feature (410)..(410): n is a, c, g, or t
  misc_feature (423)..(423): n is a, c, g, or t
  misc_feature (441)..(441): n is a, c, g, or t
  misc_feature (454)..(454): n is a, c, g, or t
  misc_feature (471)..(471): n is a, c, g, or t
ttttttttttttcagcttttcagaagttttattataaagagatttgagagaagcactgggcaccaagnacagacactcgccagggccaggaaacagctgcaaacgacgtcaagaacccaaacccaaacgaaaccccaaaaccacacacacggtaggataagctgtaacttcgttctcaaggtttcttcataaatagacaaaagtcgtcgccggcaatttaaaatagatgaatacatgattaaaaggagagcagtgctccggggtggctagcaagcgtccggtccttgctgtgaggatgacgaaacggtttggcagccgcttttgtgcgcgtctcccttaagntaaaacttaaaattgtgctaaggtttcatataaaatgctttttaccttaaagggaaactacttttttncccccacaaaatngtttttacagatgttttncagcacagttttnaaaacacgtagttcaantatg

SEQ ID NO: 1754 - DNA, 411 bp, Homo sapiens
  I.1754 (R56877)
  misc_feature (8)..(8): n is a, c, g, or t
  misc_feature (10)..(10): n is a, c, g, or t
  misc_feature (69)..(69): n is a, c, g, or t
  misc_feature (78)..(78): n is a, c, g, or t
  misc_feature (102)..(102): n is a, c, g, or t
  misc_feature (105)..(105): n is a, c, g, or t
  misc_feature (274)..(274): n is a, c, g, or t
  misc_feature (400)..(400): n is a, c, g, or t
tttttttntntttaattaattagaaagtaggctgggcacggtggctcatgcctataatcccagcacttngggaggccnaggatctcctctctggtggatcanttnagggcaggagttaagagaccatcctggccaacatgatgaaaccctgtctctactaaaaatacaaaaagtagctgggcgtggtggcatactcttacaatcccagctacttgggaggctgaggcaggagaatcacttgaacctaggaagcagaggttgcagtgggccaagntcacaccactatactctagcctgggcgaacagaggtggggaaaaaagtaggacccctgtcctatattcaggtttttcttcacatatatgaacccatcttaaattcttacgttgtttaaaggtagtnttaggttaatt

SEQ ID NO: 1755 - DNA, 344 bp, Homo sapiens
  I.1755 (R56800)
  misc_feature (287)..(287): n is a, c, g, or t
  misc_feature (340)..(340): n is a, c, g, or t
ttttttttgagtcgtctttgcattcttttatttctgtttcatctacacccaaggcgaatctgatgggttctcccttccaaacagggtggggggtctgacgctcctctgcctggctacagccccggatgtgttaaatgtctgcatctcgcacctcccgttccaaaaaacgtcacggagctctgagccactgcttccctgaaaccatcgttcccacgtcaccgatggcccccaccggccaaatcagagggcctggctggtcggcaccttccagggccttccacaacctnctgccccggctcctgcttcaaacactcctcacgttgcctatgagacactgcanaccc

SEQ ID NO: 1756 - DNA, 444 bp, Homo sapiens
  I.1756 (R56774)
  misc_feature (75)..(75): n is a, c, g, or t
  misc_feature (156)..(156): n is a, c, g, or t
  misc_feature (223)..(223): n is a, c, g, or t
  misc_feature (279)..(279): n is a, c, g, or t
  misc_feature (334)..(334): n is a, c, g, or t
  misc_feature (377)..(377): n is a, c, g, or t
  misc_feature (436)..(436): n is a, c, g, or t
ttttttttttggtctgtaacactttcggtttattggctgcggtgccctggtgtggctgaccggccactgggctgnaggagaagccctgtcttgtttctccatcccctccccatcggctccccacggtggctcctgggggacatgcacagacacttntgccccaggaaactggggtggtggaatgggggctcaaaataaaaccaaatcgaggctggagcagggntgggaaatgaacattacaatgaaaataatgcccccggtgatacacaatacagcgtntagagacacagggatggcgatggggtcctgctgacattcccttttgccaccaggnaggggccccctaaagagaggattgatgatttcgaaatgtcttntgggaagctctgtttccctgggccccagccccttgctggtgggggtttttggggaagtnggttatgc

SEQ ID NO: 1757 - DNA, 481 bp, Homo sapiens
  I.1757 (R56773)
  misc_feature (364)..(364): n is a, c, g, or t
  misc_feature (467)..(467): n is a, c, g, or t
gatggacatcgagtcccagcctgagtgtgcctacgaccacctagaggtgttcgacgggcgagacgcaaaggcccccgtcctcggccgcttctgtgggagcaagaagcccgagcccgtcctggccacaagcagccgcatgttcctgcgcttctactcagataactcggtccagcgaaagggcttccaggcctcccacgccacagagtgcgggggccaggtacgggcagacgtgaagaccaaggacctttactcccacgcccagtttggcgacaacaactaccctgggggtgtggactgtgagtgggtcattgtggccgaggaaggcttacggcgtgggagcttcgtgttccagacctttgaggtngaggaggagaccgacttgcggctattgattacatgggagctcttcgacggctacgacagcacagcccccaggttgggcgcttactttgggttagggcttcttnaggagttttatttt

SEQ ID NO: 1758 - DNA, 541 bp, Homo sapiens
  I.1758 (R56723)
  misc_feature (122)..(122): n is a, c, g, or t
  misc_feature (155)..(155): n is a, c, g, or t
  misc_feature (170)..(170): n is a, c, g, or t
  misc_feature (421)..(421): n is a, c, g, or t
  misc_feature (519)..(519): n is a, c, g, or t
  misc_feature (530)..(530): n is a, c, g, or t
gaacagctccacaatgactctattcaagacagagctctgccagtcacctctttactctgacagtccttagtaaccacgcgaatgagaaagtggagatgctactaggagctgagacgcagagnaagcgagcccgctggataactgccctgggacanagcagcgggaagccnctgcagaccgaacctgtggctgacgtcgtcctcatctatcaacgtgtcagcgatggctggtatgagggggaacgactacgagatggagaaagaggctggtttcctatggaatgtgccaaggagataacatgtcaagctacaattgataagaatgtggagagaatgggacgcttgctaggactggagaccaacgtgtagtctcttcagatggtcttttgttactgcaagatttgcacgacacttaccgggcnggttggttctgggctagttttattgttaattttgttcacagccctttatttaaaagaacgaaaacattgccttaagttgccaggtgttctgtctctcngagaagagttnggtacagtgtt

SEQ ID NO: 1759 - DNA, 449 bp, Homo sapiens
  I.1759 (R56649)
  misc_feature (30)..(30): n is a, c, g, or t
  misc_feature (34)..(34): n is a, c, g, or t
  misc_feature (36)..(36): n is a, c, g, or t
  misc_feature (168)..(168): n is a, c, g, or t
  misc_feature (215)..(215): n is a, c, g, or t
  misc_feature (244)..(244): n is a, c, g, or t
  misc_feature (263)..(263): n is a, c, g, or t
  misc_feature (314)..(314): n is a, c, g, or t
  misc_feature (327)..(327): n is a, c, g, or t
  misc_feature (381)..(381): n is a, c, g, or t
  misc_feature (403)..(403): n is a, c, g, or t
  misc_feature (410)..(410): n is a, c, g, or t
  misc_feature (436)..(436): n is a, c, g, or t
ttttttttttgacctcatgcagccccaaanggananaagagactttaattaggggagggaggatccaccagaatcagaaaagggacagctagcgtgggagcagaggagccagaacaggcaggaggagggcccggccaggaagctctggaggactcacctcgccacctntggcacaggcactggcactgacggacaaggcgaaacagcggcccctntcaactgggagggcacccaatggcccctntagccagaggttgcccggnttttgggccccaggtcctaggcatgactggtggtcaccaatttggcccttntccccaaccagtnttggggggccatctttaggcagaattcaggaagttggcagagagttcccaacanttatactgggggccaaggaggnttgggantaaaagggcaagggagaaattgggantttgaaacttcct

SEQ ID NO: 1760 - DNA, 492 bp, Homo sapiens
  I.1760 (R56648)
  misc_feature (252)..(252): n is a, c, g, or t
  misc_feature (254)..(254): n is a, c, g, or t
  misc_feature (258)..(258): n is a, c, g, or t
  misc_feature (261)..(261): n is a, c, g, or t
  misc_feature (403)..(403): n is a, c, g, or t
  misc_feature (440)..(440): n is a, c, g, or t
tcagctttctgatcaccaacttccacacagagcagatgtacaaacacaagttggtggactttgtgatccacttcatggaggagattgacaaggagatcagtgagatgaagctgtcagtcaatgcccgtgcccgcattgtggctgaagagttccttaagaatttttaaaccatctggctggatctcgtggccttccccctcagactacccatgtctccacgaaggcgtcctggagtcactccccgagcagcgngncggncgncagggagttgggttggggtgggcatttgatgcgggaggtgggtggtgtgcttgctagctgggcaagaaagcagcagtggacctgccccaaggccacacgtgcctggtcaggctggcttctgatgttcagtcccctggggccnggacagattttttttaaacgtcttgaaaactttaaantctgttgcttgttaggatattgtaacctttttgtcttttttttttttttttt

SEQ ID NO: 1761 - DNA, 471 bp, Homo sapiens
  I.1761 (R56533)
  misc_feature (324)..(324): n is a, c, g, or t
  misc_feature (424)..(424): n is a, c, g, or t
  misc_feature (436)..(436): n is a, c, g, or t
  misc_feature (443)..(443): n is a, c, g, or t
  misc_feature (453)..(453): n is a, c, g, or t
  misc_feature (468)..(468): n is a, c, g, or t
tgtttagtggatcctctatccttcagagactctggaacccctgtgctcttctcctcatctagtgaccctgaggtgatggagttttcaagtccttccagagaggaatgtcccaagccttcgggtagggtaagcatcatggctggcagctcacaggattgcttctacttcaggcagtgtcgtgggcatcagatgagtgccttcagccgctacaagagcagaagcagtgggcattggatggagctgagtacaggaccatacaggctaattgcaccggcacaggaatcggatataacatcatccgggtacccatgggccagctgtganttctccatccgcaccttacaccttatggcagacacccttgatggattttccagtttgcacaatttcagcctcccagaggaagataccaagttcaagatanccctggtttcancgagccntgcatttggnccaggttccgttttnatt

SEQ ID NO: 1762 - DNA, 372 bp, Homo sapiens
  I.1762 (R56166)
  misc_feature (57)..(57): n is a, c, g, or t
  misc_feature (146)..(146): n is a, c, g, or t
tgtttctcgcctacttcctgggtgtcgatcgccggcctcctctacgcgctggtacantcggccagccatgtgactgccttcctcccctgcggcagcagccgagcagctacggcagaaggatctgaggatttcccagctgcaagcgnagactccgacggccaccccctgcccctgcccagccccctgaacccgaggccctgcctactatctatgttgttacccccacctatgccaggctggtacagaaggcagagctggtacgactgtcccagacactgagcctggtgccccggctgcattggctgctggtggaggatgctgagggtcccaccccgctggtctcagggctgctggctgcctctggccttcctc

SEQ ID NO: 1763 - DNA, 456 bp, Homo sapiens
  I.1763 (R56138)
  misc_feature (330)..(330): n is a, c, g, or t
  misc_feature (343)..(343): n is a, c, g, or t
  misc_feature (449)..(449): n is a, c, g, or t
ttttttttttgagctgactctgtccctttaatgcccaggctgagcccagtgcctccttgagtatctgctccatcactggcgacgcacaggtaggtgtgaatggagtagccaggtgagattgtctccaggaagcccacagcaggatccttgatggtaagaggcacatccttagaggagcggtttaggacgaccacaacaggagagccatcgggatgcatcagtgccactgcgtccgggtcgttcttctgactggcaaccagccccactctctgggagccctcaggaatgaacttgctgaagtgggccaaggtgggtaggaacatggggctntttgtaaaacgtntgcttgggtgatgtcttacaatgatggggttccagtcgggtccagccgaccacatgggtacaggaagttttgtgatgatgctgtggctgttacttgcatccttcgntcccagg

SEQ ID NO: 1764 - DNA, 363 bp, Homo sapiens
  I.1764 (R56054)
  misc_feature (216)..(216): n is a, c, g, or t
  misc_feature (252)..(252): n is a, c, g, or t
tttttttttttttttccaggttgagattctttattctggaggtaggaagggggtcagcatgctcaggtgggaagggtccagcccagctcctccagccccccagtgcatgcccagccccaataagttacccagttactcagctgccctccctcctgggtccatctgtccttctgttccaccctagacagggccaacctgactcaacacaagggctgnttgtccccagcctgtgggcagtgccacacggcaggntaggggaggggtgaagcagcaggaccatgccctggggcctgggaggggcagaggggccatttttggcttccaagggttcaggattttggaaaaccacattcctgggggcag

SEQ ID NO: 1765 - DNA, 509 bp, Homo sapiens
  I.1765 (R55893)
  misc_feature (128)..(128): n is a, c, g, or t
  misc_feature (379)..(379): n is a, c, g, or t
  misc_feature (453)..(453): n is a, c, g, or t
  misc_feature (462)..(462): n is a, c, g, or t
  misc_feature (471)..(471): n is a, c, g, or t
  misc_feature (477)..(477): n is a, c, g, or t
  misc_feature (491)..(491): n is a, c, g, or t
  misc_feature (497)..(497): n is a, c, g, or t
cgggacaagtacaagacgctgcggcagatccggcaggcaacaccaagcagcgcatcgacgagttcgaggccctgtaacagccaggccaggaccaagggcagaggggtgctcatagcgggcgctgccancccgccacgcttgtctttagtgctccaagtctaggaactccctcagatcccagttcctttagaaagcagttacccaacagaaacattctgggctgggaaccaggggaggcgccctggtttgttttccccagttgtaatagtgccaagcaggcctgattctcgcgattattctcgaatcacctcctgtgttgtgctgggagcaggactgattgaattacggaaaatgcctgtaaaagtctgagttaagaaanttcatgctgggcctgttgttgattacaagagttcagcatcatttaaagggaaacgtgggccagggatttccctnttgtggccntatttgttnttgtanttcggaaatgaggntcaaanttgaatttttta

SEQ ID NO: 1766 - DNA, 438 bp, Homo sapiens
  I.1766 (R55808)
  misc_feature (47)..(47): n is a, c, g, or t
  misc_feature (256)..(256): n is a, c, g, or t
  misc_feature (334)..(334): n is a, c, g, or t
  misc_feature (378)..(378): n is a, c, g, or t
  misc_feature (407)..(407): n is a, c, g, or t
  misc_feature (421)..(421): n is a, c, g, or t
  misc_feature (430)..(430): n is a, c, g, or t
tttttttttgcctttgcaaagcttttatttcatgtctgcggcatggnaatccacctgcacatggcatcttagctgtgaaggagaaagcagtgcacgagaaggaatgagtgggcggaaccaacggcctccacaagctgccttccagcagcctgccaaggcatggcagagagagactgcaaacaaacacaagcaaacagagtctcttcacagctgggagtctgaaagctcatagtgggcatgtgtgaatctgacaaanttaaaagtgtgcatagtccattacatggcataaaacactaataataatcctgtttacacgtggactgcaggcagggcnggtccagctccaccactggccctcctggccacattcacattcangtggccatgggtttaggaggggttttttncatatgtgaatttntttttattnttgttaaa

SEQ ID NO: 1767 - DNA, 489 bp, Homo sapiens
  I.1767 (R43204)
  misc_feature (292)..(292): n is a, c, g, or t
  misc_feature (297)..(297): n is a, c, g, or t
  misc_feature (308)..(308): n is a, c, g, or t
  misc_feature (315)..(315): n is a, c, g, or t
  misc_feature (419)..(419): n is a, c, g, or t
  misc_feature (437)..(437): n is a, c, g, or t
tttttttttttttttcttaatgttcatttattcaacaaatactaattgagcctctattgtgtgccaggttccattctaatgctggagacacagacaacacaaaacagatgtcccctactcaaggggcacatggcacacagggaatagatgcctcattacatctgtttaagaaacaacatagccactgcagagattcacagcaggctgaacacgtgtttatctccactcctcttgacatccacttaaaatgatagttaaagttgtaggaccacccataagggacaaagggaantcggnaggacgggtgnaaggagnagattggattttcaggcaatgtttttggaaggataaaaatctaggatgggacaacaactttcagccatctttctctggctctggacaggggcctgcacgggggnggcacgcagctttggggntgccaggaagtccctttggggaagggtttggggaactggaccaccccggggg

SEQ ID NO: 1768 - DNA, 312 bp, Homo sapiens
  I.1768 (R43195)
  misc_feature (47)..(47): n is a, c, g, or t
  misc_feature (72)..(72): n is a, c, g, or t
  misc_feature (230)..(230): n is a, c, g, or t
  misc_feature (248)..(248): n is a, c, g, or t
  misc_feature (251)..(251): n is a, c, g, or t
  misc_feature (265)..(265): n is a, c, g, or t
  misc_feature (270)..(270): n is a, c, g, or t
  misc_feature (276)..(276): n is a, c, g, or t
  misc_feature (283)..(283): n is a, c, g, or t
ttttttttttttttttttttttttttcattgttcattttgcttagtnactctgagaaagattttttctaagnaattaagttgctgatgaaacgtctaagaccaattaataccttccatttcatgaatttaagcttcaaatgaatccattctgctgtgtagtccatcttctgagtgtttcagtttcataatcaaatttttaatttccagaaactctaaatatttttttcangggcatcctattctttangancacagtatctttangaatngctganggatttngattcattaatttaaaaatttcatgtttc

SEQ ID NO: 1769 - DNA, 411 bp, Homo sapiens
  I.1769 (R43121)
  misc_feature (265)..(265): n is a, c, g, or t
  misc_feature (344)..(344): n is a, c, g, or t
  misc_feature (396)..(396): n is a, c, g, or t
tttttttttttttggtagtcaaagtaaaggtttatccttgacatcagaatggtttaaatcttgcaatttgcatatacaaagagttcagcaacattcactggcattataatcagagcaagatcaaattataaatgtaatcaaagaaaatatgatagttgaaactgtaataacatacatacattataaaggactgcacataagttaaacacaacttaggttaaacaaacaaacaaaaaagtatcagtaattatacacttaaaaggantaacatggggggatgtctcccaaatggctggaaacacgggtgttccgggctcattttaaaaaaggtgtttttaaaaacnccttaaaaataccctttttaaaaccttggggtttggcattctttctttcctntgggccctggggggg

SEQ ID NO: 1770 - DNA, 429 bp, Homo sapiens
  I.1770 (R42352)
  misc_feature (292)..(292): n is a, c, g, or t
  misc_feature (347)..(347): n is a, c, g, or t
  misc_feature (394)..(394): n is a, c, g, or t
  misc_feature (413)..(413): n is a, c, g, or t
ttttttttttttttagaatacagaatgactttatttaaataaagttcaaaaacaggtaagagtaaacaatgctagttaaggatatctatataggtgataaaactgtttaaaaaggcaagggaataattaacacaaaattaataatggccagggtaacggggggcagggaacgcattcctcctggggtaggaaacacacaaaaggtttccaaactaactaaagtttctaaagcttttattaatttttgttatgaaatataccattaacatgtactgacaaaaaggcatatttnttacacagatacggctttgtcagtacatattaatgacatatttcacaacacaaantttttaaaggagaaggggagatggtacatatttctcttaggaagggnaaaacttcaaataaatgtnctcttctccggttttt

SEQ ID NO: 1771 - DNA, 424 bp, Homo sapiens
  I.1771 (R49668)
  misc_feature (12)..(12): n is a, c, g, or t
  misc_feature (55)..(55): n is a, c, g, or t
  misc_feature (174)..(174): n is a, c, g, or t
  misc_feature (234)..(234): n is a, c, g, or t
  misc_feature (236)..(236): n is a, c, g, or t
  misc_feature (239)..(239): n is a, c, g, or t
  misc_feature (241)..(241): n is a, c, g, or t
  misc_feature (269)..(269): n is a, c, g, or t
  misc_feature (277)..(277): n is a, c, g, or t
  misc_feature (283)..(283): n is a, c, g, or t
  misc_feature (288)..(288): n is a, c, g, or t
  misc_feature (293)..(293): n is a, c, g, or t
  misc_feature (337)..(337): n is a, c, g, or t
  misc_feature (385)..(385): n is a, c, g, or t
  misc_feature (391)..(391): n is a, c, g, or t
  misc_feature (403)..(403): n is a, c, g, or t
tttttttttttntttttttttactttgcttaccagttttatttacacagtaattnttatgagtggtttttagtgaattctttgtatttacattttatatacacatttatacttgaaaggtaaagaaactgtacaataataaaaaaataagaaaaacaaatacagtaacttaggnccaactgaggaaacaaatacatgaaagtatgattaaatttagtcaggtagtataacctgnantgngnttactgccaggatgttatattccctctntcaagggntaccantaccnagggnagtaggttactgggggttaaaagggtcattctaaaacctgctanggaccatgggccactccttccaatattttattatattaccagtctccnataggnaggtccctatangggcattaccttttggggggt

SEQ ID NO: 1772 - DNA, 364 bp, Homo sapiens
  I.1772 (R49502)
  misc_feature (209)..(209): n is a, c, g, or t
ttttttttaaaataaaatttctttattgcaagtgtccaagtccttaggatttgtccttaaaggtactagaagatgagtaagaccacacacaccaagactatgtttagtctttagagtaaactagcaaatggccagtttgttctaggatgcattgcatcaggacatcacagtacatgaagaaaatctgctttttgtgaaaagccaccggnattttagatcccgtttaccatggaagtgcagacacaggcaggatacccaggataattacagttcaggtggcaaaagttcaaatgaggtaaggtcaggcttcttttggatgagggctgggcttacactggccaaaatattaaatggaaacttcgga

SEQ ID NO: 1773 - DNA, 478 bp, Homo sapiens
  I.1773 (R49384)
  misc_feature (301)..(301): n is a, c, g, or t
  misc_feature (342)..(342): n is a, c, g, or t
  misc_feature (375)..(375): n is a, c, g, or t
  misc_feature (416)..(416): n is a, c, g, or t
  misc_feature (437)..(437): n is a, c, g, or t
  misc_feature (457)..(457): n is a, c, g, or t
tttttttttttaaactctttaaacatttaattcttcagcattaatacacacaaatgcggtaacaggggtcaggggggtggtgcgggggcaggtgggttacagcctccactgggatcagggtttcaacagtgttacttataaattatattacatcaattttatttactgatctaggcagccagagggtggaaggatatacaatgtggaggaaacacattcatacgggggtgaggagtgctggcgggagacacggctctttaacatgaaaaatgtataaagtatttaggcaaaagttacaganaacagatccaaacaaggcaagtttatttttgtttaggaaanttccactttcataggggtttgcccgatgtgctncgtgtctgtggaagggggttgcttcccggtcatcttccttncctaacgggaggggaagccgntgctaagtttggggcccctntcacccaggttggctggctcc

SEQ ID NO: 1774 - DNA, 433 bp, Homo sapiens
  I.1774 (R55098)
  misc_feature (94)..(94): n is a, c, g, or t
  misc_feature (96)..(96): n is a, c, g, or t
  misc_feature (398)..(398): n is a, c, g, or t
  misc_feature (409)..(409): n is a, c, g, or t
  misc_feature (432)..(432): n is a, c, g, or t
ttgaccttggccgctttgtcctaacagtccacagtcctgccccgacccaccccatcccttttctctggcactccagtcccaggccttggctgananctactggaaaaggtctggcggctggggaggagtgccagcaatagttcataataaaaatctgttagctctcaaagctaattttttactaaagtttttatacagcctcaaattgttttattaaaaaaaagatttaaaatggtgatgcttatagcagtttgtacgagctcttaagtgttgattccatggaactgacggctttgcttgttttgattcttttccccctacttttcctaatgggtttaaattctgggaattacactgggggttcttttggcctttttttagcagaacatccgtccgtnccatctggcantctctggtcccgtgaactcaggng

SEQ ID NO: 1775 - DNA, 426 bp, Homo sapiens
  I.1775 (R44955)
  misc_feature (232)..(232): n is a, c, g, or t
  misc_feature (405)..(405): n is a, c, g, or t
ttttttttttttaacagttaagatttttgtttaaatttattttttgaactggtaataattttacatgtttcaaaattccaaaaatataaaatgataaagagtgaaaattattcctcatcactgtcctcccaattcttctggccaaccagtatgccacttttaccctttcagagattatgtgtgtacatataaacaaatgtttcttatttatttatttatttttgaggatggngtttcgctcttgttgcccaagctgggagtgcaatgggcacaatattgggctcactggcaacctccacttccgggggttcaagcgattctcctgccttaggcctacggggtaggctgggggattaggaaggtgtggcaccaccacacccagcttttggtatttttagtaggagntggggggttttcaccgtgttg

SEQ ID NO: 1776 - DNA, 461 bp, Homo sapiens
  I.1776 (R44869)
  misc_feature (348)..(348): n is a, c, g, or t
  misc_feature (405)..(405): n is a, c, g, or t
  misc_feature (430)..(430): n is a, c, g, or t
  misc_feature (444)..(444): n is a, c, g, or t
ttttttttcacccttgttcagacattttatttgaatttatgacagtgatggggatttgactgagatgccttatggagaagtaccccaccctctatgaagacagaatcactctctgccattcattctgcctgatgctaacaacacgcagctgatttagggagtgtcccagcctagctggatcaagggaaattccagggagccctggggcagggccctgggccccagtgccaagcctcagagtaagcagacattgggaaagttgccaaccacttggtaggaccactaggttctctgttttcccttccctttccttttcaaatcccacagtttcctgttggggagaagctntaattaggcctagttccagggtaccagatcccagtttaggggcgcattgttttgggnttaactccaaggaaaacctgggggnaccagtattttttncatttttaagggttttt

SEQ ID NO: 1777 - DNA, 412 bp, Homo sapiens
  I.1777 (R44862)
  misc_feature (258)..(258): n is a, c, g, or t
  misc_feature (324)..(324): n is a, c, g, or t
  misc_feature (335)..(335): n is a, c, g, or t
  misc_feature (356)..(356): n is a, c, g, or t
  misc_feature (362)..(362): n is a, c, g, or t
  misc_feature (411)..(411): n is a, c, g, or t
tttttttttttttagcacaaagcattttaggtttatttaaataaaaattataatttatacaatactttttctttaaacaaacaaagttttcttaaaaaaatgttacaggagaatttttttcatcggttcttaatacagtacaatccttttgttgaacaaaagtcacactggcaatgattatttacagatccaaaatagactcaggcttcagacataaaaaatttaacattcatctagttcagtgattagtcacagaanttaaacatctgcccagatgtacacaatttggtaaaaactacagcttctctccacggggagcccagngcccgtgccgntccgcgctccgctcccgaggncttccnggggaggggcctgtgctggcagcagagccagtcggtggccctcccccgng

SEQ ID NO: 1778 - DNA, 421 bp, Homo sapiens
  I.1778 (R44799)
ttttttttttatttcatagaaagcattttattatcagaacagtatggttttcctatgtttaagatctatttattatgttatttttacaagtagcaaagtccctccgtttttttccccaggtgaatgtacatgaatataaaaagcggctgatgtccacactgctcggcccacccgcatcagggtcggcaggaagttgcggctgatgagcagctcccggagcgttggggcggggcctcctcttctccagttccagtacgctcatcagtcgtcctcctgctgatttctcttcagcttaaggaagtctattagcttgtgagcgtcctccccagtagagaggtctacaaagtccttggggtaggccggtaacttcaaatagggggctggggctgggacttgtcactttcactgttttgtggcaacg

SEQ ID NO: 1779 - DNA, 363 bp, Homo sapiens
  I.1779 (R44773)
  misc_feature (19)..(19): n is a, c, g, or t
  misc_feature (69)..(69): n is a, c, g, or t
  misc_feature (76)..(76): n is a, c, g, or t
  misc_feature (150)..(150): n is a, c, g, or t
  misc_feature (160)..(160): n is a, c, g, or t
  misc_feature (165)..(165): n is a, c, g, or t
  misc_feature (179)..(179): n is a, c, g, or t
  misc_feature (287)..(287): n is a, c, g, or t
  misc_feature (325)..(325): n is a, c, g, or t
ttttttttttttcacttanaaagaaccatttattcatctgttgattttcattcattattttcatcaatnacaattnttcctctcctgcatcagaggaaatcacaaaagacctgacagatttacgtagtcaactgagtgcgtaggttgctnaattagtagnacatnagtgagtgctaatnggataagagagcattggttttcttatataaggatattggatgacattgtaaatgccctttggaccaactcaggacaagggtacaaaatggggcccatggatggagctntgagcccagctcaccactgttcaactctcttctctganacaaattgtccatggggacccgtcaggcatctgggggg

SEQ ID NO: 1780 - DNA, 409 bp, Homo sapiens
  I.1780 (R44625)
  misc_feature (340)..(340): n is a, c, g, or t
  misc_feature (350)..(350): n is a, c, g, or t
  misc_feature (359)..(359): n is a, c, g, or t
  misc_feature (404)..(404): n is a, c, g, or t
tttttttttattgaactaggtctgcatcagtaatgatagtcattgtgttcccctgggcctaagagtgatcacttggcagtggttggagccaggtgtgtgccaggcagaaattttctcctatatccacccccaggaagacctgaagtcctgctgtcctggagcagaatagaggggtctgggacatggacccagactaaaccagccatcctgggagggcaggcatcagggtggggctgaaccattaccccactctgggaatacagagggactgcactgtgggagaacaccaggggcagccctctgaaggtctggggtccctccggcccacctgggggtattntggtttcgantgggttctnttgctcattttgaagcaccctgcgcctttggtcttttgttacctntctgg

SEQ ID NO: 1781 - DNA, 445 bp, Homo sapiens
  I.1781 (R44614)
  misc_feature (160)..(160): n is a, c, g, or t
  misc_feature (329)..(329): n is a, c, g, or t
  misc_feature (368)..(368): n is a, c, g, or t
  misc_feature (426)..(426): n is a, c, g, or t
tttttttttttttttttttaccttgtaaaaaactggctttatttgtcacttattcaccttatctcagttatgccattttggcgtccacagtgacagtcccctggaagctggggtcagcccccacccacccaccgtgaccatcacccacagggcgtgagtntgggccttgcagggccagccgatggttacaggctgcaggcgggactatggggctcctcctgaggcctgggtgccttccagccccctgcccaccagcttgggtacagctgcctgcctgccagaggcaaggcattcccaagcgtgggctggggggaggccctgcccctctntaggcagcagagcagacaggggcagtggggagaaccatnttgggtagggaggggcattcaagttttcaaggagcctttttccccttgcttcaaggantttgggttttaggaaaaag

SEQ ID NO: 1782 - DNA, 426 bp, Homo sapiens
  I.1782 (R44543)
  misc_feature (393)..(393): n is a, c, g, or t
  misc_feature (405)..(405): n is a, c, g, or t
ttttttttgttagttaaatagtttaatcagagcggttttacagttctaaaattaacaagcagacttgtaataaaagagctccaatgtttgcaaaatgaccttgtttccattctgaatctgactttttaattgtaaaggttagcattacatttaaaaggactcaaaatggaaaaaatggagtgatgtatattatcatccgtgttttgtgacgcaactggatggaaatccctggaatgggatattgcttcagctttgatattaaaaaatgggcctgacaaggaaggtccttaatcaacaaaactgatcacagggtgggctggaaaggttgaggcaaaaccccaaagctactgttcaggtttcatattgtatcacattgttggtggggtggacacnggctcccgggtntacattaggccccgggcactt

SEQ ID NO: 1783 - DNA, 385 bp, Homo sapiens
  I.1783 (R44508)
  misc_feature (244)..(244): n is a, c, g, or t
  misc_feature (255)..(255): n is a, c, g, or t
  misc_feature (310)..(310): n is a, c, g, or t
  misc_feature (359)..(359): n is a, c, g, or t
  misc_feature (370)..(370): n is a, c, g, or t
tttttttttttttttttttagtcagaaatatagctttattatcataatatttcataatctaaaaacttctttaattctggaacagaatattccaacttctgtacaactgactggccctgcagaatactggaaaacaatgtctaagcaacttgaaccttgcagataagaacctgtaacctagtttgggaaaaaggggaaaaaggcaagaaaagcgggttcaaagggaaggatttcttccctacangacaaataaanttaaatctactctccatttcaaccttggaacatagtttcccggaaactttggggngattttctttccaaaaaggcaacccgccttaactcttggggtcacgggncctgtgggggnccagggaattttttt

SEQ ID NO: 1784 - DNA, 414 bp, Homo sapiens
  I.1784 (R44477)
  misc_feature (154)..(154): n is a, c, g, or t
  misc_feature (218)..(218): n is a, c, g, or t
  misc_feature (337)..(337): n is a, c, g, or t
  misc_feature (344)..(344): n is a, c, g, or t
  misc_feature (353)..(353): n is a, c, g, or t
ttttttttttcagtttgtggaagcctcattttatttaaccaatttcctattaatggacatatagatttttaacaattttctactattaaaataatactgtaatgaatatcacatgcaaacatcataccacactcgtccagttatttcttagggntcttaacatggaagaggataaatatatatttaaaatttaggatatctacagcttaaccctcccnaagggattaaacaacttacattctcaccaagggtaggtcctttttttgccctcaccctcattgacactgggatgttggtcaaatttaaaaaaaatcctttaacaatctggataggatgnaaaggtngttttgggnttactgggggcggtgttttttcagggggttttttggtttttgttttttggggtggggggtt

SEQ ID NO: 1785 - DNA, 452 bp, Homo sapiens
  I.1785 (R45601)
  misc_feature (386)..(386): n is a, c, g, or t
  misc_feature (413)..(413): n is a, c, g, or t
  misc_feature (431)..(431): n is a, c, g, or t
  misc_feature (442)..(442): n is a, c, g, or t
tttttttttttttaatgtttaaaaggtttttattaaattatacaaaaacaggcagttagaaattgtgttttcttcctgccccattgacatttctaaggccctaatgcatttgttctgaggtttgacagttgaagcccttcaccagtgctagggaaataaagcctcctcaaccttaaggatttcagtgataaggagtctgaaagtctaggcacttcaggtaggactttgggatgaactaagaggttccacagttcaccctgttcatataactgtctgacaggaaataggggggatgagggtctattaaaatgggaaaggggtgggtattttcgtttttattggggtaatggaatgatttggggaataggaaggcatacaggaactgncaaattttccagggacgttagtgtacngggccggggcccttttgnaattccagggngaagttgggg

SEQ ID NO: 1786 - DNA, 437 bp, Homo sapiens
  I.1786 (R45589)
  misc_feature (23)..(23): n is a, c, g, or t
  misc_feature (150)..(150): n is a, c, g, or t
  misc_feature (250)..(250): n is a, c, g, or t
  misc_feature (296)..(296): n is a, c, g, or t
  misc_feature (321)..(321): n is a, c, g, or t
  misc_feature (385)..(385): n is a, c, g, or t
ttttttttttcttcatgaaacanttataatttaccctttgaaacaccttcacataaaaatatttttgacatatacagtatcttttttagaatatttggaaatatatatctacaaatgacctaggggttttagttaagtgttatttttttntctactttttcttgtatctttgaaccatcttccccctcttttctctctcattctgtctccttctgacatgaactttgctctttcgcttgctctgtcagantcctgtctccaagctgcatagtctgctttgctccaggactgccagnacaggggactcttgttcttaaatgnaattatggaaaataagggaaactttcaaattctttaggacagagggcaataaggcggtgggggnattactgcgttgaggaaccataatttaaatttcccgtggcggagggactgaa

SEQ ID NO: 1787 - DNA, 508 bp, Homo sapiens
  I.1787 (R43753)
  misc_feature (4)..(4): n is a, c, g, or t
  misc_feature (45)..(45): n is a, c, g, or t
  misc_feature (329)..(329): n is a, c, g, or t
  misc_feature (402)..(402): n is a, c, g, or t
  misc_feature (439)..(439): n is a, c, g, or t
  misc_feature (448)..(448): n is a, c, g, or t
  misc_feature (453)..(453): n is a, c, g, or t
  misc_feature (473)..(473): n is a, c, g, or t
  misc_feature (502)..(502): n is a, c, g, or t
tttnttttacatgagaggaagaggtctttataaataactcctggnttaaatggagctgaaaataggaagacaaaagaggaagccaattgctaagcacttattgagtcaataacattggcttggaagccatagtgcaagtggctggtttggtttatttccttctcatcaaaagagctaacgcaggattgaacctgggggcaccaaggaccgcatgtgtgtccgaggatgtgtctgaaaggatgtggtgcttctcagatgatgatgtctcgactaagacataacccagggccttgggttagatcttctcggtgttcacagaagaacctgtncgggtggtgtggcttggctgtttaagtccctgggacctcttgagattcacttttctttcacttgggaaggttntagttcactggggtttggctttctaaagctcttgagnttttagatnagcantttcataagccaaagtcttncgatattaaaacacaggaacccaaaagtnttgatt

SEQ ID NO: 1788 - DNA, 484 bp, Homo sapiens
  I.1788 (R45240)
  misc_feature (215)..(215): n is a, c, g, or t
  misc_feature (249)..(249): n is a, c, g, or t
  misc_feature (306)..(306): n is a, c, g, or t
  misc_feature (324)..(324): n is a, c, g, or t
  misc_feature (417)..(417): n is a, c, g, or t
  misc_feature (438)..(438): n is a, c, g, or t
  misc_feature (446)..(446): n is a, c, g, or t
  misc_feature (460)..(460): n is a, c, g, or t
  misc_feature (478)..(478): n is a, c, g, or t
ttttttttcacatggacccgggaccgagacctgcgctccagacacggggcaggttttattgtcacagcagctgacggcttccccggtgctgggttgccagggagtcccaggcagtcctggtgctgctgagatgggcgctgcctcctcccacccacagcgcgtcatcccctcaccagccggcacctgcaggctcccctcctgaagcggactcgggntcacagggaacacccgcacccagaccgtgccgtntggcaggcactttcggcctcagtgccacggccccttccccagggccgttcacacccntggggggccacagaggtnttttgcacagcagggtttcctcctttccctggggagggcccatgaaagggagacagattttgggccgcaggaccttgtttgtttaaggggggnaaccttgggacgaattaggtnacggtttngggttcaattgggnaaggccttttgacatttnaggttt

SEQ ID NO: 1789 - DNA, 389 bp, Homo sapiens
  I.1789 (R45218)
  misc_feature (191)..(191): n is a, c, g, or t
  misc_feature (316)..(316): n is a, c, g, or t
ttttttttctcaaggtatttcttttgtaaaggagccagatttggcaactagactgaaaatcttccaaaattctgtacaaatgtgtaatatacaaatatacacaaggcttttgccaagaaaagacatcacaacaaatgacagaggtggctttggtgtcacataccacctacagcatctcaaacccctaggantgtgaggggctgatggaccacaacataggctacacatgtaaacacgctacattacactatgtacactggagtataaacaatccactgtcctctccggtctgttcacaaggccctctggcggggangggaagggccatttcaccggggcaacccacattaagggggaacttctttaaggtggggaggggagaaccctgc

SEQ ID NO: 1790 - DNA, 284 bp, Homo sapiens
  I.1790 (R45159)
  misc_feature (77)..(77): n is a, c, g, or t
  misc_feature (245)..(245): n is a, c, g, or t
ttttttttgggtgagcactcaggggtttatctgaacttggaaatgctacagagccaagagtatggggtgggccttgnccagggcgctgcttccctctccttccacctgcaggctcttcctgagcttttctcctggcttctccaggatgtggtcgctctcggtgtccagacaaacccagggaggaaggctcagcgttcctcggggcagtgcagaaaatgtcctgtcactcccagaggccctgggtncttagccccctgctgcccagggcttcccatctgaccaac

SEQ ID NO: 1791 - DNA, 329 bp, Homo sapiens
  I.1791 (R45138)
  misc_feature (98)..(98): n is a, c, g, or t
  misc_feature (131)..(131): n is a, c, g, or t
  misc_feature (147)..(147): n is a, c, g, or t
  misc_feature (236)..(236): n is a, c, g, or t
  misc_feature (311)..(311): n is a, c, g, or t
tttttttttttgctttttataccactttattccaacctggagcacctcaatataaaactaaacactggtgaaccgttttcctaattctgcattatcanaaatgtacaagttctcctagcagtccaacactnaaatagattaaatcanctctgacacatggtagctttcatataatgaaaatacctaaaataattagtgcaatatactgaactgatcaaaataaaatgaactttggnaaaggtaggctgcaagattgttactaacatattgcaatactttatgttacaaattacggggtacattgtttattntggggtctaggccatggg

SEQ ID NO: 1792 - DNA, 419 bp, Homo sapiens
  I.1792 (R44419)
  misc_feature (306)..(306): n is a, c, g, or t
  misc_feature (315)..(315): n is a, c, g, or t
ttttttttgtcagacaccaagccccaggcctggccctagatgtattttttcttgaggtaccagtaggcaaagtagcccatcccacccagggagcccatgaggaaggacgccccgaagaaggatgggggtttcctcttgaccagccggaaagcattggggatgacggccgacagcagggtggtgtggatgtcacccagggactttccggaaggcaaagcgtctctgggaccctctcaaagaaggactgcaggttggggccggctgccatctttcccagtatttcttgggacagtcccagggaacttnagggcggtncaggggtggctcccagggagggacattcagcgagggtttaagggcacagccacagagccacagctcgcttttttgcccctcgttttttccagtttcctcttttt

SEQ ID NO: 1793 - DNA, 431 bp, Homo sapiens
  I.1793 (R44909)
  misc_feature (267)..(267): n is a, c, g, or t
  misc_feature (323)..(323): n is a, c, g, or t
ttttttttttttgaggctaaaatcatttaattatacacaggccacaattgcaggatggaaaggcagtgggcacttggaagtgactacacatggcaataagcagcctatcttctttaccaaccagaagtttcttggggcatgtgatggtaggccagaccctttccaagggaataatactacactaagcctacactgtactgtgagagtcatggtggaacaaggccacaggcagtgggaggaaatgtgatgacttcactgtgttcaganttctaaggcccagcatgatcaggatgtaaggctccataattttctaaaccaggaanttatgaggaaggaacaaaattctggcaatcacttatgtttttttcttcttttttttttttggggacagagtttcactcttgttgcccgggctgggagtgcagtgggcc

SEQ ID NO: 1794 - DNA, 288 bp, Homo sapiens
  I.1794 (R40908)
  misc_feature (47)..(47): n is a, c, g, or t
  misc_feature (120)..(120): n is a, c, g, or t
  misc_feature (158)..(158): n is a, c, g, or t
  misc_feature (229)..(229): n is a, c, g, or t
  misc_feature (263)..(263): n is a, c, g, or t
  misc_feature (282)..(282): n is a, c, g, or t
tttttttttttgaagttaaggcaacatttatttgatttccttataancatattatctaaggcagaagtggtggttacttggcaagaatacgatttcttttaatgtcttctatagttgagntttagctcagaaatacatcatatttcactggttcaaanctgagagaatgtacttctagcatgggctcctattcatggatcaatgcatttttgtgtcaccatggtcttgnatcaaacttaatcactgtttcaatggccagggcntggccagtttctggccagnctcctc

SEQ ID NO: 1795 - DNA, 366 bp, Homo sapiens
  I.1795 (R40880)
  misc_feature (329)..(329): n is a, c, g, or t
  misc_feature (354)..(354): n is a, c, g, or t
ttttttttatggtaataacattttaataggtttaaaccaaataattctaatatctctaaaaataatcaatttgaaatgcttaggatatggttcttttttttataattaactcatctttgagcaaacatgtaatgttgagtttaatatcagtgtcaatttcttaaatattaaggtatatgtagtcttgtttgggatcagtggggggaaaaaaagtgcatttcctaaaaggtaattgtattgtatatttcagggagagtagggggtgaggatttacacaatgtccttttgttattttctcttcccggttattaaacaaacaaacacaacancggaaggctctggttctttaccggnttttgggtaaaa

SEQ ID NO: 1796 - DNA, 329 bp, Homo sapiens
  I.1796 (R40697)
tttttttttcatgcaacaaattttatttaattatactcagagcacaacaatgcatttatgacctcaatgtctatgaagttcattgatatatatgctttaaataataattttgtaatatttgctgtttctttcattcacataagtttaatttaaaaactggtctttccccttaccctccatactttcatattcattaatccagtaggctacatgtgttctaacactctcatctaggggaatatttatctcaataatatggatgctttgcaaattctcttcattaccataaggttggcatctcactgtaaatggtcttgggccgggggcat

SEQ ID NO: 1797 - DNA, 296 bp, Homo sapiens
  I.1797 (R40406)
  misc_feature (180)..(180): n is a, c, g, or t
  misc_feature (199)..(199): n is a, c, g, or t
  misc_feature (229)..(229): n is a, c, g, or t
  misc_feature (270)..(270): n is a, c, g, or t
  misc_feature (287)..(287): n is a, c, g, or t
ttttttttttttaaccaatccgttttttaattcttaaattcttgacattacagaactaaactgaaatttattaacattccactcttacatttcttatcgacaaacagaaataaaattcatgagccaaaaaacccaaaacaaaactaaaaacagggaaaagcttataaaactaaatatggntcccagcattaacagctgnaacagagaatgtgatttttaaattcttagncgggatgataaagttgtgtaggaaactggaacacttacaanttatttaaaaccggggntcactgacc

SEQ ID NO: 1798 - DNA, 468 bp, Homo sapiens
  I.1798 (R40147)
  misc_feature (111)..(111): n is a, c, g, or t
  misc_feature (144)..(144): n is a, c, g, or t
  misc_feature (259)..(259): n is a, c, g, or t
  misc_feature (285)..(285): n is a, c, g, or t
  misc_feature (444)..(444): n is a, c, g, or t
  misc_feature (459)..(459): n is a, c, g, or t
ttttttttttttttttggagggtgggcagcactcgctttattgtccagcattccacatggatagacgcaggacagcaggccagggtggtgggctaagaggcagcctgccgngcctgatgctgctgggcaaaccgctgcatccgntcctcgagctccggccgaaagtggcggatcagaccctgcacaggccaggcggcccgtcacccagagcacaaatcgtatggccttctatctgcttgctgatctcccacagggagtncgatctcggccggccggcatcccccntcacgaaacgtgccatcaccttgttcatccagtccacaccctcacggcatggggggtacactgggccacagtttttcgtgcttataggaacttaatgagggcggggcgatgggtttttcacgatgttcccttggaggcggtccattgacgattcaacgnagttttgcccggggnttttttttt

SEQ ID NO: 1799 - DNA, 263 bp, Homo sapiens
  I.1799 (R39996)
  misc_feature (39)..(39): n is a, c, g, or t
  misc_feature (195)..(195): n is a, c, g, or t
  misc_feature (222)..(222): n is a, c, g, or t
  misc_feature (244)..(244): n is a, c, g, or t
tttttttttttttttttatcaaatgaatactttattagnagacataacacgtataaaataaatttcttttcatcatggagttaccagattttaaaaccaaccaacactttctcatttttacagctaagacatgttaaattcttaaatgccataatttttgttcaactgctttgtcattcaactcacaagtctagnaatgtggattaagctacaaatctaagnattcacagaatgtgtcttaggncttgggtttgtaacaatct

SEQ ID NO: 1800 - DNA, 360 bp, Homo sapiens
  I.1800 (R46713)
  misc_feature (297)..(297): n is a, c, g, or t
  misc_feature (307)..(307): n is a, c, g, or t
ttttttttttttttttacctaagaggctatttattttaaggaaagttgattaatatttaaatgattaaaaaataaatcaatgttaagtattaactgcacaaaatctaaaaaaaagaccacattacatcatactacattatatagatagatttaaagcagctaactagaagcctttttaaaaatttaaagtttctgacatcattttccaccattccatcaattcttccttctgctcttctttcctttcagaaaatgactccagttcaaaatcaaccccagcagcagggctgttaaggnactgccactntctttgttattgccagatagcctgggggctgaggctgtaagtttatagtttcc

SEQ ID NO: 1801 - DNA, 399 bp, Homo sapiens
  I.1801 (R46700)
  misc_feature (189)..(189): n is a, c, g, or t
  misc_feature (333)..(333): n is a, c, g, or t
  misc_feature (345)..(345): n is a, c, g, or t
  misc_feature (355)..(355): n is a, c, g, or t
  misc_feature (361)..(361): n is a, c, g, or t
ttttttttttttttttttgaactttagaaggtttattgttgatagagctgtagtgattctgaaacttgtatttatggtagcactgagcaaatgagtgaaatatattgagaataatgggagccagggttattactgctgtggtaagagagacaatacagaatgggggaaggcaaagaagcacccatggtnttggattaaaagtttcagtatgaactcatgatttaaaagtatgataaatatgtattcatatatacatgtgtcccacatatatatacacacacttatttgccataaattttcctagttctgtctgctgaaatgcctcaaaggcantgatatccagtntcagtgtgantacctngtgccaattttaggcttctaaatggacatacctactaa

SEQ ID NO: 1802 - DNA, 311 bp, Homo sapiens
  I.1802 (R46832)
  misc_feature (141)..(141): n is a, c, g, or t
  misc_feature (162)..(162): n is a, c, g, or t
  misc_feature (165)..(165): n is a, c, g, or t
  misc_feature (187)..(187): n is a, c, g, or t
  misc_feature (196)..(196): n is a, c, g, or t
  misc_feature (233)..(233): n is a, c, g, or t
  misc_feature (247)..(247): n is a, c, g, or t
  misc_feature (263)..(263): n is a, c, g, or t
  misc_feature (300)..(300): n is a, c, g, or t
  misc_feature (307)..(307): n is a, c, g, or t
tttttttttttttttttggaaaagaagtaatattatttaacaattttctgacttaaatatcttcacataacaaaagttttcatatcaccgtcaatattacttatatacatatgccaaaagtgaacaacaacaacaaaaaantcaaaagatgccctttcaaantancagtaaaatgtctatttctttngggttctgnaaatgggctcctctcttaatatacaaggtccatacantatttataataaanctactctcttctgaanccagggggggcaacggggggaaattaaagggcatttntttttcngggg

SEQ ID NO: 1803 - DNA, 411 bp, Homo sapiens
  I.1803 (R46801)
  misc_feature (399)..(399): n is a, c, g, or t
  misc_feature (405)..(405): n is a, c, g, or t
tttttttaacttagaatctaatctttattaacctgggatatcacagaaaatacttgggcctgccacttgtatttctttgtcctcaatactgaacactagacacatttgaaaccttcctcagaaggaaacaaaccaactggttatgcctgggtggtggcatggaagatgcccattgttgcccaatttgctaataagtattttgaaattaggaaatgaaacatgaggtccaagcctgtccagttccctacccaacccattcctcctccctggggaaaaaggaaacccgtattcatcttccaaatttctggattcatcactggccactttaaaaatggaaccgttttggaatttttaaaatgtggaattaactcaagtattcttttcttttggggatggccnaacctncggcca

SEQ ID NO: 1804 - DNA, 396 bp, Homo sapiens
  I.1804 (R46796)
  misc_feature (381)..(381): n is a, c, g, or t
ttttttttgcgcagtcaaaccttttaatgatgtggttctggtggggtttataaagggaggtggacccctgggaagatgctttcctgaaccacaacccccacacttgggtcaccatttcctcttcctcctccttgtgtgggtggccggagacctgtaggaccttccctccctttagggttctgtaagggccccttctcagtcctcagagtccattcttctcttgtgctgaggcctgcagtgggaccatatacttctgggtgctcttgttgctgtcgcgtctgtttccctttcctgctctccagggtcctgcaccgtgtctgggcagtgggctgggcccaggggtctttgggcagggagggacagtgaacagcgttgggcggnccacagggaacagca

SEQ ID NO: 1805 - DNA, 492 bp, Homo sapiens
  I.1805 (R46239)
  misc_feature (319)..(319): n is a, c, g, or t
  misc_feature (356)..(356): n is a, c, g, or t
  misc_feature (422)..(422): n is a, c, g, or t
  misc_feature (445)..(445): n is a, c, g, or t
  misc_feature (474)..(474): n is a, c, g, or t
ttttttttttttttaacgtctctgccattttagtgtcatgttactgaaacttcccttccccagtggctcagttcagagccttctgtgtgaagtctttaaacaacggtgtttcagggtcctcaacagcaataagatgggacacctctcagggttctgcttgctcctatttcagtctcttctcactcaggagagtccatgcttcctactggttgggcagtttcagggctgacccaacatggggtaaaacaagaggcacctgccattttcaaggagagggcaaacagggcttcacccggggatacctgggggctttgggggngtctttccaaggaaggccctgtccacctggggaaagntttttccttccagactgggctcttctttccactttgcagttccctccttccttgggctcaggggantgtaactgggctgggcccagggnttttgggccacagcagttcctaggggggnaccagaaggagcacattt

SEQ ID NO: 1806 - DNA, 415 bp, Homo sapiens
  I.1806 (R46383)
  misc_feature (168)..(168): n is a, c, g, or t
  misc_feature (289)..(289): n is a, c, g, or t
  misc_feature (409)..(409): n is a, c, g, or t
ttttttttttttttttaaagtcacaagaattttctttattatagcaaatactttcacggcatttgacagaactcagaactatttacaaagaaagaaagaaaaatcaaacaaccaaaagatacatttcatataataggaaaatataaaaatcgaagccaagtgacagantgaaaaagttagctaagcaatggatttgaaaaacttcgattctaactatctgacttgttgctaattgtccaaacatataataatttaagatggtcttttgagacttcctaggaagtaaaanggaattattgaaaaaatgttcaaatatttcataaataaataccaaaaatatttattttcattgtactttccgacttgcttcagtgaaggtgtccttttacaacactctgtttcttgtttncaattc

SEQ ID NO: 1807 - DNA, 470 bp, Homo sapiens
  I.1807 (R46372)
  misc_feature (200)..(200): n is a, c, g, or t
  misc_feature (371)..(371): n is a, c, g, or t
  misc_feature (431)..(431): n is a, c, g, or t
  misc_feature (445)..(445): n is a, c, g, or t
  misc_feature (455)..(455): n is a, c, g, or t
  misc_feature (467)..(467): n is a, c, g, or t
tttttttttcctcgaatgacaatcagttttattgcatgagttatggtgtccaaatgagttaatttgcttttttcaccgtctgagtcaaaataggccacctgcaggcctcatgcaaaatgtagaaactggatagatgatttaagcctcaaaaacgcaagtgattttttggggtgcacgcaggagagggcggatctggggtntggtcagcagatgaccagccgtggccttgaaggcagtttccagtctctgcagctgcgggatgagggtgaagccccccatttgctctgctcagcctctctgttgagtatttaagaaatcctgattctccgtgttctgccagggaggatactgcagaaggagtgggactggtntggccattatttcagcatcttcaccatgttacgggccttgtaatctgtagccgatttttncataataatttccngggggccganccctgatatcanagt

SEQ ID NO: 1808 - DNA, 470 bp, Homo sapiens
  I.1808 (R46366)
  misc_feature (348)..(348): n is a, c, g, or t
  misc_feature (434)..(434): n is a, c, g, or t
  misc_feature (454)..(454): n is a, c, g, or t
  misc_feature (462)..(462): n is a, c, g, or t
ttttttttttacattgaattacaattattactatatattaaattgaaacaaaattgagatgcagtaatatatgggctttttaattaatacatcaacttacaggatctgctatcattccaagaggtgacaaatatgaacaatacttcaagatgccctttttatgttacattacagttgctgtaactggtttgtattggtgggaaaatcccagggtactgcttttactactgtgatttattgccagcatttataacttgggagtaaggctaaatttcagtttcattgctgaaaataaagatgtaacattttcttccatcaagttcatggttacccctgggcttctatccngggtaaggaatccctggcctttaggggaaaatttctgggacattaatcagggacactcctggaaggaggttttaaaggaaggaggntaaggaccccacttcaaggntttcccantggcagtt

SEQ ID NO: 1809 - DNA, 484 bp, Homo sapiens
  I.1809 (R46156)
  misc_feature (380)..(380): n is a, c, g, or t
  misc_feature (387)..(387): n is a, c, g, or t
  misc_feature (405)..(405): n is a, c, g, or t
  misc_feature (425)..(425): n is a, c, g, or t
  misc_feature (466)..(466): n is a, c, g, or t
  misc_feature (481)..(481): n is a, c, g, or t
tttttttttttttttgagatggagtcttgctctgctgcccaggctggagtgcagtggtgtgatcttggctcaatgcagcctctgtctcctgggttcaagcaattctcctacctcagcctcctgagtagctgggactataggtgcccgccaccatgcctggctaattttttctatttttaatagagacggggtttcaccatgttaccagggctggtctcgaactcctgacctcaggttttaaaaagtgggttacttgatccagaaaatccaaaagctttgggaaattccagggaaagcaactactcttttgggcagtgggactcttccaggggttgtttaatcccacttctgacacaatatgggatgggactaggggaggnctttccngatttattccaaatgggntttacccaaggcatgccatncattttttcccaaggcaaagccccaaggggggtttttaaantttcccaaagtggtnaat

SEQ ID NO: 1810 - DNA, 383 bp, Homo sapiens
  I.1810 (R46116)
  misc_feature (53)..(53): n is a, c, g, or t
  misc_feature (116)..(116): n is a, c, g, or t
  misc_feature (189)..(189): n is a, c, g, or t
  misc_feature (232)..(232): n is a, c, g, or t
  misc_feature (293)..(293): n is a, c, g, or t
  misc_feature (324)..(324): n is a, c, g, or t
  misc_feature (355)..(355): n is a, c, g, or t
tttttttttttttttttttttttgtagttttggcacttttacttggatttttnaaagaaagtgaatacaaatatctttgtacacaaattctcgttctggagaaacaggatgtaganttcaaaggtgccaacatctcccttcttaaaaataacattgaaacgggtaactgtacctgttaaatatcctggnttggacaacttttaaaatctggacttccacctaactccacaantttgacaaagttatttttgtttgtgtaagtgatactgggttatccacttccaggtacatgntaccatttgggccagagggtccattaaatantatttaacattttcagtgtgggaaatcttgnaggttctaagggggaaattttggctcgg

SEQ ID NO: 1811 - DNA, 338 bp, Homo sapiens
  I.1811 (R46087)
  misc_feature (210)..(210): n is a, c, g, or t
  misc_feature (216)..(216): n is a, c, g, or t
  misc_feature (282)..(282): n is a, c, g, or t
  misc_feature (327)..(327): n is a, c, g, or t
  misc_feature (336)..(336): n is a, c, g, or t
tttttttttaagtgagacaacatatgggactttattaaataaggtgaatttgggacaaatgaaaggtgagatgaaggcaaactactgtcaagggatgatctgagcctgaacaactcagtgaatgtgaagagaaaacaagattacatgtgaatatagatgttaactggaaaagcaaggagaaaaaaagggagcacaaggaagaaaaaaaantcaaantttgtgagccatctcaagccatcaaaaaaacttcattctattgtagggagggaagctgggaaacantgggcagagtaattttgtgttaaggaattaaagtactaggctccngtttgggcntt

SEQ ID NO: 1812 - DNA, 401 bp, Homo sapiens
  I.1812 (R45373)
  misc_feature (266)..(266): n is a, c, g, or t
  misc_feature (391)..(391): n is a, c, g, or t
ttttttttttttagaagccactgttgtctttataaaacacagaattgtgctgctgctgctgctgctgctgatgttgcttgcttcagaaggaactgtacattacagctgctgggataatttcacaatggactggacaaggtacagctcaaagcaggacacaaacacaaatctcaaagggaaacaaatgcaaacaagtacacagctgtggggatccagagacatttccccatccatgctggacttgagagggataaaaagtttagganactaaagtgaaaaccagagtaggtcacacatgcccaccacatgggctgctaaggtggcaacattcacattaccaattagggctgggactgtgtggcacagggaaagtaattttcatttttccttntttgctacta

SEQ ID NO: 1813 - DNA, 425 bp, Homo sapiens
  I.1813 (R45355)
  misc_feature (109)..(109): n is a, c, g, or t
  misc_feature (278)..(278): n is a, c, g, or t
  misc_feature (294)..(294): n is a, c, g, or t
  misc_feature (319)..(319): n is a, c, g, or t
  misc_feature (330)..(330): n is a, c, g, or t
  misc_feature (387)..(387): n is a, c, g, or t
  misc_feature (402)..(402): n is a, c, g, or t
  misc_feature (417)..(417): n is a, c, g, or t
tttttttttcccagtgaaagggtcctttatttccacgttcaacggaattggtctgtgctgctgccctacccctgcccctgtcagggagccacgggagggggctgggccncagaggtgcctgacttcccaatgccgaggccttgccatctgctggaagagggtctgggagaggggagggatgccaagaggaaatgctgaggagtcctgggcagaggccagcatgcgggcctggccacagggcgattcccagacaggacagactggaatggcagccaggnttgcacaccctgggtnggcctcccgcatgggcaagtgggtnccgcaggcttnggtctgggaaagcgtcaattaaaggtcaactggggttgccgggggcacagaggcgtnctcctgggtagcctnagcaccctgaacctnggcgtttt

SEQ ID NO: 1814 - DNA, 364 bp, Homo sapiens
  I.1814 (R45645)
  misc_feature (120)..(120): n is a, c, g, or t
  misc_feature (186)..(186): n is a, c, g, or t
  misc_feature (268)..(268): n is a, c, g, or t
  misc_feature (344)..(344): n is a, c, g, or t
ttttttttttttttttttgcatttctttgttcaaggtgtttattgcatctcagagggcgtacatgcactgggtttttaaactgaaatacaaagaaagccattttgaaattggttttaggnaatttttccccattacagtgtatgttatccccacagtaaattcagatacaaccacttttaaatggnaccatacatctattaaataatttgaaaaataggcaaacacctttccaacccaatatgcttttatgaagagctgccaagctanctagcaacactgatcaacagtgacctcatttatggcatcaaaatcttaaggccaagccatcaggcacaggacagtntggacaacaatttaaaactt

SEQ ID NO: 1815 - DNA, 214 bp, Homo sapiens
  I.1815 (R44205)
  misc_feature (70)..(70): n is a, c, g, or t
  misc_feature (120)..(120): n is a, c, g, or t
  misc_feature (123)..(123): n is a, c, g, or t
  misc_feature (124)..(124): n is a, c, g, or t
  misc_feature (189)..(189): n is a, c, g, or t
  misc_feature (211)..(211): n is a, c, g, or t
ttttttttttttcacctggacagttgagtcagattgtaggaaaattaacccagatgggtctacatttttnttcaagttcaaaccacatggtttcctagtcagaaagtctcatggactttnttnntaagctgttctatgatcagaccacctcctaaatgtggcttttacccattacaggctacagttgantcaggcaggagcagctgctggnaga

SEQ ID NO: 1816 - DNA, 393 bp, Homo sapiens
  I.1816 (R44080)
  misc_feature (102)..(102): n is a, c, g, or t
  misc_feature (286)..(286): n is a, c, g, or t
  misc_feature (312)..(312): n is a, c, g, or t
  misc_feature (320)..(320): n is a, c, g, or t
  misc_feature (346)..(346): n is a, c, g, or t
  misc_feature (382)..(382): n is a, c, g, or t
ttttttttttttttttgccaaaacaaactttattgcaccaaaaaggaaaacaaaaaaaacaaaaaaacttcatttatatacagtcagatataaagacatctntttgactcctgtgcatatatttcctcaactcaagattagggcataaaagtcaggctgctatgccagacatgctctgccctatggcggagccaaggagaggattgtcacttgaaagtgggaacacttaaatgggatgacagacaacactgggacccacagaccaagagcattcttctaaggcccnggagtaggctcgagggattgggaagnaggggaanttgggaaggcaggggtccctttttcntttctttcatgtggaggaggaccccagccttttttnattcaaggggg

SEQ ID NO: 1817 - DNA, 397 bp, Homo sapiens
  I.1817 (R44020)
  misc_feature (233)..(233): n is a, c, g, or t
  misc_feature (275)..(275): n is a, c, g, or t
  misc_feature (277)..(277): n is a, c, g, or t
  misc_feature (333)..(333): n is a, c, g, or t
  misc_feature (354)..(354): n is a, c, g, or t
  misc_feature (390)..(390): n is a, c, g, or t
tttttttttttttttttttttatatgaatttagcctattttttatttctgtgtgttcatagtaaacatttttgtaagtgacaaacacgggcatatgaccacagtatcacaatcaagaaattttaagacaacattaacaatcactcaaatttatgcggcatttgcgcaacacaggttacatatttgcaaggtttacctataagtacaataggtattaacatttcactacatttngaaaaaataaaagtgacctgttagtgaccacatacatcaaantntacacaacacaaactgagggcaatcgttaattttgtccccttctgattcaattgantggggcagtgttgccaactgnaacaactttcctttttgtttgttttaatacttgggnatacccg

SEQ ID NO: 1818 - DNA, 442 bp, Homo sapiens
  I.1818 (R44014)
  misc_feature (26)..(26): n is a, c, g, or t
  misc_feature (364)..(364): n is a, c, g, or t
  misc_feature (371)..(371): n is a, c, g, or t
  misc_feature (417)..(417): n is a, c, g, or t
ttttttttttccacaaagtaaaaatnttttaatggtgtaaaataaggatagcctctgggaggcattgtttgcataattttctgttatcaaaaggagcaattgtatcagttattgcttgcataaaagacgaatgaagttctagcagatcataaaaagaccctctctatcaacatactatgagtctgagctggttgagaacccaatctaactaactttgcaataaactaacacatggatttttgggtgggatgcagttcccattccaaatacatttatctttctttgtatttatgagtgtgataggtaatcgatagatctttttcaacaaaaagccacctggatatctacatttcataattcctangcaagantcttaggggaacacctctggttaaaatatatggaaaattgggtccnggggttttccgtcataggtttaacc

SEQ ID NO: 1819 - DNA, 388 bp, Homo sapiens
  I.1819 (R43908)
  misc_feature (26)..(26): n is a, c, g, or t
  misc_feature (310)..(310): n is a, c, g, or t
tttttttttggctcttctgaactggnaaataataaaagtgctgttcaccgtgaatttaaaaaaaatacacagtataaacacacaaccttggaaacattttttgaggcacaaaatccctgacacaccagaggtacatggaaagacatttaacataaagagatcctttatatcatgtcacatcacaacttttaagatttttcttggtaatactcatgcaatatgcataaacaatatgggttgtggatttctaggcaaaatcaggatgaggattggcaaggcaagggaaaaacatagggtaatcccggtgggnaggaaaggctatttaaggtccttccttctttttccttttaaggcctaggaaggctgtgacttctttcccacacaaagg

SEQ ID NO: 1820 - DNA, 391 bp, Homo sapiens
  I.1820 (R43841)
  misc_feature (376)..(376): n is a, c, g, or t
  misc_feature (385)..(385): n is a, c, g, or t
ttttttttatatacaaatctctatagtgaccagataatctgatctgtgttgtgcaacatggagatgcaatgctgaggttttccaggagaaagagaaagggagggagttaaggtgatttgtagaaaaatctagatgccaaaggatgactttctataagggaagtaactcttatggagtattaaaccaccagacagccaactttctgatcatttatctcaggggaattcgctccatggggtccatggggggaggaaacctcagaggatgtgctgggaccaacttccttgggctagtgtgtgtatttgccccctaggcaaaggccaacaggctgtttccgggggagggcaaatgggttgccatgaggaaggaaacagtnccccccgangggttt

SEQ ID NO: 1821 - DNA, 390 bp, Homo sapiens
  I.1821 (R43280)
tttttttttttcattcttcattttatttgcatgtcccaacaactcatctcaaatactaaattcaaaagaaaaactgtagttctcctcagcattagcactaatttatggtaacaatcatttcttttaaatgtctaacttatttaaccccttcattttaaattgcaaattaaagcatgtatttacatatttatatacaaaaaacttcaaaaacaaattaatccaaatcttggtccaagagtttccactttataagtggtatggtactatgctatatatatcctcttccaaaagtctcttagggacttgggtaagttccaaatattcattcacaaatgggttcccctttaggcttaatggaaccatatacttcatttctgaggtaaattaggg

SEQ ID NO: 1822 - DNA, 525 bp, Homo sapiens
  I.1822 (R44328)
  misc_feature (58)..(58): n is a, c, g, or t
  misc_feature (375)..(375): n is a, c, g, or t
  misc_feature (428)..(428): n is a, c, g, or t
  misc_feature (448)..(448): n is a, c, g, or t
tttttttttttctcaacatggaaaaactgttcaggcacaaagattaaacaagcccgcnttgcataccttggattgtactgaatcactgggtcccccagcctccctacctacccctgcaccccagatctgccttccccatattcatggcctcctcctccaaagcagcccaaagcagcaatgatatttactattttatatcaatctcttggctatatatatatatatctatatatctatatatttgtctatcctatatatacatagggttttaatgctttggaatgaggtgaaggggtgaataggggaaaggaggcacatgaggtgagggtgtaaatgttcaccaaatggcattaaggggacatatttgtagggagnctgggacatgggggaaaggggactatttaaccaacgtgggccttgccgggggntgggaggaagtttttttcantgtggtcggggttagggccgttaggcaaggcggggtttgttcaggcagtacccccagtttaagggcggccggggggg

SEQ ID NO: 1823 - DNA, 372 bp, Homo sapiens
  I.1823 (R40774)
  misc_feature (352)..(352): n is a, c, g, or t
  misc_feature (370)..(370): n is a, c, g, or t
ttttttttttcaaattttagggatgatttttatttacaaaacagattggtacttttgttttacaaaaattacaaaaaatgactcttaaaaatagaaatagcttctcagactcttgggaactacttttaagcaaccaaggagttagaactcaggatggttttcttctttgtaacagcaacaatgaccacggctctgtgccatggcaatcactgctgagtgtcttctcctacaattacacaggcccgagctgtgtctgggtgggaaaggtctccactcagggtcagagtctgaagggggcaaggatcttcttcattaatgcaggaacctgtgcaggaaccaccatcagattctntccacagcggggagaccngg

SEQ ID NO: 1824 - DNA, 329 bp, Homo sapiens
  I.1824 (R40281)
  misc_feature (93)..(93): n is a, c, g, or t
  misc_feature (212)..(212): n is a, c, g, or t
  misc_feature (258)..(258): n is a, c, g, or t
  misc_feature (315)..(315): n is a, c, g, or t
ttttttttttgagggtattagctgtttactgacaaaagagacatttcaggacctcagaaggccagacactcccataggttggatggccctttngggagatctgagcccatttccacaaaatgcattcgttagacccacacacagtgcttgagccccctagacacagaatagtcttgtcctgttcttcaagtgactgggctatcatctgcggnaatagtcagcttccccccaatactgggggtgacgggagacttttangggtcatccccagggtttgtatgggcattcttggggggcaaacagcagaagggatgnctgccctgatgcct

SEQ ID NO: 1825 - DNA, 421 bp, Homo sapiens
  I.1825 (R40259)
  misc_feature (293)..(293): n is a, c, g, or t
  misc_feature (330)..(330): n is a, c, g, or t
  misc_feature (339)..(339): n is a, c, g, or t
  misc_feature (372)..(372): n is a, c, g, or t
  misc_feature (383)..(383): n is a, c, g, or t
  misc_feature (389)..(389): n is a, c, g, or t
ttttttttttcttattaaatgttttatttcttaacattcctacatattaataaatgttctatttcttaacctgatagtgggtacatgaatgtttattattctgtaaatcatattgtgcttatgaattgtttcacaattaaaaaaaaaattcatcccacctattccctttgctcaggttccatgctcattaaagaccattctgggtgatgctttgacttctattgtagctttgcctccaataaggcaaatgggacattgggtccatttgggcatgtggtaattctctttttagnggtgggtaaactggggggtacaagttttattttaggnaaaaaaggnatttaataaaaccaatggaatggcttagggtcnccttaattacncagggnccttattaaatgggaattaaatggggggctcc

SEQ ID NO: 1826 - DNA, 478 bp, Homo sapiens
  I.1826 (R40636)
  misc_feature (16)..(16): n is a, c, g, or t
  misc_feature (18)..(18): n is a, c, g, or t
  misc_feature (19)..(19): n is a, c, g, or t
  misc_feature (180)..(180): n is a, c, g, or t
  misc_feature (231)..(231): n is a, c, g, or t
  misc_feature (249)..(249): n is a, c, g, or t
  misc_feature (321)..(321): n is a, c, g, or t
  misc_feature (335)..(335): n is a, c, g, or t
  misc_feature (349)..(349): n is a, c, g, or t
  misc_feature (377)..(377): n is a, c, g, or t
  misc_feature (395)..(395): n is a, c, g, or t
  misc_feature (411)..(411): n is a, c, g, or t
  misc_feature (426)..(426): n is a, c, g, or t
  misc_feature (435)..(435): n is a, c, g, or t
  misc_feature (441)..(441): n is a, c, g, or t
  misc_feature (446)..(446): n is a, c, g, or t
  misc_feature (458)..(458): n is a, c, g, or t
  misc_feature (469)..(469): n is a, c, g, or t
ttttttttttctcggntnntttatttttatttttagtaaaaataaaatgttgcccaggctggtctcttaactcctgagctcatgcgatccttcctgttaggcctcccaaagtgctgggattacaaccatgagccaccatcgcgatcggcctgggttcattgcttaaagggacagcaactnttacaagtaggatgagaccctgcaccctgcaccaaagacccctagccaggngctgctgatttgccaggngaggatagggaaagtggggggtcctacccgggcctagggtatttccagtccagaagggtcgggagagggcgntccgtgcggttccnctgggatgatacgntgccgccggttctgtttgacagaaactntaggagggaagggaggtnagcttcggagcagganttcattcaggggttncgggaaccncccgtnaaagnattttaggatanccctaaggttnaggggtttt

SEQ ID NO: 1827 - DNA, 418 bp, Homo sapiens
  I.1827 (R40560)
  misc_feature (348)..(348): n is a, c, g, or t
  misc_feature (374)..(374): n is a, c, g, or t
  misc_feature (380)..(380): n is a, c, g, or t
  misc_feature (399)..(399): n is a, c, g, or t
  misc_feature (404)..(404): n is a, c, g, or t
ttttttttgcatgtaacttttttattgaggcacaacaaggcattgtaacttgcctggacttgaggcagtcagtttagtaagctgaacgttaatacagttaaggattaagtgcaaacaatatacattcacagcttgactagcgaggctacatcacaatttataaagtgccagattagtgctaattgtcattcagcttgatttttcacctcagggaagggaaaacaaaaaagtaagggacctcctccctctagggaacaaaaacattttcctaaaccaatcagtcatgaggggcaaaggactacttttccttccaatcccactaattaggaacaccatccttttattgtncaatactgttactggactttccaatncttggntaaggagggttgggcctgnaaacntggggttttttccc

SEQ ID NO: 1828 - DNA, 329 bp, Homo sapiens
  I.1828 (R40473)
  misc_feature (212)..(212): n is a, c, g, or t
  misc_feature (258)..(258): n is a, c, g, or t
  misc_feature (291)..(291): n is a, c, g, or t
  misc_feature (300)..(300): n is a, c, g, or t
ttttttttcactgtaactatttttattacattacaataattaggagtagtacagttcatgacaaaaatattacaaattttagatcacttcacagcacatactcctataaacatttaaaagttaatttcaattaaaagagtagtcatttttaatgtttgatatgaccaacattcctaggtcagcgcaaccaaatgatgggaaaacaactgggntcacactgcatatggtcccacaaaaggaaaggcacaatgtacaaantgtggcatgtttcaggtttacactatacaaaantggttaaantacattccgggggaaacatggttacatta

SEQ ID NO: 1829 - DNA, 321 bp, Homo sapiens
  I.1829 (R40218)
  misc_feature (13)..(13): n is a, c, g, or t
  misc_feature (167)..(167): n is a, c, g, or t
  misc_feature (235)..(235): n is a, c, g, or t
  misc_feature (270)..(270): n is a, c, g, or t
  misc_feature (276)..(276): n is a, c, g, or t
  misc_feature (304)..(304): n is a, c, g, or t
ttttttttttttnatgctcgtttattccaaatgtctttattgaaacagaatgatagagcaagaaataatgaggtctgggtggatgtctttgggcgcaggatggagcccagacccaatggttacagtgtggagctctctccctgtcccctgactctggccaaggaagngaatgcaaagcagcagggaggaggcagggttgggacggccctctgagctctccgcgatggctggcgtnaggttgcctctgagacttctgggcagccctgcctnccctantcagtcttcccgatcttcttgccacctntctgtgtgggccagcct

SEQ ID NO: 1830 - DNA, 168 bp, Homo sapiens
  I.1830 (R45480)
tttttttttttttttttttttttgaggctcacaaagaggcctttatttatctagctcaaagtagacactatcacaatcttgtttgttactccttttactaaaatagttcaaatcaatgtttttaccacactatcaaaaagttctatttcttcttgtctccccacggtc

SEQ ID NO: 1831 - DNA, 341 bp, Homo sapiens
  I.1831 (R42195)
  misc_feature (187)..(187): n is a, c, g, or t
  misc_feature (216)..(216): n is a, c, g, or t
  misc_feature (233)..(233): n is a, c, g, or t
  misc_feature (241)..(241): n is a, c, g, or t
  misc_feature (302)..(302): n is a, c, g, or t
  misc_feature (322)..(322): n is a, c, g, or t
  misc_feature (328)..(328): n is a, c, g, or t
  misc_feature (335)..(335): n is a, c, g, or t
tttttttttttttttttttttgtcgatgagcaaactgaactttaatttgcttacctgaaagcttgctcttcattattggcataggccacagctatttacacagaatcattgtacaggatttacagcaagatgctacacatagcatcattctggataagcgacaaaggagtaagaacagactggggantaaagctctgaaatcaaagtgtaagcagnaaatctgaaggtaggtntacaaggnaaggataagggccaaatgatgaggcgaggttgggtgagggtaggacataagggagggaagngggaaacatccaacaacttntgggtncagaggntattaa

SEQ ID NO: 1832 - DNA, 444 bp, Homo sapiens
  I.1832 (R42174)
  misc_feature (360)..(360): n is a, c, g, or t
  misc_feature (435)..(435): n is a, c, g, or t
tttttttttttatgatgactacttatttatttctattttatatgcggggaaacagctcagttattactcaaagccacacttaccaaagccagaggtaaactagtacaagtcttttgattcttagcattatattcaataaattcactaggtattctctaactgtacttttgatgggatattgaaatctttaaaggagaaattccatgttgggaaccaaggcaaagggtgggaatttgacaaaggcagcccaaccactttgggcttacaaagtcctttatttagttcctaccctcttcatctggcatagttaaatcataggggttcccccccacccccaccacggaataggcagttaatcanggctatttctcccaaaaagctggggtggcaaatttaactttttggggtcccagtctattctaatctggaatgganttaaccaac

SEQ ID NO: 1833 - DNA, 282 bp, Homo sapiens
  I.1833 (R42168)
  misc_feature (28)..(28): n is a, c, g, or t
  misc_feature (133)..(133): n is a, c, g, or t
  misc_feature (255)..(255): n is a, c, g, or t
tttttttttttttttttttttttttganaactaaatctataacaaatttaataatgaaggctctgaaagatttctgtcagctctagatggaattattctatgacttcatttgaagcacccagttggtgctggnagtttcagccatgcactatatatattcagcatatcagaattctgttcaatattctgattttaagagaagctaaaaaggaaacataaaatatacatcatccaatttattttctttatccaganggaaatctgttaacattttcccaaaat

SEQ ID NO: 1834 - DNA, 299 bp, Homo sapiens
  I.1834 (R49576)
  misc_feature (131)..(131): n is a, c, g, or t
  misc_feature (134)..(134): n is a, c, g, or t
  misc_feature (143)..(143): n is a, c, g, or t
  misc_feature (164)..(164): n is a, c, g, or t
  misc_feature (170)..(170): n is a, c, g, or t
  misc_feature (173)..(173): n is a, c, g, or t
  misc_feature (193)..(193): n is a, c, g, or t
  misc_feature (296)..(296): n is a, c, g, or t
gtgtattgagaacatgagagaaaacaaagttgggggcagagctcagcctggccgcaggagctgcagaatgaagggcgggctcttccattggtggccctcaagggtagaagggagcaggggtccagggcagnggnttcactctnttctgggagaggccagggctnaagganctnagctcactcacaactccccnacgcataccccctcgatctgtgtgaaatgagctcactaagaaggcacccctgttcccatggagacaagcccagagctcacaaaaactgcaggctcagcccagncat

SEQ ID NO: 1835 - DNA, 240 bp, Homo sapiens
  I.1835 (R49258)
  misc_feature (58)..(58): n is a, c, g, or t
  misc_feature (166)..(166): n is a, c, g, or t
  misc_feature (204)..(204): n is a, c, g, or t
  misc_feature (229)..(229): n is a, c, g, or t
tttttttttttttttatcctagaagagattagcgggaaccatttatatagtgtaaagncatgcaaaccatgctgaaaaggaagcactttgttgtggtgacatggggaggaagaggctgtgggaagcccctgcctgggtggggccaccacgcacacgcatgcatttnatgcagccattggtgtccccgctggtaagctacgggtntaagagtaagtgaactatacaaagnctgtctacatt

SEQ ID NO: 1836 - DNA, 383 bp, Homo sapiens
  I.1836 (R49244)
  misc_feature (78)..(78): n is a, c, g, or t
  misc_feature (358)..(358): n is a, c, g, or t
tttttttttattaaataagataccatttattttttaaaaaattaaaaaataatgccaacattatttcatgcatccgcngcctgccccctgcctcccaccagcctcccagggctggtccccctcctcccctggctgtcctgtgtaataaagggaaaaacaatgagcaggctcagtcaggcccaggggagggaacgcagacccagggagagaatcaagacgctacagcaactcagcctcgcatcatggcaaacccaagcacactggtagaaaacattcgtataaaaaggggaggggcatgctgggcacaggcctgagggcaactgcttccctgggtgcttcaggagactgctgtcccccngagaaaagcctgattaaaaacttga

SEQ ID NO: 1837 - DNA, 298 bp, Homo sapiens
  I.1837 (R49234)
  misc_feature (72)..(72): n is a, c, g, or t
  misc_feature (278)..(278): n is a, c, g, or t
  misc_feature (293)..(293): n is a, c, g, or t
ttttttttttaggattaacatgatttatttcattatcagtcttacaggttgctgaggttgggcaaagcaggnatagtaacttaaatccaaagcacttttgttgagtgacaacccgattagcaaggccctgttactgaacagagggcagtggagggcaccccaggaaccacagcacacagactagtgttagaaaccccttcccagaaggcaaccggtgggacttggcccttaccagccaggggtctactccattggctcttggtgcccaccagcccctnttagaggaggcccanaggct

SEQ ID NO: 1838 - DNA, 415 bp, Homo sapiens
  I.1838 (R43074)
  misc_feature (334)..(334): n is a, c, g, or t
  misc_feature (348)..(348): n is a, c, g, or t
  misc_feature (360)..(360): n is a, c, g, or t
  misc_feature (383)..(383): n is a, c, g, or t
  misc_feature (388)..(388): n is a, c, g, or t
  misc_feature (410)..(410): n is a, c, g, or t
ttttttttgggagtactttcacgtttaatacgcaagggcataaaatagaatgttaggaaacaatttggatttttttccctaaaatataggtgactatgggctagtttacaactttccttctctcactgaaataaaaatacatagttaaggattagggacgaatacataacaggtgacatttgacagtttgggcatattccttgttactttctaatcttgagaatcacagtttgctgttttaggaggtatctgaggaggttccagataaaaagcgatggctaaatgctcttaaactttgaggcgtgctgggatgctctaaagtagggagagggantttattaaccggangcttacaatgtnggaacccggacattcccgggccntctgnggtcttggccatgaggagggcnccggg

SEQ ID NO: 1839 - DNA, 406 bp, Homo sapiens
  I.1839 (R43065)
  misc_feature (365)..(365): n is a, c, g, or t
  misc_feature (380)..(380): n is a, c, g, or t
  misc_feature (397)..(397): n is a, c, g, or t
  misc_feature (402)..(402): n is a, c, g, or t
tttttttttttttttcacatttgagcagagtttattagcatttttgaattatcagagataatattagattacagtatcatatagtattagataagatgcaccgttgacacaggtacagaagtttccatatagttcaactgattttttatttattttttatttttttgagatagggtctgactctgtcacccaggctggagtgcagtggcccatctgagctcactgcaacctccaccttgcaggctcaaacgatcctcccacctcagcctcacaagtaggctgggactacagggcatctgacaccacacccagctaatttttgtatattttgcaggagacaggtttctcggccatgttgcccgggntgggttctccgactncctgaggcccaaggtanttctngccc

SEQ ID NO: 1840 - DNA, 396 bp, Homo sapiens
  I.1840 (R42953)
  misc_feature (231)..(231): n is a, c, g, or t
  misc_feature (326)..(326): n is a, c, g, or t
  misc_feature (376)..(376): n is a, c, g, or t
  misc_feature (382)..(382): n is a, c, g, or t
tttttttttttttttcaacaacatttatacatctttttaattagattagctttacaagcaacttgagagctctttcataatgaaacactgcttttcaaattacatgactttatagtctatctgtatatgaatcctgaaaatctttgcctactcttgataaaggtctgtgttttacagctggttaatgtgttgaataaaaacagcattatgaagctttatctttaaccgggnttaaacacatataggccacaaacagttttaaattttgtttgaaatagagtcctgcttgggtgacaggttaatagtcccactaacatggaaatgantgggatattaaataaatgggcccatcctgatttcttgatccttttcacantgattnctagggggagtata

SEQ ID NO: 1841 - DNA, 254 bp, Homo sapiens
  I.1841 (R43453)
ttttttttaacttgtttgcttttttattaaatgatagttcttatgttctagattttaacattcatacattacgcataagtcacatatctttcctcagtctgttgctttatcttataccaaaagtaggtcataaagaaattttacattttgtaatgatcaaattcatcaatcctttcgcttatatttttgccttctgggatcttaggaagccttctcaaccttgaggaatataggatattttccttccttgtaag

SEQ ID NO: 1842 - DNA, 482 bp, Homo sapiens
  I.1842 (R42782)
  misc_feature (229)..(229): n is a, c, g, or t
  misc_feature (414)..(414): n is a, c, g, or t
  misc_feature (458)..(458): n is a, c, g, or t
  misc_feature (472)..(472): n is a, c, g, or t
ttttttttcattttgcaaatttaatgtaactctgataccaaaatatgacagcacacagaaagcaaacaataaagcaggaacagcaaacagatttttccatcacatgacaccctcagctgattggccataactgccttgactgctgtgtggacaaagattccaaggatgtactttggctccatgggaaggactactgcaatttattagcggtatctgtaaacatggggantaaatctgaaacctcactagccatacgagaagccacaggcaccaagactggcggctccactgccaaagccagcactggtgcttcggtccaccaccaaagccagcaccagtgtttggtccaccgccgaagccagctcctgtgctcggtccaccgttggaagccactggtgcttggtccactgcagnagccaacaccagtgtttggtccaccgttgaagccaacattagantgggtccattattnagccctgttt

SEQ ID NO: 1843 - DNA, 438 bp, Homo sapiens
  I.1843 (R49291)
  misc_feature (310)..(310): n is a, c, g, or t
  misc_feature (339)..(339): n is a, c, g, or t
  misc_feature (345)..(345): n is a, c, g, or t
  misc_feature (397)..(397): n is a, c, g, or t
  misc_feature (437)..(437): n is a, c, g, or t
tttttttttgaaccacacctcttttattccaagaatgggaagcgcattttcattggcttgaatgagaaagcttcatactccactctagctgcagtaatactgcatcccatccactcttcttctcttttttgactgaaactcttcaaagaactgctgaatgtcctctctcttaacaaccgtgccttcatcagcaaatctcttgaggatagtctttaagttcagtcttcaaatcattgtattcacaaatgagttccacttgctgggactctattcatggctggctaaggggtatccattaggggggatcggntcctggtcagtgggcctggggcaaatctntccccnttggtttttcataaggccaggaactgtgtcgggatttcatctggtcaggggnttaaggggcatctgggatcttcccattacattttttcatna

SEQ ID NO: 1844 - DNA, 429 bp, Homo sapiens
  I.1844 (R49159)
  misc_feature (364)..(364): n is a, c, g, or t
  misc_feature (374)..(374): n is a, c, g, or t
  misc_feature (391)..(391): n is a, c, g, or t
ttttttttatcttcttcactggacttataaatagccttagttataacaccttcaagttcttttaccagcttcgtaaactcatgatcaaatatcatgtattctggactgggaaagtttggctggggtttctgagatgctctggaatacaactcatgtttgctaataaatcctagtttctctatgaaattctctttgccaatcctcttctcaatcagttgttttaggcttctctttcatgtaggctctcaagtgagttatcattgaaataaatcgaaatgcccaacaaaggggcacataaggccttgggaccaactgctcttcttctcccaggatttttctggcaatttggtcccggtaggggatngggaacattngggctggaattgtggangggaaatgcggttactggcatgggggggcatttgctta

SEQ ID NO: 1845 - DNA, 453 bp, Homo sapiens
  I.1845 (R49085)
  misc_feature (63)..(63): n is a, c, g, or t
  misc_feature (72)..(72): n is a, c, g, or t
  misc_feature (354)..(354): n is a, c, g, or t
  misc_feature (364)..(364): n is a, c, g, or t
  misc_feature (426)..(426): n is a, c, g, or t
  misc_feature (438)..(438): n is a, c, g, or t
ttttttttttttttttttttgaaacagttaagatttttgtttaaatttattttttgaactggnaataatttnacatgtttcaaaattccaaaaatataaaatgataaagagtgaaaattattcctcatcactgtcctcccaattcttctggccaaccagtatgccacttttaccctttcagagattatgtgtgtacatataaacaaatgtttcttatttatttatttatttttgagatggagtttcgctcttgttgcccaagctggagtgcaatggcacaatattggctcactgcaacctccacctcccgggttcaagcgattctcctgcctcagcctacggagtggctggggnttaggaagtntgcaccaccacacccagcttttgtatttccagtagagatgggggttttcaccgtggccggtnaggtgggttttngaactccggacccca

SEQ ID NO: 1846 - DNA, 275 bp, Homo sapiens
  I.1846 (R49069)
  misc_feature (248)..(248): n is a, c, g, or t
  misc_feature (255)..(255): n is a, c, g, or t
ttttttttagtatttccaaaatcacaaaatgcacaacattcatgtttttaatatgcaacatggaatattatatacagattaaaaccacgacagcaaaaacactcacacggtaccagtttcatatcaaaacaaaacacacaagtgctttttcaatattaaaacgactgtgataaaaacatattaatattttgaaccatgtttacaatagaggcaaaattcatattttactaaataacaaatatttaacngcaaaanctttatactaaatatctatt

SEQ ID NO: 1847 - DNA, 438 bp, Homo sapiens
  I.1847 (R54802)
  misc_feature (208)..(208): n is a, c, g, or t
ttttttttgtaataaagacactgcttttatttagtttgatatgtttctttacagaatgcagaaaacacatcttaaaatcatatagaaggaaataaaaacacatcagtggttggtgaacacttgaatgtgagattggctctccatctcacagagtccaacggccatcaccagcccagcgctcaggggagcaggctgcctgcaaaggatntgttgctgttgttattctgttcactgccccatcgcctccagttgctatggcaacaggccattctgggccagccacgtctctgcatggcagtgcccaatggtgggagttgctaggggcgacggagctgtttgggaaggcctttcaaagccctcacctgggaacattggggaattgtttattttttgatgaggtcatcagaaataattttcaccagggtcagatcccacttg

SEQ ID NO: 1848 - DNA, 419 bp, Homo sapiens
  I.1848 (R48965)
tttttttttccattctcatataaatttatttttgctaaataaataaatttatttctcattcaagggtgaaagtaccacctatatttaagaccaaacagtctttctgtatttaataagtgaaatataaacattataattatcaagttatattgtgatttgatattgtttatgggcactcatttttcaaacgttgaaagcaccagggtcttttgagattgtactttagcctgatttgtataaaatgctgtgttatgaatatgtgcgtgggtcattaagggaaatgagggactactatctggaaggcatctagctttgcacttttaagtttttactatggcatatgcctttctattattccccaaaccatttggattggggggggatgggaggtatggataaattgcctagttccggagggg

SEQ ID NO: 1849 - DNA, 371 bp, Homo sapiens
  I.1849 (R41853)
  misc_feature (7)..(7): n is a, c, g, or t
  misc_feature (132)..(132): n is a, c, g, or t
  misc_feature (163)..(163): n is a, c, g, or t
  misc_feature (180)..(180): n is a, c, g, or t
  misc_feature (274)..(274): n is a, c, g, or t
  misc_feature (309)..(309): n is a, c, g, or t
  misc_feature (314)..(314): n is a, c, g, or t
  misc_feature (333)..(333): n is a, c, g, or t
  misc_feature (342)..(342): n is a, c, g, or t
ttttttnttgtaggtagaatcatttttattggagcatgacctgtttggggcttataactctgcagcccctatgggtagctgggggtgggggaagatagtatcaaaaaacggtgaagagagctgatgaggctntggggactggctggaagctgctggcagggtngagtgggctggggcccnggcagattcagatcgaggtacagcagcgttaataatactcttggagcgttaatactctggggaggggcaggcacttggggggccctagggcatnaaaggcacttggggttcgggaggggacaggggatntactncgggacttggcgggcccangcccttggnttttgcaagcacttttgggaatttcttgg

SEQ ID NO: 1850 - DNA, 491 bp, Homo sapiens
  I.1850 (R41793)
  misc_feature (244)..(244): n is a, c, g, or t
  misc_feature (338)..(338): n is a, c, g, or t
  misc_feature (357)..(357): n is a, c, g, or t
  misc_feature (463)..(463): n is a, c, g, or t
  misc_feature (480)..(480): n is a, c, g, or t
  misc_feature (485)..(485): n is a, c, g, or t
ttttttttttttttttttttttttttccattcaaagtctgtttatcagagatttttttttctgaaaatgcacagtggcatttcattcaaaaaacccttcatctgcagacctgcggaagggaggtggcctgggtcccttccctcggaatatcttagtttatttacctccttcattggccatttgcaggctcttctccttgaaaaatgaatctttacgcattctccaattataaaatcagtgactnttagctaccaaaggctgcactaggatttcttctgtgtccaacacggccaagagccctgaaattgacttcggtttactccatccctgtctgtccngctgggcaggtgtccatgnctaaaaaacaaggtcgagggtgattggattggaaacgggagctggaagggttgtttttaaaatgttctgtcagtggggaggaaacggcgttattcacggaattttncgaggggaagttaggtnaaacntttttt

SEQ ID NO: 1851 - DNA, 480 bp, Homo sapiens
  I.1851 (R41784)
  misc_feature (320)..(320): n is a, c, g, or t
  misc_feature (323)..(323): n is a, c, g, or t
  misc_feature (376)..(376): n is a, c, g, or t
  misc_feature (440)..(440): n is a, c, g, or t
  misc_feature (448)..(448): n is a, c, g, or t
  misc_feature (461)..(461): n is a, c, g, or t
  misc_feature (472)..(472): n is a, c, g, or t
tttttttttttttttttccggttcctgaggcaactgcttttattgaataaacattaccttttatgaaaaatgtatctttttagagacaatgtcttcctatgttgcccaggctggagtgcagtggttattcacaggtgcgatcacagcacacgatagcctcgaactcctaagctccagcgattcctcccgccttagcctcccacaaagctgggccttaacaggcacgtgccactgtgcccggcaataaacattacctttttatatgcatgaaagacctcccctcactggggcattcatgcaatttctgaatacatccagangantaaagtatctacacgggacaagataaattttaaaggaattttttttaaaacangaaaggacttaaaatgtgggtaaggaaatcagttttgtggcatttttgtgacatttgtgttccntccattcngtcttcatttaantgctccggggnggctgatg

SEQ ID NO: 1852 - DNA, 512 bp, Homo sapiens
  I.1852 (R41729)
  misc_feature (413)..(413): n is a, c, g, or t
  misc_feature (435)..(435): n is a, c, g, or t
  misc_feature (447)..(447): n is a, c, g, or t
  misc_feature (470)..(470): n is a, c, g, or t
  misc_feature (504)..(504): n is a, c, g, or t
tttttttttttccattcttattcgtggtttctggtttttttggttttgttttcccttttaatttttttctagaaaaaaaaacacaacccggggaatttatatgacaaactatcagtgtcaggatggcagagggaaagagaaagaagaggaaggccaaagacatggggagtgaataaaaagtgggttccggatcgtgcggaacagtccacagggtcatttacaggtcctcaggagatgaccagtccctttggcatgcaggtccagtgcctgggtcttctggtctgcctgctcagacacccaagggcagagagagctggccacaagtaaacctgccaatgacaaactcaggacttaacagaaagacttagttcagttccttgggctttgtgcttcaggcattcacataggcaggncagcctgcagcctttttttgcntgaggagaagantccagaagagcaggagagtcacntttggaacacattttgggcttcacagcagtgaantgcaagtt

SEQ ID NO: 1853 - DNA, 498 bp, Homo sapiens
  I.1853 (R42627)
  misc_feature (385)..(385): n is a, c, g, or t
  misc_feature (409)..(409): n is a, c, g, or t
  misc_feature (420)..(420): n is a, c, g, or t
  misc_feature (430)..(430): n is a, c, g, or t
  misc_feature (440)..(440): n is a, c, g, or t
ttttttttttttggtctggactaaggctgccccttactggaccaatgcaatctagagactggggactggaatctaactgcgcagagaaatcaaagaccgatggtgtgaaatctggggcagcttcaaaatttctgcctcctaaaaacatttcacccaatttttcattattgcccatgtcacatttaactgaaacaggttcaccaaaaaatctctctctcagccagtctgggaaggatttccatttagagactgctccgtaggagggagtaagtgtgtgctgacgtgtcatgtccatttgtcttcacagtgaaatgagtcttctgggctccatccaccataactgacccatgactcagccttatcattagggtgtctttcctgaagncaggggcccccagtggaaaacaantcatagggtgncgaggaacantgttgaggtngggtggggcaaagggagaaggggaaatggggggacattcatgttttaccttttaccaa

SEQ ID NO: 1854 - DNA, 130 bp, Homo sapiens
  I.1854 (R42600)
  misc_feature (113)..(113): n is a, c, g, or t
tttttttttacaaagcagggagaggtcatgttggtctggaacgcgtcacaggggggacgtgccgcggcaccatgtggggggctcgtctgtggggagggctgccccactgggancctggggacggaggcct

SEQ ID NO: 1855 - DNA, 482 bp, Homo sapiens
  I.1855 (R42593)
  misc_feature (446)..(446): n is a, c, g, or t
tttttttttgtattgaacattaagacattttataaagtatttcacagggttatcgtcttccaccatggacctctggaaagatctgttgggtgagttttagtccccatgacatgcacaacatccatgaagacttaaaacatggcacaagatggggcgctcgggagacttgtggacaataccaacaggtagttctcgagagctgctccaggggtcagcagaggatctttctttccttctcaggtcacggtcgccacttcccacccccgaacaagaaggtcccctttcacaaacaggaggtgaccctagcagacagcacagcagttggaggttagacacagtcaagctcccaatccggacgcgaaggcacacgggagagtaaacacagcacccacgagtcaacagggcagggcttttttttttggggcagtgggggggtggttattttnttttttccaccttcaagggctttctgttttgtgaag

SEQ ID NO: 1856 - DNA, 481 bp, Homo sapiens
  I.1856 (R42592)
  misc_feature (423)..(423): n is a, c, g, or t
  misc_feature (471)..(471): n is a, c, g, or t
  misc_feature (481)..(481): n is a, c, g, or t
tttttttttttaaaagtcaaaactggtgtttattgtgttcccaccatagcagtcattttgtataggtaaagtgattggatctacatattcctccataatattgctctattatatactagtgatacacagccatatgctacataaagacatttctgtcaatgattccacatttaaaaccatggtcccataagattatagtggaacatatacagaaacctaatacatgggcccttgatattgggcattgcaggatcaagtaggggaaatgactgacattcagtaataatgctgtgacatttgggtatttcatgtgaaaatatacatgtaaataaaaatacatattaacatctagggtttgtgttaaggtacattctataatgtttacacaatggacaggattgcctaggtggacactttctaggntgtatccccttcgtttaaggcatggctgaccgtatttactggcgttcngggtgattan

SEQ ID NO: 1857 - DNA, 356 bp, Homo sapiens
  I.1857 (R42461)
ttttttttttttttttgcaatttaaataagatttatttttttaaaggtggttatttttattttttgcaatgccacagttataggagtgtatgaagaggtaacatgtctccttttccttaaccatgtttttttttttttaaccttctgcacaaaggtaaaagtttttgttaatctcatagttaatggtataaaacagagattgggcaaacctttcctccaacagggccagggtagtaaatattttaggatttcacagaccacatatttttttcttttataactctttaaaaatgtaaaaatcatttttagtttggcaccatacaaaaacaggactggggccaaattcgggcccgtgg

SEQ ID NO: 1858 - DNA, 360 bp, Homo sapiens
  I.1858 (R42261)
  misc_feature (205)..(205): n is a, c, g, or t
  misc_feature (356)..(356): n is a, c, g, or t
tttttttttatcacacagaatgtttcagcttttattttaaactgagctcctctacaatggactacagagtttctgcgtttgtcaagagaaaacataagcatacacattacataactgcactaaattaagtaaaagcaaatagacatttttaactattcaaagtggtaaaaccaaaccatagagtttacacaggaaactgcaaganttcaacacagtgttaaaacctttgcaatacaatgatgtgaataaattctacttttgcctgggcttatgtgtgtatttattcaaccgattacccaagacataaaggaagcctgagatatacagtctacatgctcgtatggaaggggcaacgnccta

SEQ ID NO: 1859 - DNA, 309 bp, Homo sapiens
  I.1859 (R42123)
  misc_feature (223)..(223): n is a, c, g, or t
tttttttttttcaagttgaataaagcttttaataaaacagtcttgttctttatcaatacctgtaaattctcttaaagcagtagcaaaggcgactgtagcaagagctcaaaaggcaaggcaatatcggaaagtgtatttaacagaagattaaaaatataaatgtagaagatctgtttatatatttttctttcagaaataaatcccccctcccctgccagggtgnaaagggaaatattgcactttctgttctcatggactaaggggacagggagttccagaagaacctttcaaggatggatcagggaacac

SEQ ID NO: 1860 - DNA, 376 bp, Homo sapiens
  I.1860 (R41666)
  misc_feature (8)..(8): n is a, c, g, or t
  misc_feature (115)..(115): n is a, c, g, or t
  misc_feature (116)..(116): n is a, c, g, or t
  misc_feature (133)..(133): n is a, c, g, or t
  misc_feature (135)..(135): n is a, c, g, or t
  misc_feature (212)..(212): n is a, c, g, or t
  misc_feature (225)..(225): n is a, c, g, or t
  misc_feature (254)..(254): n is a, c, g, or t
  misc_feature (262)..(262): n is a, c, g, or t
  misc_feature (271)..(271): n is a, c, g, or t
  misc_feature (294)..(294): n is a, c, g, or t
  misc_feature (301)..(301): n is a, c, g, or t
  misc_feature (327)..(327): n is a, c, g, or t
  misc_feature (341)..(341): n is a, c, g, or t
tttttttnttttagtatgaaattagtttttatttttaactaaaaataaatgcttaacatctttccaaaatcaaactaaagacgaacacttagaaaaaagggtggaagtgtatttnnccttccctggggacaancngtaaggcagacattctaacgaagcttggtttttcccataggactagtctatgcaacagaatctctctccagcctttnctctatgtcagtnttatctacctgggcaagaaaaaacaaaancaaccccnaaacaaccnttcccgacagacacaacacaaancaagggncttgaggaagttagggaaaacctttnacacgttttctgtnaaatcctttctgaggtgggtttagtacagggtact

SEQ ID NO: 1861 - DNA, 343 bp, Homo sapiens
  I.1861 (R41656)
  misc_feature (8)..(8): n is a, c, g, or t
  misc_feature (237)..(237): n is a, c, g, or t
  misc_feature (267)..(267): n is a, c, g, or t
  misc_feature (281)..(281): n is a, c, g, or t
tttttttnctacatctaggtattttattcgttatgtataaggtaaagtatatttaatggcacagtagaataaacaggctatgattacaagtccaaagattacaaatataatgatgatatcaaatatatgcacacacaaacacaatccaacaaaattcttgactctctttcttttttcaccgctaaaggtagcaaacattcctctgtacctaggctctggaaaacacatctacagganggcaaatgaactcatctggcaaaataaaanggcacatatctttnatttctaatgttttattataggatttttaggatacatatttatttttatattattaggctta

SEQ ID NO: 1862 - DNA, 484 bp, Homo sapiens
  I.1862 (R41632)
  misc_feature (9)..(9): n is a, c, g, or t
  misc_feature (243)..(243): n is a, c, g, or t
  misc_feature (287)..(287): n is a, c, g, or t
  misc_feature (296)..(296): n is a, c, g, or t
  misc_feature (349)..(349): n is a, c, g, or t
  misc_feature (365)..(365): n is a, c, g, or t
  misc_feature (383)..(383): n is a, c, g, or t
  misc_feature (389)..(389): n is a, c, g, or t
  misc_feature (402)..(402): n is a, c, g, or t
  misc_feature (411)..(411): n is a, c, g, or t
  misc_feature (434)..(434): n is a, c, g, or t
  misc_feature (451)..(451): n is a, c, g, or t
  misc_feature (470)..(470): n is a, c, g, or t
  misc_feature (483)..(483): n is a, c, g, or t
ttttttttntttctgaaatagctttttattaaacggcaaagcaggaactgcaacacaatttaaatgtctgtaaattaggtcacaaaagggatgcaaaatgtttgcagtttgactattatatattcacacagctaaagtcattcatcaactcttacaccaatacataagattattccatgattaaaagcccaaatctaataaccttaagctacattagtgggatctcttttcatattataaggnttttaggcaatacttccaatattgatttccttaccaaatgggantctaggagnctaaatttttaaaaattgttaaagggatgactaaaactcttcaaacccgttgncggggtttacgggaanttctaggaacagtgaggnttaaantactggggcaggntaataggtntactgtataactttccccttttnttccctttcccataccntacaccttacgggttttgncggtgttggcccng

SEQ ID NO: 1863 - DNA, 445 bp, Homo sapiens
  I.1863 (R41582)
  misc_feature (318)..(318): n is a, c, g, or t
  misc_feature (423)..(423): n is a, c, g, or t
  misc_feature (428)..(428): n is a, c, g, or t
ttttttttaagctaaatatcaacctatagataaagaaatgatcttgacagtctgacctatgacttagaaaactttggtgctgggctcatggggccagcgcctgcaccttgggagagtgtatcaacctgaaagacactacacagagtgctgagcctgagagggaagcaggcagggtccactgggcagagaggctgtgtgagagaagcaggattatgctccttgggtctattttgtttcctttgggatctgtgttttgggaaggtccctttcctgaggttgggaggttacgatcagggaagggctagctggggcgtgggnctccaagttgcccaattacttcttctcttcctctcttgggagggacaaaagtcaatggctgagatttgggcctgcccttcccgtctgtgtttaaaagggcagttnaggtngcaaaggttacaggttt

SEQ ID NO: 1864 - DNA, 367 bp, Homo sapiens
  I.1864 (R41508)
  misc_feature (338)..(338): n is a, c, g, or t
ttttttttatgttttgtttgttttttaatcattaagagtttttgtacaaaaagtgatggttttttttcttcattttaaaacaccagggtgtgggggagggatgcaaacaaataacaaaaaagatgcttttgtaacattattttccctgtttagaaagaaaaaaaatcactccaatagtattgaaaagtccaaaggatgaaatagtttcattttcttttcctaagggcttataaaagggccccctgcctgttgattccatccctcttttgtgtccagtgggagccatgttactcttcagtgggcccgggggttcactattaaaggaaaggatcagtccnggttttctggggcacatgggcctaaaaca

SEQ ID NO: 1865 - DNA, 283 bp, Homo sapiens
  I.1865 (R41425)
  misc_feature (175)..(175): n is a, c, g, or t
  misc_feature (238)..(238): n is a, c, g, or t
ttttttttttttccttatttcctttgattttaatgtgtcaaaaaaacacttaaagatattcttgtaaatacatataagctgtgtgtcaacattcagtactatgcaaatcatttttcaatatgacaaaatgaaaaacttacacactttagggtagtcgcttaatacttatctttgnaaatctattgctgatgctagggtctaaaggggcaatggactcaaccaggaaaaaataggtaangggctggccttttcctttttaaagtggcttattaggctttatatc

SEQ ID NO: 1866 - DNA, 215 bp, Homo sapiens
  I.1866 (R45078)
  misc_feature (59)..(59): n is a, c, g, or t
  misc_feature (92)..(92): n is a, c, g, or t
  misc_feature (99)..(99): n is a, c, g, or t
  misc_feature (109)..(109): n is a, c, g, or t
  misc_feature (127)..(127): n is a, c, g, or t
  misc_feature (130)..(130): n is a, c, g, or t
  misc_feature (134)..(134): n is a, c, g, or t
  misc_feature (162)..(162): n is a, c, g, or t
  misc_feature (166)..(166): n is a, c, g, or t
  misc_feature (201)..(201): n is a, c, g, or t
ttttttccaaaagtgttcttttatttctagtaacatatattgtataaatactctatttnatatgcacttccacaaaagcgatataattcaanagtcttncccattaganataaatgtataacactanatntgtnattataggcatttattactaactatagncctncttggaaggaacacccaaaccaatacttataaagnacatgtaattcata

SEQ ID NO: 1867 - DNA, 493 bp, Homo sapiens
  I.1867 (R54585)
  misc_feature (353)..(353): n is a, c, g, or t
  misc_feature (406)..(406): n is a, c, g, or t
  misc_feature (431)..(431): n is a, c, g, or t
  misc_feature (444)..(444): n is a, c, g, or t
  misc_feature (457)..(457): n is a, c, g, or t
  misc_feature (476)..(476): n is a, c, g, or t
ttttttttcttttcagtgttttatttttcaaaatatacaatttaagtttttatttcacaaccgtagttttgtatatttattccaaaatctttaaatagctccgcagcaaacagtacaaatcacaaggtccgtcaaactgcttctctttagcctttacacttggcgagttttttaagtttcaagtagtaatggtttgtgggtaagaaaggaaccaaaaacaggaggaaacaacattttttacataagctcaacatgtaggattagaaagggccgtctgaccagctccttgggtctggggaccaggacttaaggaacatgtatctggtttataaataaggaccgtcctggggagncagtgagggttttggttacgagggagggaagggggcagggaacctcattctgncgggaggctggggagggcagggggngaggtgagggcantgaggaggtgggntccttttggggagcgcccnagttaggggccttgagc

SEQ ID NO: 1868 - DNA, 417 bp, Homo sapiens
  I.1868 (R54584)
  misc_feature (3)..(3): n is a, c, g, or t
  misc_feature (101)..(101): n is a, c, g, or t
agnctgtagcccttgaggaaactcagaagacagatcctgctatggaaccacggttcaaagtggtggattgggacaaggacctggtggactggcgaaactcntcctgtggcaggtgggccacttgggagagaagtacgatgagtgggttcaccagccggtgaccaggcccatccgcctcttccactcagacctcattgagggcctctctaagactgtctggtacagtgtccccatcatctgggtgcccctggtgctgtatctcagctggtcctactaccgaacctttgcccagggcaacgtccgactcttcacgtcatttacaacagagtacacggtggcagtgcccaagtccatgttccccgggctcttcatgctggggacattcctctggagcctcatcgagtacctcattccacc

SEQ ID NO: 1869 - DNA, 393 bp, Homo sapiens
  I.1869 (R54393)
  misc_feature (328)..(328): n is a, c, g, or t
  misc_feature (361)..(361): n is a, c, g, or t
  misc_feature (368)..(368): n is a, c, g, or t
  misc_feature (388)..(388): n is a, c, g, or t
ttttttttttttttcggtttgttgttcagtgtttattaagtagattcagtcttatatatgatatacagattcaaaaggaaaaggattccacatacttatgaaatcagtgcatttagcaagtaataccatggagataacagctcgattaacagctcattggtcttttgttaagtgagggagagagggagtcggcctgtgctagtcattccacaaacaaaacagaatttagtcacatcacgtagaggaagacacattctaagatttaaaatattaagccacatttactgggtaaaactcactatataggaccacaaataatttttatagngggccttgaggagggagtcctcacctgcttagnagggccncgttagttgcatggggcctntctgt

SEQ ID NO: 1870 - DNA, 430 bp, Homo sapiens
  I.1870 (R54392)
  misc_feature (355)..(355): n is a, c, g, or t
  misc_feature (376)..(376): n is a, c, g, or t
  misc_feature (386)..(386): n is a, c, g, or t
  misc_feature (396)..(396): n is a, c, g, or t
  misc_feature (405)..(405): n is a, c, g, or t
  misc_feature (411)..(411): n is a, c, g, or t
gtaaaactttttacaaaatagtaaagtatttcaccagaataccagtttcaatccgtccatggtctgatttttatataatttagtggtgctttagaaactttgtttttgttgtttctgagctaaacagctcaatcctttttcgcctgtatctacctaagaccaatgtgaacctttgtatttttgctcctaattttggactcagtgaaagtgtactgtttacatgtacagatgcccccagtccctgtgtgttctgcaagacttgctcttgaggggggaaggtgcacctcactaaggtcatctgcttagcaaagccacaaacaaaaacctctcactttttacctacggtttccacctnaaaataccacaaaaacctttncccgtgggantcggttgggnggaaaacantttcanggggtggtgggccctttgg

SEQ ID NO: 1871 - DNA, 444 bp, Homo sapiens
  I.1871 (R54337)
  misc_feature (207)..(207): n is a, c, g, or t
  misc_feature (440)..(440): n is a, c, g, or t
ttttttttttggtttaaacaaagagggatttattttatttacaagaattctggagaaggatggcggctggtattggcttggtgaaataatgatagggtcaatgactctgtgattctcttggcctttttgtcatggtagcaaagtggctgctgtggctccaggcatcacaccctcaatcaaggtaggaagaagaggcccagggaggtnttagccatgcctgtgtcttttattggaaaagctttcccagaagcccaggtagacttcctcttcaatttcattggccacacctgatcacatagccatcctaagctgcaaaggagactggaacagtgaaaatctggatttacagcctccacagttgggagtgggctggagatacagagttggggacgacccctggaaaagtgaaccaaggtcgttttgcacggctgccctgggangcgt

SEQ ID NO: 1872 - DNA, 496 bp, Homo sapiens
  I.1872 (R54336)
gaaagcaaatatacaatgattttcagtaggcttctggaatagaaacagtggtttgaagaccccactgccacctttatggactggcccctttgagtctgaatccccggcctctgtcacctgagacccaacccctagctgggccaactccagtgaattcacccatttttcttcttcagaaggcctttcctgtgtgagacccacatattttaaccttttgctcctatcccatttttaaagaattagagaataaaccaggcctgtttcttttcccctgaaatccctgcctctggtttcctaaacccatcatctaaggtgacagagcagtgctggaatagcatctcctttcactttcccaaaactgccacagatagctgccactggcatggcttctttggattcctgggaaggcaaacgtggggactgttcggagggaaaggggttgttctggtcttacttcataactggggtgggtttgagggtgactgaagtcgtgctt

SEQ ID NO: 1873 - DNA, 445 bp, Homo sapiens
  I.1873 (R54225)
  misc_feature (32)..(32): n is a, c, g, or t
  misc_feature (290)..(290): n is a, c, g, or t
  misc_feature (336)..(336): n is a, c, g, or t
  misc_feature (437)..(437): n is a, c, g, or t
aagttgctgctccctcaaccttcctgctgtcntcccctccctcaaccccaataggaggatcccaggataaacactgctgggcaggcgggcaggcaggcctggggctgccctgctcactctcattgtctggcctcaggacttagccatactagaccagtcagcttgcctggaagagggaggtcccactatgcctttgggagacacctatacttaggaaaaagcctttgttgtcctcccatccatccattaagctgctatctcagcctgtcccttctgccccaggggtttgnctgggcttggctgcagtgcactttgaaatgaagtatctgtcctttngcccagcccctggtttgcttgtagaaaacatggtaggcttccccaaggcatctgcagggaactttgggcagcttgggggcacctggaatttagcaaaaatnggggggtg

SEQ ID NO: 1874 - DNA, 443 bp, Homo sapiens
  I.1874 (R54071)
  misc_feature (27)..(27): n is a, c, g, or t
  misc_feature (261)..(261): n is a, c, g, or t
  misc_feature (359)..(359): n is a, c, g, or t
ttttttttgagcctacaacacaaatgnaatgggccattttattgatttttacctcctaatagtggatacaggttgccgtggtttccagcaggatctcagatgcaaagggaagtgaagaaaacagatgaatccctagggtaccccgccatggaaccaaacaccacatcaactggaactcttcttgcaaacgaaggctgaagatcaagaatgacattctcacaccacagcacagcttaaatacttctttgacaaaattaatantaaattatatttgactcagaaaataaattctgttcaggcagagtgacaggagggtccattcattgcattgcacgaggggctctacggaggggtgaggntgggtgcaggatgccacagtgacaagggactgggggtgcgggcccagcagcacaggctgaagttagcttgacgctgcttttggg

SEQ ID NO: 1875 - DNA, 503 bp, Homo sapiens
  I.1875 (R54070)
  misc_feature (11)..(11): n is a, c, g, or t
  misc_feature (12)..(12): n is a, c, g, or t
  misc_feature (365)..(365): n is a, c, g, or t
  misc_feature (375)..(375): n is a, c, g, or t
  misc_feature (411)..(411): n is a, c, g, or t
  misc_feature (434)..(434): n is a, c, g, or t
  misc_feature (444)..(444): n is a, c, g, or t
  misc_feature (466)..(466): n is a, c, g, or t
  misc_feature (471)..(471): n is a, c, g, or t
  misc_feature (490)..(490): n is a, c, g, or t
ggccagaaccnnaagatcaccatcacggggtaccgaaccgcttacagttgctatggcacagtgtcttccttaaacggagagcccgaacaaggggttgccatggaagcggtgggccagaacgactgcagcatttacggagaagacaccgtgacagacgaagagggcaagttcagattacgtggattgctgccgggatgtgtgtaccacgttcagctcaaggcagaaggcaacgaccacattgagcgggcgctcccccaccatagggtgattgaggttgggaataatgacatcgatgatgtaaacatcatagttttccggcagattaatcaatttgatttaagtgggaaatgtgatcacttcctctngaataccttnctacgttatggggttcaagctttttccaaaagcggnaacctcgaccattcccattcccngaccgttttncctttgggccgttccccgtttnttccnttttccccccatttgtttnggagttgggcgag

SEQ ID NO: 1876 - DNA, 337 bp, Homo sapiens
  I.1876 (R53946)
  misc_feature (33)..(33): n is a, c, g, or t
  misc_feature (65)..(65): n is a, c, g, or t
  misc_feature (99)..(99): n is a, c, g, or t
  misc_feature (123)..(123): n is a, c, g, or t
  misc_feature (131)..(131): n is a, c, g, or t
  misc_feature (170)..(170): n is a, c, g, or t
  misc_feature (190)..(190): n is a, c, g, or t
  misc_feature (227)..(227): n is a, c, g, or t
  misc_feature (232)..(232): n is a, c, g, or t
  misc_feature (246)..(246): n is a, c, g, or t
  misc_feature (267)..(267): n is a, c, g, or t
  misc_feature (301)..(301): n is a, c, g, or t
  misc_feature (308)..(308): n is a, c, g, or t
tttttttttttttttttttttttttttttgagnggcattggctaaaatttaattgtagccttttnaaaaattacaatttcacattttaacagttacttnccagcatttaagcaaatacagcantatatagnggactaaaacaggcaggagtcagaaagagaaagccaatnttcagtgaacgtcgatgggnctgagtgctgtggagggtgagtgagacatgcatagtnccagntgaggaagtgggancaggggaggggggcgggaaantttttttccacttgggcctgcgtcaaggctcagntctgggnctggatgagtggggagacgtctcccatct

SEQ ID NO: 1877 - DNA, 459 bp, Homo sapiens
  I.1877 (R53836)
  misc_feature (399)..(399): n is a, c, g, or t
  misc_feature (456)..(456): n is a, c, g, or t
cttatcaggtcacgtatcagttaaaaattcttacaacagcattattttctgtgtctatgcttagtaaaaaattgggtgtataccagtggctgtccctagtaattctgatgacaggagttgcttttgtacagtggccctcagattctcagcttgattctaaggaactttcagctggttctcaatttgtaggactcatggcagttctcacagcatgtttttcaagtggctttgctggggtttactttgagaaaatcttaaaagaaacaaaacaatcagtgtgggataagaaatattcagcttggtttctttgggaagtatatttgggattaatggggtgtatacatttatggatgggaggaactgggtatccaaaggaatggggttttttccagggggttntaacccgactgacccggggttagtagtttgtttcctccagggcacctgggagggccntgt

SEQ ID NO: 1878 - DNA, 424 bp, Homo sapiens
  I.1878 (R53639)
  misc_feature (59)..(59): n is a, c, g, or t
  misc_feature (189)..(189): n is a, c, g, or t
  misc_feature (395)..(395): n is a, c, g, or t
aagcgcctcaaagtccagctaaagcgacctaaggatgccaaccggccctactgaggccnccaggtctggagatcccagaggaaggggcgcctcacaccctcttcccacgactggccccggcctctccgcacacctgccctgggccttgactgggttctggggcaaacgctgcttcgtggcccccggggnacaagacaccggcccctcccacccccctgcctctctgaagggccatggctatgcttccctggctccaagggcccatttcctcctagatgcccttttggcctttgtgagggagcgaggaacaggctcgaaggctccggggtatcttgccttctgctggggctcctgttgacaggccttctgttgcccagcgtttgtaatttgccttnccccaacagtggggcctgtttttaaccct

SEQ ID NO: 1879 - DNA, 394 bp, Homo sapiens
  I.1879 (R53635)
  misc_feature (385)..(385): n is a, c, g, or t
cgatgtgttctttgtacctgtaggtctatgatgtccaaacttaacagatcacatgcccctcttagaagaaatatgagcatgctccctcatgcagatagtatacacatcataaacaaagagtagaactttaaaagaaggtaaataatcatacacagaaatcctaacattatattcccaaatctcaaaagatctcctgtgcacctgactttggagacgatgctttaggtaaaaagcttaaacattgccttatattggatcaggaacccttacagtagagggtccagtcttctagtggggtttaatgtttagtcagtgtactctgagtcctcattgttcaggaaaaggcacctcttggaaggaactggacttcctggaactcccagtnctgttgggt

SEQ ID NO: 1880 - DNA, 499 bp, Homo sapiens
  I.1880 (R53527)
  misc_feature (351)..(351): n is a, c, g, or t
  misc_feature (395)..(395): n is a, c, g, or t
  misc_feature (400)..(400): n is a, c, g, or t
  misc_feature (410)..(410): n is a, c, g, or t
  misc_feature (470)..(470): n is a, c, g, or t
  misc_feature (489)..(489): n is a, c, g, or t
ttttttttgcttttaaacttttttctttatttagacagaaaagaccaactctttaaaagtaaaatgcaataaataaataagttaagcatagagaactgtctgaaactgactccccggtctccccttaccacccccacccccaccccattttcttttccctaaaacctcttcctaaagaaaatgatcaggtaataaaccccttgacccctccccacacccctcctcccaatacccaattaccccccaaaggcaaagggagaaattaagagagagaaaaaaatccaaggggcaacattgtctaaactcccaggaaagagagatgggcaggcgtccggggccgggccgggcggngctgggattaacgcacgggtgggtaggtgggtattttacacagnggggnaccagcaggngactgttaaacttttttagggggttttcgggggaggtttttttcctcgttgaaggggggnggtttttgtgggttgattnggcagagttt

SEQ ID NO: 1881 - DNA, 333 bp, Homo sapiens
  I.1881 (R53523)
  misc_feature (323)..(323): n is a, c, g, or t
ttttttttcatctttcttttatttattgtactggaggagcaggaaattacacaagcctattaaaggctaagcaaattccaagtaaattgcataaatgggatttttttaaaggacacaaaataactctaaaacaatctatccatttcagaacatcatcagatacctggggactgcgcatgaagagatgtgctcagcagcatcttatacaaattatccagactcaagccttttcctctcctatccagcctcatctcctgggacccacaaacccaaaagagagtgcccggggaatgaggagagccaaaggaggaggccagaccagnccagggaggg

SEQ ID NO: 1882 - DNA, 475 bp, Homo sapiens
  I.1882 (R53341)
  misc_feature (326)..(326): n is a, c, g, or t
  misc_feature (343)..(343): n is a, c, g, or t
  misc_feature (377)..(377): n is a, c, g, or t
  misc_feature (403)..(403): n is a, c, g, or t
  misc_feature (471)..(471): n is a, c, g, or t
actgaagtttggagtcaaaaggcccagagtctgagtcccagccctgagcacttaggagccttctgacttagggtttgtcactccacctcattgagcctgactgttctgctccataaaatagggtaataaaggtcaaacatcagtgagcaagctgtgtacactggaaaacactgaatcaatacaatgcgtttgtgattatcattagtaaggtaagtcttagatcagagccctccagcccttctttttgaaacctcccaatggcatttcagaagtgagcagtggaattttcctgccatcctaataagagccctgggattccatcattnacattttcagcccattnggatgaagtggtgccctctcctctggtcccccgnggaaaaggtaaatacacccaaagggnggggacctagttaagttcattggcacctagataaggttagggagggttaaggcccttaccttggtttngatg

SEQ ID NO: 1883 - DNA, 385 bp, Homo sapiens
  I.1883 (R52998)
  misc_feature (10)..(10): n is a, c, g, or t
  misc_feature (77)..(77): n is a, c, g, or t
  misc_feature (209)..(209): n is a, c, g, or t
  misc_feature (267)..(267): n is a, c, g, or t
  misc_feature (377)..(377): n is a, c, g, or t
tttttttttntttaagagatactgttttatttttttaaaaagttatcctcaaagtttcaggcgtgactgttcacctncacataagcaagccaaaaaacagtgtgtggtaaaatcagtggtggaagagccgaagttcgtatgagcgaggatgattcccagttcgtcgcaggcctcaatcacaactttgtcagcagcagaaccggaggagnccgcaatgtacgccacaccactccttttagctctgtctacgttatctcggaaagggangaaggcatcagagctgatagaaacttcagtcagtttctcaacccattccttcttctctgcctcagtgagtaactcagggaattcctcaaacagtggccttccactttatncaaatttt

SEQ ID NO: 1884 - DNA, 501 bp, Homo sapiens
  I.1884 (R52997)
  misc_feature (27)..(27): n is a, c, g, or t
  misc_feature (400)..(400): n is a, c, g, or t
  misc_feature (427)..(427): n is a, c, g, or t
  misc_feature (449)..(449): n is a, c, g, or t
gcgtatctcagatgcccttgagatatngaatgaacccacatcagacccctgcccagctgtacacactgcagcccaagcttcccatcacagttctaaatggagcccctggatttataaacttgtgcgatgctttgaacgcctggcagctggtgaaggaactcaaggaggctttaggtattccagccgctgcctctttcaaacatgtcagcccagcaggtgctgctgttggaattccactcagtgaagatgaggccaaagtctgcatggtttatgatctctataaaaccctcacacccatctcagcggcatatgcaagagcaaggaggggctgataggatgtcttcatttggtgattttgttgcattgtccgatgtttgtgatgtaccaactgcaaaaattntttccagagaagtattctgatggtatnattgcccccgggttatggaggnaggagccttgacattatttccaaaaaggaaaatgggaactattgtgttcctt

SEQ ID NO: 1885 - DNA, 318 bp, Homo sapiens
  I.1885 (R52830)
  misc_feature (131)..(131): n is a, c, g, or t
  misc_feature (205)..(205): n is a, c, g, or t
  misc_feature (275)..(275): n is a, c, g, or t
  misc_feature (309)..(309): n is a, c, g, or t
tttttttttgaagattgatcacacaattttattagagtcttttgaacaaaagtaatcctctgtgaaaaactcttgcaaaagagacattggagtgtactattttcaaccctgagcattaacactgcataccnggggggggtgggtcaagaagctggttagatcgaagcacaagcacaagccactgatattctctatgtgatcaggnttttacaaaaaaatacatagttttcaataaataatgcttaattttacaactttgatacagcaatgtcatncaccgtttcaacacactacactctgcatgctagntagtctacg

SEQ ID NO: 1886 - DNA, 454 bp, Homo sapiens
  I.1886 (R51980)
  misc_feature (300)..(300): n is a, c, g, or t
  misc_feature (348)..(348): n is a, c, g, or t
  misc_feature (395)..(395): n is a, c, g, or t
  misc_feature (421)..(421): n is a, c, g, or t
  misc_feature (430)..(430): n is a, c, g, or t
  misc_feature (451)..(451): n is a, c, g, or t
ttttttttcaatccaaatgattatttattctaaaactggaagctactttgcctacattttcgccagaatggtgtaatgagaacaggggaggaaaaagttacagatgtaaacaatgacacagttacattttttttttaaatggtaaaacccctttttactggccacttccaagaatgctttacaggttgtgcaaaaacatttacaggctccatgtggtgtttttctcacaagctttcctgtctacaactacaacagacgtctgataaaacactaaacaagtcttctaagggaaaacaaggnctaggggattcctctgggtttaccattaatccacatttttcccccttnaacataggttttttcataattaaaaggacaggaaacaaaacccgggncatctactgttgttggcaaatgtttntttggggtntaaaccaacagggtgtgggcngtt

SEQ ID NO: 1887 - DNA, 407 bp, Homo sapiens
  I.1887 (R51979)
  misc_feature (1)..(1): n is a, c, g, or t
  misc_feature (370)..(370): n is a, c, g, or t
  misc_feature (397)..(397): n is a, c, g, or t
naacgtgtgtaaatgtgcgtgtgaaagggagcaccccttcccgacttctagaaacaaaattccttttggggcgctttccctgtgtgtccccagagaggcctctagccaggagccttcagttgggatagtttcatttgtgactttaccaataccctcccagttcttgatagacagctgtaggttgctgggttcaagaatatgggtgggatatggaatgctctttcaatgtctagcttcagttttcattcatcctcctgctcagcactgtcagccaagagcttactcagcagacaccacatacttgcagcagttcctagtgaggaaaatctgtgccacttaggaaaatggtttcacttccatttcctcaccnggggcagttctctgtttgaaaattgtngggctgattt

SEQ ID NO: 1888 - DNA, 394 bp, Homo sapiens
  I.1888 (R51829)
  misc_feature (277)..(277): n is a, c, g, or t
  misc_feature (292)..(292): n is a, c, g, or t
  misc_feature (346)..(346): n is a, c, g, or t
  misc_feature (361)..(361): n is a, c, g, or t
  misc_feature (372)..(372): n is a, c, g, or t
  misc_feature (389)..(389): n is a, c, g, or t
ttttttttgcagtacatgaatgttgtattcttcataaagtgcttaaaacatgaagaacaagctctttataaagagccttaactaggaagacaaacagcaaagcagaaccatgcctgctccctgcccaacccacctgcaactttcctccaagtgtggctaggagaagaaacatcaacaaggaccctgggcttcgattcaaaaactcctctgaaaccatccatgccctgggcatttaggggagacccacaaaggtcagggccaggggctggggagtgantaaagcccagaggantccccagtagggggggttgacttcccctcttcttcagattaagatacttacttntctaattacccaatngacccccaaangcatggatttgaaaccntgggg

SEQ ID NO: 1889 - DNA, 462 bp, Homo sapiens
  I.1889 (R51710)
  misc_feature (15)..(15): n is a, c, g, or t
  misc_feature (384)..(384): n is a, c, g, or t
  misc_feature (419)..(419): n is a, c, g, or t
  misc_feature (438)..(438): n is a, c, g, or t
  misc_feature (445)..(445): n is a, c, g, or t
  misc_feature (451)..(451): n is a, c, g, or t
  misc_feature (459)..(459): n is a, c, g, or t
tgaaccatgtccggnttgcatggccagcttccctgcagaggtgatagaaactgacttgaggcagtttctttctctatgccttagttagatgaccctcaaaggggcacagcagatttccctggctactgatacaccttaacaagaagcttgtgttttttatgccctcaaaagtgttttacttatactttcctagacataaaggtggaaaatgggcctaaggtctgtcaaaggtcttggaaaagaagattgtattaaaattgctgtccgtcttcattaaataatactagatcgatacaatgctttctttacagtattagtggttggtgaaagacttcctattgttacagtatatgtatatatctgtaaaatttaatgaggtatccntttaacttgtaggttaggaagcgactaaaaactcntagggggtttactaaaggnggcaccntggggnggaggcgnccg

SEQ ID NO: 1890 - DNA, 455 bp, Homo sapiens
  I.1890 (R51620)
  misc_feature (12)..(12): n is a, c, g, or t
  misc_feature (409)..(409): n is a, c, g, or t
  misc_feature (424)..(424): n is a, c, g, or t
ttttttttttangagttagacatttatttttaacaattaaccactgaattcattttcagaaataggcctgaattgcttgttaatttcattacaggaagtaactctaaaagccaattccacttccaaactataattaccatcatctgaatttaacagggaaagacatcttccaagacttcttttgggtggatgcttagttttagaatagccaactttaccctaacccatgtacaagacagttctccaggtgggccttgggactgacccagttctcccttcttccttgcttgtagttcttaaggaataactgtaggaatgcactggggaatgcaatatcctgatatgggagggaactgcctggaaacaggttgggccttgttgttgtccctcctaggggaatgttaacatnttgatttaggggaantgttttgagacagcgaggttgtgttcccttt

SEQ ID NO: 1891 - DNA, 422 bp, Homo sapiens
  I.1891 (R51510)
  misc_feature (213)..(213): n is a, c, g, or t
  misc_feature (288)..(288): n is a, c, g, or t
  misc_feature (417)..(417): n is a, c, g, or t
tttttttttttttattgtttttcagtttattgtatcaccaccttggaactagttgacttcttacatatacacaaagataggacctgcagcaacaactcttatgacatttttttcatatcagccacacaatttacataaatatgcaaaatgatcctagggtacactggaataaaaaatattttgaaatcttattgccacatgtaactaccaggntatttttttaaggagatgtgtaggttgtaagcctataagaaaggtacacgcagaatgcattacacagatacaganaaacaagtacaattacaatagagacataatacatacaatcaacaagagctctgcctggaagcttctaggcaacttatacattttggggtacacggtacattcaggtattcactactttcacggttgganaaagg

SEQ ID NO: 1892 - DNA, 425 bp, Homo sapiens
  I.1892 (R51509)
  misc_feature (396)..(396): n is a, c, g, or t
  misc_feature (422)..(422): n is a, c, g, or t
atacgtgactacaggcagtccagtaacatgaaatctcctggttaccaaagtcggcacattctcttacgtccaacaatgcagactttaatttgtgatgtacattcaataacaagtgataaccacaaatggacccaggaagacaaacttttgcttgagagccagctcatcctagctacagctgaaccactctgtcttgatccttctatagcagtcacctgcactgcaaacagactgctctataacaagcaaaagatgaacactcgcccaatgaaaccgtgtcagttcagtcttcggtattggggaagggtgtaaaacatcgacccccaccaattcaaacttcccttcaagcttcagggaaatagttcctcagggtaactatttttacaccacaacagncaagcaggttttttcaattttccaantcc

SEQ ID NO: 1893 - DNA, 301 bp, Homo sapiens
  I.1893 (R51477)
  misc_feature (211)..(211): n is a, c, g, or t
  misc_feature (273)..(273): n is a, c, g, or t
  misc_feature (291)..(291): n is a, c, g, or t
gtcagacatggcccagtcacatcctgagctgctcctggctgataaccacgatggagcccgtgtttgtcctgccatctggcactgcactgagtgtggcacaggcaccgtcctgttgatctcacaacacagttctaagttaggacgttcttggctccgttagacaggtgaggaaactggggggcacagagaggtgatgtcatctgcctgggtntcaatcagctagcaagtgatgggagcccagattttaaaaccaaagggggtacgtcagggggnttaagtttccattaactntgtagagttc

SEQ ID NO: 1894 - DNA, 519 bp, Homo sapiens
  I.1894 (R51373)
  misc_feature (224)..(224): n is a, c, g, or t
  misc_feature (266)..(266): n is a, c, g, or t
  misc_feature (411)..(411): n is a, c, g, or t
  misc_feature (443)..(443): n is a, c, g, or t
  misc_feature (456)..(456): n is a, c, g, or t
ttttttttttcagagtaaacagcatgtttattttgaacattcaagtttacaaaaacaaaaaggtaacaaaaccatgacacagatcacacacacatacacacacacacacacgcacacacacgcacacatgttgcagctcatgtcaatttatgtacaaaacagggagaggagaaaggggcaaggctggggaggggttgtcagtagggtgcactaatgtcacagtntcagacaacttgacatgctcactcacactcagcctgggcccntgtgagccccttccccacccaggggtcgggggtcagggtgggaggtgggggtctggggtggcaggcagctgggattaaaggggtgaagagagtagtcccttctctgggagggagcccctttccaagtttactcaggccaagggtnttggggacacacaaaggaggggggtttcagtnctggggagaggtngttgcttcctagagagggttgattgcatcagaaggttgggttcaatttccctttccagttggg

SEQ ID NO: 1895 - DNA, 479 bp, Homo sapiens
  I.1895 (R50876)
  misc_feature (359)..(359): n is a, c, g, or t
  misc_feature (398)..(398): n is a, c, g, or t
  misc_feature (414)..(414): n is a, c, g, or t
  misc_feature (426)..(426): n is a, c, g, or t
  misc_feature (442)..(442): n is a, c, g, or t
  misc_feature (456)..(456): n is a, c, g, or t
tcatttttagctcgaccacatcatcaggtctttgccaccgaggcatagtgtagaacagtcccggtcagttggccaacctcccgcagccaagtaggttcatccttgttcctgttcattctcatagatggccctgctttccccagggtgacatcgtagccaaatgtttactgttttcattgccttttatggccttgacgacttcccctcccaccagctgagaatgtatggaggtcatcggggcctcagctcggaggcagtgacttggggccaagggacctcgagacgctttccttccccaccccccagcgtcatctccccagcctgctgttcccgctttccatataggtttgggccagggnaagcatggcaataggatttgcttgggagcccagcattcnggggttttgggggttnggggaggggganggggggcaaccatttncctgttttgttgangggcttgtttgtttccccatttt

SEQ ID NO: 1896 - DNA, 306 bp, Homo sapiens
  I.1896 (R50871)
  misc_feature (9)..(9): n is a, c, g, or t
  misc_feature (11)..(11): n is a, c, g, or t
  misc_feature (291)..(291): n is a, c, g, or t
  misc_feature (304)..(304): n is a, c, g, or t
ctcgcaggnantcactccttcgcgagaccattagtgactgagcacctagcgcatggtgtgtcaggagctggagattgagccttgaacggagcaggccttgtccacaggaagcttacagtctggagaagacacatgaaagacgcgaagaagccaaatgacttgccgaggctccagggcagcgctgtccaatagaaacatgatgagagccacgtgtgtcgtttcttatttgactcagaggaactgactgcttccgttttcccagatttttatcaaatatcttttaaaggtgtnccaaatttacccnag

SEQ ID NO: 1897 - DNA, 487 bp, Homo sapiens
  I.1897 (R50827)
  misc_feature (365)..(365): n is a, c, g, or t
  misc_feature (384)..(384): n is a, c, g, or t
  misc_feature (417)..(417): n is a, c, g, or t
  misc_feature (448)..(448): n is a, c, g, or t
  misc_feature (483)..(483): n is a, c, g, or t
ttttttttaagatttttctttttcttcaaactttagacctggctcacggcgagccttagaaaagcagtgagtgccacagacactgcagggtgaggccgagggtgccccgcaggcccagcaggtcctgcctggcagtttctgctcaaaaggctgggacacacaggatggggcgcgtaaacacaggggagggggggcggatggagcagcaccatggaccctgggggatcacagagtctggggtcaccaaccaaaaggcatggagcaggtggaaaagaaaaacaacccaagaacaaaccagcgagacttagggaggaaaatgggacgagaccaggggggaaggcgcggaagttctttcaggagcagcngtttgcccggggttcagcntccttcacattgttggacaccagcttgccgttnccattgtttcttggaccgctttctttattcnttccagggcttggggagaagggcgggcacggcacntttt

SEQ ID NO: 1898 - DNA, 368 bp, Homo sapiens
  I.1898 (R50756)
  misc_feature (326)..(326): n is a, c, g, or t
  misc_feature (331)..(331): n is a, c, g, or t
  misc_feature (355)..(355): n is a, c, g, or t
  misc_feature (364)..(364): n is a, c, g, or t
ttttttttacgaatataaagtttcttgtaaatatgtacagtcttttgagctagttctatatagcagaaagcagttcacagatgagacacacaatatacattttcagggctcaagaagcccatttctcatggagatcctaaatgaaatgccaagactgaaagacccattttcagtgacctttccaaatactgtgggaccaagagacaaaacttcagcaaacattcaatcaaatctgcccgggggacgggaggggagggagtacgaccccacagactccaaggcaacacattaaaacgccacagcagggacatttgccaaagggaggntaccncatggggggtttttgggcgttttnaaaccaggnaagc

SEQ ID NO: 1899 - DNA, 490 bp, Homo sapiens
  I.1899 (R50752)
  misc_feature (396)..(396): n is a, c, g, or t
  misc_feature (404)..(404): n is a, c, g, or t
  misc_feature (473)..(473): n is a, c, g, or t
  misc_feature (482)..(482): n is a, c, g, or t
tttttttttttctacctaggtaaccttcaatttattctctgttgttatatcttatttttctttctcacatttgcacttatgattttttagggtccaaaactccttcctaaatatcaagtgaagtcatttcttaccccatgctgttccctggagacccctgtggattctcagctttatagatatgtgaagattgggctgactaaccttttaggagcaagattatattttgctccaaaagtgttgacaccctattgttatacaatagggtaagtaggtgtaagggagttttgttgttttaaacctaaggcatcctgttcgattttgggaggatatatggggacttaggaaggcaataggaaggttctctgggaaatgccaaaatgggaatgggtcccnttccctgnagggcaagttggggggttaggcaggcagagcccgttggaggtccaagactgttccgggggttttaaggnctccaaatntttaggcc

SEQ ID NO: 1900 - DNA, 421 bp, Homo sapiens
  I.1900 (R49175)
  misc_feature (229)..(229): n is a, c, g, or t
  misc_feature (244)..(244): n is a, c, g, or t
  misc_feature (303)..(303): n is a, c, g, or t
  misc_feature (325)..(325): n is a, c, g, or t
  misc_feature (359)..(359): n is a, c, g, or t
  misc_feature (378)..(378): n is a, c, g, or t
acgaccgagtaatttttttttttttttttttttttttttttttttcatcttgttgctttattcagtttgctccgagggcaaaatcaacagtagtagagatcacaaacattattttgattggcctcacaagcctcatcagtaaaacctgaaaaaacagaaaatgttacacaagttgcaaagaaagcactcctgggcgttcactgacatgataggcaaatgggaaagattntaaatggcaacaggngttaacatttaggaacagtacttgtaaacctgctcatttctaggacaagtccgggactntcgctggcgaacccttcatctnttcactggctggatttcctttggacatggaaatntggacttttttggaaaatntttccctaaacctcacttctgggctggcacctggggtggggtt

SEQ ID NO: 1901 - DNA, 347 bp, Homo sapiens
  I.1901 (R48163)
  misc_feature (171)..(171): n is a, c, g, or t
  misc_feature (245)..(245): n is a, c, g, or t
  misc_feature (289)..(289): n is a, c, g, or t
  misc_feature (310)..(310): n is a, c, g, or t
  misc_feature (326)..(326): n is a, c, g, or t
  misc_feature (342)..(342): n is a, c, g, or t
agaacaccaggcgggtgggcgtgtcgggcacaccagcagtcaggcgagagtcgtgggaggagacggaggtgagggtggagtagtccctcggcagtgtggtcgagtgtgagtgttctgagcgggtcagtgagttgtagtcccgtgtgagggtggaggatgtgcttagcacgncggtggggcacgtgtgggctcaggtgggtgccataggagcagcactggtcgtggtcatcctgtgcagggagttngtgctgcccgggaaggcaaagtccatccggccattcaccaggtnctcagtgtcattcggagacgnttgggccttttgcttnccccaatggaaaaccntagaa

SEQ ID NO: 1902 - DNA, 422 bp, Homo sapiens
  I.1902 (R48162)
  misc_feature (356)..(356): n is a, c, g, or t
  misc_feature (404)..(404): n is a, c, g, or t
ggcaagccaatggggtacagggtaaagtactggattcagggtgactccgaatccgaagcccacctgctcgacagcaaggtgccctcagtggagctcaccaacctgtacccgtattgcgactatgagatgaaggtgtgcgcctacggggctcagggcgagggaccctacagctccctggtgtcctgccgcacccaccaggaagtgcccagcgagccagggcgttctggccttcaatgtcgtctcctccacggtgacccagctgagctggcttgagccggctgagaccaacggttgaggttcacagcctacggaggtcttgctatggcctgggtcaacgatggacaaccgacctattngggcccttgaaggaaagttgttggtttgaacaaccttaaggaaccggntgttgtttattttgagaa

SEQ ID NO: 1903 - DNA, 346 bp, Homo sapiens
  I.1903 (R46512)
  misc_feature (42)..(42): n is a, c, g, or t
  misc_feature (64)..(64): n is a, c, g, or t
  misc_feature (147)..(147): n is a, c, g, or t
  misc_feature (250)..(250): n is a, c, g, or t
  misc_feature (252)..(252): n is a, c, g, or t
  misc_feature (346)..(346): n is a, c, g, or t
caatgtacattttatattaaaaaagccaaaataacaatgggntgagaacaggaggccactatancagtggcaagagttcagatccttggaggccgtctttggagaggctcaatgggactcgtattctggcagcagcacagcaccgtntgggacacaggacaccctccccacacctgagctttcacccacaggcaagggatgtggcgagaactgacgggcacacgtgaaaacagtcagccctgcccggcgntntttgaaggagagctctaaggaacacaagcacacagggctgagttcagcttttacccagcttttttaacttacctaattttttaaaaaatttggn

SEQ ID NO: 1904 - DNA, 354 bp, Homo sapiens
  I.1904 (R46511)
agagaacataagacacgttgcgttcattcgctagaaatccctgtttccttctctcagaaggcagtcacagtccctacctgagtcgtgtgaaacacagggcctgagagtgctttacaggcattcacgggctgtccgagtggcattcgggggctggcctagctggccctagtcctggtgtgcagggttcaggcagtcttgacctgcaacaaccgaggttttttagtcttttaacccagccattttcaattttttaaaaattaggtaagttaaaaaagctggggtaaaagctgacttcagccctgtgtggcttgtgttccttagagctctccttccaaagagcgccgggcagggctg

SEQ ID NO: 1905 - DNA, 419 bp, Homo sapiens
  I.1905 (R39782)
  misc_feature (270)..(270): n is a, c, g, or t
  misc_feature (414)..(414): n is a, c, g, or t
ttttttttcacggtgaaaaatacattttaatccaaaagttttgaatattggcacttagaaagttatttacaatcaattttactataccctttgtgaataaagagataattatgtacgtgtagctacctatagttgtttctttccaactcaaacaccataactatgtggaaaaagggtaagagttaaagctgctgcagctcaaaatcattacaatcaacttagattctgcaaattttcccaggggttgaaaaatgctgggttaaatcaggncaaaagaggagggcaagtgaggtacaccccactcctctcccattttacggtgtttgctcccttactttaacccgggcaaaggacctgcaccctgaatttcttagggacaatttttcatattaccacaggggcctctttattatnggggg

SEQ ID NO: 1906 - DNA, 374 bp, Homo sapiens
  I.1906 (R39682)
ttttttttttaagaagcttcaatattcacttttattatttataaaaaaaaattaaggtaccacgagtgcatattggtgtactgtgatcttggttttgcaaatttattcatgtgttttacattatttcaattttaataaacatatcatatgtgtatctttacaatacctgataaagattcagctgtctggcacttacacatgtattcatagagttcattctgatgctctgaacctcaagaggatgtgaaaatgacttgcctgtaattaccccaagatgaagatttattgaagcagttatgctccagcaacttgccactcatttgtgctggttctactttttccccttaattgaatgtaaacatttgccaaaaaaa

SEQ ID NO: 1907 - DNA, 387 bp, Homo sapiens
  I.1907 (R39504)
  misc_feature (12)..(12): n is a, c, g, or t
  misc_feature (14)..(14): n is a, c, g, or t
  misc_feature (15)..(15): n is a, c, g, or t
  misc_feature (16)..(16): n is a, c, g, or t
  misc_feature (179)..(179): n is a, c, g, or t
  misc_feature (181)..(181): n is a, c, g, or t
  misc_feature (310)..(310): n is a, c, g, or t
  misc_feature (321)..(321): n is a, c, g, or t
  misc_feature (359)..(359): n is a, c, g, or t
  misc_feature (369)..(369): n is a, c, g, or t
  misc_feature (382)..(382): n is a, c, g, or t
acttccttcacnannntacgacaaaatttaagaggaataacaaatacaaattttctgttaagaacggaaaggtgcaaactagcagagtcaatactggtaaccagaaggcactaatccaaacacataaatttcaaaagctggttatattatggaataccatatatactgggcctttgccntnttggggatttctggcaataggcaataagcctcgtttctgtttccaattataacaacaaaaaggatgaggttactaatggaacattccacttacaggaggtctggggctatggttggataaattggaaancttatctaggnctactcctgtctaggggggccaattaaaagggtaaccncctctttttntcccggccggccnggggg

SEQ ID NO: 1908 - DNA, 392 bp, Homo sapiens
  I.1908 (R39503)
  misc_feature (343)..(343): n is a, c, g, or t
  misc_feature (359)..(359): n is a, c, g, or t
gttttgctctataccactgaaaagcactataacataattgttgtccatgatactgaagcttttcccctcacttctaggttgtttacattcagagctctatcaataagaggaatacatattacagtgaattcgacaaccgcacaagttggcagtaggtatccccaacctaatttatcttgggtaaattcaccctgtttcctaggtgctgctgggataaaagagtgtttactttttattgctcttaggacagagtaggtctaggataaggttttcaatttatccaacataggcctaggacttctgtaagtggggaatgttccattaggtaacttcatcttttttnttgttattaatggggnaacaggaacggggggcttattggctattgccgg

SEQ ID NO: 1909 - DNA, 266 bp, Homo sapiens
  I.1909 (R39290)
  misc_feature (23)..(23): n is a, c, g, or t
tttttttttttttttttaaagantccagctttttttattttttccccttttacacaaaacaaagtagaagaaataatacaggattaaaactgcaaaagtagttaatcagtagaatatgtatgcacacaaaaaatccagataggaagacaggcttatttacaatgaaagtaaggtaaaattaacgtagttttcttatgaaataataaaaaaaaatcaaacatatgctacaatggggcaccactgttcacagcaatattaaagagggg

SEQ ID NO: 1910 - DNA, 366 bp, Homo sapiens
  I.1910 (R39278)
  misc_feature (276)..(276): n is a, c, g, or t
  misc_feature (281)..(281): n is a, c, g, or t
  misc_feature (284)..(284): n is a, c, g, or t
  misc_feature (316)..(316): n is a, c, g, or t
ttttttttagcaaatcctagcacattattaacaaaaaaatctgtacatttgccatgatacacttgaaagtgaaacaaataagatataaatacagatatggatgtaacatgaaaaagccccccccccaaaaaaacccaaaaaacaaaaaaacccacccaacctgggggtgtggggaccatgcgtgtgaacacagtgccaacataactattttggtggctgatattttttcagagcacttctttatttccaaacattattgttagcaaagtcctgggnggggnttntacaaagttcttatttgctgtccttttaaagngtaacattacggctttgataaataaggggtgggcagggggaaggaaaagg

SEQ ID NO: 1911 - DNA, 336 bp, Homo sapiens
  I.1911 (R38931)
  misc_feature (322)..(322): n is a, c, g, or t
  misc_feature (328)..(328): n is a, c, g, or t
ttttttttttctttatatgtattatatttttcattaataaataggttttcttcattaaacacagaacatataacagattgaaacactccccccctccccccaattccaaagacaagagtctataaaacaaatgccagctgtactaccctaagggcagaaaaagtctggtgacccccacccagccctgcccctgcagcaccaccacccccacactctgcaagagaagggggtctggggcttctcccttggaccctgggggacttaggtgagaagcatgtgaatgtatgatgtcacctctccatgaggcatgggctatgcaaangattgnggtttcct

SEQ ID NO: 1912 - DNA, 389 bp, Homo sapiens
  I.1912 (R38717)
  misc_feature (80)..(80): n is a, c, g, or t
  misc_feature (261)..(261): n is a, c, g, or t
  misc_feature (331)..(331): n is a, c, g, or t
  misc_feature (348)..(348): n is a, c, g, or t
  misc_feature (362)..(362): n is a, c, g, or t
  misc_feature (376)..(376): n is a, c, g, or t
tttttttttaactgaatgtgtgatttattatgtttaagattggtttataaaggcttaaatatatctgtcatagttaacangttaacagcaaataaaggcaactttacaaaatcagtgtttccatacagtacaggactaaatgtggcaactgtgcattggaaaattaatatttcctcaatgcaaatatcaaatctgcagcaccatttagaagcttccactaaaaactcaagctgcagtatttattacaggctctactcagancacaaggctacctaaatcaagcattagagaaaaacagtgggagtcattcagggcatatatatggtcaggntttgggtacagggtttnaatttacttaaccnttttttaatgtccngggggttttcaac

SEQ ID NO: 1913 - DNA, 283 bp, Homo sapiens
  I.1913 (R38684)
  misc_feature (237)..(237): n is a, c, g, or t
  misc_feature (266)..(266): n is a, c, g, or t
  misc_feature (273)..(273): n is a, c, g, or t
  misc_feature (279)..(279): n is a, c, g, or t
ttttttttttttttgatttggaaaaggaattttaaaccttaaattaaaaaaagaaaacattttcacacagaagaattatctgctttgagaaataaagaaattagaaggtgtaaaaaaaaatttttcaaaccccaaataatgataaaaatagatgtatcctctgtaaaaatctggactaaactattcagtcattcatggttattcagtattcagagcatgaagtgaaacaccaaagtntaaaaatttaaaaaaaaaaaaaaggggtncccgggntcctgncgtt

SEQ ID NO: 1914 - DNA, 417 bp, Homo sapiens
  I.1914 (R38599)
  misc_feature (90)..(90): n is a, c, g, or t
  misc_feature (281)..(281): n is a, c, g, or t
  misc_feature (335)..(335): n is a, c, g, or t
  misc_feature (373)..(373): n is a, c, g, or t
  misc_feature (388)..(388): n is a, c, g, or t
  misc_feature (401)..(401): n is a, c, g, or t
tttttttttgacgaattaccgaatttgacgaaaagaagggtttatttaagcacatctcagagttacaagctcttacaagaaagacacttntctaaggcacaagcaaggtgtgttcaaatttatatgaatgactacttgagttcagacgggattacgtttttcttgcttttgacttatattatttcacacatcttgaattttagagtctaggcttacacatcgtccagtttcttggcatggcttgcttaatctgagctttcaaacttcagattaacctgggnctgaggctaagagtttataatgaaacccaaaactaaggcaagcttcccctgggnttcaggtttaattgtttgaaggtctttcataacttccnggggggcataggggnaaaccatggtatnctgggccacaattgta

SEQ ID NO: 1915 - DNA, 317 bp, Homo sapiens
  I.1915 (R38426)
  misc_feature (60)..(60): n is a, c, g, or t
  misc_feature (181)..(181): n is a, c, g, or t
  misc_feature (226)..(226): n is a, c, g, or t
  misc_feature (247)..(247): n is a, c, g, or t
  misc_feature (300)..(300): n is a, c, g, or t
acaggagatggggacgaggagaggagaggaggagccattggatgaaagctcagtgaaganaatgatcctcacatttgaaaagagatcatataaaaaccaagaattgcggattaagtttccagacaatccagagaagttcatggaatccgagctggacctaaatgacatcattcaggagatncacgtggtggccaccatgccagacctgtaccaccttctggtggangcttgaatgctgtacagtcgnttctcggcttgctcggacacgataatacagatgtgtccatagcttgtggtcgnttttgcttcaggaatta

SEQ ID NO: 1916 - DNA, 367 bp, Homo sapiens
  I.1916 (R38376)
  misc_feature (57)..(57): n is a, c, g, or t
  misc_feature (184)..(184): n is a, c, g, or t
  misc_feature (218)..(218): n is a, c, g, or t
tttttttttgaatttttaacagaaaattttatttcaataaatattttgccctccaangtgacaactacaatttcaagggaggtaaaagtataacctagaagtaatttagaattattccacttttcaattttgcctgagtgaagaatacagtttgggcctgaagtctgctaagagactgcaccgngtgacacgtgcagaaagtcaaaaggacacatggnaagcagtccatctttgggtgcacgcacacagccatgtgcacgcacacgtgtggggtaggaacgtatctgcacatacatgcggtaaaataatgggggctcacggcaagtttcatttctcttttcacccttctggggctcccaggatttct

SEQ ID NO: 1917 - DNA, 355 bp, Homo sapiens
  I.1917 (R38198)
  misc_feature (267)..(267): n is a, c, g, or t
  misc_feature (287)..(287): n is a, c, g, or t
  misc_feature (331)..(331): n is a, c, g, or t
  misc_feature (340)..(340): n is a, c, g, or t
tttttttttttttttttttgtgttgaaatatttatttcagggatttaaatccacccccttctgatgaacatcaggattaaaagacctccagcaatccatgattctagtatactcatctctgactgctgtatataagatgtgatttgattaaagaagacagacaacaagtgcatttattatggaacaacattctgaatactcacgagtagttatcttgcacacttaaccctaggccagaggacacggggcaaccacacaggaaaaggntaccaggggcagagtccatngtagttttgcttatacccacaaaagggagttaagggcagtttanttcaagggntgccgaaaactacgg

SEQ ID NO: 1918 - DNA, 498 bp, Homo sapiens
  I.1918 (R37657)
  misc_feature (201)..(201): n is a, c, g, or t
  misc_feature (202)..(202): n is a, c, g, or t
  misc_feature (482)..(482): n is a, c, g, or t
  misc_feature (489)..(489): n is a, c, g, or t
  misc_feature (497)..(497): n is a, c, g, or t
tttttttttaaattttatttaaaatctcaacactcagtcatttattccgtttttgcaaccaaacaagtaataaatattatttagcactttgtttttacaaaaataaaacagatgatacactctctgcgaggggcggtgcgatcagaggaagggtgttacacggcagacgctacaaagcccagtttgcaacgaggcagcgcnnggcggctttgcacggaacgcaggaagcacgtggaggagtttaccatttgtgttaaacgtggcaaaaataaaccaaaatagaggaaagccggcttagactccgatggggctggcagtcacgtgagcaaacagcttagcattgcgcactttacctcatcatttgataaatttacacatcccaaaaaaggaaatttttaaaaagcccaacaggaccccccaaattaaccccaacttgttttccacaggcacttgctttttaattctgttacggtcttagggtnccccaanttacccant

SEQ ID NO: 1919 - DNA, 251 bp, Homo sapiens
  I.1919 (R37491)
  misc_feature (96)..(96): n is a, c, g, or t
  misc_feature (103)..(103): n is a, c, g, or t
  misc_feature (156)..(156): n is a, c, g, or t
  misc_feature (244)..(244): n is a, c, g, or t
ttttttttttggcatcagaaatgctgtttatttctctgctgctcccaagctggctggcctttgcaagaggagcagacaacagatgcatagttgggnaaaaggnaggcaggtccaggatagaggttgcaggctgagggaggagggaagaggaggagncatcctggaccccacatttcagtctcagatgaggcaaagggctccaagccccaaatcatcagaaacagcaaggacaggaggacttganaggccca

SEQ ID NO: 1920 - DNA, 454 bp, Homo sapiens
  I.1920 (R37402)
  misc_feature (40)..(40): n is a, c, g, or t
  misc_feature (45)..(45): n is a, c, g, or t
  misc_feature (46)..(46): n is a, c, g, or t
  misc_feature (50)..(50): n is a, c, g, or t
  misc_feature (51)..(51): n is a, c, g, or t
  misc_feature (52)..(52): n is a, c, g, or t
  misc_feature (116)..(116): n is a, c, g, or t
  misc_feature (159)..(159): n is a, c, g, or t
  misc_feature (205)..(205): n is a, c, g, or t
  misc_feature (289)..(289): n is a, c, g, or t
  misc_feature (296)..(296): n is a, c, g, or t
  misc_feature (311)..(311): n is a, c, g, or t
  misc_feature (333)..(333): n is a, c, g, or t
  misc_feature (368)..(368): n is a, c, g, or t
  misc_feature (376)..(376): n is a, c, g, or t
  misc_feature (406)..(406): n is a, c, g, or t
  misc_feature (424)..(424): n is a, c, g, or t
  misc_feature (433)..(433): n is a, c, g, or t
ttttttttattgtttccactttattgctcaagcatggaanttganncaannnttgaccttcagcaaccgtgcagagaagaggctgaggggattttgggacacaacctggccgagangggaaactgacaggggaaataccagaacagggaacagggggtngtcaccatgacaccagaagacatcatcagccacaccgtcgggggtnaggaagggaacagagagaagaaatggcatagcagtggtttttcccatgtccctagcacccacatggaggccacatttggaaatngactggngagagggaaaggatnagggaaaacggcttcccagggngtcttcctcttcaccacttgggttctttattcagnccttcatncctaccactttgcctctttcttaccctttnggaaaattgggcctttancagaggggngccaaattaaattttacattt

SEQ ID NO: 1921 - DNA, 313 bp, Homo sapiens
  I.1921 (R37369)
  misc_feature (260)..(260): n is a, c, g, or t
  misc_feature (283)..(283): n is a, c, g, or t
ttttttttgacatgtctacttgtgtttattctcatttttgctttttttaaaaaaaaaaaaaaaaatgagggatggagagggaaataacccataaacaccgcgaacaggaaccaagactccaagacttgggcatactccctctaccctcagcctcagttctccaagagattcccacccacctgattttcttttaaacaagacacccaaatcagcagcaaaggtacctgggggtagtcactgagattttgaacactggggantggggagggggaaagtccaaaangtaggaagttggggaaggaaaaggggaagg

SEQ ID NO: 1922 - DNA, 70 bp, Homo sapiens
  I.1922 (R37295)
  misc_feature (55)..(55): n is a, c, g, or t
tttttttttttgtacaaaactttgaattttttatttgtgaaattaaaaatatggnattatatatatataa

SEQ ID NO: 1923 - DNA, 461 bp, Homo sapiens
  I.1923 (R37282)
  misc_feature (293)..(293): n is a, c, g, or t
  misc_feature (333)..(333): n is a, c, g, or t
  misc_feature (370)..(370): n is a, c, g, or t
  misc_feature (419)..(419): n is a, c, g, or t
  misc_feature (424)..(424): n is a, c, g, or t
  misc_feature (432)..(432): n is a, c, g, or t
ttttttttttattggtcaatcaacttttatttttaattacccaaagtgtgtactgtcctttgtatgaagatacaatggaggatacaaaaggaagaagagataaaatttctaccatcaaaaaagttaaaatcagctggagacacaccgcacaaaacagtaagacttaaggctatatactgagtagcatttgagaagtgtaagacaacttagcacagagtaaacccacacaacgggacaccatcggtaactatgacagggagtgaaggaggataattggggaaaacatccaaagnggtgggaaaagcgttgggatttgtgttctagtcccccagntacccagtggcttattgtgggctcttagggtaaattnaagttccccctctgtggggcttcagtttgcttcaactcttaaaacaggngggtnagggcttnaatgggtctttacttgtctttcagctgta

SEQ ID NO: 1924 - DNA, 438 bp, Homo sapiens
  I.1924 (R37251)
  misc_feature (292)..(292): n is a, c, g, or t
  misc_feature (373)..(373): n is a, c, g, or t
  misc_feature (403)..(403): n is a, c, g, or t
tttttttttaaggcaaaagctgatcaaattcatttaatctttgttaaaagcatcacaaatgattcatcgatttttaaaaaggaaaaataagaaggaatgcattgtctctttgttatgtgcatggcagctgatggcctcgttcccaggcgcccaggtctacctgaacatcagatatgcagaccctcgaatttacaaccagggacagccacgggccacgcctgggatctccatgggtgcacagacgggaacgtatcaggctgtctcagatgccacctccttcccagggtgcttngggtccacatgcccaacatgttcttaataggaaatatttaacataaaatacaggggaacccacaggttaacttaggggggnaaaaccccaaccccaaacaggcagaggggnttttaattggggttggtcaaggggaggggccacgg

SEQ ID NO: 1925 - DNA, 340 bp, Homo sapiens
  I.1925 (R36983)
  misc_feature (26)..(26): n is a, c, g, or t
ttttttttgcaaacaataagcactantttatttctatttttatttttttagagacagggtctcactatgttgcccaggctggtctcaaactgtgggtttcaagtaatcctcccacctcagcctcctaagtcactgggattactggcctgagcgaccatgcccagcttataaacattattaattgctgtatttacttccggaaatttctttcccctattcaacaaatgttaagcacttactataggtcagcacctgtgcgtggcactgggcatgctgcagtgaacaagacacttttttttttttgagatggagtttcgctcttgttgcccagggctgggag

SEQ ID NO: 1926 - DNA, 443 bp, Homo sapiens
  I.1926 (R36753)
  misc_feature (365)..(365): n is a, c, g, or t
  misc_feature (371)..(371): n is a, c, g, or t
  misc_feature (380)..(380): n is a, c, g, or t
  misc_feature (400)..(400): n is a, c, g, or t
  misc_feature (441)..(441): n is a, c, g, or t
tttcatattaatttcttatagacctgtactttattctttcaataatttttaaatgaaattaagctttgctacatggtaattaaataattactaggaagcttagctatcaaacatcgacttactaaaatttcattttagcttttatggtatatgtgcttgttttctgaatatggatacatgttatttttgatccagcatcaaaacttcactttttgttttgacttttccccccaaatctgtaaggttcaagtatacatattactgaatcctctataattgggcataattcaatgggtaggccttaaatctcatcatgtaggcggggggaatcaggaatgttattttcaaggaacttaatgttcccntcaggnatataaaancccgcatactttcatttccngtggagcctggacaggctggctggttgtgtttttggggggntg

SEQ ID NO: 1927 - DNA, 115 bp, Homo sapiens
  I.1927 (R36380)
tgtgaaaagtgtgctcaacttttttacaagagtgatattaacttggatttatttttcaatataatttggagaccctttgttatccaaataaaattgatgagtttctgtgcctgta

SEQ ID NO: 1928 - DNA, 482 bp, Homo sapiens
  I.1928 (R36327)
  misc_feature (423)..(423): n is a, c, g, or t
  misc_feature (442)..(442): n is a, c, g, or t
gcatgaaagcctacgctttctggcagagttctgaagatgccgggacaggtgaccccatggcggaagacaggggctatgggaatgacttccccatcgaagacatgatccccaccctgaaggccgccatccgagccgtcagaattctacaattccgtctctataaaaaaaaattcaaggagactttgaggccttacgatgtgaaggatgtgattgagcagtattctgccgggcatctcgacatgctttccaggataaagtaccttcagacgagaatagatatgattttcacccctgggacctccctccacgccaaaacacaaggaagtcttcagaaagggtcagcatttcaccttcccatcccagcaatcttcccggggattgaaccatatgtaggccagaccatccacatcagaattcgaaggnccaaaggcttgatgggggnagttttttaaaagtttgaaaggacaggtttcagggacttg

SEQ ID NO: 1929 - DNA, 466 bp, Homo sapiens
  I.1929 (R36312)
  misc_feature (89)..(89): n is a, c, g, or t
  misc_feature (307)..(307): n is a, c, g, or t
  misc_feature (420)..(420): n is a, c, g, or t
  misc_feature (451)..(451): n is a, c, g, or t
  misc_feature (463)..(463): n is a, c, g, or t
cctggctgaatgtgcagaggagaagatcccaccgagcacactggttgagatccatctgactgctgccatggggctcaagacccggtgtngaggcaagctgggcttcctggccagctacttcctcagccgagcccagagcctgtgtggccccgagcacagtgctgttcctgactccctgcgctggctctgcaccccctgggccagaagtttttcatggagcggatgggtctgtgaagtcagctgccaaggagagtctatactgtgcccagaggaacccagctgaccccattgcgcaggtccaccaggncttctgcaagaacctgctggagcgagctatagagtcctttggtgaaacttaaggccaagaagaaggcttggagaccagggaagaagagagctgtgaatttttccagtgctttngaattatttgaaatttatttcattttttttnttggattttttnggg

SEQ ID NO: 1930 - DNA, 471 bp, Homo sapiens
  I.1930 (R36303)
  misc_feature (245)..(245): n is a, c, g, or t
  misc_feature (350)..(350): n is a, c, g, or t
  misc_feature (355)..(355): n is a, c, g, or t
  misc_feature (364)..(364): n is a, c, g, or t
  misc_feature (378)..(378): n is a, c, g, or t
  misc_feature (411)..(411): n is a, c, g, or t
  misc_feature (441)..(441): n is a, c, g, or t
  misc_feature (464)..(464): n is a, c, g, or t
gccatcttcacggggtactacgggaaaggcaaacctgtgcccacgcaaggtagccggaagggggcgccttgcagtcctgcaccatcatatgagtgttctcaccaccacttatgcccctagaagggaaggggagagggaaacgtgccctctgtttgatccttgttttgtgacattttttttttttttttttttactcaaagttaacctacctgtaactttttaaaaacttgtaaaataactgaccntcccttcctgtccgccctcttcccctctaatgctcacgctcccaacacaaggtgggcagggaggcaccattcaggaacctgggaccaaagctgacgaggctgggncaagncaggggatngggccacagccagnaaccccgagccctacttccaggttttggttagntcagccccagcccagcccagttgattctgnccagagctggggtgagttggganacactta

SEQ ID NO: 1931 - DNA, 392 bp, Homo sapiens
  I.1931 (R36289)
  misc_feature (262)..(262): n is a, c, g, or t
  misc_feature (366)..(366): n is a, c, g, or t
  misc_feature (380)..(380): n is a, c, g, or t
agagtgagtgaggagaatggggagtccatggttcaaggtcagatgcggccaccagctggctttgtgaccttgggcgagttgcctcccctctctgagctgaagccgcccctcccctactacaacaggggtcggactccatgtctgagcggggaggagggtcatggagagagaactgtctggcagccctgatgcggtagaggggcatcctctggcctttgtgagctgtagggatgcagagtctgatgccagcgtcttgctgggnggagtggcctagaaggggatcctaacagggacttctggagcagacagagcctgccagtgcctgtgggagttcagccagccgagggtctggcttccttcagctgnccccagggggcttncccttccttgaa

SEQ ID NO: 1932 - DNA, 356 bp, Homo sapiens
  I.1932 (R36006)
  misc_feature (296)..(296): n is a, c, g, or t
  misc_feature (337)..(337): n is a, c, g, or t
  misc_feature (348)..(348): n is a, c, g, or t
tcagataaacatgtttattgtagatttttcatacacattttatgtacctattattacaaaaaagcttataatctgatggtagtagactgattgcttacttgaaaatattaacttcatacatatcaaaatacaccatcctcaactatataattggactgcaaaatgcttgatatgaaggtatgtaaaaaaataaggcaggtttattataccttacaaccttataaaggggttggctatctaggtacaaaggataacatttatcttataacaaaaatttggataggttttaagggttnggtattgtgtggggggattttccccaagggctaaggggggntaactcggggnaaaaggtt

SEQ ID NO: 1933 - DNA, 309 bp, Homo sapiens
  I.1933 (R35167)
  misc_feature (139)..(139): n is a, c, g, or t
  misc_feature (143)..(143): n is a, c, g, or t
  misc_feature (145)..(145): n is a, c, g, or t
  misc_feature (241)..(241): n is a, c, g, or t
ttccgaccccattccgggggccaagcctgaccggtgccccccgagctggcaccgttcgtggggcggatgtctgcccaggagagcacacccatcatgaacggcgtcacaggcccggatggcgaggactacagcccgtggntgancncgcaagctgcccagcccaaatccctgtctcctccgcagtctcagagcaagctcagcgactcctactccaacacactccccgtgcgcaagagcgtgnaccccaaaaaacagctatgccaccaccgaggaacaagattctgcctcgctcgagctccatgggcagcc

SEQ ID NO: 1934 - DNA, 385 bp, Homo sapiens
  I.1934 (R35114)
  misc_feature (11)..(11): n is a, c, g, or t
  misc_feature (320)..(320): n is a, c, g, or t
tgggcatattnataataagaacatatctcagaaagattgtgattgccttcatgttgtggagcccatgcctgtgcgggggcctgatgtagaagcatactgtctacgctgtgaatgcaaatatgaagaaagaagctctgtcacaatcaaggttaccattataatttatctctccattttgggccttctacttctgtacatggtatatcttactctggttgagcccatactgaagaggcgcctctttggacatgcacagttgatacagagtgatgatgatattggggatcaccagccttttggcaaatgcacacgatgtgctnagcccgctcccgcagttcgagccaacgtgctggaacaaggtagaatatgcacagcagcgtgggaa

SEQ ID NO: 1935 - DNA, 424 bp, Homo sapiens
  I.1935 (R34997)
  misc_feature (123)..(123): n is a, c, g, or t
  misc_feature (361)..(361): n is a, c, g, or t
  misc_feature (369)..(369): n is a, c, g, or t
  misc_feature (377)..(377): n is a, c, g, or t
  misc_feature (395)..(395): n is a, c, g, or t
  misc_feature (407)..(407): n is a, c, g, or t
  misc_feature (416)..(416): n is a, c, g, or t
catgccccctgctcagtgaaaggtgagtcccgagaccagttgggtacctctctatgcgaaccagagacatttctggatccaggccaggtgaagattagggccaggaagcctgagcccccgggnctcaaggtagggagccgaagaggtgccaggactctgctgggttgaaatttgccggggaggactcttgtctccccctcaggagtatttttgttgaggctttcctgggaggtgaagaagcaattcccattgcagcaggttagagcgagaatcagacagagggcaaaaaccaatttcgcttctccccacgttctaaatgctggggcatggctgttcaggagggcttcctggggaggtgttntctggggngttgggtnaggtttggggcgatggcnttttggagattncgtgtggtntttcagga

SEQ ID NO: 1936 - DNA, 374 bp, Homo sapiens
  I.1936 (R34902)
  misc_feature (14)..(14): n is a, c, g, or t
  misc_feature (16)..(16): n is a, c, g, or t
  misc_feature (24)..(24): n is a, c, g, or t
  misc_feature (26)..(26): n is a, c, g, or t
  misc_feature (355)..(355): n is a, c, g, or t
  misc_feature (372)..(372): n is a, c, g, or t
cggagccaggggcncnctgggagntncggagctggagcccgtggtatcgttggtcgacgtccttgaggaggacgaggagctggagaatgaggcgtgcgctgtcctgggcggcacgagctccgagaagtgctcctactctcagggctcagtaaagagacaagcactatatgcctgtagtacctgcaccccagaggagaagaaccagcaggaatttgtttagcttgcagttatgaatgtcatggaagtcacaaactatttgagctatacacaaaaagaattttccgttgttgattgtggaaacagcaagttttaaaattttggaatgcaattacttccctgacaaagcaaaggtaantctggcattaagtgcantg

SEQ ID NO: 1937 - DNA, 453 bp, Homo sapiens
  I.1937 (R34646)
  misc_feature (4)..(4): n is a, c, g, or t
  misc_feature (326)..(326): n is a, c, g, or t
  misc_feature (361)..(361): n is a, c, g, or t
  misc_feature (379)..(379): n is a, c, g, or t
  misc_feature (396)..(396): n is a, c, g, or t
  misc_feature (423)..(423): n is a, c, g, or t
  misc_feature (435)..(435): n is a, c, g, or t
actngcccacactgatcacttgcgagatgtccttagggtacaagaacaggaattgaagtctgaatttgagcagaacctgtctgagaaactctctgaacaagaattacaatttcgtcgtctcagtcaagagcaagttgacaactttactctggatataaatactgcctatgccagactcagagggaatcgaacaggctgttcagagccatgcagttgctggaagagggaagccaggaaaagcccaccaactctgggcttttcagtgggagggctttaaagtacaggcatggaaggaccttcatcttggcaggaaacacctacttttncccgttggggtaggttgcagttttagggccattcnaaggcccactgtttcttngattattggattttcanccccaggttttttacccgcagcttttncccttcccgganttcccttgacccctgggg

SEQ ID NO: 1938 - DNA, 426 bp, Homo sapiens
  I.1938 (R34629)
  misc_feature (238)..(238): n is a, c, g, or t
  misc_feature (251)..(251): n is a, c, g, or t
  misc_feature (287)..(287): n is a, c, g, or t
  misc_feature (294)..(294): n is a, c, g, or t
  misc_feature (327)..(327): n is a, c, g, or t
  misc_feature (355)..(355): n is a, c, g, or t
  misc_feature (371)..(371): n is a, c, g, or t
  misc_feature (394)..(394): n is a, c, g, or t
  misc_feature (402)..(402): n is a, c, g, or t
tttaaagaaggctcatatattcaacgtatgaaaccttggtttgaagttggagatgaaaattctggctggtctgcacagaaagtgaccaatctacatctaatgctacagcttgttcgtgtattggtatctcccaccaaccctcctgggtgctaccagtaggctgccagaaggctatgttccagtgtggggttattgcaggcagctttgtactatcctaatgggctactggggggttccntgctggatatccnggactgaggacccataaatactgttattcaggaggntatttcnaggggcttgcccaggtaaacccaaggacttacntttgcatcttgttaaatggcaccctttnaaaccccacccaggancccggcaattgtagggtacttcnttcaggtnccagggggctggcccttttcattt

SEQ ID NO: 1939 - DNA, 373 bp, Homo sapiens
  I.1939 (R34554)
  misc_feature (292)..(292): n is a, c, g, or t
  misc_feature (337)..(337): n is a, c, g, or t
aagcaatcaactggaactcaacaagccttgagttctcaaagggggtgtgggaaggttcttatacatcttctatgaagggcagtttatcagtcactaaattacaaatacataaaccctttgtctcaccaaacctgctgggaatgaatcctacatatatatttatatgtgtgcaggctacatggttttcattatgctattgattttaaaagtaaaaatttgggaaagaacctccatgtccaccatggggaactgggctaagtcatttatgggtgggaatgggtgatcataaaanttcattaaaaatgaaggactctattatacagcttggaatattccnttatcggaaatgcttggggacccggaggtgttttca

SEQ ID NO: 1940 - DNA, 358 bp, Homo sapiens
  I.1940 (R34539)
  misc_feature (336)..(336): n is a, c, g, or t
  misc_feature (341)..(341): n is a, c, g, or t
attcaataaatggagtcttaactaatgagatattattttctagaatggtgtagctgagagtatgtgtgattcaactgaaaggaataatgtttaatcagtgactcttactatatacaggaaaaggtgcagttctgtctttcaaatctgcctccttaccatattggcttacatccctcatgctgttttcttgtgtttgctagaaagttgttgccaagccaaatgtcatgggccatgttgaaggcaaggaaggaaaaaatgggaaatgggcctgtgccagctatatatatcgccttttatggaggggaaaggcaaagctttcttcaggaaatccccaanggggntttccccttgacttaat

SEQ ID NO: 1941 - DNA, 469 bp, Homo sapiens
  I.1941 (R34432)
  misc_feature (358)..(358): n is a, c, g, or t
  misc_feature (369)..(369): n is a, c, g, or t
  misc_feature (405)..(405): n is a, c, g, or t
  misc_feature (413)..(413): n is a, c, g, or t
  misc_feature (441)..(441): n is a, c, g, or t
  misc_feature (450)..(450): n is a, c, g, or t
  misc_feature (462)..(462): n is a, c, g, or t
gaattatgaatttcagtcttagtaaccagtgatgcactgtttcccaggcaagatgcaagggggagaaaataaagtaactagatcgctaagaagtacaggattaattaggagaagataatctaggatccatacatcttaagataataaatgagataaagaaattggaaagtaaaattgctattgtttttaaaatatgtagtccaattacatggcacaccctcacacacccacacgcttccacacacacccacacaacccaataaattttcaaagggccgtgggagccaatttaggatgggccagattcctgtggaaaggctgttcacttatattttgggttaccctttttcccaaccanttacaggcaantggggcccccattaacggtttggaactaaggtcagnggggtggntggattggagttttttcgttcatttggncttttaaanttttggtttggnaaatttt

SEQ ID NO: 1942 - DNA, 380 bp, Homo sapiens
  I.1942 (R33824)
  misc_feature (30)..(30): n is a, c, g, or t
  misc_feature (83)..(83): n is a, c, g, or t
  misc_feature (85)..(85): n is a, c, g, or t
  misc_feature (286)..(286): n is a, c, g, or t
  misc_feature (309)..(309): n is a, c, g, or t
  misc_feature (326)..(326): n is a, c, g, or t
  misc_feature (347)..(347): n is a, c, g, or t
ggagaggcagcttgccaccgggcgggacanggggagtaagtactgcgaatggtggtggtggtggtggtccggggagcgggagngnggctatagcggcctacgccggagactggcagccaggggtcttgaggaccctggacaggtgatcgtccagtatcgtctgcgggtcttcctcgtagctgccggagcaataagggagagggggtgctgcgtgggcgccccctcccgcgaatttgagtgtgagctcggagccctctctctcttcatcctcttcggatcttgcttncaggcgcttcctccaggcttttngcggctcttccaacttncaactttcactttttttccanccttcgagattcaacttcaactttcaaaaggtt

SEQ ID NO: 1943 - DNA, 361 bp, Homo sapiens
  I.1943 (R33823)
  misc_feature (54)..(54): n is a, c, g, or t
  misc_feature (213)..(213): n is a, c, g, or t
  misc_feature (256)..(256): n is a, c, g, or t
  misc_feature (316)..(316): n is a, c, g, or t
  misc_feature (327)..(327): n is a, c, g, or t
  misc_feature (353)..(353): n is a, c, g, or t
cggcacgaggggagatgacccccgtggaacccgccacctttgcagctgagctgntctcgaggctggaaaagctgaagctggagttggagagccgccacagcctggaggagcgcctgcagcagatccgagaggatgaagagagagagggctccgagctcacactcaattcgcgggagggggcgcccacgcaggcaccccctcttcccttactgncctccggcagcttacgagggaaggacccgcaggacgattattnggacgattcacctgttccagggttccttcaaggaccctgggcttgccagtttttcggggnttaggcccttnttaggcccccgtttcccgttttcccnggaccaac

SEQ ID NO: 1944 - DNA, 369 bp, Homo sapiens
  I.1944 (R32892)
  misc_feature (367)..(367): n is a, c, g, or t
agaacaggtacttcgtactgggatttcgaggctggcatcctgcagtattttgtgaatgagcaaagcaaacaccagaagcctcgaggagtcctgtctttatctggagccatagtgtccctgagcgatgaagctccccacatgctggtgggtgtactctgctaatgggagagatgtttaaactgagagctgctgatgcaaaagagaaacaattctggggtgactcagcttcgagcttgtgccaaataccacatgggaaatggaattcttaaggagtgctcccaagctccccgaagccgaagtcttcacttttgcttcccacatgggaacacccattcttgcgtcttccctgttaggccagagacacctnaa

SEQ ID NO: 1945 - DNA, 367 bp, Homo sapiens
  I.1945 (R32583)
  misc_feature (343)..(343): n is a, c, g, or t
  misc_feature (358)..(358): n is a, c, g, or t
gccttcagggagtcctgaaagagaaaggccaatcactgctgactaagaattcattatattggcttagtacacagaaattctgcagatgctattgtacacatgtgacaacctatgaagaatcaaattattctctgagttatcagtttatactaaatctcttctccttcctgctcagaataaagacttcccttctccatgaagaagtgagcttagttgagaaggaaactttttgaggaaaaaatacagtgtaaaaaggaaagaaatcaagatccaaggaaagtgaggacgacattgaggaaaatggaaataggaaacttttctggggaaaaatattttttaattngtggataattaaccntccggattt

SEQ ID NO: 1946 - DNA, 313 bp, Homo sapiens
  I.1946 (R32478)
  misc_feature (9)..(9): n is a, c, g, or t
  misc_feature (51)..(51): n is a, c, g, or t
  misc_feature (101)..(101): n is a, c, g, or t
  misc_feature (296)..(296): n is a, c, g, or t
gtttttttntaatacttttatatttttacatatgaaagattatgtttaganctttgatccatctgggatttactctggggcataaagaataatgaaggganctagtttaaaaaataaatttagctttaaaatacgatgagtatacatttctggatacaattatacaatttgctattgttttaactttctcttaggaatgttcatactctggaaaaataaaatcaaatgaaggctcaccctgctttaccaatataccatttttctaggcacacttggatatatatgggaaatatggngtcaggggggctatacc

SEQ ID NO: 1947 - DNA, 299 bp, Homo sapiens
  I.1947 (R32319)
  misc_feature (10)..(10): n is a, c, g, or t
  misc_feature (138)..(138): n is a, c, g, or t
  misc_feature (184)..(184): n is a, c, g, or t
  misc_feature (241)..(241): n is a, c, g, or t
  misc_feature (250)..(250): n is a, c, g, or t
  misc_feature (258)..(258): n is a, c, g, or t
  misc_feature (277)..(277): n is a, c, g, or t
gcagctcganagagaaactgcctgtgccgcttccactggtgctgcgtagtacagtgccaccgctgccgtgtgcgcaaggagctcagcctctgcctgtgacccgccgcccggccgctagactgacttcgcgcaggttgngctcgcacctgtgggacctcagggcaccggcaccggggcgcctctngccgctcgagcccagcctctccctgccaaagcccaacttccaggggctctggaaatnggtaaggcnaagggggnttgagaggaaacggccaanccaaggaagggccaaggggggc

SEQ ID NO: 1948 - DNA, 340 bp, Homo sapiens
  I.1948 (R32272)
  misc_feature (178)..(178): n is a, c, g, or t
  misc_feature (179)..(179): n is a, c, g, or t
  misc_feature (180)..(180): n is a, c, g, or t
ggtggtttaaatatctttattgatactaacctcacccaccatcctgtggccagcagttctggggagcccagtatccagaggcctttagactggcttttttccagtctaaaaaactgtttcctcctagaggccaaggggagggagggcctgtacagtgtcctttaaacgctccccgagnnncttttcggggccgtctggcgccctgggccttcgtgggtgggcgttcctctcaagcccctcgcctcaccatttccagagccctggggagttgggctttggcagggagaggctgggctcgagcggcgagaggcgcccggtgccgttgccctgaggtcccaca

SEQ ID NO: 1949 - DNA, 385 bp, Homo sapiens
  I.1949 (R32245)
  misc_feature (144)..(144): n is a, c, g, or t
  misc_feature (188)..(188): n is a, c, g, or t
  misc_feature (215)..(215): n is a, c, g, or t
  misc_feature (236)..(236): n is a, c, g, or t
  misc_feature (299)..(299): n is a, c, g, or t
  misc_feature (328)..(328): n is a, c, g, or t
  misc_feature (353)..(353): n is a, c, g, or t
gctgcacctcccaggggacagtccccacatgattacaaaagccaggtgccctcatcacccgttacccctgacctgtccacttgttttgaataaaccttcattctccaagcagatccccaaacttccttgtccttgttacacgtntacctcacaacctcacaattcaacaacagggtaaatacctgggntttcactggatttctttactgtccttntctgaggggttgggggaaggntgggggggctaggaaaagggctcataatttttaaaactcttgggggaattaaacttggggggnattttctattccctacaggtgttttcttnggggggatttttagggctcactggntcggccctagggattaggtggtggaactctcc

SEQ ID NO: 1950 - DNA, 207 bp, Homo sapiens
  I.1950 (R32191)
  misc_feature (155)..(155): n is a, c, g, or t
  misc_feature (171)..(171): n is a, c, g, or t
atttaaaaaaaaaaagtgtgaagtaagacaaaatggacctctaagttgtagggaaggacaaggaaaagaccaggggtagaaaaggagtgtaagttttagaatggtggcattggcatagatgtgggaagagtataaaactagaagaagtctccagntaaaaatatggcaaantatgtctgtttaagtataaccattttctgtccccat

SEQ ID NO: 1951 - DNA, 335 bp, Homo sapiens
  I.1951 (R31604)
  misc_feature (40)..(40): n is a, c, g, or t
  misc_feature (115)..(115): n is a, c, g, or t
  misc_feature (138)..(138): n is a, c, g, or t
  misc_feature (181)..(181): n is a, c, g, or t
  misc_feature (230)..(230): n is a, c, g, or t
  misc_feature (251)..(251): n is a, c, g, or t
  misc_feature (257)..(257): n is a, c, g, or t
  misc_feature (275)..(275): n is a, c, g, or t
  misc_feature (295)..(295): n is a, c, g, or t
  misc_feature (307)..(307): n is a, c, g, or t
  misc_feature (332)..(332): n is a, c, g, or t
ttttgtacacaaatgttcacagcagctttatttgtaatancccaaaactaaaacaacccaaatgtcatcaacaagtaaatgggtaaatgaattgtggtatatccatacaagggantattcaacatttaaaagaatganttcatacgagcatcaagatggagacatatgaatctcaaaatanttatgcaaagtgaaagaagccagacaaaaaaaaaagacatactatatgnttcccttcaccattaaaactnccaaantgccaaattggaagccgnttggggggttttctgggggnggggggtcctcnggggggggcctttgtggcccttttnggg

SEQ ID NO: 1952 - DNA, 342 bp, Homo sapiens
  I.1952 (R31524)
  misc_feature (310)..(310): n is a, c, g, or t
ttattaacaaaaaagtacaaagaagtacaaatggacatcctatttcccattgtggtccatctgtctatctacctttcagtccatgagatggttttttagagctttaagaatgggtaaaatacttctcctgtttctaatgggccctaataaccatcctaaaccaaataattgtgtatttaagttacacagtccaattttttaaaaatgttcaaatctattgttataaaagcctctccccttgcaatacacccacggtaccccaaactggaacattggcggtcaaccatcccattaaatcatatatatatcnctgggatggtttgccttttggaaatacaggtt

SEQ ID NO: 1953 - DNA, 410 bp, Homo sapiens
  I.1953 (R31395)
  misc_feature (365)..(365): n is a, c, g, or t
gcctccatagaaaggcttcgtgtggaatatcactgtcgctgagtacccagtcttggcacagttgatgctgacttttcctccgagctccacccacgggatggtgagaatggaccgggcgtaggcactaggcagggtgaatacgtactcctccccgtgttccaggagcctcaacacaccttcccctatcatagagacccccacggacatgcccatgaacttgcttttggtccatacatgagtgttgacgcacagtctcttctcctcgcactcacagtagaagcaggagatgggtgggtgatgggacacttgctcagccacaaaccttagtttgtagcttttgggaagggtcatcggccatttgggtnttcatgacagctggcaggagagccgggaagcagttctctttaggt

SEQ ID NO: 1954 - DNA, 383 bp, Homo sapiens
  I.1954 (R31345)
  misc_feature (50)..(50): n is a, c, g, or t
  misc_feature (52)..(52): n is a, c, g, or t
  misc_feature (70)..(70): n is a, c, g, or t
  misc_feature (338)..(338): n is a, c, g, or t
  misc_feature (343)..(343): n is a, c, g, or t
  misc_feature (360)..(360): n is a, c, g, or t
gcttgaaaaccctctgaactcagtcttctttacctcattatcaccttccngnaggcactcctaaaatganaatgaaagacagaacatggagaacttgctcaagtgcaggcagagagcaaaaaggggaaatatgtctgggaaaaagtgcacgtgaagaaacaaagaaggacagaggccattccgaaatcaagaaactcatgttcttaactttaaaaaaggtatcaatccttggtttttaaactgtggtccatctccagactctaccacttacgggacaggacaggacaggacagacacacacacacacacacacacacactttttgggacagtgggggngcccnaggaagttatttagttnagtgagtgggtctttttttgtta

SEQ ID NO: 1955 - DNA, 387 bp, Homo sapiens
  I.1955 (R31034)
  misc_feature (312)..(312): n is a, c, g, or t
  misc_feature (318)..(318): n is a, c, g, or t
  misc_feature (355)..(355): n is a, c, g, or t
  misc_feature (371)..(371): n is a, c, g, or t
  misc_feature (380)..(380): n is a, c, g, or t
tatgaattattatgttgcacatttttgcatgtgttctgataaaaatcaattctagcactgtgaagcttcagacaccttgaaagtcctaacattagaattgtaaatgttatttatggaaataccttccaatgctattgagaaattcaaatctctattgtatattgttctttgatatgtggcttagttttatgttttgattttttttgctactgtgcaagtttaatgtgaataaaatctttgtgggaatgatggattttatgtttaggtgagtgggtcatctggaattttcccagctcccccaggaaaatgtanggcacngggtatagcaccccttatggttacctaaagccccggncctaaccactggaacnccaggttcntggatgg

SEQ ID NO: 1956 - DNA, 434 bp, Homo sapiens
  I.1956 (R28452)
  misc_feature (250)..(250): n is a, c, g, or t
  misc_feature (327)..(327): n is a, c, g, or t
  misc_feature (383)..(383): n is a, c, g, or t
  misc_feature (398)..(398): n is a, c, g, or t
  misc_feature (416)..(416): n is a, c, g, or t
tgtacataaaggagtatatggctgttgtcccgtggggtatgtttaattcctctaaatgtttaaagtacttttctgcctgtactctccagttctgtcgttgagtatacactcaggcttgagatacaaccaaaatttgcttgcctttctctagccactggctgaccagtgagttcgtgtgatggggcacacaggaaatgcacacaggatgtacatacacgtatgtatggcacacacagtattatggattccnttaaaattccaaatggcaggtttaattcttcctaatggggttttccagtgttggattcgttaataggtctggaggcngggccagtgttcccttttgggctggcccgtcttggggtttggttaaaggggggtantctttccggttcccngggggttctttggccccntccggagtatttgtactt

SEQ ID NO: 1957 - DNA, 243 bp, Homo sapiens
  I.1957 (R27855)
  misc_feature (55)..(55): n is a, c, g, or t
  misc_feature (132)..(132): n is a, c, g, or t
  misc_feature (156)..(156): n is a, c, g, or t
gccattgaccccgcagcttctcctggcccttgtcctctgggccagctgcccgccntgcagtggaaggaaagggcccccagcagctctgacactgccccgggtgcaatgccgagcctctcggtacccgatcgncgtggattgctcctgggaccctgncgcctgctccaaactccaccagccccgtgtccttcatttgccacgtacaggctcggcatgggcttgcccgggggccacagcttggcc

SEQ ID NO: 1958 - DNA, 389 bp, Homo sapiens
  I.1958 (R27771)
  misc_feature (24)..(24): n is a, c, g, or t
  misc_feature (376)..(376): n is a, c, g, or t
attttatatttatattaatttttnagagatggggtcttgctgtgtggcccggactggtttcgagctcctggcctcaagctaccctcccacgtcggcttcccagtgactgggattacaggtgcgatccactgcgcccagcccaacaacaattcttttctaattaaacaataaaaaatatctcacagtgacagttcagtcagccctgcactgtgggtaaaggtaaaggtaaaggagagagtaggtacatctccatttctcagctagagaaactgagggctcaaaggggaaaagtcgggtcatctgaggttgcccggcagcttcaggcaggcagcaaagcaagggactccagcccgggctagggcagatccccatccgnccttccaacaggg

SEQ ID NO: 1959 - DNA, 286 bp, Homo sapiens
  I.1959 (R27484)
  misc_feature (254)..(254): n is a, c, g, or t
  misc_feature (260)..(260): n is a, c, g, or t
  misc_feature (284)..(284): n is a, c, g, or t
gaaaattcatctactattatccagaatccagtagagacacccaagaaggactatagtctgttaccactgttagcagctgcccctcaagttggagaaaagattgcatttaagcttttggagctaacatccagttactctcctgatgtctctgactacaaggaaggaagaatattaagccacaatccagagacccagcaagtaggatataggaaattctttcatccttacctgccttgaggaggaaccggggaaanttggantttgttttatcacaatggaaaatngg

SEQ ID NO: 1960 - DNA, 445 bp, Homo sapiens
  I.1960 (R27123)
  misc_feature (392)..(392): n is a, c, g, or t
  misc_feature (422)..(422): n is a, c, g, or t
  misc_feature (437)..(437): n is a, c, g, or t
  misc_feature (444)..(444): n is a, c, g, or t
taggaagagtagtgtgcattcagacattcggaatttttgctagtagttggagatgtttcagtgagtgaattaaaacaaagtctatttaactgacgtgatctattttgtgtctaaaacagaggaatttatcttgtcctagaagttcatgaactataagatctaagtttttttttcttttttaacaataaaatgattttttcttaaagtatcaaagttggaattggctaaaagtgaagtagcataactcagatatgttggaacttggtactgaaggcaggctttttgggtaacaggaaatgacattttaaggggtaactgtatatcctgtttttagttctttgcctctcagattctgtttaacttagttttaaattcactggaataccctaccnctagggcgttgctccttacaaaggctgttnatttccattacgggnaaacccnt

SEQ ID NO: 1961 - DNA, 371 bp, Homo sapiens
  I.1961 (R26941)
  misc_feature (166)..(166): n is a, c, g, or t
  misc_feature (170)..(170): n is a, c, g, or t
  misc_feature (201)..(201): n is a, c, g, or t
  misc_feature (316)..(316): n is a, c, g, or t
cgactttgcagatttctcttcccccaggcctccctcctccacctctccgccccctccgggcttggctctcccaggaggctacgactggagccactggtcccgcagatccccgcgtcctcggtcgccgcgtccacgtccctctcgcgtccccgcccggcgccacgcncctncctctgggttcggcctccgcgcggtgcagcnagttcttcaggccgcgggacaatcccgacttaaatctctgcaatggctaacgaagcttatccttgtccgtgtgacattgggccacagacttgagtatgggagggctagggcgtgnaagtttcaagttcgaggcacatcaagggtttatggttcaccaaaattcccccgtt

SEQ ID NO: 1962 - DNA, 263 bp, Homo sapiens
  I.1962 (R26891)
  misc_feature (75)..(75): n is a, c, g, or t
  misc_feature (217)..(217): n is a, c, g, or t
  misc_feature (245)..(245): n is a, c, g, or t
  misc_feature (257)..(257): n is a, c, g, or t
aaccttttcataacgcatcccccaagttggggatttaaatcgctgaaatgtttatttagcactagagaagtaaantcaaagttgcctgtgggtagacgtacaatagaattggttgacaaagtttggtttataaaatatacttacatattgtttcttagggcaaaaatcggcagcaatctgggaataattcaggattttttatgggggttaattgccnatctttttatctgtgacggttaatgccncaaaatggctcnggggcc

SEQ ID NO: 1963 - DNA, 409 bp, Homo sapiens
  I.1963 (R26717)
  misc_feature (264)..(264): n is a, c, g, or t
  misc_feature (284)..(284): n is a, c, g, or t
  misc_feature (383)..(383): n is a, c, g, or t
tttttaggattcctacacttattttataaaagtgaaaattaaatcaaatgatctaactatttccaagcaaattttgggatgaaagctattctaggaaggcttgccttgattcttgctacatgtacttgttcagccactcaattaaattccttctggcctcgtcaatgtagggcttgtctgcaggtgagcaatcttctctcttccgatgcacgaacccatgagtctgcccagaaaatgttttaatttgatattcaactttgcagngttctttcaacttctgaggncaggcaaaggatacgggcccttgagtgggggaatcaccaacatccattttcaggccaaaaatggaccaaagtggggggggttcctttaaattggtaaangtccttcagggaatcccctggacaat

SEQ ID NO: 1964 - DNA, 410 bp, Homo sapiens
  I.1964 (R26639)
  misc_feature (272)..(272): n is a, c, g, or t
  misc_feature (350)..(350): n is a, c, g, or t
  misc_feature (359)..(359): n is a, c, g, or t
  misc_feature (408)..(408): n is a, c, g, or t
catcttaatctcttcacatggtacactaaatgctgcctataacccatcctcatcttctttactcatcattgctttcttcaaggaaggtcttgatactgccctcgtctacctcactatccgctagtctagatagtgactctttggaaaattggtagcctctgaatgagttatccaacttctgcttcctcacattggccactttgcataggttcgggaacttaggcaggttttaaatcatcatgcccatgggagggtgaaatactttgagggangggggaacatctctttcactgtgttttttgggatcagccttcttctcaaccgccaaggaaatggcatggattttcccntgcccactntagggggagtaggtgctgcatgattgaatcataatttgaggaattcttnca

SEQ ID NO: 1965 - DNA, 356 bp, Homo sapiens
  I.1965 (R26444)
  misc_feature (336)..(336): n is a, c, g, or t
  misc_feature (354)..(354): n is a, c, g, or t
tccaaagtttattttatatagcacacatttatatggaactgtaacagtgtttcaacacaagacatttgtgcagaaaaataacaggaactcttttgttaggatgattgtctctgttttatacatgaaagagctagtatataaaaatagtttttaaaccaaaggtaaccttctctattctatatcaaaagtacaatactctgagtgggcaaagaaccaggggaatctgaaaggaattacctccttttactaatccaagactgggcagcccaaagggaacactgggcctgcttcagactatttacgggttcacactggaaactcattgggggggaattnatctgcatttggattttntg

SEQ ID NO: 1966 - DNA, 269 bp, Homo sapiens
  I.1966 (R26330)
  misc_feature (137)..(137): n is a, c, g, or t
  misc_feature (226)..(226): n is a, c, g, or t
cagcaccatctctgcagcatctctgtaggctcaccattaacaaatgtaccggtgccatctggggactgcctttaccaacaagactaaaagattacttggaagaatataaattccagccagctgttttttatcctggntagaagaattttgtgttttcttttagctatgggatctttgaacattaccctatgatcgaagagttttgagttggggttttaggatgttnggtgtcatggaggaaacagggaatctgggtgtatgcccagccc

SEQ ID NO: 1967 - DNA, 438 bp, Homo sapiens
  I.1967 (R26118)
  misc_feature (253)..(253): n is a, c, g, or t
  misc_feature (373)..(373): n is a, c, g, or t
  misc_feature (388)..(388): n is a, c, g, or t
  misc_feature (427)..(427): n is a, c, g, or t
  misc_feature (436)..(436): n is a, c, g, or t
catgcaccaagattcttttaattttaccaaagaatctaagaatttccttagtatattatagcttttttgtttcctttacttttttcttaattgcctgacagatgaaaataaagctcaatggcactcttatctattgaggatcaattggaaataagaataatctacgtaaatgggaaaaatgacttgcaaaaacacaccctatgcccatcatcttctgggaacacatctgtttgttagctgggaagcagagcgnaggacagccttccagatcccttgataatgaaaattcatccaaagggttatgatgatgatgatgatggctggcatacaccagattcctgtttctccatgacaaccaacatctaaaacccanctcaaaactcttcgntcataggggtaatgttcaaggatccataggctaaagganaacaccaantt

SEQ ID NO: 1968 - DNA, 438 bp, Homo sapiens
  I.1968 (R26082)
  misc_feature (315)..(315): n is a, c, g, or t
  misc_feature (387)..(387): n is a, c, g, or t
  misc_feature (398)..(398): n is a, c, g, or t
  misc_feature (407)..(407): n is a, c, g, or t
  misc_feature (417)..(417): n is a, c, g, or t
cataattcatttttcttttattttggtccttttctctaaaaaggtacaatttgatcaagctattaaaatgctataaaaatattaccagtttggtggtcttctaatgagaaatctaaagcacacctccccacccactcggatatctgtttctgatgatcacgtgacatctagcatatacgtctgtaggaaaagggaaaaagcaaacccatttcacaaatggctaaagtcaatgtcttcaattgtaaattcttcatctcaggttatttttttaagtgtctgacagggcacaaacactttcctcatatctattatatnggctgagggtttatccatggggttttaaatacctaatgaggggctaaattattacagtttttttcacatccnttacatttatnacatctctntcagggtgtnttcttcggtgagcttgggttt

SEQ ID NO: 1969 - DNA, 346 bp, Homo sapiens
  I.1969 (R25834)
  misc_feature (295)..(295): n is a, c, g, or t
  misc_feature (305)..(305): n is a, c, g, or t
  misc_feature (315)..(315): n is a, c, g, or t
  misc_feature (344)..(344): n is a, c, g, or t
tctgaagttacgttttgtgaagagcaaagcacttggaatctctgttttaaagcttcaagtgttaaaaatgctacaatagttttttatctataaaattatctaaagaatcattgtctttcagagactcataggaaaaaaaaactgggaaaagtgtcaccgcattgttctcttttgtctacaaatcactgaactcagggtactactgtagggcagtttcctcctcagtctcctccgtgggctagtgtgtctaggttcacggagggcaattaactggggtcttactatcattgtaggnggtggattcnttggtatttngccaaggccaaaacggcttaccagggggnaa

SEQ ID NO: 1970 - DNA, 379 bp, Homo sapiens
  I.1970 (R25804)
  misc_feature (134)..(134): n is a, c, g, or t
  misc_feature (319)..(319): n is a, c, g, or t
  misc_feature (351)..(351): n is a, c, g, or t
gcctggtctgcgatgccaggtcgccccactccagcacgggggtcaaggtcctggcattcttgtcgctggctgaggtgggtcaggtggctgggcaggccccagcggagtgaaaggcggtgctcctggaagctttngggtcacccagtgaggatgtgagggctgcagctcgtatgcactgggccgtgtgggtgctggcagcctgcccgacttcctgcccttcctgctggagcagatcgaggctgagccccgacgacagtacctgctgctgcactcactcagggaggccctggggcgcccaagccttgacagcctgaagccntacgccgaggacatctgggcctttgttgtttncagcgttgcaagggtgttgaggagggca

SEQ ID NO: 1971 - DNA, 430 bp, Homo sapiens
  I.1971 (R25797)
  misc_feature (89)..(89): n is a, c, g, or t
  misc_feature (92)..(92): n is a, c, g, or t
  misc_feature (367)..(367): n is a, c, g, or t
  misc_feature (411)..(411): n is a, c, g, or t
  misc_feature (419)..(419): n is a, c, g, or t
  misc_feature (425)..(425): n is a, c, g, or t
tacccaccactgccgcccgcctgccgatgccaacctcagcaagaacggggggctggaggtctggctgccccgggacaggcaggggactngangtcctgcctccgcttcacctccccgcagtggggactgccctttctcaatggcacagaagccaatggacaggggccacagagcctgcaccgatggctggatctatgacaacagcaccttcccatctaccatcgtgactgagtgggaccttgtgtgctctcacagggccctacgccagctggcccagtccttgtacatggtgggggtgctgctcggagccatggtgttcggctaccttgcagacaggctagggcgccggaaggtactcatcttgaantaccttgcagacagtgtgttagggacctgcggagctttcggaanccaatttncccatnttatt

SEQ ID NO: 1972 - DNA, 439 bp, Homo sapiens
  I.1972 (R25720)
  misc_feature (430)..(430): n is a, c, g, or t
tacaaggttgtacaaaccatccccactatctagttttagaatattttcgtcacctcagaataaaccccaaaccctattatgtagtcactcctcctttccccctcttctcaaaccctaccaaccactaatctgctttttgactctatggttttgtcaactctgtacatttcatataaaggaaatcatacaatatatggtcttttgtggctggcttctttcacttagcatgatgtttctaagggtcatcatgatatagcatgtatcagtacttcattcctttttattgccaaataatgcacctctgtttttttttaaaggacaagagtttcgctcttgtttccttgggctagagtgcagtgggtgccacctcgggcttcactggcaacttctggcctgctggggtttcaaggcaattcttcctggcctcagncttcccgag

SEQ ID NO: 1973 - DNA, 361 bp, Homo sapiens
  I.1973 (R25702)
  misc_feature (16)..(16): n is a, c, g, or t
  misc_feature (271)..(271): n is a, c, g, or t
  misc_feature (297)..(297): n is a, c, g, or t
aaagctagtctaggtntgagagcccacattgtctgtagccatcaaaaataataataataaactggacagtttacaatcgttggtttctttcaaaaggccttttttggaaagaagaaaaggcagtcaccgttttccacttggggttttggtttgtgcaacaggcaggggaggagtggggacgcgtttgttctagcttgatttccatgggcaacagcagcggcacgtttgggaccccagaacccagcaccctcatcctgtgggccagaggggncgggaccactgaccccttttcagggntccaccacagcccaggaccgttcaccgtggacccggtgggcattgcattgtttcccagggggca

SEQ ID NO: 1974 - DNA, 434 bp, Homo sapiens
  I.1974 (R25640)
  misc_feature (4)..(4): n is a, c, g, or t
  misc_feature (180)..(180): n is a, c, g, or t
  misc_feature (308)..(308): n is a, c, g, or t
  misc_feature (369)..(369): n is a, c, g, or t
  misc_feature (381)..(381): n is a, c, g, or t
  misc_feature (404)..(404): n is a, c, g, or t
tagntcaatatgattttatttaaaaatgtgtacagctgaaggagggatctgatcttttgttaaatgaaaccaattttcacggtatatatttggccattttagcttcgtagtgaataataacagaaaaggaagtttctgttcaagatcctcactccagcacactcagccagggtgcctggnaagatgacacatttcctgggtctgaagctcacagccaatcctctcactgaagtgaaacaccaattctccggggatacacacacatacgcacatcttattttcactgctcttacacaggggacctgagnatccttaattttaaagttgggggaaaacgtggaaggggttccctaactccttgtctgcggncaaatcccactnactgtttaactccttaacattgncaggttttaaaatacttggaattttacagg

SEQ ID NO: 1975 - DNA, 388 bp, Homo sapiens
  I.1975 (R25556)
  misc_feature (357)..(357): n is a, c, g, or t
  misc_feature (369)..(369): n is a, c, g, or t
  misc_feature (384)..(384): n is a, c, g, or t
gaatgaggctgttggacgagaactgctcattttcttggcccagtacctatgcaacgaataccagaaggggaacgagacaattgtcaacctgatccacagtacccgcattcacatcatgccttccctgaacccagatggctttgagaaggcagcgtctcagcctggtgaactcaaggactggtttgtgggtcgaagcaatgcccagggaatagatctgaaccggaactttccagacctggataggatagtgtacgtgaatgagaaagaaggtggtccaaataatcatctgttgaaaaatatggaagaaaattgtgggattcaaaacacaaagcttgctcctggaggaccaaggctgtncatttcattggnttatgggtatttccntttt

SEQ ID NO: 1976 - DNA, 397 bp, Homo sapiens
  I.1976 (R25544)
  misc_feature (381)..(381): n is a, c, g, or t
ccaggaggagctcggtggtgccaagacccacaccaccatgtcaggtgtggcccacagagcttttgaaaatgatgttgatgccttgtgtaatctccgggatttcttcaactacctgcccctgagcagtcaggacccggctcccgtccgtgagtgccacgatcccagtgaccgtctggttcctgagcttgacacaattgtccctttggaatcaaccaaagcctacaacatggtggacatcatacactctgttgttgatgagcgtgaattttttgagatcatgcccaattatgccaagaacatcattgttggttttgcaagaatgaatggggaggactgttgggaattgttgggcaaccaacctaaggtgggcctcagggatgnttgggatatttaattt

SEQ ID NO: 1977 - DNA, 454 bp, Homo sapiens
  I.1977 (R25530)
  misc_feature (364)..(364): n is a, c, g, or t
gcggacaggagcctgatcccacagcagctgctccagcccgcgatgaggaaaagtccaggtctgtctgactgtctttgggcctggatcctccttctgagcacactgactggaagaagctatggacagccgtcattacaagatgaacttaaagacaataccactgtcttcaccaggattttggacagactcctagatggctatgacaatcgcctgagaccaggattgggagagcgtgtaaccgaagtgaagactgatatcttcgtcaccagtttcggacccgtttcagaccatgatatggaatatacaatagatgtatttttccgtcaaagctggaaggatgaaaggttaaaatttaaaggacctntggacagtcctccggttaaaattaacctaatgggcaagttaaaatctgggactccggacacattttttccacattgggaaaggagttcag

SEQ ID NO: 1978 - DNA, 247 bp, Homo sapiens
  I.1978 (R24980)
  misc_feature (25)..(25): n is a, c, g, or t
tgttccgggggaagaagtggaacgntctgcgccagcgttgggactcctgttcctatgacctggaccagctgttcatcgggactctgctcttcaccatcctgctcttcctcctgcctaccacagccctgtactacctggtgttcaccctgctccggctcctgggtgggtcgccgtgcagggcctgatccatctgctgggtggacctcatcaactccctgccgctgtactcactgggtcttcggctctg

SEQ ID NO: 1979 - DNA, 502 bp, Homo sapiens
  I.1979 (R24955)
  misc_feature (53)..(53): n is a, c, g, or t
  misc_feature (226)..(226): n is a, c, g, or t
  misc_feature (260)..(260): n is a, c, g, or t
  misc_feature (346)..(346): n is a, c, g, or t
  misc_feature (353)..(353): n is a, c, g, or t
  misc_feature (381)..(381): n is a, c, g, or t
  misc_feature (400)..(400): n is a, c, g, or t
  misc_feature (406)..(406): n is a, c, g, or t
  misc_feature (434)..(434): n is a, c, g, or t
  misc_feature (472)..(472): n is a, c, g, or t
  misc_feature (479)..(479): n is a, c, g, or t
ggtcatgcacccagtctcaaagtggtgaaggaggcagtgttgactacagttanctgcaaccaggtcaagatggctatgccaatatgctcagtattcacaggattatcagcagttttatcaacaacaagctggaggattggaatctgatgcatcatctgcatcaggcacagcagtgaccaccacctcagcggctgtagtgtcccagagtcctcagctgtataatcanacctccaatccacctgggctctccgactgaggangcacagcctagcactagcacaagtacacaggccccagccgcttcccctactggtgtagttcctgggtaccaaatatgcagtacctnacacgtncactttaccagtatggatggaatctttnagggtctttactatggatncgacancaggggtttttttattgaccccaatttngcattattatttttatttttttggaccccggcgttacntttattnggggttgggggaaaaggagacct

SEQ ID NO: 1980 - DNA, 442 bp, Homo sapiens
  I.1980 (R24839)
  misc_feature (101)..(101): n is a, c, g, or t
  misc_feature (104)..(104): n is a, c, g, or t
  misc_feature (333)..(333): n is a, c, g, or t
  misc_feature (376)..(376): n is a, c, g, or t
  misc_feature (412)..(412): n is a, c, g, or t
  misc_feature (424)..(424): n is a, c, g, or t
  misc_feature (439)..(439): n is a, c, g, or t
cagtttgcacttaaaaagaaaaaaaaaaaaacgggtggtgtgtctcaggacaaaaggaggctcttctcattcagctaaattcacatttgcccccccccgcntgnccccgcccccatatgctcctgctattattttggtaatgctctgatgcaacattgcaactttatgaaatatttgtatgaaaacaaaaagactgcaaaaaatacactttcaaaagaaaccattcattgcatgtttattatggcaagtttaaatgaacaaaggaaaaccttcaggaaacaagttgatccaacgtgaggaggaaattttcatggataattattccataggtantaaagtgttcgtgggggctttaattgtattatctgggaggccngtgttcatccacccaacatggtggataccatttggnacttggacagtngtttttgggggtttngct

SEQ ID NO: 1981 - DNA, 360 bp, Homo sapiens
  I.1981 (R24748)
  misc_feature (119)..(119): n is a, c, g, or t
ggggacaggccgcttccccacatccgctcatgccactgtaagcagccctagctcttgggtccaggacctcaccagctcctcgtcagactcctgtgctcttccaggggctgctcagccancctgaagagcccagagaggctgtcttcctacccagcaggtctcatgcaggcccagggctggggatgcaggcaagaggagggagatggccgccctgtccctctccctagctgggcggctctattctggaggcagttcttgctggcccgtttgctctcaggggaaagggttcacggccccccatctttaggccccaggggggtgaagtggggtgctgggtgatggggatgggtgttgggcgtt

SEQ ID NO: 1982 - DNA, 520 bp, Homo sapiens
  I.1982 (R24312)
  misc_feature (24)..(24): n is a, c, g, or t
  misc_feature (480)..(480): n is a, c, g, or t
aaggctgggagcagaatatggcgnttttacttcttacattgccaaaggtgaagatgaagagctgctaacagtgaatccagaaagcaattctttggcattggtctacagagacagagagactctgaaatttgtcaagcatattaaccaccgaagcctggaacaaaagaaaaccttcccaaacagaacaggtttctgggacttttcattcatctattatgaatgacagcactgggcaaagctgaacaaaaatgtgacccttcgtaattactgggaagtctgaaagagctaagcatggagtcaaggagaactacatggtagcttgcctgacagtgttcttaaaactggttgtcttttactaggactcataatgattgtcctcaaccgagaccttgagcttgcagcttaagtacttattctcttgattaaaaaaaaaaagttggcttttttttttttaactttagtccttttcctattggcttntcagtgatttttaagttcatttggtttttattgagggaat

SEQ ID NO: 1983 - DNA, 337 bp, Homo sapiens
  I.1983 (R23818)
  misc_feature (332)..(332): n is a, c, g, or t
ggttaatgaggaatatatcatcatgggctatgaagatgaggaacgttccagattactcttggtggaaggctctatagctgagaagtggaaggatcgactcggtaaaaaagttaagcgctgggatatgaagcttcgtcatcttggactcagtaaaagtgattctagcaatagtgattccactcagagtcagaagtctggcaggaactcgaacccccggcaagcacgcaactaaatcccgaaatacaaaaagtaacacagtgggacttcctattaagactttactttgcattgctgggactaggcaaagggaaaatttgcactatttgcacatncatat

SEQ ID NO: 1984 - DNA, 221 bp, Homo sapiens
  I.1984 (R23759)
  misc_feature (12)..(12): n is a, c, g, or t
  misc_feature (58)..(58): n is a, c, g, or t
  misc_feature (72)..(72): n is a, c, g, or t
  misc_feature (75)..(75): n is a, c, g, or t
  misc_feature (143)..(143): n is a, c, g, or t
  misc_feature (146)..(146): n is a, c, g, or t
tttttttttttnaccaatgggtttatttaaaaggaagcaaattaaacaaaactatggngataacagcagatntcnagttataattcatttctctaatgctgattaatatattcatgaacaaatcaaatgtattgccaaaagangantgctaccattaacaccccagcggctactggtttcagttgtgcttctcaatcaggcaaaatgttctttcttaaggc

SEQ ID NO: 1985 - DNA, 417 bp, Homo sapiens
  I.1985 (R23489)
  misc_feature (356)..(356): n is a, c, g, or t
  misc_feature (371)..(371): n is a, c, g, or t
  misc_feature (378)..(378): n is a, c, g, or t
  misc_feature (392)..(392): n is a, c, g, or t
  misc_feature (399)..(399): n is a, c, g, or t
  misc_feature (406)..(406): n is a, c, g, or t
  misc_feature (411)..(411): n is a, c, g, or t
ggagagaaactatttaagtgtaaagaatgttcaaaagcctttagccaaagttcagctcttattcaacatcaaataacgcatactggagagaaaccctacatatgtaaagaatgtgggaaagcctttactctcagtacatccctttataaacatctaagaacccatactgtggagaaatcctacagatgtaaagaatgtgggtaaatccttcagccgaaggtcagggcctttttatacatcaaaaaattcatgctgaaggaaaacccttgtaaggtattaatccgggtagggaagggctctagttgcagcacatccctttctgggatgtccaaggattccttctaggaaggagtccnacttatggtattgangtgggcnacacttttaggctnggcttcnacccttnggttntcctcc

SEQ ID NO: 1986 - DNA, 470 bp, Homo sapiens
  I.1986 (R23420)
  misc_feature (17)..(17): n is a, c, g, or t
  misc_feature (303)..(303): n is a, c, g, or t
  misc_feature (412)..(412): n is a, c, g, or t
  misc_feature (454)..(454): n is a, c, g, or t
atgacaggcctgtggantgacctcaagaacgcctatgcccgtgatgagttcaccaacacctgtgcagctgacagtgagatcgagttggcctacgctgatgtcgccaaacgcctcagccgatcctgagcacagccattttgccccatccccgctgcagaaggactcaaccactcccctaagactccagcttcatagactcctctgtatcactgccttgaggcgcactttttataatcaagcctcatcttgctggtatcatgggaactccagcctgctatctttcatgaaggtcagcaccatccngggcctcctcacatagggaatctaggcaggaaatgataggacacagtccacctttcggccggccagcctgatctggggctcagcatgttttgggggtcagtcagtgttnggagagcccacatatgggggtttgccattaggttttttttgnccattatcaaaaataa

SEQ ID NO: 1987 - DNA, 304 bp, Homo sapiens
  I.1987 (R23042)
  misc_feature (226)..(226): n is a, c, g, or t
  misc_feature (246)..(246): n is a, c, g, or t
  misc_feature (260)..(260): n is a, c, g, or t
atcaagatatgtcttctccgactactatgaagaagcctgaaaagccattgttcagctctgcatctccacaggattcttccccaagactgagcactttcccccagcaccaccatcccggaatacctgggagttgcacacagtgtcatctcaactcgaactccacctccaccttcaccgttgccatttccaacacaagctattccttcctccaggccccatcggaggntactttttttcatccaacantcaggatatccttncccacctggaatccttcaggggttactctggaagggactatggt

SEQ ID NO: 1988 - DNA, 346 bp, Homo sapiens
  I.1988 (R22937)
  misc_feature (239)..(239): n is a, c, g, or t
ttcctttttttttcattttttctttttttaagatttcaaactgggttacacactggaaaaggctgggttaagggccgaaatttaataaatctgtactgataactaaaggctacagagatttcatatatttttttaacttttagaaatcagagtgcttataaaatggctggctcatggctctgtcacccagcatctctgacgccgcctcctagccttcgttgggtgaggataccaggggnataggtgattcccatgcggtaaaccaaccaaggaatacttaaacccaattaaaactaggctttatcatgccaatattaggggcatcttgggaaggtcaggttaaaat

SEQ ID NO: 1989 - DNA, 328 bp, Homo sapiens
  I.1989 (R21335)
  misc_feature (160)..(160): n is a, c, g, or t
  misc_feature (176)..(176): n is a, c, g, or t
  misc_feature (199)..(199): n is a, c, g, or t
taaatctctctgtggtatgaaccttagggaccaactcttaaatgctggaaaggacaaatactatattttgtgcagaatggtaattaaacattgtaaccatttcttagagaatcattattaaatcagggaatcttgttatatttttgaaaatatattaganattatttttgaatttntttaggtattagaatatttaaangatctgaaacaatattggaaaagaggatatgggtatactattaacagtcgatccagctgcaccttgtttcaggatatctttgcagcacttgggacaaagcagttgaacagaaacaaaggtcttcagcca

SEQ ID NO: 1990 - DNA, 391 bp, Homo sapiens
  I.1990 (R21326)
  misc_feature (169)..(169): n is a, c, g, or t
  misc_feature (369)..(369): n is a, c, g, or t
  misc_feature (378)..(378): n is a, c, g, or t
gacatttaagtgacatgttgacctatggctgcacaaggctggagattggggtgcagagtgtttatgaagatgtggctagagacaccaacaggggccacactgtgaaggcagtgtgtgagtcatttcacctggccaaagattccggttttaaagtggtggcccatatgangcctgacctgccaaacgtgggactagaaagagacattgaacagttcacagagttttttgagaaccctgcttttcgtcccgatgggctgaaactctatcctaccctggtgattcgtgggaccgggctttatgagctttggaaatcaggaagatataagagttacttctcctagtgacctgggttgaattgggtggctcggntcctagccntcgttgcctccat

SEQ ID NO: 1991 - DNA, 418 bp, Homo sapiens
  I.1991 (R21321)
  misc_feature (43)..(43): n is a, c, g, or t
  misc_feature (350)..(350): n is a, c, g, or t
  misc_feature (403)..(403): n is a, c, g, or t
gagtttgccacgctgcgacaccataggttggccccccgggatntcgggtggactacgaacacaaactgaagccctaggacttgtcgcccgtttgcgctctcgccgaggcacaggctgctcgcggaccaccctgctccgaaaactaagaggtaggtggtagcccattcatctggttactgatactggccggcatcagtggactgtcggcaggtccttgagcaactggtgtgtgaaatgggacggacgtcaaaggacaagcgggatgtctactaccgcctgggccaaggagaatggctggcgtgctcgcagcgcctttcaaactggttacaactggataaggaatttccaanttttccaaggcgttgacacggggcagtttgacctgtgttggcagccccagggnagctgggagccaggg

SEQ ID NO: 1992 - DNA, 489 bp, Homo sapiens
  I.1992 (R21309)
  misc_feature (381)..(381): n is a, c, g, or t
  misc_feature (416)..(416): n is a, c, g, or t
  misc_feature (437)..(437): n is a, c, g, or t
  misc_feature (462)..(462): n is a, c, g, or t
atggggcttcaagggagtcaggtgtcaagaaaggaggggtaagtactctctacttgctggaaaatcattgtaagtctgttgtgtatgaaattttaggaaaagtcttatatagttccctttccagactgttttcttttgactctaactataatcataagtctgtgcttccattatgaaggtcacattcctagcattcttgggaagtattagctcatactctcattcacatatgggaggttagatttttttcctctacccagagtccctttttagtttaccccacggcttagtttgctgtcagataccagttctctagcagattccccaacagttttttcccccagtggggaggggttggaagggaggggactgatataagtnagggagatgagtagtttgtgttacagttcattttnctttaaaaaaaaagtattttnaggaaaaggtgccaaattaattctngaaaagtttcggggccagccaaagtcc

SEQ ID NO: 1993 - DNA, 425 bp, Homo sapiens
  I.1993 (R21283)
  misc_feature (166)..(166): n is a, c, g, or t
  misc_feature (196)..(196): n is a, c, g, or t
  misc_feature (366)..(366): n is a, c, g, or t
  misc_feature (372)..(372): n is a, c, g, or t
  misc_feature (421)..(421): n is a, c, g, or t
gatggacataaaggaaaaagagtgatgagaagagaatggagagaatttgaataaaaggtgggaaaggagagcactgttctttgattgtttatccagtccaacctgatccattagggatcgaggtgctacactggcctccagggataagcctggggtactgttgctnggaacttaggcttaacataaagccgaaganggtacctagaaatttgaaacttccctaaaaagctcctaatgcccacctgctagatagcttctctgtggcctcctatttagctaagcagcagtgtttttgggatactttttttttctgtttgtgaataaggccagcactcaagatggggcagccaaggggtgcactgactnttagcntggccccataggatatcctgtaagggcttggtgggacaaatttttggancccg

SEQ ID NO: 1994 - DNA, 452 bp, Homo sapiens
  I.1994 (R21118)
  misc_feature (412)..(412): n is a, c, g, or t
atctccctcccaaagtgttgcgattgcaggtgtgagccactgcacctggctgctgagaaatctttgcctacagtgagggaaactactaaagttcctggggaagcaaagtagaatttcataagaacaaaatggatggagaggagaaaacctatggtggctgtgaaggacctgatgccatgtatgtcaaattgatatcatctgatggccatgaatttattgtaaaaagagaacatgcattaacatcagggcacgataaaagccatgttgagtggcccagggtcagtttgctggaggaacgaaaccaatgaggtcaattttaggagagataccttcacatgtgctatccgaaagtatggcatgtattttttacgtacaaggtttcgctacactaacagcttccaccgggattccnggaatttccccatttggcacctggaattggcacttgggac

SEQ ID NO: 1995 - DNA, 314 bp, Homo sapiens
  I.1995 (R21096)
  misc_feature (97)..(97): n is a, c, g, or t
  misc_feature (127)..(127): n is a, c, g, or t
  misc_feature (182)..(182): n is a, c, g, or t
  misc_feature (185)..(185): n is a, c, g, or t
  misc_feature (302)..(302): n is a, c, g, or t
gaaacacacagccaagaaggcgcccgacggcactgtcatccccaacggctactgtgacttctgcctggggggctccaagaagacggggtgtcccganggacctcatctcctgtgcggactgtgggcnatcaggacacccctcgtgtttacaattcacggtgaacatgacggcagccgtgcgnatnctaccgctggcagtgcatcgagtgcaaatcctgcagcctgtgcggaacctccgagaacgacgaccagctgctgttttgtgatgactgcgatcggggttaccacatgtactgcctgantccccccatggc

SEQ ID NO: 1996 - DNA, 394 bp, Homo sapiens
  I.1996 (R21059)
  misc_feature (292)..(292): n is a, c, g, or t
  misc_feature (375)..(375): n is a, c, g, or t
gcggacgaggggaggagagccagtacgactctggcattgagtctctgcgctctctgcgtaccctacccgagtccacctcggctccagcctccgggccctcggacggcagcccccagccctgcacccatcctccgggacccgtcaaggaaccacaggagaaggaagacgcggatggggagcgggctgattccacctatggctcctcctcgctcacctacaccctgtccttgctggggggccccgaggctgaggacccggccccacgcctgccactcccccacgtgggggccgnttgagcttcaggcagctgggaagcattcatttaacatcttccgagggacggagacacgttggttccacttggggagtgatttnatggagggccccagcggtt

SEQ ID NO: 1997 - DNA, 319 bp, Homo sapiens
  I.1997 (R20693)
  misc_feature (128)..(128): n is a, c, g, or t
  misc_feature (236)..(236): n is a, c, g, or t
  misc_feature (244)..(244): n is a, c, g, or t
atgctgggaaacgcggcccctctttcctccagtgccaagaagaagggcagagaagcagaggtgttggccaaggacagtgccaagcttgccaaggccttgctgagggagcggaaacaggcgcaccgctngccagcaggttcaccagccagacgcaagccacgctccaacaggcgtcccagcaggtgctggcgtcttgaagcacgcagacaggagctgggagggaagctgagcaggtngggtgctngggttgagcgagatgggagcagcagatcccgggattcgcttttctcacttggagaagggacatcgagactttttc

SEQ ID NO: 1998 - DNA, 364 bp, Homo sapiens
  I.1998 (R20616)
tttttttttttattttacataatatttataataaactttcttatcacaagttcctcctcagaacacactctacaaaatgtccgactgaaaagcttccaaaataattgaacacaagatatgaatcagcaacagaataagctcaagggaagagacatgggcacaggcaggcaaaacgtgatcaccacagctcccgttcctgcagtgacacttaacatactcagcatcttcatgaattctgaataatttactgatccgtaaagtctaaaagtatcaatttcaggtgagcagttttaaatcagaaaatagtcaataagttaatcatgactcttcagggtatttccttcacgtcctctgaagagtttcc

SEQ ID NO: 1999 - DNA, 310 bp, Homo sapiens
  I.1999 (R20608)
  misc_feature (257)..(257): n is a, c, g, or t
  misc_feature (281)..(281): n is a, c, g, or t
  misc_feature (290)..(290): n is a, c, g, or t
  misc_feature (295)..(295): n is a, c, g, or t
cagtgtgttgcagacagagaagaagcctttaaagaaaaagatgttcaaagacttatgcgacagattttagaaggtgttcactttttacacactcgtgatgtagttcatcttgatttgaagcctcagaatattctgttgacaagtgaatctccattgggtgacattaagattgttgattttggcctttcaaggaatattgaaggacagtgaagagctccgaggaaattatggggtacccctggaatatgtgggctccntgaaattcttaggttatgatcccnattaaggcngggcnacaggtttgtgggag

SEQ ID NO: 2000 - DNA, 474 bp, Homo sapiens
  I.2000 (R20586)
  misc_feature (6)..(6): n is a, c, g, or t
  misc_feature (7)..(7): n is a, c, g, or t
  misc_feature (10)..(10): n is a, c, g, or t
  misc_feature (14)..(14): n is a, c, g, or t
  misc_feature (297)..(297): n is a, c, g, or t
  misc_feature (389)..(389): n is a, c, g, or t
  misc_feature (395)..(395): n is a, c, g, or t
  misc_feature (417)..(417): n is a, c, g, or t
  misc_feature (429)..(429): n is a, c, g, or t
  misc_feature (444)..(444): n is a, c, g, or t
  misc_feature (451)..(451): n is a, c, g, or t
  misc_feature (456)..(456): n is a, c, g, or t
aaattnntancagngttctgatggagagatatttgaagttgatgtggaaattgccaaacaatctgtgactattaagaccatgttggaagatttgggaatggatgatgaaggagatgatgacccagttcctctaccaaatgtgaatgcagcaatattaaaaaaggtcattcagtggtgcacccaccacaaggatgaccctcctcctcctgaagatgatgaggaacaaaggaaaagcgaacagatgatatccctgtttggggaccaaggaattcctggaaagtttgaccaagggaacantttttggaactcatttctgggcttgcaaacttactttaggacatccaaaggttttggcttggatgtttacatggcaagactgtttggcccantatggntccaggggggggaaaacttccntggaggggaggnttccggcaaggaccntttccanttttnccaaaattggacttttta

SEQ ID NO: 2001 - DNA, 477 bp, Homo sapiens
  I.2001 (R20367)
ctcctatctgtgagactctgattctgtggtgctgggatggagcccagaaatttatattttcagaaagtatcccaggtaattcttaacttacagaagtttaggaaacagccatatggaacataataaacttttgatgatttttctgaaaatgactattttttttttttttttttgcctttctctggtacaagtctaatagtgcagtttactcacctactgggctgtgagaggcccctgttttccccgccttggctcactgggcctgtccatccaggggaaaatgggaccacaaataaggacagtctcccgcagaagtcccccttaaatttaggcctggattcctgatgggccccaggggcaggcatgggctcttccatggaggaccccaccagggttgttgggtccccaccggaaggcccagggttgcaggtgggggccccatttttcatggcagggttttgccagccgttgtttttt

SEQ ID NO: 2002 - DNA, 390 bp, Homo sapiens
  I.2002 (R20321)
gcgtctgtaagaaatcattatgcactatggcttcctcctctggtctgggaagaagcggggactggctggccctcaggggatctgtaaatcccagaaaacagtatttttaacagcaagatgtcattcaacattggtggggaaggaagagaaaaaaatcaaactattccatagaactagctggccccctcactcccatgcccttcccactcagcctggggcccctccccgctccattcataaaagctgagagggttgagctaatcttcacaaattgtaatatttttgtagtatctgttagttccttcgtcagttctggcaggaaccttgccctttccttttgtaatgtgaataggggaggacaaaaggacaaaaaaaaatccaccaccacca

SEQ ID NO: 2003 - DNA, 387 bp, Homo sapiens
  I.2003 (R20168)
  misc_feature (2)..(2): n is a, c, g, or t
  misc_feature (322)..(322): n is a, c, g, or t
  misc_feature (346)..(346): n is a, c, g, or t
  misc_feature (376)..(376): n is a, c, g, or t
  misc_feature (381)..(381): n is a, c, g, or t
ancatagtgtacactaaattttacatacacacagaggaatatatatgtgtatagttatcttgtgtttagaaatttggaatcccttctagttgtcttgtaacatgtgcttactctattttgaggattttctctatgaatttcatgtagctctttaaattaactttcaggaggattgtaacaatgtgctctccacccagtattttaccagccttgagttttctcaaaggggggcattgggagggggttcttatacatttacagtggggaatgtggaatttgatacaacttctgtgggaggggcagttttatcaggccactatcntaaaattacacatacataaacccntttgtccttagggcaaacttgccgggggantaaanacccac

SEQ ID NO: 2004 - DNA, 444 bp, Homo sapiens
  I.2004 (R20138)
  misc_feature (59)..(59): n is a, c, g, or t
  misc_feature (426)..(426): n is a, c, g, or t
aagaggatgccctaaatgagaccagggaatcagagacaaagctgaaggagctcccaggngtgtgcaatgagaccatgatggccctctggaagagtgtaagccctgcctgaaacagacctgcatgaagttctacgcacgcgtctgcagaagtggctcaggcctggttggccgccagcttgaggagttcctgaaccagagctcgcccttctacttctggatgaatggtgaccgcatcgactccctgctggagaacgaccggcagcagacgcacatgctggatgtcatgcaggaccacttcagccgcgcttccagcattcatagacgagctctttccagggacaggttcttcacccgggagccccagggataccttaccactaccttgccctttcagccttgcccccaccggaggccttcaattttttnttttccaagttcccgcat

SEQ ID NO: 2005 - DNA, 455 bp, Homo sapiens
  I.2005 (R19976)
  misc_feature (452)..(452): n is a, c, g, or t
atttgataggatagttagtgaggattattaacctctgagcagtgatatagcataataaagccccgggcattattattattatttcttttgttacatctattacaagtttagaaaaaacaaagcaattgtcaaaaaaagttagaactattacaacccctgtttcctggtacttatcaaatacttagtatcatgggggttgggaaatgaaaagtaggagaaaagtgagattttactaagacctgttttactttacctcactaacaatggggggagaaaggagtacaaataggatctttgaccagcactgtttatggctgctatggtttcagagaatgtttatacattatttctaccgaggattaaaacttccagattgtttcaacatggagaggaaaggctcaggcaacgtggaaataacgcaaatgggcttcctcttttcctttttgggaccntct

SEQ ID NO: 2006 - DNA, 386 bp, Homo sapiens
  I.2006 (R19918)
  misc_feature (4)..(4): n is a, c, g, or t
  misc_feature (320)..(320): n is a, c, g, or t
  misc_feature (340)..(340): n is a, c, g, or t
aagnagagacttatgatagagtcaagtttctaatacagaattattttaagtgttttgaacttaatttttaataacatgcatgggtccctctcactaatgtttcaacaatagggaaaaatgagaactatgtggacacttgtttcattggaaggttagggggaataatttctcatcactaggaatatagacaaatgactgtctgggcccacacagttaaccagcccatttctccacactggtacagtagtcacctgtgaaaaaaaaaattgggaacttactaatttgggcttttcaaaaacattctttgtttagaagggagnttctaaagttatttatgatngcttagccatagtatttcaggcaaatgtttcatttctcctggggac

SEQ ID NO: 2007 - DNA, 70 bp, Homo sapiens
  I.2007 (R19740)
cccagggtttgacctgatggtggccttcagcctggtggaaaaggcttatgcgtccatccggggcgtggca

SEQ ID NO: 2008 - DNA, 397 bp, Homo sapiens
  I.2008 (R19631)
  misc_feature (69)..(69): n is a, c, g, or t
  misc_feature (354)..(354): n is a, c, g, or t
  misc_feature (369)..(369): n is a, c, g, or t
gacccccaacaatctgacccccaccaactgcagctggtggcccatctccgcgctggagagcgattgcgnccaagccagcggaggcccccgacgctcccgaggcggccagcccgcccattggcccagggagagcctggttctgtaccactggacccagtccttcagctcgcagaaggtgcggctggtgatcgccgagaagggcctggtgtgcgaggagcgggacgtgagcctgccacagagcgagcacaaggagccctggttcatgcggctcaacctggggcgaggaggttgcccgttcattcattccaccgcgacaacatcattcagtgattattgaaccagttcatttgattntttttggagcgcacntttcaacagggagagcactttgtttggc

SEQ ID NO: 2009 - DNA, 442 bp, Homo sapiens
  I.2009 (R19565)
  misc_feature (147)..(147): n is a, c, g, or t
  misc_feature (347)..(347): n is a, c, g, or t
ccttctctgatcatcaggattctcttggactctggggtccttgtcctgctcaggcatccctgcccccctcttcaggagggccctcaacacgatcttctctggacaggagtctggggcacaactggatgttgtgggccccaaaggtgnactccctgctcctgggccccacagagagtccttgtgctcagtgcactggctgagctgcaagacatcctgggaattgggagcacacagcaccggcttgctgtggtacctgtgcattcaaattgaaggcaggatcgccagcaaggaacacagggcttgcaggattcacagaaaacccttgggagttgtttttgacacaccantgatgccaagtgtctggggtactttgttagggatggccctggcctttaccattccagggggccattggccaacaggggagatttccacaaaccaa

SEQ ID NO: 2010 - DNA, 397 bp, Homo sapiens
  I.2010 (R19559)
  misc_feature (81)..(81): n is a, c, g, or t
  misc_feature (322)..(322): n is a, c, g, or t
  misc_feature (352)..(352): n is a, c, g, or t
  misc_feature (377)..(377): n is a, c, g, or t
  misc_feature (383)..(383): n is a, c, g, or t
agaattttttggtggtgtaagtgggctgacagtggaacaatttagaaagatcaatggttttcctaatgccttctggggatngggaggagaagatgatgacctttggaacagagttcactatgctggatataatgtaaccagaccagagggagacttaggaaaatacaagtcaattcctcatcaccatagaggtgaagtccagtttttaggacggtataaattactaaggtattccaaggagcgtcagtacatcgatggactgaacaatttaatatataggccaaaaatactggttgataggttgtatacaaacatatctgtnaaacctcatgccagagttagctccaatcgnaggactttttaaaaggagttggctnttcgtngccaaggttggacc

SEQ ID NO: 2011 - DNA, 460 bp, Homo sapiens
  I.2011 (R19494)
  misc_feature (375)..(375): n is a, c, g, or t
ttttttaataaaagttcccttgacttaaactcaccttcctaatagaagtagtgatttggctcacggaaaaatgtttccagagtcaacatgagaggactggatgaacctacagcctcactcaagctgttgcatcattgctgctgtagcaacagagccctctctgaatacccaaaacacacaattttctccaacaattctaattgcccacccagtatgggaatttgagagcctttggtgaataaccttgatcactcttttgaaatttggtgcaacacttgcacaatcacggcaactgtttgtaaatatctttttcttctccgccagtatgtagacatggcacacccatttcacaagtaagcccgcaaattcattttncacatttttcctcttggggttgttttttatcctgggtatcacattgtcgggaggagatgctctaacttacaagattgggattttt

SEQ ID NO: 2012 - DNA, 345 bp, Homo sapiens
  I.2012 (R19350)
  misc_feature (38)..(38): n is a, c, g, or t
  misc_feature (87)..(87): n is a, c, g, or t
  misc_feature (89)..(89): n is a, c, g, or t
  misc_feature (97)..(97): n is a, c, g, or t
  misc_feature (107)..(107): n is a, c, g, or t
  misc_feature (120)..(120): n is a, c, g, or t
  misc_feature (122)..(122): n is a, c, g, or t
  misc_feature (131)..(131): n is a, c, g, or t
  misc_feature (132)..(132): n is a, c, g, or t
  misc_feature (174)..(174): n is a, c, g, or t
  misc_feature (278)..(278): n is a, c, g, or t
  misc_feature (284)..(284): n is a, c, g, or t
ggtctgaaaagacagttgtgtgcatggatgtgtgcgtngggagaaagaacgtgggtaagatgtcccttcccagccctgagaccactngncacagttngccaacttcnacgggagaccctntnccttggccnngagtcctccaacctttggggggcttcctgcctgaaggtcctnagaatcccactgcaatggacccagggcagcgcccagggaagccatgctggggcccccgcaggccttattcccaaaagcaggggccagggagggggcgatttgcntgcccntgaagccttgtttccatttggccccattttgcattttgcaggtttttcattttagttgggt

SEQ ID NO: 2013 - DNA, 132 bp, Homo sapiens
  I.2013 (R19341)
  misc_feature (93)..(93): n is a, c, g, or t
tcccttattttaaaagtgatttttttaaggacagaacttcttccaaaagagagggatggctttcccagaagacactcctggccatctgtgganttgtctgtgcacctattggctcttctagctgactcttct

SEQ ID NO: 2014 - DNA, 408 bp, Homo sapiens
  I.2014 (R19244)
  misc_feature (401)..(401): n is a, c, g, or t
aatgtcaggcctagggagaaaattcatctgtgcccactgctctccaaagtgcgaggcaaggaatggcagtgtaaagttctgttaatagcagtaaaatgaaaatatttgtgtttgtgtataaccttcccctcagctaatttgaaagcctccaaaataaggattcccattccccgagtattctggttaatcaagatttcaatttctgggttgctcaagggactcgttcagtcagacttcagttctcattccgacaggtgtctttcagttcgtttgtttgattgaggttttttgggtgggcctaggatgcatgtttattcaggattttgggtacacctctggccgtcttctttgggctggagtattctggcacccacaggaccatggctggccagcctctatcnttaatag

SEQ ID NO: 2015 - DNA, 410 bp, Homo sapiens
  I.2015 (R19214)
  misc_feature (402)..(402): n is a, c, g, or t
aggtttactctatcacctaacacctcaacactacctgtgggatgccttagttacccagcagcaggttaccaagggctgtctggaaagggagggacaaaaggacccagaagtagaagaatggggatggagtggtgagaattgaatggttaatgcactgccattcataattgccaattgaggacaacacaaatgggattggtactttatagtaataaatctgaccagcagagggagggatcagggcagcagtgtttagagcacaccacactgggccactgtaaaactgaggaagcttaagttaactgggtattttatggattttgagtatagtctttttataagttgtattacactttacatgttaaaaagggaacaactttgtattattagccaattcggggngggggact

SEQ ID NO: 2016 - DNA, 505 bp, Homo sapiens
  I.2016 (R19134)
  misc_feature (287)..(287): n is a, c, g, or t
  misc_feature (364)..(364): n is a, c, g, or t
  misc_feature (369)..(369): n is a, c, g, or t
  misc_feature (385)..(385): n is a, c, g, or t
  misc_feature (398)..(398): n is a, c, g, or t
  misc_feature (426)..(426): n is a, c, g, or t
  misc_feature (469)..(469): n is a, c, g, or t
  misc_feature (483)..(483): n is a, c, g, or t
  misc_feature (499)..(499): n is a, c, g, or t
gaagaaggagcatgtgcttcactgccagttctccgcgtggtacccgttcttccgaggcgttaccatcaagagtgtcattcttccacttcctcagaatgtgaaggattatttactcgatgatggaactctggtggtttcaggaagggatgatccaccaacacattctcagccagacagtgatgatgaagcagaagaaatacagtggtctgatgatgagaacacagccacgcttacggcaccagaatttcctgagtttgccacttaaagtccagggaagctatcaattnccttcggggggcagtgtcttttcctaaggtttaatttgggagttgccccaagggattgcgtatttgggattagccantggantagttcttcttggaantgttaaaaacccntccaggcgacatcttttcttgctttttncaaggagtttcccgatttttcatccacttccgtggactttcanttcaggcctttttntttccattggtaaccnggatgg

SEQ ID NO: 2017 - DNA, 393 bp, Homo sapiens
  I.2017 (R19107)
  misc_feature (159)..(159): n is a, c, g, or t
  misc_feature (183)..(183): n is a, c, g, or t
  misc_feature (184)..(184): n is a, c, g, or t
  misc_feature (349)..(349): n is a, c, g, or t
  misc_feature (382)..(382): n is a, c, g, or t
ggcgtgtaacccacgggtgcgcgccacgaccgccagactcgagcagtctctggaacacgctgcggggctcccgggcctgagcaggtctgttctccacgcaggtcttccgcgcgccccgttcagccatgtcgtccggcatccatgtagcgctggtgactngaggcaacaagggcatcggctggnntttcgtgcgcgacctgtgccggctgttctcgggggacgtggtgctcacggcgcgggacgtgacgcggggccagggcggccgtaacagcagctgcaggcggagggcctgagccgcgctttccaccagctgggacatcgacgatcttgcagagattccgcgccctgnaacttttccttgcgcaagggagtaacggggggnttggaacgtgc

SEQ ID NO: 2018 - DNA, 357 bp, Homo sapiens
  I.2018 (R19033)
  misc_feature (21)..(21): n is a, c, g, or t
  misc_feature (49)..(49): n is a, c, g, or t
  misc_feature (61)..(61): n is a, c, g, or t
  misc_feature (64)..(64): n is a, c, g, or t
  misc_feature (159)..(159): n is a, c, g, or t
  misc_feature (344)..(344): n is a, c, g, or t
acgggaagctgcggcccgctnccaccacctcgcgggccaagctggcttncaagcgcggtgnctncacctccaccggcctcaccttcatggaccgcgccggctccctctactggcccatgtcgcccttcctgtccctgcaccacccgcgcgccagagcanctttgagttacaacggcaccacgtcggcctaccccagccaccccatgccctacagctccgtgttgactcagaactcgctgggcaacaaccactccttctccaccgccaacggctggaggcgtgggaccggctggtcaaacggggagatcccgtaacggccacgtaccaccttcacgggccgccgngctaggcgccttt

SEQ ID NO: 2019 - DNA, 403 bp, Homo sapiens
  I.2019 (R19027)
  misc_feature (371)..(371): n is a, c, g, or t
aaacaaaaacttaacactgaaaagtgtttctgccttggaggctatcattactgtaaaaaaattttttttaactgtgtagttatgtcattaaacaagtaataaaccacttttaatttaaagtgacattaacaattgaacaaatgacatttgattaactgaactggcagttacactgatacagaattctcttctgctagtgcgggaatttgtatacttttactgggcaacatgaaataaaagatgcagtttgagagcatcagaaagaggcaaaggacaaggcttccatactaactaaagtaggaatatcttcaggccttatcttgttcatactgtacaataggtcctgttcaataggtcctgtttccttaccnttgatggtcttggactatttccctggaaggca

SEQ ID NO: 2020 - DNA, 450 bp, Homo sapiens
  I.2020 (R19010)
  misc_feature (246)..(246): n is a, c, g, or t
  misc_feature (374)..(374): n is a, c, g, or t
  misc_feature (375)..(375): n is a, c, g, or t
  misc_feature (384)..(384): n is a, c, g, or t
  misc_feature (424)..(424): n is a, c, g, or t
  misc_feature (441)..(441): n is a, c, g, or t
  misc_feature (447)..(447): n is a, c, g, or t
tggaagggagcttggggtgggggctgtctgtgacacttaagcagtctgggtggttgtctatttgtctgtcttcagtcttgaagcagggcttcccaatgcccttttcctccctgccttccttcccccattatttcccacaggccagcataattttgtttttcctaatttatagtcactgttctagacagaccaaagagaaggaacagtggtggagtctaggctgctgatcagtaagctttacctagncacctgagcacctttctcccctcccctctttcctcacccttttctaggatgtaagacagaaagtaaatgtgactggggacttaaccaaggtcttgggtaaaagcctgcatgggcaccgttaaggaagnntgaaaatantgttttgtttcccgcaattcactggatttggaaaagtttncccaacacagggcaggntgctgntgt

SEQ ID NO: 2021 - DNA, 407 bp, Homo sapiens
  I.2021 (R18984)
  misc_feature (188)..(188): n is a, c, g, or t
aagattgacgtgggggaagctgaaccacggactgtggtgagcggcctggtacagttcgtgcccaaggaggaactgcaggacaggctggtagtggtgctgtgcaacctgaaaccccagaagatgagaggagtcgagtcccaaggcatgcttctgtgtgcttctatagaagggataaaccgccagttganacctctggaccctccggcaggcttctgcttcctgggtgagcacgtgtttgtgaagggctatgaaaagggccaaccagatgaggagctcaagcccaagaagaaagtctttcgagaagtttgcaggcttgactttcaaaatttcttgaggagtgcattcgcaagttgggaagcaaaccactttcattgaccaagttggggttccattttcctgttaaattc

SEQ ID NO: 2022 - DNA, 407 bp, Homo sapiens
  I.2022 (R18977)
  misc_feature (28)..(28): n is a, c, g, or t
  misc_feature (32)..(32): n is a, c, g, or t
  misc_feature (99)..(99): n is a, c, g, or t
  misc_feature (145)..(145): n is a, c, g, or t
  misc_feature (255)..(255): n is a, c, g, or t
  misc_feature (344)..(344): n is a, c, g, or t
  misc_feature (382)..(382): n is a, c, g, or t
  misc_feature (402)..(402): n is a, c, g, or t
caacctgagccgagcccagaggcctggnctgncactgcctgcagccgacatgcgacagtgtccctcccccacgtgcctagccggtgccggtccaggaangacccccccagcccccgccctgccccagggaagcctgggcttccgngaaacaaggtggcatttgtggagggagcgcccgcagcctggtctgctggggccgcctgcgctgggctgaagggagggaaaggcggcttgggcctcctgggaaggagttgngccaccccgcgggcctgcgtgtctgctggggcggatcccgaagctccctcagcttgtcctgagtcccttgggtgtcgttgagattgttnttttttgaagaaaacagaaagattttattttttttaanagcgagaaagttgggttttntaaat

SEQ ID NO: 2023 - DNA, 372 bp, Homo sapiens
  I.2023 (R18911)
  misc_feature (325)..(325): n is a, c, g, or t
  misc_feature (366)..(366): n is a, c, g, or t
gttattagaggaagatgatgttgtgatgggagttcagtacaaggataaagagactggagatatcaaggaactccatgctccactgactgttgttgcagatgggcttttctccaagttcaggaaaagcctggtctccaataaagtttctgtatcatctcattttgttggctttcttatgaagaatgcaccacagtttaaagcaaatcatgctgaacttattttaggctaacccgagtccagttctcatctaccaggattttcatccagtggaaactcgagtacttgttggacattagagggaggaatgcccaggggattttaaggngattacatgggttgaaaaaaattttaccccaccaaataccnggatcc

SEQ ID NO: 2024 - DNA, 339 bp, Homo sapiens
  I.2024 (R18872)
  misc_feature (317)..(317): n is a, c, g, or t
cccgactgccagagggaggatggacagacctcttgccctcacactctggtaccaggactgttcgcttttatgattgtaaatagcctgtgtaagatttttgtaagtatatttgtatttaaatgacgaccgatcacgcgtttttctttttcaaaagtttttaattatttagggcggtttaaccatttgaggcttttccttcttgcccttttcggagtattgcaaaggagctaaaactggtgtgcaaccgcacagcgcttcctgggtcgtcctcgcgcgcctctccctaccacgggtgctcggggacggctgggcgccanttccgggggcgagttcagcact

SEQ ID NO: 2025 - DNA, 438 bp, Homo sapiens
  I.2025 (R18754)
  misc_feature (172)..(172): n is a, c, g, or t
  misc_feature (370)..(370): n is a, c, g, or t
  misc_feature (375)..(375): n is a, c, g, or t
  misc_feature (430)..(430): n is a, c, g, or t
agaagatcagagctatttatgcagatctcaatcagaatgactttgccatcagcaaagaggacatgcaggagcttctctcctgtacaaacataatatttcactgtgcagccactgtacgctttgacgacactctcagacatgctgtgcaacttaacgtcactgccacccggcngctcttgcttatggctagtcagatgccaaagctggaagcctttatacatatctctactgcctattcaaattgtaacctgaaggcacatcgatggaagttatctatccgtgccctgtgggagccaaaaaaaatcattggatttcccttgagtgggttaggacgatgctattatttgacggaggatttacaccccaaggntgatncaggaggttggggcccattattttattaacctacaccaggggcttgggggagganttgggtgg

SEQ ID NO: 2026 - DNA, 359 bp, Homo sapiens
  I.2026 (R18743)
tattctcattaaagcaaatagaacactggaaaaagaaaaaaaaagacatattaaccaaaagctgcaatcacctttcagttgctccatcataaaaaatatggtttgagtcaatatttctatgacataaaatttaaaatctggaagccaattcagtagatttctccatgtttgcacaaatctaatttctatttttggttcactaatttggtagtttataaaaatgctgggaaatgaaattgtgtctaggactaaattgggggagtatgttctattttaaatatttagtttgaaggtcattctcacttttttgcctggattctttcagcgtcaactgggcactgggcttctgtgggggtatt

SEQ ID NO: 2027 - DNA, 374 bp, Homo sapiens
  I.2027 (R18558)
gcaatttataatttattactactttaaatcaaatgtagcattatcacactgtatttaaattgtcattttttaaaggaatattttcttcttaagatatatagaggattttggagaagagagacaggaggggtaaaaccagcttaaggttcagcgagcagaaagggacctgagaggatgctcactgtaagactgttggacagtggtgtgtattgaggggatgaatcggaacgatagtctcatgcagaaaatagtgagattaagatcatccttattgtttctaaattatttcaatcagatgaaagtgatacgattgaaatggaaatcacatagttcgtgctcagaattctattttgggtatgtttgtattagccttt

SEQ ID NO: 2028 - DNA, 296 bp, Homo sapiens
  I.2028 (R18515)
ttctctagagaggtacagttgtaagtcagagttaatataatagggcctgtgaaaacagaggcttttgcattgtctcttgacatcagaagttacaataggcatatgggcaaaatggtgtagcaggctcactggccgtttgttttttaaacacattttcacaagtttttgagacactggatttctttaattaaaaaaaaaaatgccaaggaaacattatttatacagggttgattgctttcatgttgttattctgtaccctatagtaggcctccatgaggaatctgggtatttcttgg

SEQ ID NO: 2029 - DNA, 485 bp, Homo sapiens
  I.2029 (R18398)
  misc_feature (448)..(448): n is a, c, g, or t
  misc_feature (453)..(453): n is a, c, g, or t
  misc_feature (468)..(468): n is a, c, g, or t
  misc_feature (478)..(478): n is a, c, g, or t
cctactctattctttccccccatgaacttatcaaagggagaactggttgtgtatttaagagaaatgagagtgcattgcaaagtagtttcccaaggcatttcccctattgtttacatggtcaaaaggaaaatcaaaatcacttctaattacaaaatgtgctgttttggtggggtgggcaatcagattattatagttgatgactgtaccaaagatctggaatgggggccacctttatattttaatactcaagtcctgtgctccttttggccactttaaaaagtcttccctcaccttgggataaatagggattcagaaagctaacagttttcattctgaaggaggcaggaaacattaatcaatccctccctggggattaaaatgtgggggcatggcacattggctttggggagttcagtatttcagctgttaagtgttagtattgttttangggcnggaattaggaaggcntattgagggnggcccac

SEQ ID NO: 2030 - DNA, 387 bp, Homo sapiens
  I.2030 (R18271)
  misc_feature (274)..(274): n is a, c, g, or t
  misc_feature (294)..(294): n is a, c, g, or t
  misc_feature (362)..(362): n is a, c, g, or t
  misc_feature (381)..(381): n is a, c, g, or t
aaaggtgtgccataagctgctccagagcttttggtatgctgagtgttgacagagctgcactcttaacatcaagagaactgtcaggagcccagaaccaaccccaggtcttggtctccattggcgagaacacaggacgtggtggttcctgagcagagagggatctgcagatacaggcttggcgctcggggtggtctcgtggccaactcttcatgcccctgccgttgtagtgggaacctcttacatgttttagttttgctttcacctaaaataatgntgatctaggagatagagaantaggggtggttattttttccagattgggagatttgaaagtccctgacttgatttcagccatttttccntagttgcttgttcggatgncagaga

SEQ ID NO: 2031 - DNA, 464 bp, Homo sapiens
  I.2031 (R18258)
  misc_feature (60)..(60): n is a, c, g, or t
  misc_feature (382)..(382): n is a, c, g, or t
  misc_feature (398)..(398): n is a, c, g, or t
  misc_feature (409)..(409): n is a, c, g, or t
  misc_feature (427)..(427): n is a, c, g, or t
  misc_feature (437)..(437): n is a, c, g, or t
  misc_feature (451)..(451): n is a, c, g, or t
tggacgcctgggtccgcttcagtgctcagagccaagcccgggagcggctgtgtagggccnccagtatgcttgctctcttcttggccatgcgctgcagaggcatggagccagtcctgagttacagaaacagattcgacaactggagagccacctgagccttggaagaaagcttctacgcctgggtaactcagcagatgcccttgagtcagccaaaagagctgttcacctatcagatgttgtcctgagattctgcatcactgttagtcacctcaatcgagccttgtacttcgcctgtgacaatgtcctgtgggctggaaagtctgggactgggctccccgtgtgggatcagggagaagtggggcccagcgtttcattcaggtantattttgtttttcccntcatcatggantttggaggccttgatggnttatggaganttcggcctacttgnggggagcaagagt

SEQ ID NO: 2032 - DNA, 397 bp, Homo sapiens
  I.2032 (R18237)
  misc_feature (382)..(382): n is a, c, g, or t
aacatactcttcttcctcccctgattattgccattaagcctttaaattctaaacaaattataatgcatcatctatttaggagttagatttggatgtgctattgtatgattacgaatagtctgtatgtttcaagcccttctgtaaaatatgaagaaaagtgctcttagcattctgtgtaaaactgtactgttaaatatatgtgtgtaatcagcctgagtgtgaaagttaatggaggcctgggaacagggtttatactaagtagtggaggagcgtatggttaagcccaaaggggcaggaacaagaaagccacgggattgtatggaaatccaaacatgagtttgtgggtgtaggactgctgtatgcagttgggaaaggacacgtngagagtgagctccaa

SEQ ID NO: 2033 - DNA, 412 bp, Homo sapiens
  I.2033 (R18232)
  misc_feature (410)..(410): n is a, c, g, or t
gtttcaggtgaacaatggataacaaaaagcaagttatggaagattgtgaagaggatggaaaaactgaatacaagataccaaaaatgaaaaaaagtgtcccatttttaataactatattctattattttataaatgtgtaataaaggggtccctctttattggttgttctccacttaatctttggtctttttcagtaattttaagttttctgggattttttttggtttataaaacttgtgtttagactttatcttgctatgggagttttcacacttctataggcacatatcctagtatctagtcatttctgttttaatatggaatttcagtaatttaattttaatctgggtgacatatttaatcggaaaataagggagtaatgtataccctcccacatgtccctttctttntg

SEQ ID NO: 2034 - DNA, 400 bp, Homo sapiens
  I.2034 (R18194)
  misc_feature (12)..(12): n is a, c, g, or t
  misc_feature (135)..(135): n is a, c, g, or t
  misc_feature (214)..(214): n is a, c, g, or t
  misc_feature (225)..(225): n is a, c, g, or t
aaagctggcgtngctgcctctgctgactggtgccatcacccatcatggccaccacactgacgtggtcagggaagcctgctgggccctgcgtgtcatgaccttcgatgacgacatccgtgtgccctttggccatgnccacaaccatgccaagatgattgtgcaggagaacaaaggcttgaaggtgctcatcgaagccaccaaagcgttcctgggntaaccctgggnatcctgagcgagctgtgggaaccctgtcccgcctgggccattcgcaacgagtttcttgccagggaggtcgtcgacctcggggggccttgagcattctggtgttccctgctagccgattgcaattgaccaccagatgaggggaccagagcgggctttcaggagttcgttgaagcaa

SEQ ID NO: 2035 - DNA, 388 bp, Homo sapiens
  I.2035 (R18054)
  misc_feature (3)..(3): n is a, c, g, or t
agnccttcttacctgtactgaaagatgcttagcttagaaaaaaacaaaacagatgcaaaatcagataattttattttgtttcatgggttttcttatttactttttaaacaaggaaggaatattagaaaatcacacaaggcctcacatacatgttatttaaagaatgaattgggacggatgtcttagacttcactttcctaggctttttagcaaaacctaaagggtggtatccatattttgcgtgaattatgggtgtaagaccttgcccacttaggttttctatctctgtccttgatcttctttgccaaaatgtgagtatacaggaaattttctgtatatttccaacttaagacatttttaggcatctgtatagtttgtattcatttga

SEQ ID NO: 2036 - DNA, 424 bp, Homo sapiens
  I.2036 (R17963)
  misc_feature (350)..(350): n is a, c, g, or t
  misc_feature (376)..(376): n is a, c, g, or t
  misc_feature (414)..(414): n is a, c, g, or t
aaaaatctttatgatgggaaagtagatctaaattttctctaaaattttccccaaagataatatcctcttagggaacataagaaaaatgtataataaaaatgtggtgcttaattaaccatgactatgtatatattgccaattttagtaatcaatattctttgtgcatgtgatttttttgcatgattaatgttgaattgaaagctctcaggataattaatcctaaatattgtcgcatgttgacctacgttaaaagatgaataggtctagagccgtgatttcaagctattttcctgaaatggcttcaggggattccataaaacatttaaacaatgtttctaagggtacatatnacttagggaccattggaggacatatnactacaagtggctagggattataggtaccctggtattnttcgttggat

SEQ ID NO: 2037 - DNA, 359 bp, Homo sapiens
  I.2037 (R17872)
aatgtaccaacactgaatcttacagcagttatctttctatggccattaggtacctagcagatgtgcacaatataaacaaaaagatatctggcctaccttactactaaaagcatttaacacgtgcatttttggtacttttttttttgttttctaaaagctacataaaggccttatttgacattttcactgataactgatcgcaccctcatgttgcagtgttcgtcccctattcattaacagtgtgtgcaaatgcaaccccgggacacattattgttctgataggatgcttcacaggggaatcaaggcttctcgcccacttccacgggttttgaggcccccattccaggggcaagattttg

SEQ ID NO: 2038 - DNA, 436 bp, Homo sapiens
  I.2038 (R17723)
  misc_feature (409)..(409): n is a, c, g, or t
  misc_feature (430)..(430): n is a, c, g, or t
tcaaaggatatttatttataggcctttttttttttaatatagaatctgaggctgtttgggctttgacttaaatttccatcaggcctctctccagcaggtaatccctctccttccgctgggtcccctgggaggtgtgaactcaagggcctagcccaaaacactttttctgcttttcttaatccttttccagtcccctctttttttataaacgttggcagtttgatgtttctgtttcggcataacgtaatccatttcactgtagcctaaactccagtccgaggttggatattgttcaaatgagcagggcccgagctgggaagcgcaaaggcagccgccgccgtgccgctcctcccttgccctcaggccagggtccctgctgggaagcgggctgcatcttcctgttcagccngggtttccatgggtgactggngttcaa

SEQ ID NO: 2039 - DNA, 426 bp, Homo sapiens
  I.2039 (R17715)
  misc_feature (73)..(73): n is a, c, g, or t
  misc_feature (359)..(359): n is a, c, g, or t
  misc_feature (376)..(376): n is a, c, g, or t
  misc_feature (389)..(389): n is a, c, g, or t
  misc_feature (397)..(397): n is a, c, g, or t
gatgcagctcccattttccagcaagctcctgggcagcactctgacctctgaggagaaacaagaaaggcggcanggcaattgcggcggctgcaggagctcaatgcccggcggcgggaggagaagctgcagctggatcaggagcgtctggaccgactgctatatgtgcaggaacttctagaggatggccagatggatcagtttcacaaagctctgatagagctgaatatggactccccagaagagctgcagtcctacatccagaagctcagtatagcagtgggagcaggctaagcagaaaatcctccaagcggaagtcaacctcgaggtgggatgttgttagacagcaagccagagacccntgacctgggagcagttnggagcctcttttngaaagatnttgggaaagcttgattgatttttgattcc

SEQ ID NO: 2040 - DNA, 506 bp, Homo sapiens
  I.2040 (R17506)
  misc_feature (106)..(106): n is a, c, g, or t
  misc_feature (121)..(121): n is a, c, g, or t
  misc_feature (367)..(367): n is a, c, g, or t
  misc_feature (407)..(407): n is a, c, g, or t
  misc_feature (441)..(441): n is a, c, g, or t
  misc_feature (489)..(489): n is a, c, g, or t
  misc_feature (498)..(498): n is a, c, g, or t
gcgctgtcccatcaagcccaggtgaggggccagggcaagggcggctgacacaggagaaggaaaggcaggagctcctgcccttcggggtggggccgagccgggccancaggctgtttctctngcccccaggagacaggtactgggtgttcaaggacaataacgtagaggaaggatacccgcgccccgtctccgacttcagcctcccgcctggcgcatcgacgctgaccttctcctggggcccacaatgacaggacttatttctttaaggaccagctgtactgggcgctacgatgaccacacgaggcacatgggaccccggctaccccgcccagagccccctgtgggaggggttgttccccaggcacgntgggacggacggccattgggctttggttccgacggttgcntcctaattttttttccgtgggccagggattattnggaaattgtttggatgggcgagtttggaagttgggcaacccgggttanccacaattncaaggggg

SEQ ID NO: 2041 - DNA, 381 bp, Homo sapiens
  I.2041 (R17499)
  misc_feature (110)..(110): n is a, c, g, or t
  misc_feature (318)..(318): n is a, c, g, or t
  misc_feature (372)..(372): n is a, c, g, or t
  misc_feature (378)..(378): n is a, c, g, or t
agccagcgagaggtctgcgcggagtctgagcggcgtcgtcccgtcccaaggccgacgccagcacgccgtcatggcccccgcagcggcgacggggggcagcaccctgccangtggcttctcggtcttcaccaccttgcccgacttgctcttcatctttgagtttatcttcgggggcctggtgtggatcctggtggcctcctccctggtgccctggcccctggtccagggcttgggtgatgttcgtgtctgtgttctgcttcgtggccaccaccaccttgatcatcctgtacataattgggagcccacggtgggagaganttcctggggtcaccttgggacgcagccttaccaccaccgcttgccctctttttnaccttnagc

SEQ ID NO: 2042 - DNA, 362 bp, Homo sapiens
  I.2042 (R17498)
  misc_feature (330)..(330): n is a, c, g, or t
  misc_feature (349)..(349): n is a, c, g, or t
ttaatgagtgatgcccttggaaaatgtggtggccaagacagattattgcagggttggccccttggttctttcaatccaggatcttgcttctgacaggtcccagggatggggagaggaccttctggctgagctgggctccatgagaaacgcctgacttccaagagcctttcctccccagatccactttgatggctggagtcatggctatgatttctggatcgacgctgaccacccagacatccaccctgccggctggtgctccaagacagggacatcccctggcagcctcctcttcgggacccaggaggaggcccagctcttgccttcccntggggggcttgttcccctnttcagctattagg

SEQ ID NO: 2043 - DNA, 465 bp, Homo sapiens
  I.2043 (R17436)
  misc_feature (47)..(47): n is a, c, g, or t
  misc_feature (284)..(284): n is a, c, g, or t
  misc_feature (431)..(431): n is a, c, g, or t
  misc_feature (448)..(448): n is a, c, g, or t
actaagtaccgcatctgctttgatggctctcccagcactggtgctgncttttggtggtgctctcaacaccagtgccagctttggagtgtgctcaacaccagtactggttttggtggtgctatgagcacagttgctgactttggcggtacactaagcaccagtgtctgctttggtggctctcctggcaccagtgtcagctttggcagtgcactcaacaccaatgctggttatggtggtgctgtcagcacaacactgactttggtggtacactaagcaccagcgtnctgttttggtggctctcccagcaccagtgctggctttggtggtgcactcaacaccaatgccagctttggctgtgcgttcagcaccagtgccagcttcagtggtgctgttcagcacaggtggctttgctttcagtggtggcaccaatncaccaaccttgggtttngcggtgcatttagcacc

SEQ ID NO: 2044 - DNA, 423 bp, Homo sapiens
  I.2044 (R17391)
  misc_feature (381)..(381): n is a, c, g, or t
  misc_feature (407)..(407): n is a, c, g, or t
aggtgtcttcttgtttgcctcaggcctcagtggtaaactgaccagccgaggagtttgtgtctgcatcagtactgcttttgaggggaacctattggattcctattttgtggaccttgtcatacagaaaccactccggatacatcaccattcagtcccagtcttcattcccctggaagagatagctgcaaaatatttacagaccaacatccagcacttcctgttcagtctctgcgagtacctggaatgcttactctgggaggaagtaccagggcaggaccggcttcaggtatctctctggggatgttatatgcctcatccgtggggcccaaggattcaacttaaaagggggggatgtttttttgtatttttcagtgttttccntaactgtggagttaggaagttttganccgttaaccctttccg

SEQ ID NO: 2045 - DNA, 339 bp, Homo sapiens
  I.2045 (R17242)
  misc_feature (160)..(160): n is a, c, g, or t
  misc_feature (279)..(279): n is a, c, g, or t
  misc_feature (297)..(297): n is a, c, g, or t
  misc_feature (311)..(311): n is a, c, g, or t
  misc_feature (316)..(316): n is a, c, g, or t
  misc_feature (332)..(332): n is a, c, g, or t
cagcagttgacaggacattcaaagcgtgtggctggttccgtcactgagctcatccaggctgctgaagccatgaagggaacagaatgggtagacccagaggaccccacagtcattgctgagaatgagctcctgggagctgcagccgccattgaggctgcancaaaaaagctagagcagctgaagccccgggccaaacccaaggaggcagatgagtccttgaactttgaggagcagatactagaagctgccaagtccattgcagcagccaccagttgcatngtaaaggctgcgttcggntgcccagagagaantagtnggcccaagggaaggtngggttgc

SEQ ID NO: 2046 - DNA, 496 bp, Homo sapiens
  I.2046 (R17179)
  misc_feature (11)..(11): n is a, c, g, or t
  misc_feature (236)..(236): n is a, c, g, or t
  misc_feature (359)..(359): n is a, c, g, or t
  misc_feature (384)..(384): n is a, c, g, or t
  misc_feature (404)..(404): n is a, c, g, or t
  misc_feature (424)..(424): n is a, c, g, or t
  misc_feature (441)..(441): n is a, c, g, or t
  misc_feature (448)..(448): n is a, c, g, or t
  misc_feature (456)..(456): n is a, c, g, or t
  misc_feature (466)..(466): n is a, c, g, or t
  misc_feature (471)..(471): n is a, c, g, or t
  misc_feature (486)..(486): n is a, c, g, or t
  misc_feature (494)..(494): n is a, c, g, or t
tgaaaccaggncaacagcaacaatattctgtttttaaaatagggacaagactgttgtcactttttagacatgtatcccattccttttggctctgcaatatttggggctgtagctccttccaagcccatggtagtccctccccgagtctctcccagtagaatgcagcctcccttccctggccccttccctctcagtgacggtgactccctggggccttctcgtggaacccagagggnctgaggactgtggcctggctggcgggccacgttggttgctcctcaggactgcagcactgagatgggaacctgggcctcagtttaggaacaggggccacaacagggcaggaacccaccaccctncacatagggaatacaaccagtgggngccacatcatgttgagggcntcagacccacattgttcagncccagcaggtccgggtngtgttcntttcagancccatgtttngcctnaggatttttgatttnggggattntt

SEQ ID NO: 2047 - DNA, 353 bp, Homo sapiens
  I.2047 (R16456)
  misc_feature (225)..(225): n is a, c, g, or t
  misc_feature (271)..(271): n is a, c, g, or t
  misc_feature (299)..(299): n is a, c, g, or t
  misc_feature (318)..(318): n is a, c, g, or t
  misc_feature (327)..(327): n is a, c, g, or t
  misc_feature (342)..(342): n is a, c, g, or t
accatggtacagaacaccaaagccgaactcacgcactcccgggagaaggtccgtcaattggaatccaatcttcttcccaagcaccaaaaacatctaaacccatcaggtaccatgaatcccacagagcaagaaaaattgagcttaaagagagagtgtgatcagtttcagaaagaacaatctcctgctaacaggaaggtcagtcagatgaattcccttgaacaaganttaggaaacaatttcatttgggaaaatgaaggcctggaaaaagganacaagtaaaactgggatggggcagctcntgggaggtgcaggcacctngagggtccncttgcggacggcttnggcccgttccc

SEQ ID NO: 2048 - DNA, 302 bp, Homo sapiens
  I.2048 (R16294)
  misc_feature (150)..(150): n is a, c, g, or t
  misc_feature (192)..(192): n is a, c, g, or t
  misc_feature (232)..(232): n is a, c, g, or t
  misc_feature (247)..(247): n is a, c, g, or t
tctgctgaccttggggctggtgggccctgtggagtaggaggggctgctgcaggctcctccacaggcgtcatggccctccgattcctcttgggctttctgcttgccggtgttgacctgggtgtctacctgatgcgcctggagctgtgcacnccaacccagaggcttcgggtggccctggcaggggagttggtnggggtgggagggcacttcctgttcctgggcctggcctttnttctctaaaggattngcgattcctacagcgaatgatcaccgcttccctgcatcctcttcctgttttatgg

SEQ ID NO: 2049 - DNA, 415 bp, Homo sapiens
  I.2049 (R15382)
  misc_feature (97)..(97): n is a, c, g, or t
  misc_feature (386)..(386): n is a, c, g, or t
ccaagttccgggtgatcaccaagatcaaaaccattggcagcacgtatatggcggcttcaggagtcacccccgatgtcaacaccaatggctttgcagnctccaacaaggaagacaagtccgagagagagcgctggcagcacctggctgacctggccgacttcgcgctggccatgaaggatacgctcaccaacatcaacaaccagtccttcaataacttcatgctgcgcataggcatgaacaaaggcggggttctggctggggtcatcggagcccggaaaccacactacgacatctggggcaatacagtcaatgtagccagcaggatgggagtccacgggggttcatggggcaacatttcaggtggttaggaaggaaacccaagttcntcctccgaggagttacgggtttccgtttt

SEQ ID NO: 2050 - DNA, 483 bp, Homo sapiens
  I.2050 (R15296)
  misc_feature (58)..(58): n is a, c, g, or t
  misc_feature (60)..(60): n is a, c, g, or t
  misc_feature (252)..(252): n is a, c, g, or t
  misc_feature (256)..(256): n is a, c, g, or t
  misc_feature (390)..(390): n is a, c, g, or t
  misc_feature (444)..(444): n is a, c, g, or t
  misc_feature (453)..(453): n is a, c, g, or t
  misc_feature (461)..(461): n is a, c, g, or t
  misc_feature (474)..(474): n is a, c, g, or t
  misc_feature (479)..(479): n is a, c, g, or t
acaaaagccagcctcaaacccaggggatgttcaaaaccaccctggaggcctcctggtngnaaattgtaactcagagccaggagctccgtcggcggagagctttgctgtttaatttggattttactggttggtccttttttcactggtacccgtggaccctgccacttactaaccccaagggaatcagccaatatattactgagacttcctctctctcttcttgctttaacttctttttttttgagacggagntcgnctctgtcgcccaggctggagtgcggtggcgcaacctcggctcactgcaacctccgcctcccaggttcacgccattctcctgcctcagcctcccaagtggctgggactacaggcgcccaccacctcgcctgggtnaattttttgtatttttagtagagacgggcttttcgcatgttggccagggtggtnttcgatctnctgacctnatgatttaacctngtgantcgg

SEQ ID NO: 2051 - DNA, 342 bp, Homo sapiens
  I.2051 (R15230)
  misc_feature (333)..(333): n is a, c, g, or t
aggcggtgtctcagggcagcagcgactctcagatcctggatctctcaaatcgcttttacaccctgatcccccacgactttgggatgaagaagcctccgctcctgaacaatgcagacagtgtgcaggccaaggcggaaatgcttgacaacctgctggacatcgaggtggcctacagtctgctcaggggagggtctgatgatagcagcaaggatcccatcgatgtcaactatgagaagctcaaaactgacattaaggtggttgacagagattcttgaagaagccgagattcatcaggaagtatgtttaaggaacattcatggcaaccacacacantgcgtattg

SEQ ID NO: 2052 - DNA, 402 bp, Homo sapiens
  I.2052 (R15219)
  misc_feature (270)..(270): n is a, c, g, or t
aaagatgaagcttaacactgaggtgagagagattggacctttgtcaaagaagggattctatcttgcctttcaggatgtaggggcttgcatagctttggtttctgtcaaagtgtactacaagaagtgctggtccattattgagaacttagctatctttccagatacagtgactggttcagaattttcctctttagtcgaggttcgagggacatgtgtcagcagtgcagaggaagaagcggaaaacgcccccagggatgcactgcagtcagnaaggagaatggttagtgcccattgggaaaatgtatctggcaaagcaggcttaccagcaaaaagggagacactttgtggaaccctgtgggccgtggggttcttacaagtctttcctcttcaagatctttcagt

SEQ ID NO: 2053 - DNA, 418 bp, Homo sapiens
  I.2053 (R15218)
  misc_feature (17)..(17): n is a, c, g, or t
  misc_feature (99)..(99): n is a, c, g, or t
  misc_feature (110)..(110): n is a, c, g, or t
tttgttctggtcaaggntaactcaatatctgtgtgaaagagaactactaacaacgttacaatagaggctagatttgaaaaaaaaaatctatagatctanttgatacaatngtagaacaaaatgtcaaaataatgttttaagtataagagaagatggaccaaggagagagagatcatttgaaaatctaattgtagcttttctaggctcacattcatgtactacttttagcacccttatgggctgtgctcgcccccgggacagttgagctttgggattatcttcctcttcaattttccctctattgacccgagtgtctccctctgcttctacagatttataggtactccttgggctctttttgagtcttccacttttacttcactgtcttctgggggttttttaagatcccttttccttc

SEQ ID NO: 2054 - DNA, 368 bp, Homo sapiens
  I.2054 (R15181)
  misc_feature (25)..(25): n is a, c, g, or t
tccttctcccggcgcctcaagcganagaccattcctcaagaattttgtatccaaggcccaaaagtttgttacccaagatgatgaatgctgacatggatgcagttgatgctgaaaatcaagtggaactggaggaaaaaacaagacttattaatcaagtgttggaactccaacacacacttgaagatctctctgcaagagtagatgcagttaaggaagaaaatctgaagctaaaatcagaaaaccaagttcttgggacaatatataggaaaatctcatgtcagcttctagtgtttttcaaacaactgacacaaaaaggcaaaaggaaagtaaggggtttgacacccttctgttttatgggattgctgctg

SEQ ID NO: 2055 - DNA, 473 bp, Homo sapiens
  I.2055 (R15161)
  misc_feature (413)..(413): n is a, c, g, or t
  misc_feature (428)..(428): n is a, c, g, or t
  misc_feature (472)..(472): n is a, c, g, or t
gagacattctgctgattggacatagacaggcttttgcatgggttgatgagtggtatgacatgacaatggatgaagtccgagaatttgaacgagccactcaggaagccaccaacaagaaaatcggcattttcccacctgcaatttctatctccagcatccccctgctgccttcttccgtccgcagtgcgccttctagtgctccatccacccctctctccacagacgcacccgaatttctgtccgttcccaaagatcggccccggaaaaagtctgccccagaaacttttcacactttccagaccctgaggaaaaaaggccaccctggaattttacccgggcatggcactctttcaggattaaggccatgttcgggccccaaatctggagttaacttttattattaaatatcttcnggggggttttttatnatttttcattttgtttgtttgtttgtttttttttttttaagggnt

SEQ ID NO: 2056 - DNA, 422 bp, Homo sapiens
  I.2056 (R14959)
  misc_feature (6)..(6): n is a, c, g, or t
  misc_feature (7)..(7): n is a, c, g, or t
  misc_feature (91)..(91): n is a, c, g, or t
  misc_feature (328)..(328): n is a, c, g, or t
  misc_feature (335)..(335): n is a, c, g, or t
  misc_feature (352)..(352): n is a, c, g, or t
  misc_feature (383)..(383): n is a, c, g, or t
  misc_feature (396)..(396): n is a, c, g, or t
  misc_feature (417)..(417): n is a, c, g, or t
ttatanntaaaatttattttattgtttcatcaaaaatttcctgtcaaaaagatttgtacatcttatacaaaacagtataaatacccctggntttcttcaaattccatatataaaagtagtacctttggttaaaaatagttacaacatatggaatgagaaaatatatagactacatcctttcaagaatcttaaatccacactctttaaaggggtataaataaaatgatttgtaacaagctgatgtttgtggaatttgattcacaagatctgtcatttctacataaataaataggggacataatactggcaagggttttaccggtaaaantaattanaatatttttaaggggcnctttattcccaccatatcttgggctttggcnctgtgtgtggggngtgtgtgctggggtggggggngtgtg

SEQ ID NO: 2057 - DNA, 354 bp, Homo sapiens
  I.2057 (R14614)
  misc_feature (127)..(127): n is a, c, g, or t
  misc_feature (338)..(338): n is a, c, g, or t
  misc_feature (349)..(349): n is a, c, g, or t
aaaagctagtttcctgagtgaacaagccataacctcccctaaacaccacctaggtatttgttagaagtcacactattactccaatgtcatcagacacctaaggtctgccagccaggctcctggctgngcaatggaagatggtgtggccctgttagtctccgtgtgtggcttactagccagccttgggaactgccaactcaaattctaagaaagccactgctttctcatcatcactctataccaatacttatttctgggccaaatgaatctgcttctctgcccctcaaacttttagttcacaatttcatcttctaccttaacttgggggttcttggggnctctgggcttnccttt

SEQ ID NO: 2058 - DNA, 183 bp, Homo sapiens
  I.2058 (R08560)
  misc_feature (58)..(58): n is a, c, g, or t
ataactttacttgttttttgggaggagattaatgggtgggaggggtgagaggggaganctgatttacatacggacttgagactcccaaggcagtaccccgggtcgtcctctgcaaggttgccccggtgggtctgacgcccagctggctccgggagccggggtggagtcctgggagggaggcga

SEQ ID NO: 2059 - DNA, 298 bp, Homo sapiens
  I.2059 (R14455)
aagccggagagctggagctttgaagccaccccggtcaaaggatgctgagtccggagcgcctagccctaccggactacgagtatctggctcagcgacatgtcctcacctacatggaggatgcagtgtgccagctgctagaaaacagggaagatattagccaatatggaattgccaggttcttcactgaatattttaacagtgtatgccaggggaacacacattctctttcgagaattcagcttcgtccaagccaccccccacaataggggtatcatttttacggggccttctgggagat

SEQ ID NO: 2060 - DNA, 322 bp, Homo sapiens
  I.2060 (R14450)
  misc_feature (45)..(45): n is a, c, g, or t
taatgcccgagccaagttccactggttcttcttgaagatgtatcnaatgtgtatggtgatgtagaaattgatcgtaataaacacatccataaaaagaggaaactagctgaaggaagagaaaaaaccatgagttcagacgatgaagactgttcggcgaaaggaagaaatcgtcacattgtagtcaataaagccgaacttgctaactccactgaagtgttagaaagctttaaattggccaggggagagctgggagttgctctattccctagaattccttgacaaagatttacaaggatttgcttggcctgggaagacggatact

SEQ ID NO: 2061 - DNA, 271 bp, Homo sapiens
  I.2061 (R14329)
  misc_feature (30)..(30): n is a, c, g, or t
  misc_feature (32)..(32): n is a, c, g, or t
  misc_feature (77)..(77): n is a, c, g, or t
  misc_feature (88)..(88): n is a, c, g, or t
  misc_feature (92)..(92): n is a, c, g, or t
  misc_feature (100)..(100): n is a, c, g, or t
  misc_feature (117)..(117): n is a, c, g, or t
  misc_feature (118)..(118): n is a, c, g, or t
  misc_feature (140)..(140): n is a, c, g, or t
  misc_feature (233)..(233): n is a, c, g, or t
  misc_feature (265)..(265): n is a, c, g, or t
agctggccatgcactttgaccgccttgtgnangaacaccacctggggcgcgtcctgcggtgtctagggctctctttnctgattacctncagncagaggtntgggactcagaggcggnngctgaggcacagcgcattcttnatcaggctttctcaagccctccatcggccccaccagatctccattctttgccatgagggccaacacatgagaccccacctccctccctgcctnccagccctagcatttgttgggagcataggagnccttcc

SEQ ID NO: 2062 - DNA, 337 bp, Homo sapiens
  I.2062 (R14309)
  misc_feature (324)..(324): n is a, c, g, or t
tggacaagcaccgccccgtggaaccggaacgcaggttcttgagtcctgaattcattcctcgaaggggaagaacagatcctctgaaatttcaaatagaaagaaaagatatgttagaaaggagaaaagtactccacattccagagttctatgttggaagtattcttcgtgttactacagctgacccatatgccagtggaaaaatcagccagtttctggggatttgcattcagagatcaggaagaggacttgggagctactttcatccttagggaatgttattcgaagggacaaggtgtccgagattttgcttttgaactttattantcctcgggtccag

SEQ ID NO: 2063 - DNA, 447 bp, Homo sapiens
  I.2063 (R14267)
  misc_feature (368)..(368): n is a, c, g, or t
  misc_feature (386)..(386): n is a, c, g, or t
  misc_feature (426)..(426): n is a, c, g, or t
aatgaccagctgctgcccaggaagttgaacacagaacccaaagatgtgcctaagcctgtgcatcagcctgtaggttcttcctctacccttccgaagatccagtattgaggaaagaaaaactgcaggatctgatgactcagattcaaggaacttgtaactttatgcaagagtctgttcttgactttgacaaaccttcaagtgcaattccaacgtcacaaccgccttcagctactccaggtagccccgtaggcatctaaaggaacaaaatctgtccagtcaaagtgattttctttcaagagccgtttacagggtattttaacgtttaatggcaccttttgcctccacggaaaaggaacaaggaaataaangattccccttatttcacngggggttacattcaaagttttttacccacaggccaggttncaccaaacacccaccccgtgg

SEQ ID NO: 2064 - DNA, 400 bp, Homo sapiens
  I.2064 (R14218)
  misc_feature (199)..(199): n is a, c, g, or t
  misc_feature (368)..(368): n is a, c, g, or t
caggcgttggactctgcctgtgtcgtgcccggcgactgctgatagcaaccatcttcaccacccatgccacgctgctggggcgctacctgtgtgccggtgccgtggacttctacaacaacctggagaacttcaacgtggacaaggaagcaggggagaggcagatctaccaccgatactgcatggaaagggcggccactgncgctcacgtcttcactactgtgtcccagatcaccgccatcgaggcacagcacttgctcaagaggaaaccagatattgtgacccccaatgggcttgaatgtgaagaagttttctgccatgcatggagttccagaacctccatggttcagagcaaggctcgaattccaggngttttttgcgggggccattttattgggcatct

SEQ ID NO: 2065 - DNA, 434 bp, Homo sapiens
  I.2065 (R14209)
  misc_feature (366)..(366): n is a, c, g, or t
  misc_feature (375)..(375): n is a, c, g, or t
  misc_feature (388)..(388): n is a, c, g, or t
  misc_feature (398)..(398): n is a, c, g, or t
  misc_feature (403)..(403): n is a, c, g, or t
  misc_feature (411)..(411): n is a, c, g, or t
ggccgtgtccatcccggagcaggacaacatcgcctgcacctcaccccatgtgctcaagggtacaccgctgagccgcctgccgccactgccatgctcggcgccctcagtgcagctcagctaccaacccagccaggatggtgccgagctgcggcctggttttgtgctggcactgcactgtgatgtggacgggcagccggccctgcagcttcactggcacatccagatacccagtggcattgtggagatcaccagccccaacgtgggcactgatgggcgtgcctggcctgggcacccctgtgggccagcttcccagccgcgctttccagggcctttgccaatggcaggcctgtttattccccgattttnggcaagctnggaggaaggcacntacagttgcntgggncaccaatnaagtttgggcagtgttgagagtt

SEQ ID NO: 2066 - DNA, 433 bp, Homo sapiens
  I.2066 (R14184)
  misc_feature (335)..(335): n is a, c, g, or t
  misc_feature (385)..(385): n is a, c, g, or t
  misc_feature (397)..(397): n is a, c, g, or t
  misc_feature (415)..(415): n is a, c, g, or t
  misc_feature (421)..(421): n is a, c, g, or t
taaggtagtggtaattacctttatgtgaactttgaatggtttaacaaaagatttgtttttgtagagattttaaagggggagaattctagaaataaatgttacctaattattacagccttaaagataaaaatccttgttgaagttttttaaaaaaaagctaaattacatagacttaggcattaacatgtttgtggaagaatatagcagacgtatattgtatcatttgagtgaatgttcccaagtagggcattctagggctctatttaactgagtcacactgcatagggaatttaggaacctaacttttatagggttatcaaaactgttgttcaccnttggcacaattttgtccctaatatatacataggaaactttgtggggggcngtttaagttacngtttggcaccaagttccntctccntttgtatttccc

SEQ ID NO: 2067 - DNA, 479 bp, Homo sapiens
  I.2067 (R14130)
  misc_feature (396)..(396): n is a, c, g, or t
  misc_feature (410)..(410): n is a, c, g, or t
  misc_feature (418)..(418): n is a, c, g, or t
  misc_feature (433)..(433): n is a, c, g, or t
  misc_feature (440)..(440): n is a, c, g, or t
  misc_feature (446)..(446): n is a, c, g, or t
  misc_feature (460)..(460): n is a, c, g, or t
atatacccatatttgtgtgtggatatgtgaagcttttccaaatagagctctcaaagtttttacttctaattattttgcattactttgagttaaatttgaatagagtattaaatataaagttgtagattcttatgtgtttttgtattagcccagacatctgtaatgtttttgcactgggtgacagacaaaatctgttttaaaatcatatccaggcacaaaaactatttctgggctggaataggcacaggaaaagtattttaacctacctgtaggggatccctcgtcaggggaagggtgcccaaactgtttttggatggggagggacaggtaggagtgagggccacagttcccccccacacgggggggctttgtatttgttcctactttttcagcccnttactttctgggcnggagggcntcccctggggggtgnccaggtntaggtngggggccatagggngttcaggggggcctgggac

SEQ ID NO: 2068 - DNA, 524 bp, Homo sapiens
  I.2068 (R13837)
  misc_feature (123)..(123): n is a, c, g, or t
  misc_feature (464)..(464): n is a, c, g, or t
  misc_feature (476)..(476): n is a, c, g, or t
  misc_feature (490)..(490): n is a, c, g, or t
  misc_feature (499)..(499): n is a, c, g, or t
  misc_feature (508)..(508): n is a, c, g, or t
ggaaactaaaacagaggcggtggaagaagttgcacaaggctagagagatcactgctggagggaaaagcatgatgggctctcgggttttgagaactggcaagttgttggaggcagctggagcgnggcctgggtcgccggcactggctgtctttgcgtttgggcgtggcagtcactcctcttccaggttccagcctgaactgtctgcccctgatctgcggcgatttatcgatggtccaaaccgggctgtggcctgcttccggagctacgggaggtcgtctcctctatcagctacatcgctcgacagctgcaggaacaggaggaccacgatgcgctgaaggaggactggcagtttgtgggccatggtagtgggaccgcctttttcctgtggaactttcatcatctttcaccagcgttggggaccttagtcatctttcctgggacggcacgttaccatttgccccttncagacccttttncttgaagattgganggttgaganccaggcccntgccatttgaagtgag

SEQ ID NO: 2069 - DNA, 495 bp, Homo sapiens
  I.2069 (R13798)
  misc_feature (164)..(164): n is a, c, g, or t
  misc_feature (265)..(265): n is a, c, g, or t
  misc_feature (310)..(310): n is a, c, g, or t
  misc_feature (314)..(314): n is a, c, g, or t
  misc_feature (375)..(375): n is a, c, g, or t
  misc_feature (412)..(412): n is a, c, g, or t
  misc_feature (425)..(425): n is a, c, g, or t
  misc_feature (449)..(449): n is a, c, g, or t
  misc_feature (456)..(456): n is a, c, g, or t
  misc_feature (478)..(478): n is a, c, g, or t
  misc_feature (490)..(490): n is a, c, g, or t
agctggtccagtagacatcgttttatgaaaaggtaccgctgtgtgcattcctcactagaactcatccgacccccgacccccacctccgggaaaagattctaaaaacttctttccctgagagcgtggcctgacttgcagactcggcttgggcagcacttcggggngggagggggttttatgggagggggacacattggggccttgctcctcttcctcctttcttggcgggtgggagactccgggtagccgcactgcagaagcaacnccccgaccgcgccctccagggttcgtccctgggcccaaggcgagnccancaaagttagttgggaagccggcgtttcggtattcagaaggcgctgatggtcatatccaatntcaatattctggggtcaatccacacccttttaggaantgtgggcctttcntccttgttttttcgtttgattttngggaganatggtttttttaataaattttnggatgtttcctntttca

SEQ ID NO: 2070 - DNA, 354 bp, Homo sapiens
  I.2070 (R13753)
gcatcggtgttcatccccacccccaccccatgagttcagggcgtatcagctctacacattgtaccggggcaaggatgggaaagtgatgcagatgcgtgttttggacaagctgatggttgagcgactttctgcagagaggacggagtgcctgaaccgcctgcaacagcactcagacacagagaagcatgagggggagaaacgacagatatccttggtggatgaattaaaaacctggtgcatgttaaagattcagaatctggagcagaagctttctggagattctagggcctgcagagcttaaatccacaccatcttacttgtgagtcctctacaggtgtgggaccatttagtggt

SEQ ID NO: 2071 - DNA, 486 bp, Homo sapiens
  I.2071 (R13495)
  misc_feature (135)..(135): n is a, c, g, or t
  misc_feature (380)..(380): n is a, c, g, or t
  misc_feature (406)..(406): n is a, c, g, or t
  misc_feature (429)..(429): n is a, c, g, or t
aactctttccagattggatattcccatcagaatctgagcgagacaaaataaaaacaagtcaagccagagatctgttatcaaaaatgttagtgattgatcctgacaagcggatctctgtagacgaagctctgcgtncacccatacatcactgtttggtatgaccccgccgaagcagaagccccaccacctcaaatttatgatgcccagttggaagaaagagaacatgcaattgaagaatggaaagagctaatttacaaagaagtcatggattggggaagaaagaagcaaggaatgggtgttgttaaaagatccagcctttcagatgcaggcagttaaggtaggcaacgccactcctttcttcagtctttcatccgatccantggacattttcatcccttgttcccanttgaggcaggacgttgggccttnaggaccacaggacaggcagttttttgattgccttcggacggggacccctttgaaggg

SEQ ID NO: 2072 - DNA, 292 bp, Homo sapiens
  I.2072 (R13494)
  misc_feature (209)..(209): n is a, c, g, or t
tcttggctggaatatgagtctagtttttccaatgaggaagcacagaaagcacaggcccttcgactggcctctcacctcaacctggccatgtgtcatctgaaactacaggccttctctgctgccattgaaagctgtaacaaggccctagaactggacagcaacaacgagaagggcctcttccgccggggagaggcccacctgggccgtgnaatggactttggaactgggcacgggctgattttccaggaaggtcctggcagcttttaccccaacaacaaagccgccaaggacc

SEQ ID NO: 2073 - DNA, 437 bp, Homo sapiens
  I.2073 (R13459)
  misc_feature (191)..(191): n is a, c, g, or t
  misc_feature (340)..(340): n is a, c, g, or t
  misc_feature (378)..(378): n is a, c, g, or t
  misc_feature (393)..(393): n is a, c, g, or t
cgttttcaagatggcgactccctatgttactgacgagaccggcggcaagtatatcgcgtcaacacagcgacctgacgggacctggcgcaaagcggagggtgaaagaaggatatgtgccccaggaggaggtcccagtatatgaaaacaagtatgtgaagtttttcaagagtaaaccagagttgcccccaggnttaagcctgaggccactgctcctgtcaccccatccagggcctgaaggtggtgaaccagggcctctccaaggacagccaaacgttaaccttgaaggcgaaagggagaaggaggcggcacaggcaaggaggaaagggagagggcagaggcntttggagcaggatttttttattaaggttttcctggggnaaggagacagcccantttcccccattgttttcccacagggtttttttgggggcagcccc

SEQ ID NO: 2074 - DNA, 241 bp, Homo sapiens
  I.2074 (R13392)
  misc_feature (33)..(33): n is a, c, g, or t
  misc_feature (55)..(55): n is a, c, g, or t
  misc_feature (56)..(56): n is a, c, g, or t
  misc_feature (64)..(64): n is a, c, g, or t
  misc_feature (119)..(119): n is a, c, g, or t
  misc_feature (192)..(192): n is a, c, g, or t
  misc_feature (201)..(201): n is a, c, g, or t
gtgtcagaaatgtgcgttttggaaccaagcttngatcagatatcaagctggaagnntctttatnggtatcattaacagatcagcatgtccagctccccatggcaatgactacagagaancttggctgtaaaacacaaaataagcagagaagaatgtgacaaatatgccctgcagtcacagcagagatggganagctgctantgatgctggctactttaatgatgaaatggcaccaatttga

SEQ ID NO: 2075 - DNA, 438 bp, Homo sapiens
  I.2075 (R13365)
  misc_feature (120)..(120): n is a, c, g, or t
  misc_feature (121)..(121): n is a, c, g, or t
  misc_feature (368)..(368): n is a, c, g, or t
  misc_feature (378)..(378): n is a, c, g, or t
  misc_feature (411)..(411): n is a, c, g, or t
  misc_feature (418)..(418): n is a, c, g, or t
  misc_feature (432)..(432): n is a, c, g, or t
gagaatcgaggacggacggcctagccaggcaagaatgcaattgccccggtggtgggagctgggagacccctgtgcttggacgggacagggtcgggggacacgcaggatgagccccgcganncactggcacattcttgctgacagtgtacagtattttctccaaggtacactccgatcggaatgtatacccatcagcaggtgtcctctttgttcatgttttggaaagagaatattttaagggggaatttccaccttacccaaaacctgggcgagattagtaattgatcccataacatttaatacaatttaatggggttacccaggaccgacctggggatgggtttcgattatatcccaaagggacaccntattagttgntgggagttcctattatggggttcccccaacagntggaaantttgggggggaagnccaaca

SEQ ID NO: 2076 - DNA, 218 bp, Homo sapiens
  I.2076 (R13262)
  misc_feature (201)..(201): n is a, c, g, or t
gacttgttcatggacctcattgagtgcagttttaatagtgctaaggaacaaaaaatataatacagggattttgttaacatacggcataggtcaggaaaatgaaactatcattttatacaggtgtcataatttcactttattggtgtcttaatgtatggcttaaaatatatacatatagtgtgggcctcaaattattttttnaatctggggggctcaaa

SEQ ID NO: 2077 - DNA, 406 bp, Homo sapiens
  I.2077 (R13020)
  misc_feature (211)..(211): n is a, c, g, or t
  misc_feature (317)..(317): n is a, c, g, or t
  misc_feature (393)..(393): n is a, c, g, or t
gccccaccaatgccatctttaaggctttcgctatgatcatcgacaagctggaggaagatatcaacagctccatgaccaacagtaccgcggccagcaggccccggtcaccctgaggctggtggtgccggccacccagtgcggctccctgattgggaaaggcgggtgtaagatcaaagagatccgcgagagtacgggggcgcaggtccaggtngcgggggatatgctgcccaactccaccgagcgggccatcaccatcgctgggcgtgccgcagtctgtcaccgagtgtgttcaagcagattttgcctgggtcatgctnggagacgctcttcccagttttccgcaagggaggagttcatggaccatttccgttaccagcccatgccggccagttncccagttcatttt

SEQ ID NO: 2078 - DNA, 352 bp, Homo sapiens
  I.2078 (R12948)
  misc_feature (62)..(62): n is a, c, g, or t
  misc_feature (277)..(277): n is a, c, g, or t
  misc_feature (308)..(308): n is a, c, g, or t
  misc_feature (339)..(339): n is a, c, g, or t
ctgaaggggcccgactggatcctgggcgagatcaagacatcgggtttgaggggccgtggagngctggcttccccactggcctcaagtggagcttcatgaataagccctcagatggcaggcccaagtatctggtggtgaacgcagacgagggggagccgggcacctgcaaggaccgggagatcttacgccatgatcctcacaagctgctggaaggctgcctgggtggggggccgggccatgggcgcccgcgttgcctattatctacatccgaggggantttttacaatgaggcctccaatctgcaggtnggccattccgagaggcctattgaggcaggtnttgatttggcaag

SEQ ID NO: 2079 - DNA, 333 bp, Homo sapiens
  I.2079 (R12730)
  misc_feature (194)..(194): n is a, c, g, or t
  misc_feature (321)..(321): n is a, c, g, or t
tatagatgactgaccaagggcttaatcaaataaaatgactaacagcatctatcataaagccacacaagccttatgttctcatctcaaaaatgctgtgacagctttttggctgctttaaccataagaaaaatgattggtggatgattttattagcccaggcttttaaaaactttcatctaggccacgtgcggtgnttcatgcctgtaatcccggcactttgggaggcctgagtggatggatcacttgaggtcaggagttcaggaccagcctgggccaacatgatggaaaccctgtctctactaaatatacaaaaattagttngggtgtttattg

SEQ ID NO: 2080 - DNA, 462 bp, Homo sapiens
  I.2080 (R12394)
  misc_feature (242)..(242): n is a, c, g, or t
  misc_feature (338)..(338): n is a, c, g, or t
  misc_feature (395)..(395): n is a, c, g, or t
ttaccaaaactgtaaattcttttattaacaggcattataaacagataatactaatcttatttaaaaaccatgagtgccacactggtgaatatacagcttatgaataacttaaaaagtatttcccattttaaaaggcaaacccagcatacaaaaacctatactaaacaaagaagctataatatgggatacatgattgatgtgtctaaaatgatatatacaggtacataatgttaattatatgntcaggtacatttttccctatggattcccttcatggcttcactttccccaggaaactggaattctggtactttcctcttcttaaaatggggggacancgggggtatcctggggggccatcaaattgggtattttccatccccaacttggggggnacccgggtggggccaccaaaatgggttttccatttttccatatttcatccaattctggcccgtgggt

SEQ ID NO: 2081 - DNA, 428 bp, Homo sapiens
  I.2081 (R12356)
  misc_feature (326)..(326): n is a, c, g, or t
  misc_feature (388)..(388): n is a, c, g, or t
gagcagtactctgggggctgctacacaacttatttcccccctgggatacctgactcaatatggaagggttctacgccagccagtggacaggatttactttgcaggcaccgagactgccacacactggagcggctacatggagggggctgtagaggccggggagagagcagcccgagagatcctgcatgccatggggaagattccagaggatgaaatctggcagtcagaaccagagtctgtggatgtccctgcacagcccatcaccaccacctttttggagagacatttgccctccgtgccaggccttgctcaggttgattggattngaccaccatctttttcagcaacggtttttggctttcctgggcccacaaaagggggttatttnttgagattttaaagagagagggtttttgttattcacattt

SEQ ID NO: 2082 - DNA, 434 bp, Homo sapiens
  I.2082 (R12322)
  misc_feature (43)..(43): n is a, c, g, or t
  misc_feature (66)..(66): n is a, c, g, or t
  misc_feature (86)..(86): n is a, c, g, or t
  misc_feature (377)..(377): n is a, c, g, or t
  misc_feature (397)..(397): n is a, c, g, or t
  misc_feature (405)..(405): n is a, c, g, or t
  misc_feature (430)..(430): n is a, c, g, or t
tctggcagggatctcagatgaccgtggcctccctctcagaggnggagaacgccagagccctggtgngtgatgtgctggctgggggngaatcccaatgagggtccctctcagagcgggagaacgccagagccctggatggtgatgcgctggctgggggtgaatcccaatgagggtccctctcagaaagggagaacgccagagccctggctggtgacatgctggctgggggtgaatccgaatgacagtgcagacgttctcccatccaccatgtctgagcttgggggaattgccttcatttaccctgggaaaagaaacatggtccatttagaggggaaagcccaggggtgaatctttcacgccccaaacagtgcccggtngggaaggaggcacccgttcntttttttnagttaaaaccacccttgggagattnggaa

SEQ ID NO: 2083 - DNA, 450 bp, Homo sapiens
  I.2083 (R11757)
  misc_feature (62)..(62): n is a, c, g, or t
  misc_feature (80)..(80): n is a, c, g, or t
  misc_feature (86)..(86): n is a, c, g, or t
  misc_feature (90)..(90): n is a, c, g, or t
  misc_feature (91)..(91): n is a, c, g, or t
  misc_feature (381)..(381): n is a, c, g, or t
  misc_feature (391)..(391): n is a, c, g, or t
  misc_feature (438)..(438): n is a, c, g, or t
cttactcataacttctcttccaaaatgtgtaacacagccgtgaaagtgaacattaggaatangtactaccttagctaaanggcccngaanngaaattgtagtgtatttggattatttgtgtattgtacgatgtaaacaatgaatggatgttactgatgccgttagtgcttttttggacttcacctgaggacagatgatgcagctgttgtgtggcgagctatttggaaagacgtctgtgtttttgaaggtttcaatgtacatataacttttgaacaaaccccaaactcttcccataaattatcttttcttctgtatctctgttacaagcgtagtgtgataataccagataataaggaaaacactcataaatatacaaaactntttcagtgtnggagtacatttttccaatcacagggagcttcaactgttgtgaggaangtttatttttgt

SEQ ID NO: 2084 - DNA, 289 bp, Homo sapiens
  I.2084 (R11261)
  misc_feature (9)..(9): n is a, c, g, or t
  misc_feature (42)..(42): n is a, c, g, or t
  misc_feature (47)..(47): n is a, c, g, or t
  misc_feature (201)..(201): n is a, c, g, or t
gtcaagtgnagctcgggggccaaggtgctggccacgctgtgnggcanggagagcacagacacggagcgggcccctggaaggacactttctactcgctgggctccagctggacattaccttccgctccgactactccaacgagaagccgttcacgggttcgaggccttctatgcagccgaggacattgacgagtgccaggtngccccgggagaggcgcccacctgcgaccaccactgccacaaccacctggggcggttttttattgtttcttgccgcgagcttacgttct

SEQ ID NO: 2085 - DNA, 435 bp, Homo sapiens
  I.2085 (R10795)
  misc_feature (222)..(222): n is a, c, g, or t
  misc_feature (258)..(258): n is a, c, g, or t
  misc_feature (264)..(264): n is a, c, g, or t
  misc_feature (319)..(319): n is a, c, g, or t
  misc_feature (332)..(332): n is a, c, g, or t
  misc_feature (359)..(359): n is a, c, g, or t
  misc_feature (374)..(374): n is a, c, g, or t
  misc_feature (431)..(431): n is a, c, g, or t
actactaccactactcagacccggtgtgcaagcaccccaccttctccatctacgcccggggccgctacagccgcgggttcctctcgtccagggtcatgggaggcaccgagttcgtgttcaaagtgaatcacatgaaggtcacccccatggatgcggccacagcctcactgctcaacgtcttcaacgggaatgagtgcggggccgagggttcctgggcaggtngggcatccagcaggatgttgacccacaccaatgggntgcgtnggccctgggggattcaaactaccttcacacggagttacggagatctttcaaaatnggaacagggatgnccgggggggcttatttttgttgttttnaacggttcagagggncccagcgacggggttccagccccaggacagggccagagaaggaggagccacttcttnacca

SEQ ID NO: 2086 - DNA, 440 bp, Homo sapiens
  I.2086 (R10703)
  misc_feature (332)..(332): n is a, c, g, or t
  misc_feature (383)..(383): n is a, c, g, or t
  misc_feature (406)..(406): n is a, c, g, or t
  misc_feature (411)..(411): n is a, c, g, or t
gttaaattacttcgaaactttaattacagatacttttccacgcaacatttctgaaatgaaagctttgattctcccctttttttgcataaaggctgggaaggtggtttggccagaccgtacatctttttgtatatacatatctacacctgtgtctcttctttattaataaaaggtgtcttgatcacagtcccaaaccaactctgcattgggattccagcatataaaactcagagggtaaaacaatttcaaagggaagacaggctgcaaccacagggaaaatgggcagggaaaagttgtaggcttgataggttgtttcttcttaaggtttaacntcagggaatattaattaattaatttaggggggaaaaaatagggggcccctngggtttccatcccctgctacccnacacngctcgtccccggactctgggggctgtctt

SEQ ID NO: 2087 - DNA, 432 bp, Homo sapiens
  I.2087 (R10273)
  misc_feature (405)..(405): n is a, c, g, or t
  misc_feature (415)..(415): n is a, c, g, or t
  misc_feature (432)..(432): n is a, c, g, or t
aaagggagacaaagtttattgctgtattggaaggaatacaaagtcaagaaccaaacccttttccaaccttggtggccccagttcctctgagttcccccacattcatcaaatccataaggtaccccaagtctccctaagacagtcatggggtaggaggatatcctgtacccagcccatggggatagggattgaagagtcaccctggtcacccccatgctgaggtctgtgatcagttacccacaagtctgcagatctcagtccttgcacattccttgggtgggggtcttgtgtgcaggttgcctcgactcagagccaaatttggggaatgcagacagggagtcctgggtcccaggttttgcaggcagagaactttggtgggtgtcttgggcaggtagcgtcgttttntcccgacctntagggtattggcaggan

SEQ ID NO: 2088 - DNA, 460 bp, Homo sapiens
  I.2088 (R10272)
  misc_feature (353)..(353): n is a, c, g, or t
  misc_feature (378)..(378): n is a, c, g, or t
  misc_feature (391)..(391): n is a, c, g, or t
  misc_feature (397)..(397): n is a, c, g, or t
  misc_feature (430)..(430): n is a, c, g, or t
  misc_feature (439)..(439): n is a, c, g, or t
atgttgaacttcatgatgcatgaccagcgcaccggcccggcatggaacgtgctgatgtggaccatgctgtttctaggccagggaatccaggtcagcctgtactgccaggagtggtacgcacggcgcactgccccttaccccaggcaactttctgggggctggtgacacctcgatcttggtcctgccatacctagaggtcgggacagacgacgctacctgcccagacaccaccaagttctctgcctgcaaaacctggggaccaggacttcctgtcttgcattcccaaatttgggttcttgagtcgaggcaaccttgcacacaagaccccaccaagggattgttgcaagggattnagattttgcagatttgttgggtaantgattcacagacntcagcntgggggttgaccagggttgattttttcaatccnttttccccntgggtttgggttacaggtttt

SEQ ID NO: 2089 - DNA, 352 bp, Homo sapiens
  I.2089 (R09804)
  misc_feature (53)..(53): n is a, c, g, or t
  misc_feature (54)..(54): n is a, c, g, or t
  misc_feature (227)..(227): n is a, c, g, or t
  misc_feature (250)..(250): n is a, c, g, or t
  misc_feature (263)..(263): n is a, c, g, or t
  misc_feature (317)..(317): n is a, c, g, or t
  misc_feature (325)..(325): n is a, c, g, or t
  misc_feature (336)..(336): n is a, c, g, or t
  misc_feature (343)..(343): n is a, c, g, or t
cggaggggacggcagtgctgaggcggaacaggccgggcaccaaggcgcagganntctataattggcctgatgaatcctttgatgaaatggacagtacactagctgttcaacagtatattcaacagaacataagagcagattgctccaatattgacaaaattcttgaaccacctggaaggccaaggatgaaggtgtgtgggaagtatggaacattttaagggcagttnctggctttgagcttaaatggganttgctgttcaaanttcagggttgaatgccctcccagatacttggcacttcaaatggacaggcaactngaaccatnggattttttcnttttgtngcagcttcc

SEQ ID NO: 2090 - DNA, 372 bp, Homo sapiens
  I.2090 (R09571)
  misc_feature (337)..(337): n is a, c, g, or t
  misc_feature (342)..(342): n is a, c, g, or t
tgaaaatatgtgggaccctttttctacaacacagacttcaagaatggtgggaattacactaaaattaatcaatggatatccttcagtagtgaatgcagaaaataaaaatacacaggtatacctaaaggcacttttattgagaatgagaagaactttagatgatgatgtatttatgcccttatatcccaaaaatgtcttagaaaataaaaattctgggccttacttgttttttcaacgacagttttggtcttcagttaaggtcataaaacccccattccagagagggtcctgccccatacccaggaaggaaagaatgctgctcagagagggccaaggnaggantctgggacgggacagggcctttgtgtttgt

SEQ ID NO: 2091 - DNA, 361 bp, Homo sapiens
  I.2091 (R09480)
  misc_feature (2)..(2): n is a, c, g, or t
  misc_feature (296)..(296): n is a, c, g, or t
  misc_feature (319)..(319): n is a, c, g, or t
  misc_feature (335)..(335): n is a, c, g, or t
  misc_feature (345)..(345): n is a, c, g, or t
tnagaaaaggcatataaatttatttgatcacagttttatgtaacatgacagccttcagaatgaagacccaaagatggaggagaaattgtctactatgtttaggtttaacgaaatatgtacaggcatgcagaaacatgactggacaaaaaggtatgatctactgctcaagagaagacaacacaaggcctgtccgtccagattcttcttggcctctctgagcagcattctttccttctggggtatgggggcaggaccctctctgggaatggggggttttatgacccttaacttgaggncccaaaactgtcgttggaaaaancaggtagggccccggnatttttattntctagggcatttttgg

SEQ ID NO: 2092 - DNA, 387 bp, Homo sapiens
  I.2092 (R09463)
  misc_feature (222)..(222): n is a, c, g, or t
  misc_feature (376)..(376): n is a, c, g, or t
  misc_feature (387)..(387): n is a, c, g, or t
tctttttatttaggaaaataatcatgctaaaagcaagttgtactttatatagattttcaaacaaaagattgattgtgctttttgaataaaaaagatagggtatcttccaacctcactgacttaaaccttgtgggaatacagcacttctaaactaaaaacacacgtcaaaaaggaaaaattaaataatcccagtggggatgctccaaaaatcgtctttagganggttttagggattgggctaattctgctattatcttattgggctgcgggcaaaaaaagggacacaggggctgctgtcttaaaatttctcccaactcccctccggagttcaggcaggggcaacacttcaggattttgaaggaactctggcggcacnggggggcattn

SEQ ID NO: 2093 - DNA, 318 bp, Homo sapiens
  I.2093 (R09462)
  misc_feature (245)..(245): n is a, c, g, or t
  misc_feature (282)..(282): n is a, c, g, or t
  misc_feature (308)..(308): n is a, c, g, or t
aagtacatttttatatgtcagttgctgcccttcacactaccaggccctgcagccacagtgttctgttggagaaacttggggaagtgttttctgaaccagttctttttcttggggtagagcgtgaaatccagacctgtttttgaaaggacagcacaggaggagaaaagtgactgggacgatgcttcctctcatccaaaacacatgcagagtcacatcctcatcctagtgttttggcagtttgaganccgctaaccctgaactttaggagctttaaatattganggggttgtgtttttgggggggggttntttttttggg

SEQ ID NO: 2094 - DNA, 222 bp, Homo sapiens
  I.2094 (R09417)
  misc_feature (212)..(212): n is a, c, g, or t
atattttaatggttgaaacctgtctttatgaggcgattatgacagcaaaaaatattataatgaataacaatgcatagtctacgctttgtaatatttcatacaataattcctttatcatttacatctcttaatgctagaaaagcattctgaagatgccaagcgtaagttgcaactgaggtaaaaaaaaaaaagcaaaatttactcaatttccnggagagggtg

SEQ ID NO: 2095 - DNA, 329 bp, Homo sapiens
  I.2095 (R09416)
gatttgttcttccatccaaggcctttgcctctccagttgaaaacccagacaactattgtttctgcacagaaaaaattatctcaaaaaattgtacatcatatggtgtgctagacatcagcaaatgcaaagaagggagacctgtgtacatttcacttcctcattttctgtatgcaagtcctgatgtttcagaacctattgatgggattaaacccaaatgaaggaggaacatagggacatacttgggatattggaacctattaactgggatttcacttttacaatttggcaaaacgggctggcgggtccaacctattgggtccaggccctcc

SEQ ID NO: 2096 - DNA, 409 bp, Homo sapiens
  I.2096 (R09369)
  misc_feature (249)..(249): n is a, c, g, or t
agaattcagcaggccataagccatccagcaacagagagtcatctaagcagagtgctgcaaaagaaaaggatttgttgccttctcccgctgggcctgttccttcaaaagatccaaaaacagagcatggctctcggaagaggactattagtcagtcttcttccttaaagtcaagcagtaacagcaacaaggagacgagtggcagcagcaaaaacagttcctccacatcaaagcagaagaagaccgaagganaggacttccagtagctccaaggaggttaaggtaaagtgttgggggcctggggttttgaaaatcattcaacttggccatgtggacttttccagggtgacactgtggctttggaaattatttgttaacatcttcagttaaatatattaggcctatgtctttt

SEQ ID NO: 2097 - DNA, 405 bp, Homo sapiens
  I.2097 (R09252)
  misc_feature (6)..(6): n is a, c, g, or t
  misc_feature (7)..(7): n is a, c, g, or t
  misc_feature (8)..(8): n is a, c, g, or t
  misc_feature (9)..(9): n is a, c, g, or t
  misc_feature (48)..(48): n is a, c, g, or t
  misc_feature (207)..(207): n is a, c, g, or t
  misc_feature (288)..(288): n is a, c, g, or t
  misc_feature (294)..(294): n is a, c, g, or t
  misc_feature (331)..(331): n is a, c, g, or t
  misc_feature (345)..(345): n is a, c, g, or t
  misc_feature (353)..(353): n is a, c, g, or t
  misc_feature (358)..(358): n is a, c, g, or t
  misc_feature (364)..(364): n is a, c, g, or t
aaattnnnnagttcttttacagacagggtctcaccacattgcccaggntggactcaaattcctcaaatgatccttccatcttagcctcccaaatagctgggactacaggtatgagccactgtacccaagggtttttctttcaatatgtatgtgaccagctgacttaccgccttcacagtcttatatcactgtattcatttatcaggnttattacatatagagggtaaaagacataggcctatatatttactgaggatgttacaataatttcaaagcacagtgtcaccngggggnaaggcacatgggcaagtttgaatgatttttccaaagnccccgggggccccnacaatttnccctnaacctncttggggggcctcttgggagggcttttcccctcggggcttt

SEQ ID NO: 2098 - DNA, 469 bp, Homo sapiens
  I.2098 (R09012)
  misc_feature (294)..(294): n is a, c, g, or t
  misc_feature (335)..(335): n is a, c, g, or t
  misc_feature (350)..(350): n is a, c, g, or t
  misc_feature (389)..(389): n is a, c, g, or t
  misc_feature (413)..(413): n is a, c, g, or t
  misc_feature (445)..(445): n is a, c, g, or t
  misc_feature (459)..(459): n is a, c, g, or t
actccagacgcaagctacctgtggtggatgaatggtcagagcctccctatgactcacagcttgaagctgtccgaaaccaacaggaccctctttctattgggtgtcacaaagtatactgcaggaccctatgaatgtgaaatacggaacccagtgagtgccagccgcagtgacccagtcaccctgaatctcctcccgaagctgcccaagccctacatcaccatcaacaacttaaaccccggggaggaataaggatgtctttaaactttcatctgtggaaccttaagagtgaggaantacacctacatttgggtgggcttaaatgggtcagaggcctnccggttcagttcccnggggttaaaggcggacccttttgaaaacagggttccttnattttttaccccgttgttcacggnggaattggaaacaggggcccttttcattgttnggaattaggggggnccgttttggg

SEQ ID NO: 2099 - DNA, 435 bp, Homo sapiens
  I.2099 (R08906)
  misc_feature (8)..(8): n is a, c, g, or t
  misc_feature (173)..(173): n is a, c, g, or t
  misc_feature (240)..(240): n is a, c, g, or t
  misc_feature (250)..(250): n is a, c, g, or t
  misc_feature (327)..(327): n is a, c, g, or t
  misc_feature (339)..(339): n is a, c, g, or t
  misc_feature (358)..(358): n is a, c, g, or t
  misc_feature (372)..(372): n is a, c, g, or t
  misc_feature (399)..(399): n is a, c, g, or t
  misc_feature (404)..(404): n is a, c, g, or t
  misc_feature (411)..(411): n is a, c, g, or t
  misc_feature (416)..(416): n is a, c, g, or t
  misc_feature (431)..(431): n is a, c, g, or t
tcccattnagtatagtttattgaactgctataagctgtagatagattaaaagagaaaaattccatcaatgtagaaaacaaaccatttaaagaatcagcaaattttcaaataaaaatcataaaaacattatcttcattattatcaattatttcaatgaaatcaatgttcttccngcttggtctaggctgggaatattatgaagatatcagcctgtttgttaaagttttcgaagttcttagncaaatttggnggggttcaggaggaggaatttggggatttgcttgtgcccatggggacacaggctgggggaataccaattgttttccntggctcttctcntggaatgcccaggataggnctccccccttaaancccctattgcccacggatgctgggggntcccnctttccnggggnccttcggactgtccngggg

SEQ ID NO: 2100 - DNA, 269 bp, Homo sapiens
  I.2100 (R08657)
  misc_feature (57)..(57): n is a, c, g, or t
  misc_feature (174)..(174): n is a, c, g, or t
  misc_feature (175)..(175): n is a, c, g, or t
  misc_feature (236)..(236): n is a, c, g, or t
  misc_feature (252)..(252): n is a, c, g, or t
aacgccaaacgcacgagtattacccctatctcagcagtgatggggagagccatagcnaccattactgggacttccacccccaccacgtgcacagcgagttcgagagcttcgccgagaacaacttcacggagctccagagcgtgcagcccccgcagctgcagcagcttctaccgnncacatggagctggagcagatgcacgtcctcgatacccccatggtgccaccccatcccagtnttggccaccaggtcanctacctgccccggatgt

SEQ ID NO: 2101 - DNA, 371 bp, Homo sapiens
  I.2101 (R07957)
  misc_feature (21)..(21): n is a, c, g, or t
  misc_feature (78)..(78): n is a, c, g, or t
  misc_feature (246)..(246): n is a, c, g, or t
  misc_feature (300)..(300): n is a, c, g, or t
  misc_feature (307)..(307): n is a, c, g, or t
  misc_feature (329)..(329): n is a, c, g, or t
  misc_feature (348)..(348): n is a, c, g, or t
  misc_feature (353)..(353): n is a, c, g, or t
  misc_feature (366)..(366): n is a, c, g, or t
tttttttttgtgctgcaacangtttcctcatttattttttctttctttttctttttttctttttttggagggagaggnccctgcaaggtcccttcccgggcagggagggatggaaatgccgtcacagtagtagggactggagcgtctacaaggatggaggggagctactcaggcctaacgttagctacaaggaaaaaggacgccttccgtgacagatccttgaggtgtctgtgtctgccccaagtngccggcagtggccttccctccgggcccaaggcttgcagccacctgctctaactnttgagtngggggggctggtgggggacctncaagggctcgggggacaangacancagcaagaagcanggggc

SEQ ID NO: 2102 - DNA, 116 bp, Homo sapiens
  I.2102 (R07956)
cccactatgcagtcaacagccagttcaccatgggcggccccgcattctccatggcgttcgccatgtccatcccgaccaacaccatgcactacgggagctaggggcccgcccgcgga

SEQ ID NO: 2103 - DNA, 378 bp, Homo sapiens
  I.2103 (R07444)
  misc_feature (177)..(177): n is a, c, g, or t
  misc_feature (259)..(259): n is a, c, g, or t
  misc_feature (288)..(288): n is a, c, g, or t
  misc_feature (304)..(304): n is a, c, g, or t
  misc_feature (322)..(322): n is a, c, g, or t
  misc_feature (335)..(335): n is a, c, g, or t
  misc_feature (342)..(342): n is a, c, g, or t
tttttatttttacaaagataatctttattgacagtcacaggccacaggggtgagccctgaggtttgggttctgggatgaaggagaacccctgccccctgccctgggctctgctggctgaggggacctccatggtgctcagactacaaccaggacctccctgggcagcccagggagtntgggtgccgcagagacaggccccttgcagagctgacctagagcccaccctccccatagcctgtgtgagcacaaagccagggncccacaggctgttccccgggctttgtcanttgattccagttggangtttggcaacttcccctntttaggcaacctnaggacantttaaagaagggcaacttctttccatttaaagaaga

SEQ ID NO: 2104 - DNA, 413 bp, Homo sapiens
  I.2104 (R07443)
  misc_feature (45)..(45): n is a, c, g, or t
  misc_feature (47)..(47): n is a, c, g, or t
  misc_feature (300)..(300): n is a, c, g, or t
  misc_feature (347)..(347): n is a, c, g, or t
  misc_feature (377)..(377): n is a, c, g, or t
  misc_feature (388)..(388): n is a, c, g, or t
agacacagagaagttgaaattgagggaatggattacaggcgtgcncncacacctggccggttgtttatatttaattgtctttttttcactaatgaggaccaccttgtaaattctgggcattttcagagttttctcttccatgtgaattgctccagctaacttaatattagtttctcaagggtttgtgtaggacctgggctttgtctctttccatctgtttctctctttccctttaacgtcacttgcctgagggtctataagggccctttaagggttgccagcccagagccaggaagaggntggggtgtccctggaagttaaggaaagccacctttggccctacaggnggggtgtttcacagtgttggggtgttgggnagttcacaggnttgactttttgggggggccccaggg

SEQ ID NO: 2105 - DNA, 345 bp, Homo sapiens
  I.2105 (R07300)
  misc_feature (190)..(190): n is a, c, g, or t
  misc_feature (321)..(321): n is a, c, g, or t
  misc_feature (328)..(328): n is a, c, g, or t
tttccttttcataaaaaaatatttattagtttgaacatcgatttaaaaaaaaatcagtcacataaaaaaaacccttcatgacatgtcttttccctccacgcctcctgagatggacgtgctcacctgggcctcggaaatcccacactcttcagtcggcaaactgcgaacaagaacaggaaatctgccacgngccaaacacttggggaggtcagtgggacactgttggttttagggaagaaaatgcccctgtagctccggcgggggaacccccaaaacgggtcagcaaaggcaggccacacggagtaggccggccagatgggngcagggncatcctgagtttgggag

SEQ ID NO: 2106 - DNA, 366 bp, Homo sapiens
  I.2106 (R07299)
  misc_feature (184)..(184): n is a, c, g, or t
  misc_feature (195)..(195): n is a, c, g, or t
  misc_feature (240)..(240): n is a, c, g, or t
  misc_feature (272)..(272): n is a, c, g, or t
  misc_feature (324)..(324): n is a, c, g, or t
atcgaggtagttacataaaattattttgtttggcattatttttctcactcgaagaaactatatagggttgtttttcctttagcttgtgctcaagtcctcttgctgtgttttcagaagcactcacatgttctttcttttcctgagtgaaaagcaaaggtcccacggtgtgtgctgtggtgcaccncctgggctttnggggtcccggaggcaggctgcctaggactcacagcctcgggaccnttgccacggcctgtcttctcgttcaggcctgnctctgacagcacttaccatggagggacattccatccttcaccccctcctctnggcacagggccaccactgcggtgctgtgcctttcagatgggg

SEQ ID NO: 2107 - DNA, 450 bp, Homo sapiens
  I.2107 (R07278)
  misc_feature (5)..(5): n is a, c, g, or t
  misc_feature (201)..(201): n is a, c, g, or t
  misc_feature (229)..(229): n is a, c, g, or t
  misc_feature (319)..(319): n is a, c, g, or t
  misc_feature (333)..(333): n is a, c, g, or t
  misc_feature (342)..(342): n is a, c, g, or t
  misc_feature (375)..(375): n is a, c, g, or t
  misc_feature (384)..(384): n is a, c, g, or t
  misc_feature (423)..(423): n is a, c, g, or t
  misc_feature (447)..(447): n is a, c, g, or t
ttttnactgaaatgaaatccaacaattttattgtaatgagctgtattttctaaatttctcttttattttcctgttttcatacagtaaagaaaacaaaacgcagcacattcacattttcccgaggaactgtaaagatgatctctacagggataaacgttgtaaagcctgaagctcaatcaactgatgttgggaaactctcanagggagtaaaggcttgatctcaatggtntaggaacatgtactgtaatttaatagaagagatgggtcgtcttaatatttaatgcatttaaaaggccttcccaggtccatgcggaggagntacaggtccaaggncttaaatcnaatttctggaacgggatttttatggcttacctntggggtatnctttgcgggtcctcgggggtttcggcgcccaatattctntctcaatagggccttcaatcgggnttc

SEQ ID NO: 2108 - DNA, 432 bp, Homo sapiens
  I.2108 (R07277)
  misc_feature (168)..(168): n is a, c, g, or t
  misc_feature (349)..(349): n is a, c, g, or t
  misc_feature (379)..(379): n is a, c, g, or t
  misc_feature (388)..(388): n is a, c, g, or t
  misc_feature (395)..(395): n is a, c, g, or t
  misc_feature (407)..(407): n is a, c, g, or t
  misc_feature (416)..(416): n is a, c, g, or t
  misc_feature (423)..(423): n is a, c, g, or t
aaagtgtttctgatgactctgaaaaaaacatgatatctaagttaaagactgaatgtggatgtcagttcacgtcaaaactggaaggaatgtttagggatatgagcatctcaaacacaacgatggatgaattcaggcaacatctacaggcaactggtgtatctttaggtngtgttgatcttacagtccgggtgctcacgacaggatattggcccactcagtcagccacaccaaagtgcaacatcccaccagcaccaagacatgcttttgaggatattcaggaaggttctactttaggcccaaacacagtgggtcgacagcttcacactcccggcttcatttggggttcttncaggtcttcaatggccaccttttttggggncccgttttnaaagggnggtgggttcttnagtttggtntttgggnggtgcccca

SEQ ID NO: 2109 - DNA, 387 bp, Homo sapiens
  I.2109 (R07223)
  misc_feature (328)..(328): n is a, c, g, or t
  misc_feature (336)..(336): n is a, c, g, or t
  misc_feature (371)..(371): n is a, c, g, or t
  misc_feature (376)..(376): n is a, c, g, or t
  misc_feature (385)..(385): n is a, c, g, or t
cagatctcatcatttgaagaacaggatgctcacgaattattccatgtcattacctcgtcattggaagatgagcgagaccgccagcctcgggtcacacatttgtttgatgtgcattccctggagcagcagtcagaaataactcccaaaacaaattacctgccgcacaagagggtcacctcaccccacatccaatcactgggaagtctcaacatccttttcatgggaaggactcactagttaatatgggtctggcaaacactgtggaacaccagagtcctgttcgatttggatacctttggataggccttttcactaaggtatttccagnccgccacnggggggttcaccctttggacctgggggtccattgnctttnaccattttnat

SEQ ID NO: 2110 - DNA, 394 bp, Homo sapiens
  I.2110 (R07171)
  misc_feature (6)..(6): n is a, c, g, or t
  misc_feature (9)..(9): n is a, c, g, or t
  misc_feature (331)..(331): n is a, c, g, or t
  misc_feature (356)..(356): n is a, c, g, or t
ttcagnttntctgagttcttttaattacctgtatcagatgagtaaaaagacactccggacataatgaatgctttcttaacacaacagaaccacctacacacatgaacaggactgttcagggagcctggtttggtgtgaactggggctggctcccagggtggagcctgctcttagaacacaccagaaggctggaaggctctagtggggccgcttgcacacgcaacagtacagttttacttttttcctgggggcagtgcagacagtgccatcagctcttagcctttgcagggaggggcacagtcattctttcagactttgcactcctgggggntcttgggtgcttgcatcctgggggnaagggaccgcgcttcgttgggaccagcagggtaggggc

SEQ ID NO: 2111 - DNA, 346 bp, Homo sapiens
  I.2111 (R07096)
  misc_feature (179)..(179): n is a, c, g, or t
  misc_feature (299)..(299): n is a, c, g, or t
  misc_feature (316)..(316): n is a, c, g, or t
aggatggccttctgtgccctggtgcacaacttcttccctgaggccttcgactatgggcagcttagccctcagaaccgacgccagaacttcgaggtggccttctcatctgcggagacccatgcggactgcccgcagctcctggatacagaggacatggtgcggcttcgagagcctgactngaagtgcgtgtacacgtacatccagggaattctaccgctgtctggtccagaaggggctggtaaaaaccaaaaagtcctaacccctgctcggggccccacggatgctggtgggactgtgtncccctgggttggaggtnggacgacatgattgattcatggggcaagaa

SEQ ID NO: 2112 - DNA, 461 bp, Homo sapiens
  I.2112 (R07050)
  misc_feature (368)..(368): n is a, c, g, or t
  misc_feature (390)..(390): n is a, c, g, or t
  misc_feature (418)..(418): n is a, c, g, or t
  misc_feature (426)..(426): n is a, c, g, or t
  misc_feature (431)..(431): n is a, c, g, or t
aaccctatgagtattccagactacagagtttgcccaaatcaactgtaaatgacacttgtgtaacgtatatatagtgtttcatgaggtgtatataaaatagcaaattatgacagaacagtgatcacatatatttggatttatatgatatacagttacagtttactctgcagaggtaccttacctgggtattctttgaattttttttttttttgggaggaggaagagagcaacaaatttgattatatttttaagtgtcttaggatcctgaggaaagatttattgtgccattatttgaaccctgtcaatatctttttgaggtaattgttttgtttcttaccccttaaatagtcttgtggaggctgtagggncatggataggataacctgggcnttttactcccttaccgttttggaaaggntaggttcnttagncttctttcggcggcccttttcatcggcggc

SEQ ID NO: 2113 - DNA, 146 bp, Homo sapiens
  I.2113 (R07042)
  misc_feature (83)..(83): n is a, c, g, or t
  misc_feature (90)..(90): n is a, c, g, or t
  misc_feature (104)..(104): n is a, c, g, or t
tcaaaacgctgcgtgtgtatgtgggggggagggtgtcgcaacagacagggcagcggtgggcggacgacaggcaggagacggtncccgganagtgggggcggcanttgccactggctggccatgcgggcgggcaggctagacattct

SEQ ID NO: 2114 - DNA, 313 bp, Homo sapiens
  I.2114 (R07014)
  misc_feature (117)..(117): n is a, c, g, or t
  misc_feature (118)..(118): n is a, c, g, or t
  misc_feature (183)..(183): n is a, c, g, or t
  misc_feature (189)..(189): n is a, c, g, or t
  misc_feature (194)..(194): n is a, c, g, or t
  misc_feature (200)..(200): n is a, c, g, or t
  misc_feature (204)..(204): n is a, c, g, or t
  misc_feature (236)..(236): n is a, c, g, or t
  misc_feature (279)..(279): n is a, c, g, or t
  misc_feature (284)..(284): n is a, c, g, or t
aactcaaggccaaaaaaaatttcttaatatagttattatgcgaggggaggggaagcaaaggagcacaggtagtccacagaataggacacaagaaacctcaagctgtgaggtcaattnntaattaaaagaatactaagattagatgaacacaacactcagaaatactctaggagagctgaaaangaaggnacagntgttancaanacaattaaggctgctgggggaacctgagtccntgttaagcttggggttgactgtaaaggaatttttttttttttnatgcnagtttggacatgggggtttggggggtccg

SEQ ID NO: 2115 - DNA, 347 bp, Homo sapiens
  I.2115 (R06716)
  misc_feature (34)..(34): n is a, c, g, or t
  misc_feature (62)..(62): n is a, c, g, or t
  misc_feature (73)..(73): n is a, c, g, or t
  misc_feature (77)..(77): n is a, c, g, or t
  misc_feature (81)..(81): n is a, c, g, or t
  misc_feature (212)..(212): n is a, c, g, or t
  misc_feature (214)..(214): n is a, c, g, or t
  misc_feature (248)..(248): n is a, c, g, or t
  misc_feature (317)..(317): n is a, c, g, or t
  misc_feature (334)..(334): n is a, c, g, or t
ttttttgttgacacaaaatctttttattccccantttgccatcttttccacaaacctctcanggtacaaatcnggangaangtgcatataaaccctgccttatttaaccaggcccaccgcctccgggacagcccctggggaggccccatcccgctaagtatgaagggaaggccacaccaaagtgctgagtgagccacccagacagcaggtgntntgggagggaggggcaacaaggggtaggggaaggnttcctggaggagggagaggctggccctgagagacagggggcggtcctgaaaaggagagagaaggcacanttttccgggaaccaggncccagcaccttag

SEQ ID NO: 2116 - DNA, 445 bp, Homo sapiens
  I.2116 (R06715)
  misc_feature (357)..(357): n is a, c, g, or t
  misc_feature (373)..(373): n is a, c, g, or t
  misc_feature (390)..(390): n is a, c, g, or t
  misc_feature (413)..(413): n is a, c, g, or t
cacgggaacccctccggagtggacaatgctgtcagcacctggggaggagccctccgataccatcaagggaagatttcatccttaaagaggtcgccagctctccagatcctgctgaccaacaccaaagtccctcgcaataccagggcccttgtggctgggcgtcagaaacaggctgctcaagttcccagagatcgtgggcccccctcctgaccttcaatagatgccatctccctgggagtgtgagcgcgtgctggggagagatgggggaagccccagccccggagcagttacctcgttgttgggaaggagctcatttgacattgaaccaggcaccatcttgaattgcccttggggttnggggccacgtttcttnttgggaaccagtttttnccagggtgaaccagggggccccncggatttttaacaggcaagttgatttgggcgc

SEQ ID NO: 2117 - DNA, 364 bp, Homo sapiens
  I.2117 (R06629)
gagggagacttggaaggtgagccctctgggacatggggccgctggtgaccgactcggttttgtccttagaggtatcaacatccgtgtcagcactggtggtcatctggctcaggcctttgctgaggatttcctctgccgtctgctcctcctccctcccgttgaccaccaccccttccggctgggttgtttcgggctctgtggtgggcggctttgcttgtttctgtcttcttagtaccttcctctaaagacttgggaaggagagactaaagggctctttgtctctgcctccttcgctggggctctgcactgggagaagcaggtgcagactttgcaggtgagccagggttttctgggggcagtttct

SEQ ID NO: 2118 - DNA, 200 bp, Homo sapiens
  I.2118 (R06576)
  misc_feature (9)..(9): n is a, c, g, or t
  misc_feature (12)..(12): n is a, c, g, or t
  misc_feature (53)..(53): n is a, c, g, or t
  misc_feature (69)..(69): n is a, c, g, or t
  misc_feature (163)..(163): n is a, c, g, or t
gagcatggnaanccccgacccaagccacgtggatgaaggctgacgaggtgganaatccagcagtggatncgattcacatcgaaaacccaaaccaatttgtgcctctctatactgacccccaggaagtactggagatgaggaacaagattcgagaacaaaaccnacaagatgtgaagtcagcggggctcagtcccaactcc

SEQ ID NO: 2119 - DNA, 304 bp, Homo sapiens
  I.2119 (R06565)
  misc_feature (53)..(53): n is a, c, g, or t
  misc_feature (212)..(212): n is a, c, g, or t
  misc_feature (263)..(263): n is a, c, g, or t
tttgtaagaaaacttgtttttatttttaaatactttggaaagctctttcagancaatataaatgagtgcctgggaggaggaggttttgtgccagagccttgccccctcactcactcttgggggtcctgatgaactcttggaccctgtggaagataagagttagagacctcggcctcctgggtcagtggagcccttggcctcatgcctgggtnggcttaagcgggcccagctggggtttgaggtagggggaggccttggctttngccccagcagctccaggggcccttagtttccttcccagagc

SEQ ID NO: 2120 - DNA, 332 bp, Homo sapiens
  I.2120 (R06564)
  misc_feature (27)..(27): n is a, c, g, or t
  misc_feature (64)..(64): n is a, c, g, or t
  misc_feature (276)..(276): n is a, c, g, or t
  misc_feature (281)..(281): n is a, c, g, or t
  misc_feature (297)..(297): n is a, c, g, or t
  misc_feature (305)..(305): n is a, c, g, or t
  misc_feature (318)..(318): n is a, c, g, or t
  misc_feature (326)..(326): n is a, c, g, or t
aactggaagagaagggagaagtgaggnaggggagggaccagatccaggcagagcggcccagcgngtggtcagtccagcccgctccataaaccctgttctccgtgggccagatctacaacctgggcacgggcacaggctattcagtgctgcagatggtccaggctatggagaaggcctctgggaagaaggtaggcccccccgccccacccaccttcacccaccttcaccccacccagcttcttcagcaacagagcagcttttggccctttcccattnacctnttttggagggtacctnggcacttnccagtttttcttnagcctttncttagc

SEQ ID NO: 2121 - DNA, 371 bp, Homo sapiens
  I.2121 (R06211)
  misc_feature (75)..(75): n is a, c, g, or t
  misc_feature (89)..(89): n is a, c, g, or t
  misc_feature (208)..(208): n is a, c, g, or t
  misc_feature (279)..(279): n is a, c, g, or t
  misc_feature (320)..(320): n is a, c, g, or t
  misc_feature (349)..(349): n is a, c, g, or t
gaaaaattagccaggtgtggtggtgtatgcctgtagtcccagatactctggtggctgaggtgagaggatagcttnagcccaggaaattnaggctgcagtgaactatgattgcactactgtctccagcttgggcaacagagtgagatcttgtctccaaaagtccttgaaggattttaggaagttgttaaaagtcttgaaacgatgtttnggggcatgttagggttcttgaatgtttaattcctctaataactgcttattcaagagaagcatttctgactnggtgcagggcagtggctcatgcccataatcccagtactttngggaggctgaggcaggagcattgctttgngcccagggactttcaagaccca

SEQ ID NO: 2122 - DNA, 192 bp, Homo sapiens
  I.2122 (R06107)
gggcgtctccctatgttacccaggctggtcttgaagtcctgggctcaagcaatgctcctgcctcagcctcccaaagtactgggattatgggcatgagcactgccctgcacccagtcagaaatgcttctcttgaataagcagttattagaggaattaaacattcaagaaccctaacatgcccccaaacatcgt

SEQ ID NO: 2123 - DNA, 406 bp, Homo sapiens
  I.2123 (R05889)
  misc_feature (128)..(128): n is a, c, g, or t
  misc_feature (169)..(169): n is a, c, g, or t
  misc_feature (282)..(282): n is a, c, g, or t
  misc_feature (309)..(309): n is a, c, g, or t
  misc_feature (321)..(321): n is a, c, g, or t
  misc_feature (338)..(338): n is a, c, g, or t
  misc_feature (351)..(351): n is a, c, g, or t
  misc_feature (361)..(361): n is a, c, g, or t
  misc_feature (394)..(394): n is a, c, g, or t
  misc_feature (399)..(399): n is a, c, g, or t
aagtgcttgaggaagaagctgcttctgtttcctctgcagatacagggctctgctctgaagcctgcctcttccgcctagcccgctgcccttcccccaagttgctacgtgcccggtcagccgagaaacgngccctgtgcccaccttccaaaaagttcccctgccctcgggncctgcacctgcccactccctgggggacctaaagggcagctggccagggtcggggcctgggtcactcgtttcctccagatatccagggaaagccccagaccccagtgggaactnggagctcatgggacattaaggcaggtnccccggagcttnttgggggccggcttggncaaggagagcttncacttttggnagtttgggagattttgaagttttaagttttttncttgngggcttt

SEQ ID NO: 2124 - DNA, 402 bp, Homo sapiens
  I.2124 (R05804)
  misc_feature (293)..(293): n is a, c, g, or t
  misc_feature (314)..(314): n is a, c, g, or t
  misc_feature (388)..(388): n is a, c, g, or t
  misc_feature (398)..(398): n is a, c, g, or t
tgatcaagaaaacaaggggaaaactgaaatttattgaaggcttacatactgttaagagctttacaaacattctaccttcacagtctttaatggagcaggcaattggggttacatagcttgcccaaggtcatgcagctagaggtggcagagctgagaggccacctagattttttggactcttcgtgcctgccttaccaccccattgcataggcacacgtcaccctgtacttaaacacctggggccatgcctttgccctgaccatagtgcccttgcaaatcagaaagagccactntcattctgagggggacaagantttgttttcctcctccagtgctataaggaggggcatttcccccacagtcttaaatacccattgcagcacagggncagaagcttnttcc

SEQ ID NO: 2125 - DNA, 190 bp, Homo sapiens
  I.2125 (R05707)
  misc_feature (164)..(164): n is a, c, g, or t
  misc_feature (175)..(175): n is a, c, g, or t
  misc_feature (183)..(183): n is a, c, g, or t
atatatataaaatctttattacaggcagtattggtccatacactaacacaataccaacagtacaggtttaatctttcaaaatcatcatttaaacagcaaaagaccaagaaataaaatttgagtcaattatttttcaaaatattctcaatgcacattatccttanttcccttattntagtggancatacaa

SEQ ID NO: 2126 - DNA, 305 bp, Homo sapiens
  I.2126 (R05706)
  misc_feature (103)..(103): n is a, c, g, or t
  misc_feature (237)..(237): n is a, c, g, or t
  misc_feature (262)..(262): n is a, c, g, or t
agaaaacaaattcacatgccaacagattatgctgaagttacagtggactttcactgctggatgtgtgggaaaaactgcaacagtgagaagcagtggcagggcnattctcctccgagaagcacaaagagaaggttttccacaccgaggacgaccagtactgctggcagcaccgcttcccaacaggctatttcagtatttgtgataggtatatgaatgggcacctgcccaggaaggggnacagctgtaaattttgcacatgggnaatgcccgaactttcatggaatggggggaggaaaggaaggggt

SEQ ID NO: 2127 - DNA, 347 bp, Homo sapiens
  I.2127 (R05547)
gttcagaactggaggtcaggttcctgacacaaactacatatttatgggtgattttgtagacagaggttactatagtttggagaccttcacttaccttcttgcattaaaggctaaatggcctgatcgtattacacttttgcgaggaaatcatgagagtagacagataacacaggtctatggattttatgatgagtgccaaaccaaatatggaaatgctaatgcctggagatactgtaccaaagtttttgacatgctcacagtagcagctttaatagatgagcagattttgtgtgtccatggtggtttatctcctgatatcaaaacactgggatccaaattcgaaccat

SEQ ID NO: 2128 - DNA, 180 bp, Homo sapiens
  I.2128 (R05444)
  misc_feature (20)..(20): n is a, c, g, or t
  misc_feature (86)..(86): n is a, c, g, or t
  misc_feature (95)..(95): n is a, c, g, or t
  misc_feature (165)..(165): n is a, c, g, or t
attttatatccatttaaaanagtcatccaacaaaggacaatgaagtttacatctgggacaggtatacataacttgaggcatttggngtccatcgngcccactgaataacaactttgctgctgaaatttcttaaaacttaccaaactaaaacaaaaggctgaatgntacaaaaggaggagt

SEQ ID NO: 2129 - DNA, 410 bp, Homo sapiens
  I.2129 (R02205)
  misc_feature (1)..(1): n is a, c, g, or t
  misc_feature (160)..(160): n is a, c, g, or t
  misc_feature (388)..(388): n is a, c, g, or t
  misc_feature (395)..(395): n is a, c, g, or t
ntggaattaagaatttctctgctattattaacccacctcaagcatgtattttggcaattggtgcttcagaggataaactggtccctgcagataatgaaaaagggtttgatgtggctagcatgatgtctgttacactcagttgtgatcaccgggtggtggnatggagcagttggagcccagtggcttgctgagtttagaaagtaccttgaaaaacctatcactatgttgttgtaactaactcaagaatttctaaactctcccagggtcacactgattcattcttaacaagatatttatatgttattaaacaggtggttctttttattttaaccagttatttttattattgagtctgtccagataagttatttataatggggcttactgnatttttnaaatgccgttacacc

SEQ ID NO: 2130 - DNA, 375 bp, Homo sapiens
  I.2130 (R02176)
  misc_feature (152)..(152): n is a, c, g, or t
  misc_feature (276)..(276): n is a, c, g, or t
  misc_feature (289)..(289): n is a, c, g, or t
  misc_feature (322)..(322): n is a, c, g, or t
ttttagtttataatgttttactatgatttagggcttttttttcaaagaacaaaaattataagcataaaaactcaggtatcagaaagactcaaaaggctgtttttcactttgttcagattttgtttccaggcattaagtgtgtcatacagttnttgccactgctgttttccaaatgtccgatgtgtgctatgactgacaactacttttctctgggtctgatcaattttgcagtagaccattttagttcttacggcgtcaataacaaatgcttcaacnatcatcagctccnaatctgaagttcttgctgcattgtgtcaaaagnaattccccttattttctactgcccattccccataaaagtaaggaggcctcatt

SEQ ID NO: 2131 - DNA, 266 bp, Homo sapiens
  I.2131 (R02093)
  misc_feature (198)..(198): n is a, c, g, or t
  misc_feature (237)..(237): n is a, c, g, or t
  misc_feature (253)..(253): n is a, c, g, or t
gctggtttatatttagattatctcaagtaggggggaataaccatgtgtaggaattcatagaaaaataaacaatcagctgaagaggtctaagaaaatgctgacttttaaaatttcacttattttccttgaagttttctacccttcccatcgatgataaaccaagatcatgtaatggaaaatttcaaaccaggggctaanttctaaagtaaagcttcaattcaagcccttcccccaagngaattaattttcctgntttctctttctct

SEQ ID NO: 2132 - DNA, 404 bp, Homo sapiens
  I.2132 (R00935)
  misc_feature (270)..(270): n is a, c, g, or t
  misc_feature (349)..(349): n is a, c, g, or t
  misc_feature (381)..(381): n is a, c, g, or t
  misc_feature (396)..(396): n is a, c, g, or t
cgtggtcttgcgagtggagtgtccgctgtgcccgggcctgcaccatgagcgtcccggccttcatcgacatcagtgaagaagatcaggctgctgagcttcgtgcttatctgaaatctaaaggagctgagatttcagaagagaactcggaaggtggacttcatgttgatttagctcaaattattgaagcctgtgatgtgtgtctgaaggaggatgataaagatgttgaaagtgtgatgaacagtgtgggtatccctactcttgatcctgggnaccagacaagcaaggaagcttttgattgaaagcctatgttgaaaagctgggtcaaattttcgcgaaggttgaacgcccnttttctgagacttgcagttttttaagcaaccnttttcccccgggatnggataagg

SEQ ID NO: 2133 - DNA, 199 bp, Homo sapiens
  I.2133 (R00759)
ttgaagtaattatttaatgacacaggaaaataacatgttatgaaacaagctggttacaagtagtaggtagatgacttaatttttgataaaaaaattaaaaagcataaacatgcatataaaaattagattatgtacaaaataccaacagtatttacttctgctcagtaattaaatattcttccctttgtttttgtctttt

SEQ ID NO: 2134 - DNA, 362 bp, Homo sapiens
  I.2134 (R00758)
  misc_feature (272)..(272): n is a, c, g, or t
  misc_feature (305)..(305): n is a, c, g, or t
  misc_feature (321)..(321): n is a, c, g, or t
  misc_feature (339)..(339): n is a, c, g, or t
  misc_feature (344)..(344): n is a, c, g, or t
  misc_feature (359)..(359): n is a, c, g, or t
ccccttgatttaacaggatttttgtagactttagaatttggacttacctaacaagagtataaattgacttgggttgcaagcactgagcactgttacttctatcacgtctcttttttatttctgggatataaaacaggctttaagtttcttggttgcccaagggcaggagcaaggaatatctggtgtttcttgtgatgataatattttaattttaaatatccctccctcatacaagtgtatgttaccattttaatataattctttttgtaccnttccttcttgttttgtgaaggtttttgtgggcntgggattgctgtgctncactggctggtaaagggngaccnaggtgtactggggcngcc

SEQ ID NO: 2135 - DNA, 362 bp, Homo sapiens
  I.2135 (R00742)
  misc_feature (276)..(276): n is a, c, g, or t
  misc_feature (318)..(318): n is a, c, g, or t
  misc_feature (357)..(357): n is a, c, g, or t
agggctcggcgtggcagggatgatggcaggctcagcttgggtgcaggtgtggaagcaaccactgggggccggggcaggacctccagatttggcaccgggaactgcacatccatggcagggctgggctttgctgcctcctttgctgtggctgcgtcgtcctctgggggtgcagggaagggctcacttctccggggtggcgtccgactgatgctgttcttgggctggaagatctcgttgtagtcctcggcgttctggatctccgcgcgggactccgtncggtccccgggtcatcctcgctgctgggggctgcggcgcttngctctctgagttcttgcttcaacctctgaggcttacttncaagg

SEQ ID NO: 2136 - DNA, 364 bp, Homo sapiens
  I.2136 (R00741)
  misc_feature (125)..(125): n is a, c, g, or t
  misc_feature (253)..(253): n is a, c, g, or t
  misc_feature (290)..(290): n is a, c, g, or t
  misc_feature (331)..(331): n is a, c, g, or t
  misc_feature (341)..(341): n is a, c, g, or t
  misc_feature (354)..(354): n is a, c, g, or t
ggcttcaggtgccagccagctgaaggatggcacccctgtggtcaccaagacagcctggaagttgcaagagatcgtcgcgcatccagcaacgtgtcctcactggtgctgggcaaagctccgggcgnctgctggctacaggcggggatgactgccgcgtcaacctgtggtccatcaacaagcccaactgcattcatgagcctgacgggccacacatccccagtgggagagcgtccgccttcaacacccccgaggnagttcatcgtgggccggctcttcagttcgggcttccntccgtgttttggggacttgggaagtttgccaaatttttttnggaacatttnttgggggacacanaggccaactt

SEQ ID NO: 2137 - DNA, 368 bp, Homo sapiens
  I.2137 (R00206)
  misc_feature (256)..(256): n is a, c, g, or t
catttctttataaaacagtcatctcactagcagctctctcccctagagtaggggaagggggtggaggaggttgggcacctccaaaggagaaaaaggatagcagggaagggcccaaggttacctcctgaggttcttctgggcctgtttcaacaatgtgtcaaagtcaagagaatcaaatttgctctttacaggtgctggggtcaaagtcttccccggttgggagtcaagatccaggaatagctccctcttgcagganctgcccttcgggcccccaaagcagaggatccaaaggggctgctcatctgccctgcccgcagcttgtggggccactctcaatgggccttgcaaatgcctccctcaggcatagg

SEQ ID NO: 2138 - DNA, 329 bp, Homo sapiens
  I.2138 (R00205)
  misc_feature (169)..(169): n is a, c, g, or t
  misc_feature (256)..(256): n is a, c, g, or t
  misc_feature (313)..(313): n is a, c, g, or t
agaatgtcaagcgccatcaggacatcaccatcaaacctgtcttgtccttgggcccagctgcccctccgcccccatgcatagctgcctcccgggagccgcttgatcacaggactagcagtgagcaggcagatccctcagcaccctgccttgccccatccagcttgctgtncccctgagggcctcaccctgccggaatgacatggaacactagggactccccctggaaccctcaggccaaggcaggcggttcaatggngttgtttacccgaaaaggcttgcagggtcaggccaggccctttaaggcaggggttgngaaggggccgccggag

SEQ ID NO: 2139 - DNA, 333 bp, Homo sapiens
  I.2139 (T99142)
  misc_feature (55)..(55): n is a, c, g, or t
  misc_feature (57)..(57): n is a, c, g, or t
  misc_feature (306)..(306): n is a, c, g, or t
  misc_feature (316)..(316): n is a, c, g, or t
  misc_feature (321)..(321): n is a, c, g, or t
gaaggtcagccaggtttgccagaaccaccgagccccgcctcccgccccccaggtntnctgcaggcttcagcattccacttcaccatccactcggatctctcctgaactcccacgacgctatcccttttagttgaactaacataggtgaacgtgttcaaagccaagcaaaatgcacaccctttttctgtgggcaaatcgtctctgtgacatgtgtgtacatattaggaaaggggaaggatgttaaggatatgtgggcctgtggggtttacacaggggttgcctggcaggcgggtaatattatttttnagggaaatantattntccaaattaact

SEQ ID NO: 2140 - DNA, 372 bp, Homo sapiens
  I.2140 (T98839)
  misc_feature (220)..(220): n is a, c, g, or t
gattcaaaagaatggagatggagaagaaggggaggggagggaggggagagataaacagagagagacagagaattatatagcagtatgcaaaaaaccagtttaaaacctgtgaagcaaagagaaatgggtgtatgagctagacaggcatgaggagtgacagagtttcctcttcaaggagacggtatcccttctgttgacatacacaggtgatccagaactnccgtgagtgtccttcccgacgagatttccctctggggtgaattttgtgcggggtggccctcaaagctcctctctaccacccgtgaggaccctccccaaagactttttattctttttaaagtcttgggaaaagccctgcttttcctcctttta

SEQ ID NO: 2141 - DNA, 431 bp, Homo sapiens
  I.2141 (T98779)
  misc_feature (10)..(10): n is a, c, g, or t
  misc_feature (26)..(26): n is a, c, g, or t
  misc_feature (41)..(41): n is a, c, g, or t
  misc_feature (43)..(43): n is a, c, g, or t
  misc_feature (270)..(270): n is a, c, g, or t
  misc_feature (282)..(282): n is a, c, g, or t
  misc_feature (377)..(377): n is a, c, g, or t
  misc_feature (389)..(389): n is a, c, g, or t
  misc_feature (397)..(397): n is a, c, g, or t
  misc_feature (410)..(410): n is a, c, g, or t
  misc_feature (417)..(417): n is a, c, g, or t
cggagtcccntcgttgttgcccaggntggagtgcaatggcngntctttggctcaccacaacctccgcctcccgggttcaagagattctcgtctcaaacttccgagtagctgggattacaggcatgcaccaccacacccggctaattttgtatttttagtggagacagggtttctccatgttggtcaggctggtcttgaactcccgacctcaggtgatccgcctgcctcggcctcccaaagtgctggggattacaggcgtgcgacccacgncccagccacctnttaaatttcttaatcacggattgttttcagctcaggacatacacaagggcaagtaggaattactaataaaatcacttttaccctcaaccattcanggtctctaaggngcatgcanaggggttacatgncgggggnaagggaaggcactt

SEQ ID NO: 2142 - DNA, 388 bp, Homo sapiens
  I.2142 (T98778)
  misc_feature (2)..(2): n is a, c, g, or t
  misc_feature (10)..(10): n is a, c, g, or t
  misc_feature (293)..(293): n is a, c, g, or t
  misc_feature (338)..(338): n is a, c, g, or t
  misc_feature (377)..(377): n is a, c, g, or t
  misc_feature (385)..(385): n is a, c, g, or t
tntcggcacngagcttttcagacagcagtaaatgtctgaaaaaatatcaaaaacagcataaagacaagattatgtagctctaattatacgtatataattataaaaaacaatgtgcaagggttatattttaaggtcttttaaaatctgattttgatcataccaaatgacataatattttttatgggtagccttttactttcaagacttaattttcaggacttgtacaagttccttcttacattctttccctctcacaccatcctactgggaggaaaggcatacttttatggctnaggatcttactttaaggctttttatgtggaccaaaggatgttcanatgggtagggtattacttccgtaggtccctccaattgtnactattanctt

SEQ ID NO: 2143 - DNA, 341 bp, Homo sapiens
  I.2143 (T97096)
  misc_feature (34)..(34): n is a, c, g, or t
  misc_feature (95)..(95): n is a, c, g, or t
  misc_feature (171)..(171): n is a, c, g, or t
  misc_feature (176)..(176): n is a, c, g, or t
  misc_feature (297)..(297): n is a, c, g, or t
cgatttcctgcggtggtgacgtcccaccgccagnctttgcctgcctgctcgctccctgcagaggggctgagcaggacgccgctggtgctggccgnccccagccccctcctggtgccacctcagaccccggggtgagggggggctccctgggggaggcagccagccaagtantgggnccatcaacacagagagggcctaaccgagatcagtatttaactaattataccagtttttattaaacccctttccctccccgataaagaatgttctatttctgcctccccttaaaggggagancctcagaagtaaaggaatttgatgttgtgtttttgttaaaaaaa

SEQ ID NO: 2144 - DNA, 410 bp, Homo sapiens
  I.2144 (T96983)
  misc_feature (305)..(305): n is a, c, g, or t
  misc_feature (306)..(306): n is a, c, g, or t
  misc_feature (326)..(326): n is a, c, g, or t
  misc_feature (327)..(327): n is a, c, g, or t
  misc_feature (374)..(374): n is a, c, g, or t
  misc_feature (385)..(385): n is a, c, g, or t
aaacacaacatcaaattcctttacttctgaggtctcccctttaagggagggcagaaatagaacattctttatcggggagggaaaggggtttaataaaaactggtataattagttaaatactgatctcggttaggccctctctgtgttcatgggcccagtcttggctggctgcctccccccaggaagccccccctcaccccggggtctgaggtggcaccaggagggggctgggggcggccacaccagcggcgtcctgctcagcccctctgcagggagcgagcaggcaggcaagccgcttgggggtnngggacgtcaccaccccaggnnaatcgccctcgtgcccgaatttctttggccttcgagggccaaaattncctattagttnagtcgtatttaaatttcgtaatcat

SEQ ID NO: 2145 - DNA, 418 bp, Homo sapiens
  I.2145 (T96750)
  misc_feature (20)..(20): n is a, c, g, or t
  misc_feature (23)..(23): n is a, c, g, or t
  misc_feature (361)..(361): n is a, c, g, or t
  misc_feature (381)..(381): n is a, c, g, or t
  misc_feature (394)..(394): n is a, c, g, or t
  misc_feature (401)..(401): n is a, c, g, or t
gcagagacaggcaagcctgnagncttgaaacacgtctttggggcatacagcatggatgtgatcactagcacatcatttggagtgagcatcgactctctcaacaatccacaagacccctttgtggaaaacaccaagaagcttttaagatttaatccattagatccattcgttctctcaataaaagtctttccattccttaccccaattcttgaagcattaaatatcactgtgtttccaagaaaagttataagttttctaacaaaatctgtaaaacagataaaagaaggtcgcctcaaagagacacaaaagcaccgagtgggatttccttcagctggatggttggactctccggatttcaaanggactctggggacccacttnggctctgtctggntctgggnggttctgggcccattca

SEQ ID NO: 2146 - DNA, 351 bp, Homo sapiens
  I.2146 (T96637)
  misc_feature (38)..(38): n is a, c, g, or t
  misc_feature (99)..(99): n is a, c, g, or t
  misc_feature (115)..(115): n is a, c, g, or t
  misc_feature (136)..(136): n is a, c, g, or t
  misc_feature (144)..(144): n is a, c, g, or t
  misc_feature (153)..(153): n is a, c, g, or t
  misc_feature (178)..(178): n is a, c, g, or t
  misc_feature (209)..(209): n is a, c, g, or t
  misc_feature (295)..(295): n is a, c, g, or t
  misc_feature (313)..(313): n is a, c, g, or t
  misc_feature (337)..(337): n is a, c, g, or t
  misc_feature (348)..(348): n is a, c, g, or t
tataaagcttactatagaatactacagatataacacangatataaatgtcactgttagagccatcaaaataattcctatttttattaatgattgtggtngaaattattgagaaangttaattatgttatcagagcncaggaggngttaatggngctaactgggggtggtggagatagncctatgagaagcagagaagccaaatctactnccccagcactgatttggtcatctcctctatattaccaagtataacactctatacagaccatgagagagcacaatgcacgtacagantccccgattatttatgcngcacattgggatgaagcccgtctncatttcagggntct

SEQ ID NO: 2147 - DNA, 315 bp, Homo sapiens
  I.2147 (T95707)
  misc_feature (312)..(312): n is a, c, g, or t
tgataccctatgttctggggattagcagtgaggaatgatgaggaacttgaggcaagtcaccagcccctgatcatttcgcctaaaagagcaaggactagagttcctgacctccaggccagtccctgatccctgacctaatgttatcgcggaatgatgtaaagaggctggagaggagctgggcccagggctcctcagagcagggaactccactatgcatctcttgcagaggcttgccagtgcccagcagttgaggggaccttgaccttcaggggcagagacaagagagggcaccaagggagggttcccaagagnttg

SEQ ID NO: 2148 - DNA, 427 bp, Homo sapiens
  I.2148 (T95606)
  misc_feature (182)..(182): n is a, c, g, or t
  misc_feature (208)..(208): n is a, c, g, or t
gccatgtgtttttttaattttaatttttaaaaaatttaaaaaattccctattcaaaggtcaaaaagccacataagttttgatgatgatcattttgaacggaggctcgagatggactgagaggactgagacacagaagtggggggaccatggtttttactggctggaccacagggggaccctntccacccgcctgggttgaggaaggtntctggggtgctcaggtgggtttgttctcagcaatgcaggcatagtcagctcttggatcctccttggtgcctctcttgtctctgcccctgaggtcaggtccctcactgctgggcactggcagcctctgcagagatgcatagtgggagttccctgctctgaggagccctggggccccagctcctctccagcctctttacatcattccgcgataacattagg

SEQ ID NO: 2149 - DNA, 452 bp, Homo sapiens
  I.2149 (T95411)
  misc_feature (109)..(109): n is a, c, g, or t
  misc_feature (168)..(168): n is a, c, g, or t
  misc_feature (230)..(230): n is a, c, g, or t
  misc_feature (446)..(446): n is a, c, g, or t
  misc_feature (451)..(451): n is a, c, g, or t
ccatcagcagtgacacggacgaggaggaggaacagaaacacgcccccaccagcactgtctccaagcaaagaaaaaacgtcatcagctgtgtcacagtccacgactcccnctactccgactcctccagcaacaccagcccctactccgtgcagcagcgtgctgggcaanacaatgccaatgcctttgacaccaaggggagcctggagaatcactgcacggggaacccccgnaccatcatcgtgccacccctgaaaacccaggccagcgaagtattggtgggagtgtgatagcctgggtgccaggtaatttggggccagggacagggcaggaacctcttccctgggagagtggtttttcctgctttttcttgttgcttaggaaatgtttgctgttatggggagctagttacattaggaaagttgcccagttgacttgcagggcgaccntttant

SEQ ID NO: 2150 - DNA, 423 bp, Homo sapiens
  I.2150 (T95327)
  misc_feature (373)..(373): n is a, c, g, or t
gtttattcagaaggttacgttctcagcctttattccagggcccaattttcaagacaagccttcgcgggacaggaggagtcctctgaagatagcagtgcatgagcagagaaacacacatggcttggtctcgccgcccagcagctgattccgaggaggggctgagaggggccaatttcacccttccctagcaagactcggaggaggttcttcctacacaagaagcccatctgaccaccagggcttcctggcagagagtggtgctagatgtcagccaggaactccccagaccaggtattcttccaggctcaggcataaagaaccaggaggcttttattttctattaatcaacctagttgggaagcagagcccattntaaaggcagagaggtattgattacaggcttaaagaaggaaaacgctgctt

SEQ ID NO: 2151 - DNA, 417 bp, Homo sapiens
  I.2151 (T95258)
  misc_feature (4)..(4): n is a, c, g, or t
  misc_feature (7)..(7): n is a, c, g, or t
  misc_feature (276)..(276): n is a, c, g, or t
  misc_feature (363)..(363): n is a, c, g, or t
  misc_feature (414)..(414): n is a, c, g, or t
taanttnaggttggttcctgcatttccactctttgaccataggaacgcctggctacaaaaggggctgtaattggctgctgctataggggccccaggtccttcctccaattgcaaggcagcaactccgaagttctaagtcccatggaaagtggcagtggttgggctggactgtggctggaggatcaccgggcctcggttctcaagcaccatctgtctggctgcagctgggcccttcagctgggggccagtgttgctttccagctgcccccaccggtncagatcatctctggcaaggaagagctgctggcatctcttactgtccttctcgcaggccttcctccaccttgggtgccctcctgacgnctgccccggaagtcttcatctgaaaagggagagggaagctgcctcatcctntac

SEQ ID NO: 2152 - DNA, 410 bp, Homo sapiens
  I.2152 (T95257)
  misc_feature (265)..(265): n is a, c, g, or t
  misc_feature (277)..(277): n is a, c, g, or t
  misc_feature (372)..(372): n is a, c, g, or t
  misc_feature (406)..(406): n is a, c, g, or t
gactggaagggcctcagaggtcatctagatagtccagcttttccatcccattttatagatgaggaaatttgaggcccaaagacgaggggagaacttgtccaaggtctcagagctcagtggtggaccctggccagcacctgagtgtcctgctgcctctctccctggacccatgcatcgtctacctggggggatctgcatgggtcccaaatgaagggggcagagagagtcgggtcagctctcttgcccagtctaggggccgtgctgnagcgaggccttncagggtaggaggatgaggcagcttccctctccttttcagatgaagacttccgggggcaggcgtcaggaggcacccaaggttggagggaaggcctncgagaaaggacagttaagagattgccagcagttntttc

SEQ ID NO: 2153 - DNA, 427 bp, Homo sapiens
  I.2153 (T95155)
  misc_feature (77)..(77): n is a, c, g, or t
  misc_feature (144)..(144): n is a, c, g, or t
  misc_feature (159)..(159): n is a, c, g, or t
  misc_feature (190)..(190): n is a, c, g, or t
  misc_feature (216)..(216): n is a, c, g, or t
  misc_feature (299)..(299): n is a, c, g, or t
  misc_feature (358)..(358): n is a, c, g, or t
  misc_feature (384)..(384): n is a, c, g, or t
agcaaacaaaagttctgcgtaatgagactcaccttttctcgctgaaagactaagaggtgggaggaggcctgcacagntggaggagggtttgggcagagcgaagacccggccaggaccttggtgagatggggtgccgcccacctnctgcggatactcttngagagttgttcccccaggggcttctgccacnctgggagaaggaagctgcctggtgtngagtgactcaaatcagtatacctatctgctgcaccttcactttccagggtacatgctttaaaaccgacccgcaacaagtattngaaaaatgtattccagttttgaaggatgtttgtgttatctgttttacatccagagtttntgttgacacattgccccccagatttnttgcaaagatcccaagggctttgatttgcatttgatttaagtt

SEQ ID NO: 2154 - DNA, 405 bp, Homo sapiens
  I.2154 (T95059)
  misc_feature (5)..(5): n is a, c, g, or t
  misc_feature (8)..(8): n is a, c, g, or t
  misc_feature (54)..(54): n is a, c, g, or t
  misc_feature (192)..(192): n is a, c, g, or t
  misc_feature (291)..(291): n is a, c, g, or t
  misc_feature (324)..(324): n is a, c, g, or t
  misc_feature (353)..(353): n is a, c, g, or t
  misc_feature (364)..(364): n is a, c, g, or t
  misc_feature (404)..(404): n is a, c, g, or t
ttaanaangcaaaacaataaatttttatttgttcacagttaaacacaagcaacntgccattgacattttagaacattctaagaaggacagcaaactcttttgattccaattcccattcactaagattgtaccattttatcctgcagttcatatttatggcatctgatgtggattgttgacatgcttttaggnttgaggcgggaaagtttagaccttttgacaagagctgactttcttcaatttaactaaaagcagtccgttaaaaaaaatcagtttctttcactgatgggncccctttaaactgcaagtttgccacacatgggntcattcatgattgagttataaaactaggnttatggtcttnggcaaaatctggttcctccggtaatatatttgtggggccnt

SEQ ID NO: 2155 - DNA, 308 bp, Homo sapiens
  I.2155 (T92110)
  misc_feature (2)..(2): n is a, c, g, or t
  misc_feature (15)..(15): n is a, c, g, or t
  misc_feature (19)..(19): n is a, c, g, or t
  misc_feature (23)..(23): n is a, c, g, or t
  misc_feature (33)..(33): n is a, c, g, or t
  misc_feature (285)..(285): n is a, c, g, or t
antttcggcacagantctntacnatcaaaatcnccataggacaaagtattgttggagtactaaaatttgcaaccttgtttactttaaaaggttgccactttcagtgcagaatactaccggcatcttgttactgcaatagttggaaataaaatgtgaaaattagcaaaaccatgcatggtttttttgggttctaaatttaagatgtaatatttcctataaaagggtgaaagcagttttctttctctataacctcaatcaccagtttagtgagagcctttcttggcngggcagggaggcagtgtcacccg

SEQ ID NO: 2156 - DNA, 404 bp, Homo sapiens
  I.2156 (T92017)
  misc_feature (254)..(254): n is a, c, g, or t
  misc_feature (260)..(260): n is a, c, g, or t
  misc_feature (280)..(280): n is a, c, g, or t
  misc_feature (329)..(329): n is a, c, g, or t
  misc_feature (356)..(356): n is a, c, g, or t
  misc_feature (383)..(383): n is a, c, g, or t
ggttatcatcctctccagaatcttaaaaccagagaagccagctgtgtgaatgaacttataaagcctctttaaggcaaagtagccactagaaaaaaaaaacaacttttcttgaaatctttcaagaaaactaggaaatatgcattctacacattgttctgtcttgtctgctcagtttccttgcctttgtgccacacctgttttctctaatccctcctttcacttgacaccagctggcttaccccctgccaccacanttaggnaatcagtagctgcctcaagncactggtgcttcacagcaggaacctgatttgaaaattaaacccaccctnctacttggtacaatgaaggtaaatganaaaaaatcctcgggtggcactggcctnctggcctggccagggaaaggg

SEQ ID NO: 2157 - DNA, 397 bp, Homo sapiens
  I.2157 (T91937)
  misc_feature (371)..(371): n is a, c, g, or t
gggtgctgtaaaataaatgcaactttacagaatatggtaaaagtggaggatagacaaagcacattaaatattcagctactatttacaatttctcccacaattacatgttaaaacatactttttttttcaagttgctgtttaaatctaggcaaaagtgcttaaaaaaatctttcactatttacagttaaaaccagaccacataaatgctcaggacatcttacaacgaccctccgccagtgcttccaaacagatacagtaaacacccagcaggccggttctcagctcttactcaagggcacccgggaagctcagggaacttgcctataggcgggtcatctggattggtttaaaccatggatttcatggaaggnccccattatctggaattaacctggct

SEQ ID NO: 2158 - DNA, 467 bp, Homo sapiens
  I.2158 (T91881)
  misc_feature (215)..(215): n is a, c, g, or t
  misc_feature (217)..(217): n is a, c, g, or t
  misc_feature (385)..(385): n is a, c, g, or t
  misc_feature (396)..(396): n is a, c, g, or t
  misc_feature (411)..(411): n is a, c, g, or t
  misc_feature (431)..(431): n is a, c, g, or t
  misc_feature (437)..(437): n is a, c, g, or t
  misc_feature (454)..(454): n is a, c, g, or t
gacacctttatttatgccacagatctgctccatgtcaccagggcactcttatgtcacaatcccgcccaagcacgccttcccatcctgccctgccggagcacccctctcctccccttagtgaggaaggatttgggcctcagatcctggtggtcccaggactccagcgcctgctgtggtggggtagggtggggtagggtgggatgggggcgcggcananttcccaaggaagtcaccggacctcgcctcaggatattcagaagtgctagttcagttctggcagccttcctcctttaaggtgaaatccgagaacactcttccttccaggggagagcaactgacctgcaatcccagctacttaggaggccaaagcaggagaatcgctttnaacctggggangcagaggtttcagtnagcccagatcacaacatttncacttnagccttggggaacaagngagaaacttcatt

SEQ ID NO: 2159 - DNA, 385 bp, Homo sapiens
  I.2159 (T91140)
  misc_feature (5)..(5): n is a, c, g, or t
  misc_feature (6)..(6): n is a, c, g, or t
  misc_feature (319)..(319): n is a, c, g, or t
  misc_feature (334)..(334): n is a, c, g, or t
  misc_feature (341)..(341): n is a, c, g, or t
  misc_feature (347)..(347): n is a, c, g, or t
  misc_feature (360)..(360): n is a, c, g, or t
  misc_feature (365)..(365): n is a, c, g, or t
  misc_feature (381)..(381): n is a, c, g, or t
tttgnnatgcaacagaacttttaatcccataaaagactcaatatatttggcaccctcattttatagtactcctttttggtacagaatcattttgccaaaatactcctgtgatacagatgcacatgataaactgtaaaatggaatttcacccattgaagagccccaaaagaacaatatggtagtgcagcatgaactaacatgcaatttctaattttcaatatccccaaattgcaaaatactaataggctaatatatatactatatgccaggtattaggtactttggtaatattatcataatctggttataacccgcactngggggggaggtgggnatgggtnccattntcctcactttggngggtnagggaggctggggggntggg

SEQ ID NO: 2160 - DNA, 252 bp, Homo sapiens
  I.2160 (T91116)
  misc_feature (3)..(3): n is a, c, g, or t
  misc_feature (201)..(201): n is a, c, g, or t
  misc_feature (213)..(213): n is a, c, g, or t
ttntttttttcaccaattacaaaaaggctttattatattttgccaaatgttaatcgctttcattatgtctccaaacattatttcaccactcatttttataacaagtgcagtgaagatatgcttatcgaatattgtacaatactgttgtgttctgtaacactctttcgggaacagcttagatgtaggtaacaagagatgccngcgtatgaaagngcttcataaactgtactgtataaatgtaaactactaccc

SEQ ID NO: 2161 - DNA, 466 bp, Homo sapiens
  I.2161 (T90556)
  misc_feature (393)..(393): n is a, c, g, or t
  misc_feature (414)..(414): n is a, c, g, or t
  misc_feature (460)..(460): n is a, c, g, or t
aggacaaggctggtgggcactgtaacctcagactgaattactgatgtggaaatgtcattaggagggctgcttgttgcagggactggtgctgtggctgctgctgtggttgggactccagcaatgctacttaagaaaggaggtactactggaaatgttggtcctgtatgactaaagtttggaggtgctgtgttgggtccttctgtcatttgggcacgtctaagttcagaaaaggcctgttgtagactaagggatgatgcagagtgagacaagttcattccagggctctgagctgtagaggcagcaactgtatctgttatttcactggggaaaacttttgattctcgtaatcggctttctggcacaggactcactataaaccgccttcccgcagantgaacaacttgagttaaaganctggtaggaatgcctatttgctgtggcatgggagacgcaggaattngtttta

SEQ ID NO: 2162 - DNA, 400 bp, Homo sapiens
  I.2162 (T90460)
  misc_feature (310)..(310): n is a, c, g, or t
taatgtatttaggatgtttctttgctctaattcttcagttgtgggcctctcgtcagcctcctgactaacttggttccaatttgttgtcggatttcctgcctctcttcttcagatgtacgctgcaagatgtttttgtcctctagttctttcttagatggtctgttgccaagtttgatagcaagagtatccctccggcgtattttacttgccaaagcactttctccactgccatcctcatcttcgtcttcgtcctcatcatcgggtgtacaagatagggcccgtccgaggtcagaggtcattgggcttgggnattccctgtgggcccttcatcttctgagggcactaaagggattctgaaggattcggcccatcagcccaggggggtcaggtaggctgaggg

SEQ ID NO: 2163 - DNA, 552 bp, Homo sapiens
  I.2163 (T89892)
  misc_feature (1)..(1): n is a, c, g, or t
  misc_feature (12)..(12): n is a, c, g, or t
  misc_feature (15)..(15): n is a, c, g, or t
  misc_feature (325)..(325): n is a, c, g, or t
  misc_feature (415)..(415): n is a, c, g, or t
  misc_feature (424)..(424): n is a, c, g, or t
  misc_feature (448)..(448): n is a, c, g, or t
  misc_feature (461)..(461): n is a, c, g, or t
  misc_feature (469)..(469): n is a, c, g, or t
  misc_feature (478)..(478): n is a, c, g, or t
  misc_feature (509)..(509): n is a, c, g, or t
  misc_feature (535)..(535): n is a, c, g, or t
ntttcgggcacnganttaaatctctgactgctgaaattgaccggttgaaaaactgtggctgtttaggagcttctccaaatttggagcagttacaagaagaaaatttaaaattaaagtatcgactgaatattcttcgaaagagtcttcaggcagaaaggaacaaaccaactaaaaatatgattaacattattagccgcctacaagaggtctttggtcatgcaattaaggctgcatatccagatttgggaaaatcctcctctgctagtgacaccaagtcaggcaggccaagtttgggggactattcagtgtaatagtgctatggggnatttctcagggtgatggtatttgtcatggactctttggctggtttgatttttttaagggattattatccatcatggccatttaccagggnttaattacnctttaccaggtggtatcccccggnggaaaaggggccntttgcccncagtttggnaaaacctgtgggaaggggttggggggggggnttttggtttttaccctttttaggggncccttttttaggggttg

SEQ ID NO: 2164 - DNA, 507 bp, Homo sapiens
  I.2164 (T89617)
  misc_feature (32)..(32): n is a, c, g, or t
  misc_feature (427)..(427): n is a, c, g, or t
  misc_feature (437)..(437): n is a, c, g, or t
  misc_feature (487)..(487): n is a, c, g, or t
  misc_feature (503)..(503): n is a, c, g, or t
tttgagatggagtctcgctctgttgcccaggntggagtgcagtggtgtgatctcggctcactgtaacctccgcccctgggttcaagcaattctcctgcctcagcctccctagtagctgggattacaacacctcgaactttttaatgatgacataacaaagtctacagttatgaagtctggttccagcatatttacatttctaattttcaagccatgaaggtgtgcaatattcacacttgagaaataaaccacactgtaaggacctgggactcttcagaggtaaccccttcccaattcagccaaaggaaagggaaaacaggaaagaccccaaggcccaggatgccaggttaacccataaaccaccatcaggaccaatgccctcttattttaaaatggggggaacctccctctggcttggaaaatggantatataggcnggggggttcaagggtccacaggtttaccatccaaatattttattgggggntgctggctggggtaangggt

SEQ ID NO: 2165 - DNA, 522 bp, Homo sapiens
  I.2165 (T87537)
  misc_feature (158)..(158): n is a, c, g, or t
  misc_feature (174)..(174): n is a, c, g, or t
  misc_feature (232)..(232): n is a, c, g, or t
  misc_feature (288)..(288): n is a, c, g, or t
  misc_feature (307)..(307): n is a, c, g, or t
  misc_feature (323)..(323): n is a, c, g, or t
  misc_feature (362)..(362): n is a, c, g, or t
  misc_feature (386)..(386): n is a, c, g, or t
  misc_feature (402)..(402): n is a, c, g, or t
  misc_feature (441)..(441): n is a, c, g, or t
  misc_feature (458)..(458): n is a, c, g, or t
  misc_feature (478)..(478): n is a, c, g, or t
  misc_feature (502)..(502): n is a, c, g, or t
  misc_feature (510)..(510): n is a, c, g, or t
  misc_feature (515)..(515): n is a, c, g, or t
ttttgcaagttgaatatttatttaaaaataaatctcaaaaatatctattgacagtacagtaagaggggcatgtgcaaacaacagaaagggggaagtcagtcctgctgtgggaagcccacacatcagtgtgttggagcaaagttcacgaaggccatggntgactgagctgtggtntacgaaatgacattcagctaatactggactcggttcacctttgacacctggagaggtngggaagccagggggtggggagtccagctggggatccttgtgtttaggaagggggcngccaagggatgagcctttnggaagaggccccgttnttgcaagggagggctcatttcacaagccaacaggccttntagctcgccgctccagggtggatnttttggtgacctgaanggccctttcccagtccaagttggcttttgcaattggganggttaaggttcagcgangggtcccagagacagaaatnctttttaaaaggaaaaaaccaaanccaacaantcaantcaaaat

SEQ ID NO: 2166 - DNA, 453 bp, Homo sapiens
  I.2166 (T87536)
  misc_feature (381)..(381): n is a, c, g, or t
  misc_feature (387)..(387): n is a, c, g, or t
  misc_feature (412)..(412): n is a, c, g, or t
  misc_feature (420)..(420): n is a, c, g, or t
  misc_feature (437)..(437): n is a, c, g, or t
ttgaccatgtaggtggcagagatcgtgggctggctgtgtccacgtgggagttcacttagcgactcagatatctcaaccaatggctgctttgttgtctgacaagggagaaggtggcacttccgttcagattcattttgctaatctctccactccctgttcagttggttctttttttggggttttgttttgttttgttttgttgttttgttttttcctttaaagaggatttctgtctctgggaccctcgctgcacctacccctcccattgcaaagccaacttgggactgggaagggcccttcaggtcaccaaacatccacctgggagcggcgagtaaggaggcctgttggcttgttgaaatgagccctcctgccacaaggggncttttnccaaaaggttcatcccttgggccgncccctttnctaaaacaaaagggatncccagtgggatttccc

SEQ ID NO: 2167 - DNA, 441 bp, Homo sapiens
  I.2167 (T87378)
  misc_feature (152)..(152): n is a, c, g, or t
  misc_feature (154)..(154): n is a, c, g, or t
  misc_feature (335)..(335): n is a, c, g, or t
  misc_feature (383)..(383): n is a, c, g, or t
  misc_feature (389)..(389): n is a, c, g, or t
  misc_feature (404)..(404): n is a, c, g, or t
  misc_feature (415)..(415): n is a, c, g, or t
  misc_feature (435)..(435): n is a, c, g, or t
cacattccccacagggaaaacacatttctcacctcaaaagaagacaagacaacgagcaaacaagaaggagcagcaggaggggttctgagccgaggatgccgggcagacatgaggggagacacgcacccccgaatccaaccagtgcctcggcnanacgacaaatgtcttcacgtcacagacctttagaggctcctggggcagagctgaaaccagggctcctgactggtctgtttggctcacatggtgttgagattttgccatcactcaatattcagatttcttataaaatatccagatttccagcttctcttgggaaaatcagaaaaaaacagcantgaactcctagggcccacaaggcacttccccagttgaacagttgaaantgttcntttgttgcgggggcnggagttttccngggtcaacccccttcccttnccccac

SEQ ID NO: 2168 - DNA, 520 bp, Homo sapiens
  I.2168 (T87352)
  misc_feature (34)..(34): n is a, c, g, or t
  misc_feature (82)..(82): n is a, c, g, or t
  misc_feature (95)..(95): n is a, c, g, or t
  misc_feature (125)..(125): n is a, c, g, or t
  misc_feature (128)..(128): n is a, c, g, or t
  misc_feature (351)..(351): n is a, c, g, or t
  misc_feature (447)..(447): n is a, c, g, or t
  misc_feature (489)..(489): n is a, c, g, or t
  misc_feature (505)..(505): n is a, c, g, or t
agtgacgtccactgccttgtcaccagcgacctgnctgtcatgcccaccccctgaggaagcatggggaccctaacaccctggngccctgcacagancaaggccgtggtcaggcccaggcaccgcgngtntctgccacagcttcccacgtgcttgctgacatgcgtgtgcctgtgtgtggtgtctgttgctgtgtcgtgaaactgtgaccatcactcagtccaaacaagtgagtggccctcgaggcaaagtttatgcaactttcagtgtgtgtcataacgacgtcactgctttttaaactcgataactctttattttagtaaaatgcccagggagtcctgggaagctacgcgnacttgcagaggtttttttttttggccttagaatctgcagaaattagggaggcaccgagcccagcgcagaggcctcgggacccggattgcgtttgcnttagcggatatgtttatacagatgattttaaatgtttttttntttggggtttttgttntttttttcccccttt

SEQ ID NO: 2169 - DNA, 415 bp, Homo sapiens
  I.2169 (T86901)
  misc_feature (2)..(2): n is a, c, g, or t
  misc_feature (4)..(4): n is a, c, g, or t
  misc_feature (6)..(6): n is a, c, g, or t
  misc_feature (9)..(9): n is a, c, g, or t
  misc_feature (79)..(79): n is a, c, g, or t
  misc_feature (129)..(129): n is a, c, g, or t
  misc_feature (160)..(160): n is a, c, g, or t
  misc_feature (254)..(254): n is a, c, g, or t
  misc_feature (329)..(329): n is a, c, g, or t
  misc_feature (396)..(396): n is a, c, g, or t
tncngnggntctgaatccacagattcatgaacctcttcatcacttgagatactctctgctctggtgttttctacaggtntaagcacaggaggaccttcatccaaatctgatatcaactcaaggtctggntcttgttcactggcaaggaccatgcaaggtnttgttgattttcgcctgcttgccattctgatgttatgaggaaaagctcagtggtgattaaaaagcatcgaggcttaaaactgttcagtgttctncatttgaaaacaatggcttttggttcttcaagtcccatttttgtgctcaacaagtctcattagcagctttctcangggtgcaatccaagtaaagagcttattgtttggccagataaaatacctgctgaatttctgaaatttnttgaagcaccagctccggt

SEQ ID NO: 2170 - DNA, 446 bp, Homo sapiens
  I.2170 (T86900)
  misc_feature (22)..(22): n is a, c, g, or t
  misc_feature (33)..(33): n is a, c, g, or t
  misc_feature (74)..(74): n is a, c, g, or t
  misc_feature (75)..(75): n is a, c, g, or t
  misc_feature (324)..(324): n is a, c, g, or t
  misc_feature (352)..(352): n is a, c, g, or t
  misc_feature (358)..(358): n is a, c, g, or t
  misc_feature (426)..(426): n is a, c, g, or t
gcaagatggcggcggcgtggcntgaagaggcgngcggcccctgcaggtagtggcgcgcggcttccgcgaccagnnccccggagactctgggctgcgggtgggaactggagcgcagagtccgcggccggcacggaaaggagaagacagactgctgctttggacctgttggtaatgatggcctgagctaaacatctaactagaagggatacccttccatttcaaagaacagaatgctaaggaagctgtggcaagtgattgggagttgtgcttcaaaaatttcagaaattcagcagtattttatctgcccaacaataagctctttanttgattgcaccatgaggaaagctgctantgaganttgtttgagcaccaaaaatgggatttgaagaacccaaaagcctttgttttttccaattgaaggaacantgaacattttttaggcttcg

SEQ ID NO: 2171 - DNA, 408 bp, Homo sapiens
  I.2171 (T85532)
  misc_feature (313)..(313): n is a, c, g, or t
  misc_feature (335)..(335): n is a, c, g, or t
  misc_feature (342)..(342): n is a, c, g, or t
  misc_feature (386)..(386): n is a, c, g, or t
  misc_feature (403)..(403): n is a, c, g, or t
atcgcttgaggccacgagttcaagatgaggttggcaacatagtaagacctcatcactacaatttttttttttttaaattagtgaagtgtggtactgcacacccgaagtcccagctacttgggaggctgaggcaggaggattgcttaagcccagaaatttgaggctgcagtgagccatgattgcaccactatgctccagagtctaggcaacagagtgagaccttatctctttaaaacaaacaagaatgaagttaggtatctgtttatttgtttgagccatttgtatttccttttttgtaggactgtcctgtttnaaacgttaaaatcactgctgtnggttttngatttttacatctcagctgggatgggcaccaattaaattatttnaggccctggtttattgnaaaat

SEQ ID NO: 2172 - DNA, 358 bp, Homo sapiens
  I.2172 (T85528)
  misc_feature (318)..(318): n is a, c, g, or t
agattaattaaacccaggaggcagaggttgcagtgagccgagatcacaccactgtactccagcctgggtgacagagcgagactgtccaaaaaaaaaattgataattaaatgttaaaagtcagcgactccagtaatacgtggtgggctgagtattagactactggcttacatcctctgatgtcattactttcttgttcgtttgtgacttgaggttggattttaagcaaatgtatttgtggctttttaccaaggtcatatggccagattaacttttcaaaagcatttagttaaagaatttctgatttagtttgaattagnaaacaaagctcaaaggaacattgacctaattttaaacagg

SEQ ID NO: 2173 - DNA, 396 bp, Homo sapiens
  I.2173 (T85400)
  misc_feature (310)..(310): n is a, c, g, or t
  misc_feature (356)..(356): n is a, c, g, or t
gcccaccttggcctcccaaagtgctggcattgcaggctgagcacggtgcccagcctgaacaccctttcctggtaaaacactccaaaaccaggaaaagaaggaatgtacagcaacaaaataaaggccagtcatgcaaggcccatggtgaaagtctttcagtcattttaggtgaaagactgaaatctttgcctccaagatcagggaataagagaaggatgcccgattcttcactactttttatttcaacacagggttttgaagttcaggctggttcacagtgggcttcacaccttgttaattccccaggcantttttggggaagttcggagggcaggttggggatttacatggagggntattggagtttttggaggaccaccctgggggcccaacatg

SEQ ID NO: 2174 - DNA, 443 bp, Homo sapiens
  I.2174 (T85318)
  misc_feature (6)..(6): n is a, c, g, or t
  misc_feature (106)..(106): n is a, c, g, or t
  misc_feature (144)..(144): n is a, c, g, or t
  misc_feature (225)..(225): n is a, c, g, or t
  misc_feature (258)..(258): n is a, c, g, or t
  misc_feature (259)..(259): n is a, c, g, or t
  misc_feature (262)..(262): n is a, c, g, or t
  misc_feature (277)..(277): n is a, c, g, or t
  misc_feature (311)..(311): n is a, c, g, or t
  misc_feature (334)..(334): n is a, c, g, or t
  misc_feature (396)..(396): n is a, c, g, or t
ttcaanatagggaatactacagatagatagggtatgaacaataggaacgctgataggaatcatccaatagacaggaaacatctaaggttgaagcagggagagggantaattgcagagtgatgcccttgagtaaaagagaaggantgtgatctggcacacaaggaaaggggtggttgcagccaggacaaacaggtcatccacagaactggaaggaaggctgccgtntgggtgcagacacagaggggtgggcagccatcnntgngggagcatgcagaanttcccttctgatttgttccattcccccagagaantaagaagcagggccaaaagcttnagagttttggagggagggaagagggagcttttcttgaaagagggagaccacattgatatttntttttggcacaggttttgggacagagtagttttttgggatctttttt

SEQ ID NO: 2175 - DNA, 456 bp, Homo sapiens
  I.2175 (T85314)
  misc_feature (10)..(10): n is a, c, g, or t
  misc_feature (252)..(252): n is a, c, g, or t
  misc_feature (318)..(318): n is a, c, g, or t
  misc_feature (382)..(382): n is a, c, g, or t
  misc_feature (419)..(419): n is a, c, g, or t
gctggtcttntacttggcagatgcacttcaaattaacctgttaaattaggtcatgttctttgagttttgtttctaattcaaactaatcagaattctttaactaatgcttttgaaaagttatctggccatatgaccttggtaaaaagccacaaatacatttgcttaaaatccaacctcaagtcacaaacgaacaagaaagtaatgacatcagaggatgtaagccagtagtctaatactcagcccaccacggtnttactgggagtcgctgacttttaacatttaattatcaattttttttttgggacagtctcgctctgntcacccggggctgggaggtacagtggggtgtggatctcgggcctcactggcaacctctgcctcnggggggtttaatttaattcttgggcctcgaggggccnaaaatttccctataggtgaggtcggtatttaaattct

SEQ ID NO: 2176 - DNA, 575 bp, Homo sapiens
  I.2176 (T84911)
  misc_feature (79)..(79): n is a, c, g, or t
  misc_feature (463)..(463): n is a, c, g, or t
  misc_feature (490)..(490): n is a, c, g, or t
  misc_feature (499)..(499): n is a, c, g, or t
  misc_feature (524)..(524): n is a, c, g, or t
  misc_feature (535)..(535): n is a, c, g, or t
  misc_feature (542)..(542): n is a, c, g, or t
  misc_feature (549)..(549): n is a, c, g, or t
  misc_feature (560)..(560): n is a, c, g, or t
agagtcacacgatgtcatggttcactaggcagcacctcacgctggagctggagtgcgaggttcttaggggccgtgcacncattgttgccaagccaatgcatgctgagctgaaggaatttgtcttagtggcagttttttaaaaaatgcccccaaagtctatgctgatactgaaaaagggctactgtatctttaaaaacaggaagttgaacccaagctgtgaaaagccagtggtgctctgtgcatggtgctgtgcggacctgggtgctgtagtgttgtgctgggactttcttgactcttgggcaggtcacatcctacaggagcttcagcagaccagtgttaacaacagtttaatggcattcttattcctgatccctggaattttccacattgggacaatgggtggcatggccttcacacctgaggcctgctttcctccatggtgttcattggggttcggggggcntacatttaacatttttaaagtgcaagngttcaaacnttttcaacaggttgctataattttncctccctattnggtgccnttttccnttgatcatttnttttttttcccttct

SEQ ID NO: 2177 - DNA, 403 bp, Homo sapiens
  I.2177 (T84816)
  misc_feature (388)..(388): n is a, c, g, or t
  misc_feature (397)..(397): n is a, c, g, or t
ttcctgtgaaatgtgagaggaagtcagcactcatttcagaaatctgattataataatagctccatccctaaatgaggtgaatcttggaatctcttccattttattttattttatttttttgagatggagtttctctcttgttgcccaggctgaagtgcaatgttgtgatctcggctcactgcaacctctgcctcccagggttcaaggcgattctcctgctttggcctcctgagtaggctggggattgcaggtcagttgctctccctgggaagggaaggagtgttcttcgggatttcaccttaaagggagggaagggctgccaggaactggaacttaggcactttctggaatattccttgagggcgagggtcccggtggactttccttnggggaaggntcttgc

SEQ ID NO: 2178 - DNA, 419 bp, Homo sapiens
  I.2178 (T84810)
  misc_feature (200)..(200): n is a, c, g, or t
  misc_feature (281)..(281): n is a, c, g, or t
  misc_feature (366)..(366): n is a, c, g, or t
  misc_feature (384)..(384): n is a, c, g, or t
  misc_feature (392)..(392): n is a, c, g, or t
  misc_feature (397)..(397): n is a, c, g, or t
  misc_feature (409)..(409): n is a, c, g, or t
ttttggtattgttacgaacatggatatgacaaccaaactggaaatcagaacactagggtaaagtggatattgaaatgaagcaagaatattgtcacacatgtgttgtgcatcttgtttagggtatatttcttaatgtcatctaggtcattagttttgttaatatttgtgttgtcttgaccaagctcctactaagtataggncacaaatgttttttatcttccaaggcctgggctcaaatgccactgctggcaaagcttttctttgaccctctgggccacctncccaaggccaggaaggtttatctttccccctcccatggtactctaggcccttttcatggacactggatatttttcggtggacacnggactttataggttcacnggttttancccgnttggggcttaancgggccaaat

SEQ ID NO: 2179 - DNA, 373 bp, Homo sapiens
  I.2179 (T84786)
taatgctgtgtttataatcaatgtatctgcttatatctgttgccatgttcagtgattactaaacggcaggtacttagtcagaacgtaaatcccagttatggtttccccaggaggaaactgatgtgctctgtgagtttccacttgggagtgcacagtgagagggactgggagaccacctgcatttcctgctgatgcacccaaatttgtactattattttgtagggatacaggaagtgggtttttcatttctcaatagggaacttatggctgtgctatttggattaaaccctctactatggactggacagggaaaggggagtcacccggaatggtatggaaaaggggtttaaagtttcagggggggtggattctg

SEQ ID NO: 2180 - DNA, 445 bp, Homo sapiens
  I.2180 (T84080)
  misc_feature (2)..(2): n is a, c, g, or t
  misc_feature (3)..(3): n is a, c, g, or t
  misc_feature (19)..(19): n is a, c, g, or t
  misc_feature (24)..(24): n is a, c, g, or t
  misc_feature (50)..(50): n is a, c, g, or t
  misc_feature (210)..(210): n is a, c, g, or t
  misc_feature (224)..(224): n is a, c, g, or t
  misc_feature (285)..(285): n is a, c, g, or t
gnnctgcatagggttcggngtggnagggtactgtggtacggagcttggcnggtaccagtgtggattcaagtgatcatcacaggtacatatagtgatcttccttgtccgtctcgtcccactgggtaccaggcgaatcctactgggtaggtcgggtacgcggcatatgtggggtatgtttggtatccaggtatttgaggtacgaattcagtntacgttgccaggtntgcttggtcttctaaatttggaatagataggcgaggatactgattctggatagtaaaattntttggagctcggcaatcataagaaacttgcagtttccaccccctcttcacctgggagaactttgggctccattagggtgcaatcgttggagtaattagcccatcttttacatttctttgccacaaaatctcgaagacttgcccatttcaaggttccggac

SEQ ID NO: 2181 - DNA, 428 bp, Homo sapiens
  I.2181 (T84021)
  misc_feature (38)..(38): n is a, c, g, or t
  misc_feature (306)..(306): n is a, c, g, or t
  misc_feature (408)..(408): n is a, c, g, or t
  misc_feature (413)..(413): n is a, c, g, or t
  misc_feature (421)..(421): n is a, c, g, or t
tttattaatacaaatttatataggtggcatatactacntggagaaatcagaaattcataacacacaaattcatattggaaatacaaaaatcatttgagagtcaagaaatcaggttgacagcaccacaaatgtttactcagtctgagcaggtgtgtagtatccaagaataacaaatacctatagcagactgagactgaaatcataagactgtgcaaacacattccaacactatttcccacccaacaatagaatctgcaggagtcctctaggaggcctgggggtacaataaaagggcagcaaagcagnaaaaaatgggtacagaccattctttcttttaaccttcacagccagcatataaaagcaagtaggtaaccactgaggagttgtttgttcccttcttcactttgnaaggnccaaggtnttaaaag

SEQ ID NO: 2182 - DNA, 247 bp, Homo sapiens
  I.2182 (T84020)
gcagcacctttccatttgcccacatattcttcttgcacaccccttccattactgctgaatatgacattgcatgggaagagtacagaggtggcagaatgaagctagagtgggaaggactaaagactgagccccagagtgctcccagcaaccgccacgtacaaggtctgaaatgacaaggggcaagagtgaggatagggaaactgtgtgttgaaagggaaagcccttgcagtatttctgcctccctttc

SEQ ID NO: 2183 - DNA, 498 bp, Homo sapiens
  I.2183 (T83946)
  misc_feature (33)..(33): n is a, c, g, or t
  misc_feature (298)..(298): n is a, c, g, or t
  misc_feature (328)..(328): n is a, c, g, or t
  misc_feature (426)..(426): n is a, c, g, or t
  misc_feature (479)..(479): n is a, c, g, or t
  misc_feature (487)..(487): n is a, c, g, or t
tttttaagtagagatggggttttgccatgttgncagggtggtctcaaactcatagcctcatgtaatccacctgcctcgacttccaaaagtgctgggattacaggtgtgagccactgtgaccagcctgacttcaaatcctgtgttgaatagaagtagtgagatcgggcatccttctcttattcctgatcttggaggcaaagatttcagtctttcacctaaaatgactgaaagactttcagccatgggctttgcatgactggcctttattttgttgctgtacattccttcttttcctggntttgggagtgttttaccaggggaaagggtnttcaaggctgggggcaccgtgggcctcaagccttgcaaattgcccagcacttttggggagggccaagggtggggcgctccgtgcccaatttcttgggncctcgagggccaaaatttccccaataagtgaaggccgtattttaaaattccgnaaatcaangtcaaaaggct

SEQ ID NO: 2184 - DNA, 361 bp, Homo sapiens
  I.2184 (T83830)
  misc_feature (19)..(19): n is a, c, g, or t
  misc_feature (21)..(21): n is a, c, g, or t
  misc_feature (24)..(24): n is a, c, g, or t
  misc_feature (112)..(112): n is a, c, g, or t
aagaacccctgcctgaggntntanttttggctgctggtaactggacatatcccaacagaggaacaggtatcttggctctcaaaagagtgggcaaagagggcagctctgcttncccatgtggtcaccatgctggacaactttcccaccaatctacaccccatgtctcagctcagtgcagctgttacagccctcaacagtgaaagtaactttgcccgagcatatgcacagggtatcagccgaaccaagtactgggagttgatttatgaagactctatgggatctaatcgcaaagctaccttgtgttgcaggcaaaggtttaccgaaatctctacagaggaagggcagcggtattgggggccat

SEQ ID NO: 2185 - DNA, 461 bp, Homo sapiens
  I.2185 (T83666)
  misc_feature (315)..(315): n is a, c, g, or t
  misc_feature (357)..(357): n is a, c, g, or t
  misc_feature (381)..(381): n is a, c, g, or t
  misc_feature (446)..(446): n is a, c, g, or t
tttttttttttatcagtcctcagatataatttaatcttaagtctttaaaggcccctgaaacaaaagtatactttttatttaggcttcctcactttctggtagtcactttcacccagtctccagttttaccctgacttagagtccacaaacttcatcagaccctctgtgctcatggacttgggcctttctagagggaagcctaaggtcaggctccagatgagctgtgccagtacacccaatgctcgtgacaccccaaacaggaccgtgtagtaattcatctccgtcatgccataatactggagcagcaccccactntgagcatctacattgggccaaggattcttggctttaccctgntctaagaggacattgggcacaatnttgtacagctgagcaaccaactttaaacaatgggggtcattagggaggtttttcagagcaaactnttgctgacaggtata

SEQ ID NO: 2186 - DNA, 452 bp, Homo sapiens
  I.2186 (T83434)
  misc_feature (144)..(144): n is a, c, g, or t
  misc_feature (330)..(330): n is a, c, g, or t
ggcacgagcaaaatggaattcctctaagaatcaaggactggccaatacttgtggaagcaattgatgggcgccccatagcatcgggcccagttgtccacgaaactcacgacctgatagttgacctgggagatcaccgagagtctngtcatttgatgtgactcagtctccattcttccctgtcgtcctaggggttcgctggctgagcacacatgatcccaatatcacatggagcactcgatctatcgtctttgattctgaatactgccgctaccactgccggatgtattctccaattaccaccatcgctcccaccaccagcaccacaaccgncactctatttattccagtaggatgggttacagggttttaccaaccagtggagggtattttattattgttccaggaattgtgttacatttcccgttggttgaggcaaggtttaacccaggttc

SEQ ID NO: 2187 - DNA, 425 bp, Homo sapiens
  I.2187 (T83093)
  misc_feature (334)..(334): n is a, c, g, or t
ggatcaagtgcgagaaattattgaaaaagctgatgaaatgctcagtgaggatgtcagtgtggaaccagagggtgatcagggattggagagtctacaaggaaaggatgactatggcttttcaggttctcagaaattggaaggagagttcaaacaaccaattcctgcgtcttccatgccacagcaaataggcattcctaccagttctttaactcaagttgttcattctgcgggaaggcggtttatagtgagtcctgtgccagaaagccgattacgagaatcaaaagttttccccagtgaaataacagatacagttggctgccttttacagctcagnagccctggggaatggaacttgttcttcactcttggcattcattcccctttaggtcttaacaacagggccttttttcttggaactttaggac

SEQ ID NO: 2188 - DNA, 510 bp, Homo sapiens
  I.2188 (T82203)
  misc_feature (134)..(134): n is a, c, g, or t
  misc_feature (219)..(219): n is a, c, g, or t
  misc_feature (277)..(277): n is a, c, g, or t
  misc_feature (346)..(346): n is a, c, g, or t
  misc_feature (379)..(379): n is a, c, g, or t
  misc_feature (408)..(408): n is a, c, g, or t
  misc_feature (449)..(449): n is a, c, g, or t
  misc_feature (458)..(458): n is a, c, g, or t
  misc_feature (493)..(493): n is a, c, g, or t
  misc_feature (502)..(502): n is a, c, g, or t
tttcagtttttaatttttttaatgtatctatttaatggaataagttgatcatagatttgtaaaccaaaaggtaatttctcaagtatttggaaataagaaaaagcctccctaccaccaaccttttggtcatcttnctcattctcttacaatcatcctaatcccctagtacacccttaccatatatcaataagggcaccataatattatgcaaagaacagntatatatgcctgatctcttattagacttgcaccagagactgttgaaccactccagggnatgaactccaaagctgaggcacactgaccaagcccctgggaatcatacagaagcaaaggcgttctctcnccagctggctgctccttctgggaagagcccttnaaatctggggttaaatcgggccatagggnctctctctccaatggggggatgtgggtagctaggggtcccngaatgtttntcactcgggcgatctctctcttgcttccataactngtatggggngggggagg

SEQ ID NO: 2189 - DNA, 446 bp, Homo sapiens
  I.2189 (T82202)
  misc_feature (417)..(417): n is a, c, g, or t
  misc_feature (443)..(443): n is a, c, g, or t
atttcggcacagattatgttagattttaaaatactagagttcaaactgtactttttctactgttttttagacttcattatcctggcagtatggggcatgctggctgtaagtggaattacgttacagattcgaagagagagaggacgaccgttcttccctccccacccatacaagttatggaagcaagagagagagcgccgagtgacaaacattctggaccctagctaccacattcctccattgagagagaggctctatggccgatttaacccagattaaagggctcttccagaaggagcagccagctgggagagagaacgcctttgcttctgtaggatgcccaggggctttggtcagtgttgcctcagctttgggagtttcatggcctgggagtgggtttcaacagtctctgggtgncaagtcttattaaggggttcagggcnttt

SEQ ID NO: 2190 - DNA, 328 bp, Homo sapiens
  I.2190 (T81701)
  misc_feature (243)..(243): n is a, c, g, or t
aaccgctccatgcgagccctggccaaaaccaagggcatgagtctgtcagaacatgccctcagcactgctgtggtccggaacacccatggctgcaaggtggggcctggcgagtgctgcccactcccactgagaaggatgtcttcaggctcttaggcctcccctaccgagaacctgctgagcgggactggtgacccatggctgggggtgctgaggagagccgagttggactggctacccctcctnggccacccagtactccctccagcctcagctggctgaacctcgccgctccaaccaccagcttcctcagcgagcagggcccaggggt

SEQ ID NO: 2191 - DNA, 338 bp, Homo sapiens
  I.2191 (T81488)
  misc_feature (22)..(22): n is a, c, g, or t
  misc_feature (26)..(26): n is a, c, g, or t
  misc_feature (54)..(54): n is a, c, g, or t
  misc_feature (112)..(112): n is a, c, g, or t
  misc_feature (123)..(123): n is a, c, g, or t
  misc_feature (152)..(152): n is a, c, g, or t
  misc_feature (190)..(190): n is a, c, g, or t
  misc_feature (192)..(192): n is a, c, g, or t
  misc_feature (212)..(212): n is a, c, g, or t
  misc_feature (246)..(246): n is a, c, g, or t
  misc_feature (270)..(270): n is a, c, g, or t
  misc_feature (303)..(303): n is a, c, g, or t
  misc_feature (320)..(320): n is a, c, g, or t
  misc_feature (334)..(334): n is a, c, g, or t
aaatgcactttactgggccctnggcnccaacacttgtcctcaccaaggctgggnacccatttcccagcaccaccagctgcccaggaagcaggacggatagagggaacacatntggaatggctnttctcctaccccagaggtgccggatgatnttgacagcacggctgctttccctctcccctgcagcttntntccccacccagcagcttggnctttcccatagcagggaagggggatacctggggnttcaaaccagccacctgctcctgnttaaaatggggcaaggggccatttgcaaaattnttcgaggggcagtggtnaggtagaaggggtngcag

SEQ ID NO: 2192 - DNA, 481 bp, Homo sapiens
  I.2192 (T79834)
  misc_feature (66)..(66): n is a, c, g, or t
  misc_feature (69)..(69): n is a, c, g, or t
  misc_feature (417)..(417): n is a, c, g, or t
  misc_feature (425)..(425): n is a, c, g, or t
  misc_feature (444)..(444): n is a, c, g, or t
  misc_feature (479)..(479): n is a, c, g, or t
ttttttaatggtaaagaatggctttattttacatgcaggcaaaccattggcagtttaagccagtgntanagcagagaggtgatggggtcaggtttgtgttctggaaagatgtctggagctgctggatggagaatggattgaacactgcgttgtcccagcatgtgagctgctgcccgtctccctgtccgcttcccattcctgtggagacaggccttgtggggcagtggcatggagcctacggggcagcctacggggcaggctacggggcagcttacggggcaggctatggggcagcctacggggcaggctacggggcaggcccttgcactgcacatcgcacgttgagccacagactcagaaggcttcttcagggtccagggcaggtggggagggatgggggtgactgggagactcctnccccgcancagaggacagtttcatctntttcacttgggggaattcctttttggccttaggantt

SEQ ID NO: 2193 - DNA, 306 bp, Homo sapiens
  I.2193 (T79779)
  misc_feature (104)..(104): n is a, c, g, or t
  misc_feature (109)..(109): n is a, c, g, or t
  misc_feature (134)..(134): n is a, c, g, or t
  misc_feature (161)..(161): n is a, c, g, or t
  misc_feature (220)..(220): n is a, c, g, or t
  misc_feature (229)..(229): n is a, c, g, or t
  misc_feature (240)..(240): n is a, c, g, or t
  misc_feature (246)..(246): n is a, c, g, or t
  misc_feature (252)..(252): n is a, c, g, or t
  misc_feature (262)..(262): n is a, c, g, or t
  misc_feature (301)..(301): n is a, c, g, or t
ttcaatttgttaaatgaaattgtattttgcccacggtgctttctgtttgatccctggggacagaggggagcaagggaggggagtggcagggggaggcccaggtntgggnctggagggggtactggcggcagggnaggcagtaggcttgggcaggggaggantgcgctgccctcaggaggcaaaggtgcccagcctgggcaggccctggaccagcccaagntgagcagcnccgcccctggnttggcntctcanaacttggggntaaacgtggaacccgccacgttcgttttggcacttcaanaggcc

SEQ ID NO: 2194 - DNA, 346 bp, Homo sapiens
  I.2194 (T79349)
  misc_feature (272)..(272): n is a, c, g, or t
  misc_feature (290)..(290): n is a, c, g, or t
  misc_feature (337)..(337): n is a, c, g, or t
aacgatatggcaggagcagtcttggggcccgcttctaccggcagatcaaaagacatccggggatcatcccgatgatcggcttaatctgcctgggatgggcagcgctgcgctttacttgctgcgactcgcccttcgcagccccgacgtctgctgggacagaaagaacaacccggagccctgggaaccgcctgagccccaatgaccaattacaagttccttgcagttttccactgactattaaggaaggttgaagaagggaccggccagatttntaaggccagggctggggnttgccagttgccatggcaaggccacagccaggccaggcccattccantttctttcc

SEQ ID NO: 2195 - DNA, 576 bp, Homo sapiens
  I.2195 (T79239)
  misc_feature (4)..(4): n is a, c, g, or t
  misc_feature (9)..(9): n is a, c, g, or t
  misc_feature (14)..(14): n is a, c, g, or t
  misc_feature (93)..(93): n is a, c, g, or t
  misc_feature (387)..(387): n is a, c, g, or t
  misc_feature (468)..(468): n is a, c, g, or t
  misc_feature (479)..(479): n is a, c, g, or t
  misc_feature (524)..(524): n is a, c, g, or t
  misc_feature (533)..(533): n is a, c, g, or t
  misc_feature (566)..(566): n is a, c, g, or t
ccangccanagaangggtagctgaaaaattcagacccagcacagtgtttatgttggtcaaaaatagaaaactatgtctggcgccgcgagggangagacccttcaggccaagagcagcctagcaacatggcgcaaccccatctctgtagtcctacctcagctccccccagccctcaagtatgaatccaacggttcaaggctccagtgagctatgatcccaccacagcattccagcctgcgaggattgaggacacaaagaccaacgagccaccacagctaccagtcccagaacccgctaatgctggggaacggaaaatgagggagttcaactctgggcaagtttcttcaggcgaaattccacggaccttttccttttatcttctgggantctcaatgtggacttgatggaaagtttaccacatggtttttgcaggggggaaattggttttggcttgttatttattacatntttaattcacntctttgttaaaggccgggggcttttggaaagttcacgtttacagnccttgtttnaacctagtcttgtattttacccaagtttagggncgttgtattc

SEQ ID NO: 2196 - DNA, 535 bp, Homo sapiens
  I.2196 (T79157)
  misc_feature (202)..(202): n is a, c, g, or t
  misc_feature (457)..(457): n is a, c, g, or t
  misc_feature (470)..(470): n is a, c, g, or t
  misc_feature (493)..(493): n is a, c, g, or t
  misc_feature (513)..(513): n is a, c, g, or t
  misc_feature (528)..(528): n is a, c, g, or t
ttttctatgtattcaaactatttattcaaaatataaatcatcaacataatttgccactaatattcagtcccttcacaggacacgtgattcactgggagttaataaattagcagctggcaggcagtgacacacagcaaaaataaaaaccaagaggtgaaatagttctgaaataaaggttttaaagctaacagaaatcactganttactaagtcattagcactaattttgagccaactaactaattaatatgagatgatacaacgtcctatactttgggtatatacagactatgtttaaacaatgtctgtaacgtgactttcaaaatgctcctgggcttttacaaaggatgtggattaaggatgtaggtaatacatggcttaaaccattttccccctggcaaagcatgtggggtaacttttcatcagtcacattggggaggtcccggaggataaggggnaagggtcgtgggnttccgctgggggactttgcccgnggttggactccctcattttnccgtttccccggccntgggggg

SEQ ID NO: 2197 - DNA, 339 bp, Homo sapiens
  I.2197 (T78859)
  misc_feature (289)..(289): n is a, c, g, or t
  misc_feature (336)..(336): n is a, c, g, or t
ttattagaattttatcttcctttagttaaaaaaaataatccgtaccacggaatgaagaagtagcttttttggggggtggggtcggggagaagggaaggtgagaagggggggaaaaaagaagcaaaaagcccaaagaaaaaaacattttatattcatctgtataaacatatccgctaaggcaaacgcaatccgggtccgaggctgctgcgctgggctcggtgcctcctaatttctgcagattctaaggccaaaaaaaaaaacctctgcaagtccgcgtagtttccagggnctcctgggggcattttacttaaaataaagagttatcgagtttaaaangca

SEQ ID NO: 2198 - DNA, 478 bp, Homo sapiens
  I.2198 (T78189)
  misc_feature (394)..(394): n is a, c, g, or t
  misc_feature (427)..(427): n is a, c, g, or t
  misc_feature (428)..(428): n is a, c, g, or t
  misc_feature (440)..(440): n is a, c, g, or t
  misc_feature (441)..(441): n is a, c, g, or t
  misc_feature (460)..(460): n is a, c, g, or t
  misc_feature (462)..(462): n is a, c, g, or t
  misc_feature (471)..(471): n is a, c, g, or t
aaggaagcgctgatcttctatttaattccccacccatgacccccagaaagcaggagggcattgcagcatttcacagggctcttcagtctcagaatcaggacactggccaggtgtctggtttgggtccagagtgctcatcatcatgtcatagaactgctgggcccaggtctcctgaaatgggaagcccagcaataccacgcagtccctccactttctcaaagcacactgggaaaggccattagaattgccccagcaggagcaggatctgctttttttccagagcaaaatgaaggcactaggtataaaatatgttgttactgccaagaacttaaaatgactggtttttgtttgcttgcagtgcttttcttaattttatgggctcttctggggaaantcctccccttttccacaggaaccttgtgggggnngtggattctttnnttcatccccgcattcccantntacccgggncacaaga

SEQ ID NO: 2199 - DNA, 182 bp, Homo sapiens
  I.2199 (T78026)
  misc_feature (44)..(44): n is a, c, g, or t
taaacaggggctttattggcttatagacctgggcagtccaggtntagatctggttccagacaaggctgattcagagactccacgtggtcaaggctctgttgtttgtcaatcccttggctcctccacttccagtttggcttctgtcctcacagtctctctccatgtggcaaacaagatggcta

SEQ ID NO: 2200 - DNA, 447 bp, Homo sapiens
  I.2200 (T77893)
  misc_feature (296)..(296): n is a, c, g, or t
  misc_feature (351)..(351): n is a, c, g, or t
  misc_feature (420)..(420): n is a, c, g, or t
  misc_feature (438)..(438): n is a, c, g, or t
aaaatatcacccatttggtgtttagcttgaagtgtaagactatgtaacaactatagctactttgtaaaaaatgtactctcacctaaagcctaacatgattcatttttttttccaggaaacagaaaatgtctttggtctggtattaatatcaaaagaatttaactttaaaactgatcccaataagcatggcccttacacagttcatgaccaatatttagttatatgaaaatggttcattctcttctagaatctaatccagtgcagtcatctgggtgaaagactggaagtcaggaagncttttcaaaagcttctcactgaaatgggtaatttgggtaacacggggattaaacnggaattttgccattaaataggcaggatcttaggtcactggaataccccatttaaacagtactgctgggnccctggatacttatatcnggggagatg

SEQ ID NO: 2201 - DNA, 524 bp, Homo sapiens
  I.2201 (T77441)
  misc_feature (9)..(9): n is a, c, g, or t
  misc_feature (439)..(439): n is a, c, g, or t
  misc_feature (452)..(452): n is a, c, g, or t
  misc_feature (480)..(480): n is a, c, g, or t
  misc_feature (486)..(486): n is a, c, g, or t
  misc_feature (511)..(511): n is a, c, g, or t
tttctccangtaaagttcttttattcggatttaacctaaaatagttcgcttgatctctctttgatagagaaatgaaatctccagttctatagactataatggaaaagtattgaatttgcatatttccaataaaagatatttgcttcatgctttgggcatctatcatagttgcccaaaagactatgtccagtaaacataactgtcacagtactgaagcgcaaacttacaaaattgtctttgtgttaccacaacacacacagtctttaggtcagctgactattcatgttgtttggaaaggcatggaaaatacagggtttttggcatggcacacccagttggggaaagggacttgctcctccggggaaacacccattcattcgctttgggcagggctgaggaggcaccctggtgccatggtggaaccaggcgggtggggggnatctcactggggnttctggcaggtccatcactttccctggngggggnagggttttggtacccgccggggggnagagtccgggggg

SEQ ID NO: 2202 - DNA, 440 bp, Homo sapiens
  I.2202 (T77228)
  misc_feature (397)..(397): n is a, c, g, or t
  misc_feature (409)..(409): n is a, c, g, or t
atttttttgaaagattgtgtcttacttggatgttttttttcatgatgtgtgtggcagagagaacatataaacagagatttttatttgcaaaactcttcagccatattacttctgccaggaaagctaggaaatatgaaatacctcatttcagacttaagaaggtggagaatattaaaatatggttatcactgcgttcctatctaaagagacgggggccacagcgttcagttgatgtggttgtatcctcggttttcctactgacactttcgattgctttcatttgttgtgctcaggttctccaagggacataaaactttcctggaatgatgcttattaactggggagtttttgatctgggggaaacagctttactactttttttattgcgtctgggccntcacgggggtcntgaaacccaataaggaaatacagccaatgtt

SEQ ID NO: 2203 - DNA, 495 bp, Homo sapiens
  I.2203 (T70286)
  misc_feature (38)..(38): n is a, c, g, or t
  misc_feature (93)..(93): n is a, c, g, or t
  misc_feature (181)..(181): n is a, c, g, or t
  misc_feature (183)..(183): n is a, c, g, or t
  misc_feature (214)..(214): n is a, c, g, or t
  misc_feature (283)..(283): n is a, c, g, or t
  misc_feature (298)..(298): n is a, c, g, or t
  misc_feature (371)..(371): n is a, c, g, or t
  misc_feature (421)..(421): n is a, c, g, or t
  misc_feature (427)..(427): n is a, c, g, or t
  misc_feature (435)..(435): n is a, c, g, or t
  misc_feature (445)..(445): n is a, c, g, or t
  misc_feature (477)..(477): n is a, c, g, or t
  misc_feature (484)..(484): n is a, c, g, or t
tgtacaaggcagttgtgaaaaacttcaggacaaaaatntttcatttaaggacttgtgctgctaagttgaggccattgacggcttcccagactnttaagacattttcacaaaacagaccagcagcagctaggacatttcaacagattcggtgctattctgcacctgttgctgctgagccctntntcagtgggactagttcgaactatgtggaggngatgtactgtgcttggctggaaaaccccaaaagtgtacataaggtaaggctcgcagggctgtgggtctncctcatgttggtgtnttggcctgttcctgactggtcaccagggtaagtgtgtgcgtcctgtaggagtcagcgggcagacaggcagctnggagcgcccataccaaccaccgtttctgtatcgggcccagcatagccccngcagangccatggnccctgggttngcctccagcagtagacactgtgcttaactctngcgaggntgtgaagaagc

SEQ ID NO: 2204 - DNA, 381 bp, Homo sapiens
  I.2204 (T80575)
  misc_feature (50)..(50): n is a, c, g, or t
  misc_feature (210)..(210): n is a, c, g, or t
  misc_feature (224)..(224): n is a, c, g, or t
  misc_feature (317)..(317): n is a, c, g, or t
  misc_feature (348)..(348): n is a, c, g, or t
ggagggaatctggcttgattggcgtgctgagacgacctggcgcaaccctnccttctgaatcgaagttcaagtcccgcggcactgcaaccatgaaggagagacgggccccccagccagtcgtggcagatgtaagctcgttctggtcggggacgtgcagtgtgggaagaccgcgatgttgcaagtgttagcgaaggattgctatccagaganctatgtgcccaccntgttcgaaaattacacagcctgtttggagacagaggaacagagggtggagcttagtctctgggatacctcaggatcttcctactacgataatntccgtccactctgctacagcgacttcggatncagtattactatgttttgacatcagccgttcag

SEQ ID NO: 2205 - DNA, 520 bp, Homo sapiens
  I.2205 (T80232)
  misc_feature (418)..(418): n is a, c, g, or t
  misc_feature (456)..(456): n is a, c, g, or t
  misc_feature (462)..(462): n is a, c, g, or t
  misc_feature (500)..(500): n is a, c, g, or t
  misc_feature (506)..(506): n is a, c, g, or t
  misc_feature (515)..(515): n is a, c, g, or t
agcatgcagactgtttttgtaggttatggcccaacatttaagtacaagactaaagtgcctccatttgaaaacattgaactttacaatgttatgtgtgatctcctgggattgaagccagctcctaataatgggacccatggaagtttgaatcatctcctgcgcactaataccttcaggccaaccatgccagaggaagttaccagacccaattatccagggattatgtaccttcagtctgattttgacctgggctgcacttgtgatgataaggtagagccaaagaacaagttggatgaactcaacaaacggcttcatacaaaagggtctacaggaaggaggagacacctcctcttatggggcggaccttgcagtgctttttattcgggacttaggattatggattatctttatatccacnactggacttttggaaaagtgggttattaggtggaaatntttccntaattgcccactctggggaccatcctattactgttttncccaancagggctgngggtt

SEQ ID NO: 2206 - DNA, 536 bp, Homo sapiens
  I.2206 (T79984)
  misc_feature (430)..(430): n is a, c, g, or t
  misc_feature (458)..(458): n is a, c, g, or t
  misc_feature (485)..(485): n is a, c, g, or t
  misc_feature (491)..(491): n is a, c, g, or t
  misc_feature (512)..(512): n is a, c, g, or t
  misc_feature (523)..(523): n is a, c, g, or t
gagaaagcaatgatagattaacactgttagtgtaacgtgccagtggagtggaaagaccgcaacacctgaatcctgggttttgtaatgtttttatgtcctgactcacattctgtcacatacgctttcccctaatagtcgggttacaaaaaggaccagagtggccgcttgagccagatgactcaatcagatgaaatgtgcctgaggccaacgatgtacacttgctctatagaagggtgtcaggggcaagtacacttcaccacagcaatagcttgcctattagtctgctgagcagtcatgaattttattgtatttcttggggtaaggacaggccagaatgagtgtcaccagtggggtaatttgaatcaacttctcacacattacttgaaggctttattatgtcttcatggcatactttagtgtatccatggantattttgggtatcttttgtgggcttttncatatttttagtgctttcatggaatanttgggnatcctctttgctccctttctntcctgtggggncacacatacacgg

SEQ ID NO: 2207 - DNA, 471 bp, Homo sapiens
  I.2207 (T77959)
  misc_feature (283)..(283): n is a, c, g, or t
  misc_feature (284)..(284): n is a, c, g, or t
  misc_feature (371)..(371): n is a, c, g, or t
  misc_feature (382)..(382): n is a, c, g, or t
  misc_feature (396)..(396): n is a, c, g, or t
  misc_feature (417)..(417): n is a, c, g, or t
  misc_feature (449)..(449): n is a, c, g, or t
  misc_feature (466)..(466): n is a, c, g, or t
tgagcttagatattcatgaaaatcatagttttgcacttctagggaagaagaaatcaagcaatttgacattaccacccaaatataaccagccattctttgttacttccttacctgatgataaaatacctaaaggggcaggacctggatgctatcttgcaggatccttaacattgtcaaagactgaactaggaaagaaagctgatgtaatccctgttcattactacttaatacctccaccaacaaagactaagaatggcagcaaagataaggaaaaagattcagnnaaagagaaagatttaaaagaagagtttactgaagcattacgagatcttaaaattcagtgggatgacaaagctgggattctagtgacntttataacganttgaaaggaacatntcctaattatcttccactgtncgttgcacgactttcgtccattgggatgctgnaaagggaacggattganaaagg

SEQ ID NO: 2208 - DNA, 377 bp, Homo sapiens
  I.2208 (T70404)
gagagagcagttaaggcacacagagcaccagctccctcctgcctgaagatgttccaccaaatttgggcagctctgctctacttctatggtattatccttaactccatctaccagtgccctgagcacagttcaactgacaactctgggcgtggatgggaaggagttcccagaggtccacttgggccagtggtactttatcgcaggggcagctcccaccaaggaggagttggcaacttttgaccctgtgggacaacattgtctttcaatatgggctgctggcttctgccccgatggcaggttccacctttcgtggttaccattccgcatggaaagatggggctctgtgttgccccgggaaatgggatcttaccacctgg

SEQ ID NO: 2209 - DNA, 514 bp, Homo sapiens
  I.2209 (T70321)
  misc_feature (52)..(52): n is a, c, g, or t
  misc_feature (65)..(65): n is a, c, g, or t
  misc_feature (182)..(182): n is a, c, g, or t
  misc_feature (210)..(210): n is a, c, g, or t
  misc_feature (215)..(215): n is a, c, g, or t
  misc_feature (228)..(228): n is a, c, g, or t
  misc_feature (242)..(242): n is a, c, g, or t
  misc_feature (255)..(255): n is a, c, g, or t
  misc_feature (339)..(339): n is a, c, g, or t
  misc_feature (418)..(418): n is a, c, g, or t
  misc_feature (470)..(470): n is a, c, g, or t
  misc_feature (482)..(482): n is a, c, g, or t
  misc_feature (491)..(491): n is a, c, g, or t
  misc_feature (503)..(503): n is a, c, g, or t
tttttctaggattgaaaaattatctttattatctttgagtgggagctggagntggaagtccccantttcttccctccaacaactcagctcccattgtacccatctggggacttagatgaagttacaggtcagttattggacagctcacaggcctcttgattcctaggagtcaataagaaggntttggagtccaggcaggaagtcaggganttganttcctccacacanttttcgggaggatntggtgagcgattntagaggagaaagcgctggtaaccctgggcctgtctcattcagcatgattccacctggggcatgagctgggaaaagagctcagtnttcatggtcagggcggccttcagttctgagatctgtgctcccttcagtcagggtgggtaggatccatttccgggggcanacagagcccatctttcatggcgggatgggtaggcacgaagggtgggaagctngcatccgggggnagagccagnccagccattttngaaggacaatt

SEQ ID NO: 2210 - DNA, 479 bp, Homo sapiens
  I.2210 (T66350)
  misc_feature (400)..(400): n is a, c, g, or t
  misc_feature (433)..(433): n is a, c, g, or t
  misc_feature (440)..(440): n is a, c, g, or t
  misc_feature (474)..(474): n is a, c, g, or t
ttccacccccagcttcctttgcccacaaagttccatgtgcctgtaccctcccctggtctacataggacctctagatagtgttagagagagaacatgtagtggtaatgagtgcttggaatggattgggcctcagcagggtggtcttcaaggggaccagctaactgatcctgcccttcagagacccaggagttgggagctttcgctcttctccaagactcaggcctgtgggcactctataagctagttgatcttggctctcctgataacagaatccaatttccttccttccctccacaggtttgggaacaaacttctcccttcacttgttgccctgtaggcacttacaggaaacccgggttcttggggcttccactgagccccagggtccagtccccagccntttgggtttgggcctgctgttcagtggtttctnttcactncttagttgggggggtccacatcagtattgggagnttttg

SEQ ID NO: 2211 - DNA, 404 bp, Homo sapiens
  I.2211 (T66297)
  misc_feature (48)..(48): n is a, c, g, or t
  misc_feature (50)..(50): n is a, c, g, or t
  misc_feature (129)..(129): n is a, c, g, or t
  misc_feature (131)..(131): n is a, c, g, or t
  misc_feature (182)..(182): n is a, c, g, or t
  misc_feature (200)..(200): n is a, c, g, or t
  misc_feature (207)..(207): n is a, c, g, or t
  misc_feature (230)..(230): n is a, c, g, or t
  misc_feature (258)..(258): n is a, c, g, or t
  misc_feature (261)..(261): n is a, c, g, or t
  misc_feature (266)..(266): n is a, c, g, or t
  misc_feature (273)..(273): n is a, c, g, or t
  misc_feature (298)..(298): n is a, c, g, or t
  misc_feature (304)..(304): n is a, c, g, or t
  misc_feature (309)..(309): n is a, c, g, or t
  misc_feature (312)..(312): n is a, c, g, or t
  misc_feature (331)..(331): n is a, c, g, or t
  misc_feature (333)..(333): n is a, c, g, or t
  misc_feature (344)..(344): n is a, c, g, or t
  misc_feature (346)..(346): n is a, c, g, or t
  misc_feature (350)..(350): n is a, c, g, or t
  misc_feature (354)..(354): n is a, c, g, or t
  misc_feature (359)..(359): n is a, c, g, or t
  misc_feature (374)..(374): n is a, c, g, or t
  misc_feature (379)..(379): n is a, c, g, or t
  misc_feature (397)..(397): n is a, c, g, or t
tttttttttttttttcagaagattcttttattaaaactgggcaacatngnttaaggggacagtacaaaaaaaagtttggtccatgaaaaaaacaattcagttaataaaaacagttatcaacagggacantntgggaagtactgagcttccttctcatggttccagccaggaggggccagggntcagctgccccaaggttntccagtntcaacctttcaagggagggaaantggcaggaaggggaagacggggagaaanttntgctntccccantttagaacagggagggttttggggntggggntttgntcncaggaccttgaggaggggntngggaagcaggngntttntcanttctntgggtttagagcccntgctnaacggatttccccctttntgcccag

SEQ ID NO: 2212 - DNA, 422 bp, Homo sapiens
  I.2212 (T65642)
  misc_feature (306)..(306): n is a, c, g, or t
  misc_feature (348)..(348): n is a, c, g, or t
  misc_feature (400)..(400): n is a, c, g, or t
  misc_feature (406)..(406): n is a, c, g, or t
tatcttatgacaagtatcaaattaagatgacacttaaagatccttagcattaacttaatgatggagaagagtgctcaacagacagttcccagtaaggtaatgagatgccattttcagagacattctaagaagatattttgattcattaaaacattaaataaaaagccctcctcagattggaacccccaaatcgatggagccacattaataatacttttcatgcctcactttgacatgacagcattcgatttttttaaagatctttaatactttccatgagtactaaaggttgtaatgagttacctnatccttaggaggtaggaatgtttgctttcttcttcttggggnatagtcctcccaaaaagtccccttgtacccagtggacaggaggtcacttgtnttggtngacccaggtacaccat

SEQ ID NO: 2213 - DNA, 255 bp, Homo sapiens
  I.2213 (T65571)
  misc_feature (47)..(47): n is a, c, g, or t
  misc_feature (177)..(177): n is a, c, g, or t
  misc_feature (241)..(241): n is a, c, g, or t
ttttttgcagacaaagtaaaatttattgagacagacagaaatgcacntactcaggactacagttaagcatttactattaaccaaagagttgtgttcacattccagataagtctacgtggaaaagcattcagaatttactaggtttttgctacatcactatttcatctacaatagggncaacaaactgacactcaggatttgatgggctctcattacaatgctatacatttaacaggggcanacatcagtgacttt

SEQ ID NO: 2214 - DNA, 305 bp, Homo sapiens
  I.2214 (T65485)
  misc_feature (300)..(300): n is a, c, g, or t
tgcagatgctgtacttcagcaataaccttgcctttgctaagaccccctccgagggcttcaggggggcctgccaagggggggccttgttcttgttcccaaactctgacttggaagaactcagcttgtggccgggctggtgagggtgtggggtgcgcccttcccttttgggctgagggagagggggccgggagggttgtcaagcccacccgggaaacttgagccctgggaagagggggaagcagccagcccagggatgtttcaagggccctgggcagcaaagaagcttggggttgtttttgnagggc

SEQ ID NO: 2215 - DNA, 451 bp, Homo sapiens
  I.2215 (T65410)
  misc_feature (21)..(21): n is a, c, g, or t
  misc_feature (33)..(33): n is a, c, g, or t
  misc_feature (306)..(306): n is a, c, g, or t
cgcttggtttctctacacccngggccatggcangcagggtaccagcgccatcagcaactaggagggaagttcattcacaccatagaaactgtacagcgactgagagtgctagagtcacggcggcggccaggccagggctttctggaggaggtggcctctgcctcctcagtaggctgcagcttggcccaggctctgcaggaacactgattattgcacaaagacaaaaaagagtatgtgtatctgggctaaagagcagcttctaagaccccaagcccttacacaacgcagcaaacggggctggggttngccctgggaagcggaaggctctgagctgaggatttgggggaagacagcagacgggctttacacactttgtcctcctttaaggggcttcctgggttccggagaaggtagagcagggggagaggaacaggattttggccagactttg

SEQ ID NO: 2216 - DNA, 154 bp, Homo sapiens
  I.2216 (T65268)
  misc_feature (124)..(124): n is a, c, g, or t
caaattaaaaatctcttccacttgcttccgtagcttggtaattctgacattccaatcttctttgactggtgtattcgttcttggctgagtaacttcagtggtactgtgagtcagaagttctggncttttaataacaaatttaattcgattgccc

SEQ ID NO: 2217 - DNA, 160 bp, Homo sapiens
  I.2217 (T65227)
  misc_feature (32)..(32): n is a, c, g, or t
  misc_feature (111)..(111): n is a, c, g, or t
accctccccgttgaagatgaggagtcctcggngacaggatggtggtgacattcctcatgtcagctctcgagtccatgtgtaaagaactggccaagtccaaagccgaagtgncctgcattgcagtgtatgaaacagacgtgtttgtcgtcggaactgagag

SEQ ID NO: 2218 - DNA, 458 bp, Homo sapiens
  I.2218 (T77487)
  misc_feature (266)..(266): n is a, c, g, or t
  misc_feature (440)..(440): n is a, c, g, or t
gttcagtggttttgttaggtcacggcttgtcttgtctggattctgcatctggaagcgctgcatgctctcagaggagcgtgccgtttcccctgtagatggatacttttgttttgttgcctatttaaaaacaattaagtggttatttgcagttatttcagaactccaagtaagtggatggctttgggttctttctgccttggtcccaatggtgttgatgcttctgtggagcgcggacattcccaggagcaggtgcgtgccagccatgntgcccagacactgctgcaactgaccagctgccggaagattctggagccactaacattagttttgcacatattttcttggggagtgttacttgaatctatcttcaaactgccagaaaaaatcaaaaggatcaataattggggagaaaaaagaggacaaattttaactgtttacanaaattttaggataggaca

SEQ ID NO: 2219 - DNA, 350 bp, Homo sapiens
  I.2219 (T77323)
  misc_feature (6)..(6): n is a, c, g, or t
  misc_feature (30)..(30): n is a, c, g, or t
  misc_feature (275)..(275): n is a, c, g, or t
  misc_feature (323)..(323): n is a, c, g, or t
  misc_feature (339)..(339): n is a, c, g, or t
acgcgngtgctggtgtcggcggcaggggcntctgggttctcgatgcgtgcaggcttttcgggccgcaactggtgggttccagcgttgatgtggtggagaatgaagaggccagcgctaatcattgttaaaatgacagactcgttcactgagcaggctgaccaggtgactgctgaggttggaaagctcttgggtgaagagaaggtggatgcaattctttgcgttgctggaggatgggccggggcaatgccaaatccaagtctctcttttaagaactnttgacctgatgtgggaagcagagcattattggacatccgaccatcttnccagccatcttggctnacccaagcatc

SEQ ID NO: 2220 - DNA, 505 bp, Homo sapiens
  I.2220 (T75472)
  misc_feature (173)..(173): n is a, c, g, or t
  misc_feature (382)..(382): n is a, c, g, or t
  misc_feature (411)..(411): n is a, c, g, or t
  misc_feature (424)..(424): n is a, c, g, or t
  misc_feature (475)..(475): n is a, c, g, or t
  misc_feature (487)..(487): n is a, c, g, or t
cagttggcttatggacaactcattagtgttttgacttttcttacccagcgttaattgaattcttgcttttagacaacttcctttttgtagtggtgaaccttgccctttagtacagttcaagtgaatctggataattgttcatctttgctttagcttagataccatgtagtggnctgtggctacaggaagctggttctgtctgcttccacagtctgcttaaaaaactgtctgacttcgtgaatatagagaccaagtttaccacttctgatgaagagaccaattaagattcattcctcattctgtttctttccagtgggagaagagtccccatgaaataagatgaaactgattccatgcactagtacatgtagggcttctcccntgtgccaaagcttaggcaatttgtagggnaactttgatcctntttgtcccaggaaaagggaatgtctgacagggcttaaggctttcgtccccntgccacttaggnctcgaaggttaggtaaat

SEQ ID NO: 2221 - DNA, 338 bp, Homo sapiens
  I.2221 (T75424)
  misc_feature (285)..(285): n is a, c, g, or t
  misc_feature (309)..(309): n is a, c, g, or t
  misc_feature (315)..(315): n is a, c, g, or t
  misc_feature (321)..(321): n is a, c, g, or t
gtttctttattcctaatgcagttagaaagacctttctccttgagctctttgactcccagaaggtaccccagtccccagtgtacttagaaaggatctcgaacattgctggacgtcctcatagtactcacaaagggctagccttgaatgtcactcgcccagtcttcagtctcctgacttagagatacaatcacgtcacaggtctcttggcctcaatctgaaaactgctgccgccgcgccgaggagactcgcatgccgccaccacctcactgggagggcgccgagcanccgttcgccccctagacccttganagctgncagcgncctttgcctttgccgac

SEQ ID NO: 2222 - DNA, 353 bp, Homo sapiens
  I.2222 (T75358)
  misc_feature (345)..(345): n is a, c, g, or t
aagcaggtccagggagttcctgaaggatggagacgatgtcatcatcatcggggtctttaagggggagagtgacccagcctaccagcaataccaggatgccgctaacaacctgagagaagattacaaatttcaccacactttcagcacagaaatagcaaagttcttgaaagtctcccaggggcagttggttgtaatgcagcctgagaaattccagtccaagtatgagccccggagccacatgatggacgtccaggggctccacccagggattcggccattcaaggatttcgtgcttgaagtacgccctgccctgggtttggccaccgcaagtttccaaaacgatgntaagcgct

SEQ ID NO: 2223 - DNA, 1574 bp, Homo sapiens
  I.2223 (U79277)
cgcccagtagagatgtgatattattcaagtaaataaaacctgaaacttggcacatttgcctatttaatgtgcatcagtcatctgaactaggttgatcctggaataatgaaaacacttcactagtattaactaatgttttctacatagtagttcccaatagattaaggaaaatttccaacctgagattctttgttttggaatttgaataatgtgtttgtaactattccttgattgtcccaaatccaggctttacgtctgcttttgtcaatgtaacatcctagtgccaggaaattggaaaatccaatgactttttgtgtgtaaagtactggaatttttttgttcgtttgtttttaagacggagtgtcaactctcgcccaggctggggtgcagtggcctgatctcggctcactgcaaccttctcctcccaggctgaagtgattctcctgcctcagcctcgcaagtagctgggactgcaggcatgtgccaccactcctggctaattatttgtatttttagtagagagagggtttcaccgtgttagccatgatggtctcattctcctgaccttgtgatccgcccacctcggcctcccaaagtgctgggattacaggcgtgagccactgtgcccaccctggtatgttttttttaaattggccacttaagagttgtccttcagaaagtggagcagcagtgtgattagtaaaaacgatgggctttcctgcagctctggcttatggtctttgtttttccagttaacagctgttacttcatgctgttatagggggtggggggagaaagagaaagaatatgtctagtggcttaattttggggctcaatttgtttattatgtttttcctgcaaaagagtcaccagtcttgtcatggctcaatgcatattttaaaatgagtcaaagccaatttggaagctgctatcttaggttatttgtagtcaggcttcaaatggagagtgaaactttgactttgaaaactggtgctctatgctcaatgatggtcttacacattcctctagggaaaggtcaagaaataaatttggcttgattgtattctctcatttaccatataggaaatactatggtagaactgaaaatatgtacaatagtaaagtggtggctgagactgggcacttggaaaatagacttggattcttttctaagtgtgaaactaattaaatacttttatgtgactggtagtagtcacagtctccttgattgattctagttccttttcaaagtggagagacctgaatatagattgtaacaggatgtccaaccttgccagacaagcaggcatatatgtctctgggatgcagaagcagttacaagttaatatatttaagcataatgttagccaatcctaggtgataccagagatgtgaatatttgatcatatttgagttcattccttgaaagtccaaacctaactggtcttaattgattacttcttagtattccgaattttagaatttaaaaccctatgaattttcagtttgtgcttacattttctaacattggatgtttgctttggcaaaaaaaaaaaaaaaaaaaaaaaaaaaaa

SEQ ID NO: 2224 - DNA, 2414 bp, Homo sapiens
  I.2224 (AL389948)
caaaaattagccgggcatggtggcaagcatctgtaaccccagctactcgggaggccgaggcagcagaattgcttgaacctgggaggcgggggttgcagtgagctgagattgcaccattgcactccagcctgggtgacagagtgaggttctgtctcaaaaacaaaacaaaactggtatttattctctgatcgttctggaggctccttctggagaatctaaggaagaatctgttcccgcctttctcctgggtggcgttgcaggtgctcgtttgcattccttggcttgtagacatgtcactcctgtctcccctctgctgtcacacatgttctactgtcatacaagttcttcctctgtatctctgtcttcacttggtgttctcctctctttgtgtatcttttctcctcctcttataaggacatcagtcatactggatgaacagcccattctactccaacatgacctcatcttaactaattacttctgcaaagactctatttccaaaaaaggtcacattctgaggtactggggggtagggtttcaacatgtccttttgtgggggggtcacaattcaacccacaacacaactcagcaacaaaaagacagccccattttaagacagacaatggatttcagtagattccaatggatttggatagatttcccaaggagagaaattggaaccctcgtacattgctggtgggaatataaaatggtgcggccactttggaaaacagcttggtagttcctcaagaagggaaacatagagttacacatgacccagcaagtctactcctaagtatatacccaagacaatgaaacatgtctacacaaaaacttgtgtataagtgatcatagcagcactattcataattgacaaaaagtagaaacaacccaaatgtccatcagccgaggagtggataagccaaatgtggtggatcgagacaatggaatattatttggcaataaaaaggaatgaacacttaaacatgcttatataacatggatgcacctggaaaacctcccactaagagaaagaagcaggcacaaaaggactgtccaacccattccggggtctcatgaagctgggcaccgtggagcggcggggggcaatgggcatctggaaggagctcttctgcgagctctccccgctggagttccgcctctacctgagcaacgaggagcacacctgtgtggagaactgctcgctgcttcgctgtgagtctgtggggccagcccatagtgatgggcgctttgagctggtcttctctggcaagaagctggccctgcgcgcctcctcccaggacgaagctgaggactggctggaccgggtgcgggaggccctgcagaaggtccggcctcagcaggaggatgagtgggtgaacgtgcagtacccagaccagcctgaggaaccccccgaggcgccccagggctgcctctctccctcagacctgctctcggagcccgcggccctccagggcacacagtttgactggtcgtccgcccaggttccagagccagatgccatcaaggagtccctgctgtacttgtacatggacaggacctggatgccctatatattttctctgtccttggaggctctgaaatgtttccgcatcaggaacaatgagaagatgctgagtgacagccacggcgtggagaccatccgggacatcctgccagacaccagccttgggggcccatccttcttcaaaatcatcacggccaaggctgtcctgaagctgcaggccggaaacgccgaggaagccgccctgtggagggatctggtccgcaaagtcctggcatcctacttggagacagccgaggaggcggtgaccctgggcgggagcctggatgaaaactgtcaggaggtgctgaaatttgccacccgggagaatggcttcctgctgcagtacctggtggctatccccatggagaaaggccttgactcccaaggctgcttctgcgcaggtgccgatttgctctgctgccacccccagcctgccagcctcactccacctcctgctggttcctgatttaggctccccacccttctgcctccccgcaaatgcccccatccttcccctagggatgaggccacagatcaggcttgccctacagcttctgctcctccccagccccggctggggccagtgccctgctcataggcagtgggccctgctcacccgtccctctcctgccacctcccactgatgggcggcaggctggctactcactgcgctgctcagggagtcccagcctgcttcattttcttcttgctctaccgtcctgttctttcagagcaggggcatggtttccttccaaatatttctgctgcttttataagtgtacacccttttttttaattataaaaatgggctcgtgctaaaaaaaaaaaaaaaaaaaaaaaaaaaaaa

SEQ ID NO: 2225 - DNA, 1035 bp, Homo sapiens
  I.2225 (AL365406)
ggcgacgagtcagtatttcgacttcgcgcagggcggcggcccgcagtacagcaccctcctggaggacgggactttggtctggttattccccgctgctgtgacagcgcccatgacagcagctggtccccactggcacccaggaagtatttatccaatgactcaatgaatctgccgccggatcgcccgggactgctttcactttctgtcagtccagaagtggagaccactcccccggcccttgcatctgggcttccttgtgccctgccttggacagttggctgcagtggaagtgacgctgtgactgccctgtgcccaagcttaagaggccttgcctgcatctgctccatcttatgggaccctgcctggtgaaggacccaaggctggcctgctggaggaggagatataaggagaagagtcacagtgccccatccaacaggtagctgccctccaggggcagagaagcccagccatggtcaggagagccacccagctgaggcccacctccaccaggattgccacccagctgaaccccacctcagccgggagagccacccagctgagccccatctggccaggagagccatccagctgagccccacctctgccaggattgccacccagctgagccccgccttggccaggagagccacccagctgagccccgccttggccagaagagccacccagctgagccccgccttggccagaagagccacccagctgagcaccgccttggccagaagaggcacccagctgagccccgcctggccaggagagctgcccagctgatccccgcctgcagaatcacaagtgaaataaatgattgttgctttgagtcagaggtcagcggaccttttctgtaaaaagccacatagtaaatatctttggctttgtgagccacaccatgtctgtcacattagtgaaccctgctattgtattgcaagatgagccgtggacaatgtgtcatccagtgggcttggctgtgtgccaataaaactttatttttttggacactgaaaaaaaaaaaaaaaaaaa

SEQ ID NO: 2226 - DNA, 1863 bp, Homo sapiens
  I.2226 (AL360257)
agcactttcaggctcacagtttctcatcttttcaacagtcagggaaaagaaacctatggaatagttcgcatttcacagaggaagaaactgagggccagagctaggggtctctgacacagccatgggatcctgcaccccacactggctctatgtgactctgtagtagtggctaatgtccatcagtcgccccctgctcccctgcctggccatttgcccccaaatagggcagtggtgggagtatatcctggaggagggggaagtgggatataggtagtacttggctgacttcacaattttgctacacccagtctggacctcctgacagtggagtgggatccctgtggcttcctttttcttgtttttgttttgttttgttttttttagatggagtctccctctatcatccaggctggagtgcaatggtgcgatttcagctcactgcaacttccacctcccaggttcaaacaattctcctgtctcagccacctgagtagcttggactacaggcacccgccaccaccccagctactaagttttgtatttttagtagagatggggtttcaccacatggccaggatggtcttgatctcttgaccttgtgatctgcccaccttggcctcgcaaagcactgggattacaggcgtgggccactacgcctggccaatttttttttgttttgtttttttgagatggagtcttgctccatctcccaggctggagagcaatggcgtgatctcagctcactgcaacctctgcctcctgggttcaagcgattctcctgcctcagcctcccaagtagctgggattacaggcacccaccatcatgcccgggttaatttttgtattttcttagagatggagtttcactatgttggccagcctcatctttgaactcctgacctccgatgatccacctgccttggcctcccaaagtgatgggattacaggcgtgagccaccgcacctggccccagtggcttcttcagacttgaaacacaaaatgtggccagctagggatagagagaattctgactttcaacactgctgagccatggcatgggctgcttctgggtagtgagctccctgtccttggggtagacacagccatcccttgggtccttcctccagaccttccaggtacagccctttgctgctcttccctgcctccaaacctttgccagtttttgagtttctttacccaggatgttccatcagatctctctgcttccgggaagtcctattccactgaccacctactgtgtgcacaggcttgtgctgagtggtgctgtggaggggcagaagggagctggaacctggtgatggagagaagtcatagcatgatgaataactcatgtccactgggcacgtgctaggcactgggcattgttctaagtgtatgtcttatctcatttactcctcacagcacgtatgagataagcaatcttacttatgtctaagtagcttccagatgaggaaactgaggctctgggaagtgaagtaacttgcctaaggaaacacaggatgggctatggaaccaggattcaaccacaaacacagtgacttagcatcatctactgcaaacatccactgcagttaaaatgcctggagtgggtggcctggtcactggaggtgagggtcggggctgggtcgtctgagagccaggcgggtcttcggggtgaggggagtgttggggtgaggaaacatgtgaacatgcctcagtctttggagaacttagttactgttaacctgaatgtcaccacccctgactcggagactggcaccaaatggattatgggttcaataaatgtttgttgaatgaataaacgagccccatttgcagaagggtaaaaaaaaaaaaaaaaaa

SEQ ID NO: 2227 - DNA, 458 bp, Homo sapiens
  I.2227 (BE047904)
  misc_feature (413)..(413): n is a, c, g, or t
tgttttgttttgttttgcttgagaccaggctattgtgcagtggtgtaatcacggctcactgcggcctcaacctcctgggctcaagcggtccccccgcctcagcctcccgggtggctgggacaacgggcacacgccaccacgcctggcttattttttcttttataaagacagggtctgattatgttgcccaggctaatctcgaactcctggcctcaagccatcttcccacctcagcctcccaaagtgatgggactacaggcatgagccaccacacccagtcctcttttttttttttcttgcctccgttaccccaaagacaaagtgacttctgacctgcggtagcagaagcagcatccatctccccagggcctggccacagggctgcaggtcccgcccaaggagcatgttaagtntatacagattctccctttcagctgctcaatgctagatttctcatt

SEQ ID NO: 2228 - DNA, 1831 bp, Homo sapiens
  I.2228 (AL355711)
ttaaggtagtttggtaaaatgccttattccaatggcctaagataatatcaagcaactcactggtttacttttctaaccagctgtggttaagacacacacggcaatgtgctatctttcacatgttggacgttaaacccagaccaactccccaaatctaatttgtttcagtaatttctgaatgcattgaccaagatattcctttcatctctggttgagtttcttccattagaaggaaggattaaaccttggataaaagatttgcagatgccccagtggttagtagaggtgaaaatggaggtttcagggaaactgctggggccttttgcctttgtcctcatccaaagcattttgtgcctctctttcttctcctctggctgaatatccactggagattgaattctccgaaactccctgtgtgggtgaagtgggaagctgtgcccaggaaggggagtaactgtgcaaagttttatgcagtcagtgccagaattggattacatcactgggggaggcgccttcaggaccaggaaatggtacatggagctttgaggtgaaaactcatcttagaaacccacaaaaagtcattcccccagcctgacatcaggacagaccacacccatggggcagaaaccgggcttggttgttgcagtgggaagagaaggcacgactctggtgcaccgagcacctttcctcgtggctgtttccaggcactgggctggatgtcctcagaaccccctgtcccctgcccactcctcaaacccttactgacccacccctctcgcctggtgctgtcccaggccctgggggtgagggggaggggactccagcgtgggcttgccctccagtgtggtgggagggaaccacgtggccacttggcttagccgtgctcatggtgcagacgtggaacgcggaggcagggagaggctccgtgacgtccccagggccccagaacgaggaaggagcggagttgggattccagcccagttggacgctgaagtccctgttttgtttactgcctcctgttcatggcgtatgaatgtatctgagatgctttgtaaggcataaagtgcaatacttagcttagtggctgttcgttcagtgattccttctgttaccaaacaggtggctgagatgagagggcaacccaagcctaacgcccttcagtggccttgcatcagagtactcgtgacaggtacctctccgtggagaggggctgtcctctgcccttgcctgctcctcctattgcaacagtcctgtggagtagctcaggctctacaggggctggtgtgtgtgtgtgcgtgtatggtgtatatgtgtctacctacacacaagcacatgtgcacacatgcacacacatgcatgcaagcacacgcacacacacacatgcacacacactcacatggacacacacacacacacatgcacacacatacatgcacacacatgcacatggacacacatacatgcacacacatacatgcaggtgtgcagacttggctccaggcgtgtgtttgatagtattattctatgatatttccctcatctccatagaataccagcttctgaatcctcaatcagcctttactgcaagaagaaaagaaaaacctctctcattccaggtctgtggtgcagatgggaagagtatagtcaaaacccattaaggccttagtcaaatgccagccgaattagaacgcaatgaacgttagacaaaacaacccaactggccaggcgggggaggcgcagagcgtataaatataaagttagatacttataaagaataaagactctaataaaatattttatataaaactttttaaaaaaaaaaaaaaaaaaa

SEQ ID NO: 2229 - DNA, 1831 bp, Homo sapiens
  I.2229 (AL355688)
ttaaggtagtttggtaaaatgccttattccaatggcctaagataatatcaagcaactcactggtttacttttctaaccagctgtggttaagacacacacggcaatgtgctatctttcacatgttggacgttaaacccagaccaactccccaaatctaatttgtttcagtaatttctgaatgcattgaccaagatattcctttcatctctggttgagtttcttccattagaaggaaggattaaaccttggataaaagatttgcagatgccccagtggttagtagaggtgaaaatggaggtttcagggaaactgctggggccttttgcctttgtcctcatccaaagcattttgtgcctctctttcttctcctctggctgaatatccactggagattgaattctccgaaactccctgtgtgggtgaagtgggaagctgtgcccaggaaggggagtaactgtgcaaagttttatgcagtcagtgccagaattggattacatcacctgggggaggcgccttcaggaccaggaaatggtacatggagctttgaggtgaaaactcatcttagaaacccacaaaaagtcattcccccagcctgacatcaggacagaccacacccatggggcagaaaccgggcttggttgttgcagtgggaagagaaggcacgactctggtgcaccgagcacctttcctcgtggctgtttccaggcactgggctggatgtcctcagaaccccctgtcccctgcccactcctcaaacccttactgacccacccctctcgcctggtgctgtcccaggccctgggggtgagggggaggggactccagcgtgggcttgccctccagtgtggtgggagggaaccacgtggccacttggcttagccgtgctcatggtgcagacgtggaacgcggaggcagggagaggctccgtgacgtccccagggccccagaacgaggaaggagcggagttgggattccagcccagttggacgctgaagtccctgttttgtttactgcctcctgttcatggcgtatgaatgtatctgagatgctttgtaaggcataaagtgcaatactagcttagtggctgttcgttcagtgattccttctgttaccaaacaggtggctgagatgagagggcaacccaagcctaacgcccttcagtggccttgcatcagagtactcgtgacaggtacctctccgtggagaggggctgtcctctgcccttgcctgctcctcctattgcaacagtcctgtggactagctcaggctctacaggggctggtgtgtgtgtgtgcgtgtatggtgtatatgtgtctacctacacacaagcacatgtgcacacatgcacacacatgcatgcaagcacacgcacacacacacatgcacacacactcacatggacacacacacacacacatgcacacacatacatgcacacacatgcacatggacacacatacatgcacacacatacatgcaggtgtgcagacttggctccaggcgtgtgtttgatagtattattctatgatatttccctcatctccatagaataccagcttctgaatcctcaatcagcctttactgcaagaagaaaagaaaaacctctctcattccaggtctgtggtgcagatgggaagagtatagtcaaaacccattaaggccttagtcaaatgccagccgaattagaacgcaatgaacgttagacaaaacaacccaactggccaggcgggggaggcgcagagcgtataaatataaagttagatacttataaagaataaagactctaataaaatattttatataaaactttttaaaaaaaaaaaaaaaaaaa

SEQ ID NO: 2230 - DNA, 545 bp, Homo sapiens
  I.2230 (AJ011378)
cagaccactaccttccatacaccaccctggagcctccctgtgacggggcttcctgaccggcctgtctgagcatgaaagggctgagccctccataggcgggcgtgctgacaggatgcacgtggtggaggacatctgctgcatttggctgtgtgacatctccccctcgccttctgaacaggtctctgcagaggccatgaaaaatgtgccattcagcttttctgctaattgttgaaggcccagctgccaccgctctggatctacaccccatttgcaatgaagccacacatctcgtgagccactcccagcccgtgactgggcacagcaggggccctaacgcaggatagctctgaggaggtgtgggacccttgacagtggaggacattggcccgagaactcttcatcgacctgatcaaacctctcttggaactgcaaagcagtctgagactcttctcccagtttattatctccctattaactatctatagtgtagctcattggaaaagagtcattaattttgattatcaaaaaaaaaaaaaaaaaaaaaa

SEQ ID NO: 2231 - DNA, 376 bp, Homo sapiens
  I.2231 (AI446298)
  misc_feature (338)..(338): n is a, c, g, or t
  misc_feature (339)..(339): n is a, c, g, or t
ttttgttctaagtgttttttatttattaaatcattaaatcctcacacaaccctaggaggtaggatttattattatatgcattttacaaatggaaaaagtaaggcatgcaaagttaagtaatgcacacagtgccacacagctaggaggtggagtgcggggacaagggtttgaacagaggcagtttggctccagaggatgttacagcctgggtcccaggaacaaatgttaggagttgggcagttccgcatttatccagataactcctctctcactccgtaatggtttcttggctaagcctcctccagaaacgtgctgcttccttggagcagacctgggtnncagcagccagagtctgtctgggaactgccctggctgg

SEQ ID NO: 2232 - DNA, 409 bp, Homo sapiens
  I.2232 (AI445923)
ttccagcaccacaatgtttaattgattcccgttccagctttctcaaggcacgacaggccccctcttcctcatcttgatttggatacaagacgccagctggcaggcaggaggtgctgctgaagccctgcacggcccctgaaaactgtcacggctcaggagctccaggctgaggcctgggggacctcgcatcagtccctccacccaccctgcccatgggtttcaccacaggcagctccatgagagccccggcccctgccctggcggcttctgctttgcgggaagggccctccgtgggctctggctgtgtccctgtgctcttccggcagtgtcagggggtagtggcctcggcctggccgccggcccgggccgcctggtacatgctgaggattgaggagatggtgcccatgag

SEQ ID NO: 2233 - DNA, 424 bp, Homo sapiens
  I.2233 (AI445871)
tttttattggaaaagagggagtattttaatagaccttaaaataatataatttctttaatattacaccaaatttgacaagtggtaatttcttaaaggttgttacaatgtgaaaacaatctatattgaatttttcataatcagattaaaattcattaatctagtttgcattttgaacggatattttaccatgcagtttgtaacatgcatgagttacttgtaaactacaggttaacagacttatgcagatattccaacagttgacacctgtcactatacattttccaaagatcacgttctttactatcaccacccacatcattagaaaggtctttgcgtattggaaaattggtaaattcatggtggcagatacaatgttgtctcatttttagggcaaatgttatacatttattgaaatgctttcagt

SEQ ID NO: 2234 - DNA, 483 bp, Homo sapiens
  I.2234 (AI445523)
tttttttttttttttttttcccccaaagggtattttaatccacacaattgttgctcatagaaattacagaaaaaatgaattccctggcataaatataagacaacaggatgacataaatgagaattgacatataaaaagaacaaattacaggagaaaaataaattttaaaacataaaatgaaacatgagcagaattgaccctggaaaaaataaaattaataacattaagatctaaaacaattagagcaagcataaagaattcttacaagtcaacaacagacagataaaatttccagtttaaaattgaacaaaggatttgaatagactttcttcaaggaggggatgcaaatggccataggcacataaaaagatgtttaacatcattagtcctcagggaaatgcaatcaaaaccacaggaaaaaaaccacttcacacccactaggacagctaaaatttttaaaagacacacaagtatcaatgacta

SEQ ID NO: 2235 - DNA, 335 bp, Homo sapiens
  I.2235 (AI445039)
ttttttttttttttttttttttttttttttttttaaatgaatgggctttttattaatcatgacaatatacacaaacatttaaaattatttatacatacatgtgtgaaacatttgaaaactattcacacatatatatgtacaaccttttgagtcccccaacaggactttgagttcacaagcaggggagcaggtttaaactatttttatggggggacaataaaaaactggagtcgtttgatgaggtaagttcgactattctgtttttttccaaatccctttgaaaccattaccacacacttggagctggaagcacccagtgaatgaaaggctttcaa

SEQ ID NO: 2236 - DNA, 599 bp, Homo sapiens
  I.2236 (AI939594)
gaaggaacaagcattaagctaattttattaaatggccacagctggcagtgggggaagtagggaagagaagggaggataaagaaagtcattcaagtctgccagccatgacaagggtctatacatgaggcctggccaggagggaggccacccctccttcctgtctctccagctgagctagactggggaggggaagccagatgggacctttcctcaatgtagagccttgggattctccaagaggctcactccatggctgccgcccagggcagatgcttgtaaatacatcaggcgtctgcagggttggggtggaagtggaagggctgggctcaggctgccccggtgccatcctcagatctgctttggagatcccaactctgaaatatggtgtaccaggtaagagcattatctttggttcaaatactggcatttgcctgtttttagctctgtgatcttggcaagttgcttaacctctctgagcctcagtttcctcacctaaaatggataaaataacagcataattttaaaagggcatgagataatttcctgtagatctactgcccacccctgcacacatatccatgagataatatttataaagt

SEQ ID NO: 2237 - DNA, 199 bp, Homo sapiens
  I.2237 (AI939587)
caaacccaacagggaaaagcaaccgggttaaaaacccagggccctggggctggccctgcccacctgtttttgtagggccctgccttaacaaaagccagaacctaaaaagcagggcctggcctcccagggccccagggaggaccggaggcttgactcgaaagaacctgcgccactctgtggcgctccgagtcaacgccaa

SEQ ID NO: 2238 - DNA, 533 bp, Homo sapiens
  I.2238 (AI939471)
atcaagtatttatcatcaactatataaagtattaggcactgtacatggttgtgtgcgctatacttttataaaacttgcagcacagtatcaccacaaacatgagtactgtgttgcactacaatgttatgactgccactatgttactaggcaatagtaatttttcagcttccttataatcttacaggaccgccatcattatatgcagtcagtcattgaccaaaacatcattatgcagtgcgtgactatatttatttgacatttagtctgggtcattgactcaaatgcctataaacacacatacacacatacatacccctcacactctagcttctgcaggtaggggaaccctcagcctttgttctcagaaaaaaagccccagaggttaccattgggcatactgatttgcacacagacccatctggaagaaagtttgagattggaagtgagtcactgatagggtgagtagatgagcagactttccaaagagatgtcttaaggttcttacctcacttctctgcagtatgagatgggtg

SEQ ID NO: 2239 - DNA, 523 bp, Homo sapiens
  I.2239 (AI939469)
tttaaattaatatatcggctcatttaatcaatttctgcttcagtttaaccgtcttcaaaatggagataataataacactaattacccaagtggggtactgtgagaatgagctatacagcacatatctcaatgcttggctcacagtaggtgcttaatacaatcaatgaaagctatgatgtgcattataaggaatcaacagacagcactgtccagggaagactagactcactcatgaagtgttaagttccccatcaatagagcgtgtgcaagcacttcttggtgcccaaaggattccagcacccacaacaggttggcctaactcttaaggtctctccagcttccagagatcatgctcctcagggtctgacttctagtccccacgcttcaagtaacaccgaccaggcacgtgtgcccagcgtgcaccccgcctgtcggtcaccgcctactgtcaataaagttgatttgaggcggctccaggcagaggggcacggccacccacacgccacctcagcccggccccgcg

SEQ ID NO: 2240 - DNA, 755 bp, Homo sapiens
  I.2240 (AI939466)
ttctcatattttccttaatgcattttttctggaagacatcttttatacagcaaaaacaatccaccaataggattacattcatgtaagattcaaacataatcaaatctaccgtgtggagaaattcatagtttgttaataagcatacacgtgtatagaaaaggcagagtttatcacaaaacaggatgttatttatccctggggcagggagggatttgagatggccagagcacatgaggggcttctgggaggacgatgatttctagatcagatgacagtaacataggacttgctatgtaattatttgccaaattatatatttgtgtttagggcacgtttctggaggcatgttacatattctacaattgtaaaaaaatgtttttttaaaaaacacagctacacattcagggttatagcggtgaaataaatgttatcactatttttttctagaatattctatggctgaaaacctgaacgcagcagtaaaagtacacgtttttaaaacgactcataaaccatatgcacaaaacacagtcaggtgaagtttctctcatttgttacggaggttggtcgtatttcttcctggtgcctggaagacgtcacgtggtctgaacacagtcttggctggtgatgattcctgatttttgtctgaaatcctgctaggcgcatttctggtgcagtttcttctggtccttgtaccactgcatgagctccttcatgaaagtgattgtcactttgtcgtcctcaagcttgggtcc

SEQ ID NO: 2241 - DNA, 605 bp, Homo sapiens
  I.2241 (AI939453)
  misc_feature (575)..(575): n is a, c, g, or t
attaatacactggatttattaactattctttgagttctaacagtccttccaccacacagtatcactctgaaagggtgtgcatgtctcacagctcacacacacaccacttctgatcttagggtaccaagcgccagcatcctgggtgactcttcacaatgacaaaagcaacaagaactggaaaagcaaaatatttagaaaagtctcttctgaaggtagagattgctagagaggacccagcctcaacaccctggggctgacaaagggagttcaggagagaaaaatgtggtaaaacatggaagttctgcacagagccgggcctgggaaggagtctgtatgtatggacagcaaggcagtcagacacacgatgcagttcagacaggaaagagccgctgcagttgtttagaaacatcgctttctaccaccaagctctcggcagctccacagagaagagccctcatggttgtttatccagtcaagagggcccagggtgacattcaaccagaaagccgtatatcagagatactggaaagattacagcacctctgatacaatgtgcaacccagacttcatgctgntaagccaaaatacttgcatttctacaccac

SEQ ID NO: 2242 - DNA, 114 bp, Homo sapiens
  I.2242 (AI939436)
ctgtttccaccaaatatgtatgagggagctccagagaagcccaaattaagggatgttcaacaacataactggcctctacccaaaaaaaaaaaaaaaaaaaaaaagtcgtatcga

SEQ ID NO: 2243 - DNA, 356 bp, Homo sapiens
  I.2243 (AI939568)
gctctatttaccgggtgatttatttaaaacaaccctgtcagaggcagcgactctcactccactcagcagagggagcccacgcctgagaccacccaggcgtgcgtgcttgtgacaccgtttccagtgaattcggggaaacacacccctggagaaccccgtcctgctcctggcagactttggcccagctggcctgggctacgccatggaggctcacgtggggccaccgtggagataagagtcctttggacacagagccacgttctgtggcctggagagccagcagagccacgtgctgccagcctgaccctactgctcagaatgtgggaacaggctgggcgctttttacacacgcagcg

SEQ ID NO: 2244 - DNA, 547 bp, Homo sapiens
  I.2244 (AI939511)
cattcaaagcagaatttttactcagcaagggggggttagagtcaaccagttttggttgattcatttttcagaagcccaagggatagtatctctaatttggggtccttttatgtgctcaagaagtaaacaaaccaacaaaatgtaaatcagttctcaagagccattattagggaattcagaacatagtgctaacatgagatctgagaaataaaagaaggtaaagcataaaacagagaagagcaccaggccctcccctaaataaacaaacaacacaaggccttgcactcagaagacccttggaatgtaggtctgtctctctttctttgaatacttaaatctgaagggatggaaagaccacctaaaaatcctagttttttggcatgatgggggtctaattccttgttcactccaaagagctgatggcacatgttccctgtaaggatctccttgtgctaaaagtctgcagtggcctttagtttataggactgtgttcaggcttccccacttcgcagacagccatgaagtcagctgtcattcaactcaacgc

SEQ ID NO: 2245 - DNA, 211 bp, Homo sapiens
  I.2245 (AI939490)
gctcagccctgccacttttattattgatgtcaaaagcgccaggctttgcagggacaccagtgggaggtacataggtgcgtgtctgggacccgagaatctcagttctgtaacttcgtcctcagtccaaggtgcgctgctgctgttgggagctaaggctggtcaagcacaggttgtagaaggagttggggtcaaaggctgcactcacctcttg

SEQ ID NO: 2246 - DNA, 521 bp, Homo sapiens
  I.2246 (AI936987)
ttttccttgaatactttcacttgtttaataaaatgtcagagaaccacagatagaacctataattccttagggactacaagatcagagctgacagtgttacggttttcatcagtgcatttacagaaatggcatcagatggatttcctttggagaaggggattgggaaatgctttttttttttttttaaactggtaataaaagaatctactttccatctttacaattccagtattttcatacttaattttaacttacagccttgaatccccgagtataattttgtactcaaatataagttataattaaggacttggccgcccaacaaggtcaaattaactaaaaacttaagtcctcccaatcactgatattcccagcccctagccctcatccccagcccagcggactaactagggtccggcctcagaaagggtctcggggagcccagaggtaggaaagcacccggagacgcaggcctccgccttctccagggtctgcaggcagcgctgcgcggggtcgccgac

SEQ ID NO: 2247 - DNA, 516 bp, Homo sapiens
  I.2247 (AI936462)
tcagcttctcagtcatttttaataaatgcttacggtttttcttccaaagcaggtgaaaggagaatatataagtaacgatatatttgcggtggctatgcctattccacagcaatcacaaggggtgtccttggggtgggagtgcgcctgggaaagagttggcaatcagtgagtgacagtcctagacttcaaggaccagaaagactaggcagccgtgggggaccagaataagtaggaccacgagagagagtagagagaagcactgtggcaaaagatggagggtctcactagctctttatttcccagaagaaatatcagacacgcagggtagacttctgcattaagcaccgcaggcccagtgccagggaccatagtcttttggggcccatgaaaatgttttgatttgttttaaaatcagaaaaaaataagtaaagctttaggctgaagaacatgttttaatatgcaatattaatatacttttccttatgccaacgcagttgcaaaatcttatttttaata

SEQ ID NO: 2248 - DNA, 444 bp, Homo sapiens
  I.2248 (AI935874)
ttttttttttttttttttttttttgagatggaattttgttcttgttgtccaggctggagtgcaatggggtgatctcggctcaccgaaacctccagcctgggtgacagagtgacaccctatctcaaaaaaaaaaaattcttcattgctcatatacgtcagattattacaattttggtatgcttaaaaatcacagagagccaaataaggtggccaagagagaagaaaatgataagttgtccacacaagcgctctgatccaagttaaaaacaagcaaagtaaggtatgggagtacaaaatcacaaaaatattttagagcattttaaaaagggggctattataattatcttcttttaattattaattttaatatcttaacatgccaccaaattaaattcttcctgaatagagaaagataagcttttaaaaattctgcatcattactgg

SEQ ID NO: 2249 - DNA, 426 bp, Homo sapiens
  I.2249 (AI935000)
ttttacagcatcacactataatactagcttgcttctaaaagtggtaaccagctctgaatggtgtagaatgactcagcagcatgcatttctggcaatactgaggactagatatccttaagtttttctgttaaagaaaatcccctagataatatattaaaagtctccttgaaatattttttgtctactaactctttgagtaatacaccgagtttggggcctctcacggtgttggcttttctcaaatgtttgttcgtctttgaattctctgttcatctccgtatttaagaactcttgtcctgcttgttctccctatcatctcctgcctctgatgatactgaatttagtgaatagatctagagagtggacggaggcaggcaggactaattctgggagctgtcttgtatgttggtggacctttatgagcat

SEQ ID NO: 2250 - DNA, 542 bp, Homo sapiens
  I.2250 (AI934556)
  misc_feature (385)..(385): n is a, c, g, or t
  misc_feature (535)..(535): n is a, c, g, or t
tttaaacaagtaaagttgttagtatccaggcactgaattataccttcatggtatcaatcaaagctatgatcagaattttatgtaactgcttaatcacttctttaacaagtgtaccgctacaggtaacattaaacgtctctagcaatgatctttatcgggttctcttgccttgactgaaatattattaatacttcttatatccattaacataaaataactttttgttgagcaaaaatagtgtgaaaacattaagatgaatgtgcgctttggaaatgtttaaatagatatgaaatgattaaataaaatcacagtcttgtgcaacatccatagcttacagttatttggcaactatgaaaccacagttactaatggaattaagactttntaaaaaattgcaaatgtacttatttgtatatgaaagaggtattcagctattaactcagtatttaataaacattgatatgtaatttttacttgaaatggcctaaggtttataataccaactagttcatagagctttttttaaaaaagactntttttag

SEQ ID NO: 2251 - DNA, 199 bp, Homo sapiens
  I.2251 (AI934189)
ttatttatagcagctttattattataataatagccccaaacaaaagcagccctaaaggctaactgataaatagataaacacattgtggtatatctatacaatggaacacttattcagtaataaaagaaatacctaataatatatacaaccatataaatgaacctcagaagcattatgttaagtgaaaaaagccagacat

SEQ ID NO: 2252 - DNA, 240 bp, Homo sapiens
  I.2252 (AI934144)
ttttttttttccaaaaatgtgagatttatttaagtaaattatggtaacattcacactatggaataataggtagtcattaaaatgaaatacatatacatctgctaaaattgagacatctccaatataatattaactgaaaatgcaaataggaattttgtatagcatgatcccacaggtataaattttgttaaagaaatatacttctacatacagataaatgacaagaaaattttctaggaa

SEQ ID NO: 2253 - DNA, 333 bp, Homo sapiens
  I.2253 (AI934126)
aagcaagcacattataagaagcaatagatgtgccagggcatatgaacatcagatgaatggaagttatcctgtgtttttctttttaacttaaattcatcttttttgaattaaatcttaattgatacatcctgtatatgaaatttcactttatggtataaatcagaggcttcctatcctataggaaagattcatgcttgtttttcaaattcagtacaattctcccagtgatttctaggaaagaataagaggagagaagaggtagacatagaatgtagagaggaatacctgtgtaaaaatgaaaaaaaaaaaaaaactttatttctattttcccag

SEQ ID NO: 2254 - DNA, 306 bp, Homo sapiens
  I.2254 (AI933967)
  misc_feature (231)..(231): n is a, c, g, or t
  misc_feature (233)..(233): n is a, c, g, or t
ttttttttttttgagacagtctcactttgtcgccaggctggagtgtggagtgcagtggcacaatcttggctcactgcaacctctgcctcctgggttcaagcgattctcctgcttcagcctcctaagtagctgggattacaggcacaccccaccacacccggctaatttttatatttttagtagaaagggggtttacccatgttggccagctgggtcttgaactcctacctntntggatccacccgcctcggcttccaaaagggggaagtcactgcacccagccttgctggatttttctaaaacctt

SEQ ID NO: 2255 - DNA, 313 bp, Homo sapiens
  I.2255 (AI933871)
  misc_feature (216)..(216): n is a, c, g, or t
  misc_feature (234)..(234): n is a, c, g, or t
gctaaataaattatgctttattcacacaatggaatactatacaaagaagtaactctgcatataagaacctacaaacatgttcacgttctattaagtggaaaaatttatagaggaggatatatactatggttctatttctacaacttcgtatatgtgcacatagatggatttaatgtacaggtgtatatatgcgttttctgcctctctggtcctctnctgtgtctctacacacantgtgtacatgcatgcataaaaatacacagaaaggaacttctatggttttgaatattccctcaaaacttatgttgaaact

SEQ ID NO: 2256 - DNA, 297 bp, Homo sapiens
  I.2256 (AI933862)
  misc_feature (211)..(211): n is a, c, g, or t
  misc_feature (281)..(281): n is a, c, g, or t
ttcacattctttacatctgaaatgtttattttcagtatgtcttatcttgtgtctatttgaatttgaaaatttatgcatgacttttacatatttattacattgaaatattttgcttgtggtaattttcaaacattggttaagtccattataacctcttgggtgtcccttacactcatccacacttttacagcctttcttaactgtaaatctntatgtccatattttccatattgctccagtgtcacttttggaaagaatttttttatgttctgctctccccnagggtcttgggcaaaa

SEQ ID NO: 2257 - DNA, 303 bp, Homo sapiens
  I.2257 (AI933827)
tagtgtttttaaaaacattttttaatgaagaaattattccactccaaaatatagacacacaattaaatagtttaatcacttcaaaatataacatgtccccaggaggttccaacacacacacacacacacacacaaaacaatacttaacagcaatacaaaaatccatacaatagtattttttttttacaataccaatgaatattgtgaaatctttagtgtctctgaattgattatttcaaatgggtgtcaaattggcagtagtcataattaaaaatgtcttacagttaattcgcctcaagatgc

SEQ ID NO: 2258 - DNA, 275 bp, Homo sapiens
  I.2258 (AI933797)
  misc_feature (176)..(176): n is a, c, g, or t
  misc_feature (245)..(245): n is a, c, g, or t
tgtattttcagtagagacaaggtttcagtcttgaattcctaacctccggtgatccacctgcctcagcctcccaaagttctgggattacaggcatgagaaaccatgcccagccgatttctctcatttttttttttttttttttttaagagacaaggtgctcgctgtgttgcccaggnctggtctcaaactcctgggctcaagcaatcctcctgccttggcctcctgagtcaaaaagtgcatctcanatagttttaaaatggatgtgcaatatttag

SEQ ID NO: 2259 - DNA, 309 bp, Homo sapiens
  I.2259 (AI933749)
agcgttatgattttattatttttcataaacccatttcacatatcaagcaatgcccaaggaaaagaaaactactatacatttattatttcacgtggttttgaaacttgaacaaatctcatttgaaaatagagaaaaatgcaatttttgcagagtagatggggaccacactgattccatttttaaaaaaggatttcctgtaaaaacagaaattggcaatttactctaagaaaacacagcagaagctgggaagaaacttgaggatgcctaaatttccactgtggaacaacttttgctgcccagtggggagag

SEQ ID NO: 2260 - DNA, 371 bp, Homo sapiens
  I.2260 (AI933671)
  misc_feature (278)..(278): n is a, c, g, or t
  misc_feature (279)..(279): n is a, c, g, or t
actaccttgtacaacaaggaatacagtactggtttttaagtgtggagaaaggtttaatatttaaacaatatagccttaataaaataaatatactcaccaataaaagcactatcagattccaataatgagtttttcaagaaatcactagtgtcatctctgggctaaaagaaacatgtttcaatgactatttttattagttttgtgtacaaaaacaacaaatttatactaagaagaggcacaagtttccacactgttctccctaaaagcagaggatgggnnagaggtagggactgactacattccaatgctcagaaaatactggaaagccttaacacacacaattcctacgaagaacggtgatagcaacagaa

SEQ ID NO: 2261 - DNA, 291 bp, Homo sapiens
  I.2261 (AI933519)
tttttttttgagaggctttatttggctttatttagtaaaatgttaaaataaataaatacaaattgatcagctgctctgtatccccccccaccccctcaaaacaaaaaccaaacaaacaaaaacaaaaactttgaagcacaaaactccaaatacaagtctaccaagactgaaatcacaaagggcatggacaagagacagggttggggtctggctggctcttctctgctaggagctggctgacctctggcctggcccgtcccatcccgcctgactgcagctcaccctgggctt

SEQ ID NO: 2262 - DNA, 441 bp, Homo sapiens
  I.2262 (AI933013)
gcaaaattccactttatttattcattcctcctccacattaaccttattaaaacccaaggagaagaagggggggaagggaaaaaataacctgaagaccccaattagggttggttccctttggaaaaaaggtccaaagcccaaagattggaaggggtcaagcttgaacttaagaaccagtgggggcacttcttccttttacccttttccctgttgaaactttttgggacgggccaacctcagcccttattggggaattccccagccttaacttttggtttctccgaatctgctttgctcaacctcaaggtgcttctgaggcttgaagtgctggccttgctttcctgctttttgacacttttcttggaatttccccattggaaggcgtttttcacctttcactgtaccttttgcctttctgggtaaaaagttatttcaccaggc

SEQ ID NO: 2263 - DNA, 143 bp, Homo sapiens
  I.2263 (AI932927)
tgagagaagaatatatttaatgagcataaacatatagttagatagaataaataagatctagtatttgatagcacaacagggtgactatagtcaaaagtaatttattgcacattttaaaataaaagggataattggattgggtt

SEQ ID NO: 2264 - DNA, 307 bp, Homo sapiens
  I.2264 (AI932884)
gtatttttagtagagacggggtttcaccatgttggttaggctggtctcgaacccctcaccttgtgatccacccacctcggcctcccaaagtgctgggattacaggcatgagccaccgcacccggccctaaacatttgttagacaatacttccgaatgttttgtctatgtaatttagttcacaaatcattcagctcataaatcaacttgtctagactcatgccctgggttcacagaattagaaataatactattttacattagggactactaagaacaaccaggatgatgataatagtcatcactaaa

SEQ ID NO: 2265 - DNA, 309 bp, Homo sapiens
  I.2265 (AI932849)
  misc_feature (291)..(291): n is a, c, g, or t
tttttttggctgaatgaaccaatgagattcatgacagcatcattttgcactatggtcttttaaagaattcgttttctgaaggtagctgaattttgtaaagtttttctttataattaaggcaaaggtgaatttattaaagtcaaagtctcattatcatcaactttaatagagtccaatcttttgaggttgcattataatagttttatagaactaaacactagaaaattacaagagaaatggcaaaacagaaggaagggaaaattaagtccataaacaccaaaatgacaatcngttgtctttgggcttaaa

SEQ ID NO: 2266 - DNA, 400 bp, Homo sapiens
  I.2266 (AI932781)
tatgagcttttaattggtatcttcctccttatatttgaggaagaaatgaggacgccccacaaggaccttcttcagcttggaggggcagggacagaatagggcagaggagggtagtgggggcagatgcagagctgacagtggggtttcccaatcctctctctagcggccggagggccaggatcacacaggaagcctggaaacacaaaaaaatcatcgacgagctgccccatcctttgcccaggtctcacaaagagcctccttccaggttcccgttgggttcctgaggccgccaccagatgggagcatcgagcaatgttccttttccttctccagccacctccctcctctctcagtcctttactacccccttccctgcctgctttttcatcttccttcattt

SEQ ID NO: 2267 - DNA, 399 bp, Homo sapiens
  I.2267 (AI932670)
  misc_feature (172)..(172): n is a, c, g, or t
  misc_feature (288)..(288): n is a, c, g, or t
acagggacagaatttttattaaaaagcatgggcacactgctattttcagaagaggtagatgaaacaattttctcagataaatgtgacacaggtatgttttcatcagaactatgcacagataagtcagtggcagtttctggaagtttacttgggttaagagactgctgtagtnacagtggtggtctcccggaggtgggcagacttgttgctaggagatctacagtttggattgacaataatgacaccagtcgaaccttccatttttgtttcaggggtagaagagacttntaagtttggaggcccttcctttgagctgagcggaggaggcacccgggtctctttagaggtctgggaagagatgggctcgagcttgatgctttgcaaagagcttagcccttt

SEQ ID NO: 2268 - DNA, 397 bp, Homo sapiens
  I.2268 (AI932618)
tttttttttttttttgttcactagtttttcctttattttcttgggtatacttaaatagctactttaaagttctattattaatttctattaagaaatgctgggtctttttttttttttttccttgattatgggtcaaattttcctgcctctttgtatggctagtaattttttaattgaatggtaggcattgggaataataccttgtaaggcatctggcttatgttatcttcctttaaatggtattgttttatttcttgttaaagaggattatttctgtttgaacttagtcaaatgtggtccataggctggctatttttgtaaatgaagctttattggatatagccatgcccatttgtttaatattaatatattatctggcttcttttgtgctataata

SEQ ID NO: 2269 - DNA, 179 bp, Homo sapiens
  I.2269 (AI932551)
  misc_feature (165)..(165): n is a, c, g, or t
tttttttttaatttcagacagaatctcactcggtcgcccaggctggagtgcaatggtgcgatctcggctcactgcaacctctgcctcctggattcaggcaattctcctggctcagcctcctgagtagctgggattacaggcacccaccaccatgcccagctattntctgtatttttagt

SEQ ID NO: 2270 - DNA, 412 bp, Homo sapiens
  I.2270 (AI932543)
ttttttttttgcattgtttacaaaaatttattcatacaaattttacacactttatataacagttatcaaagtcctagttatagatatcatgtgtgtaataatacttggttaaggtgtttttataatcagttgcacacaaaataagagcttcaagactaacatctacctaaattatcactatatcataaatctgcttcagtttagtaaggctcttggcatttctaaaaagtatacaaaagattaaactgggtgatcactgtaaaatgcttgcaactagccacgggaacactaaattagacttcataaataaaaggttaactagagccctatttcaccactaacagctgatacaaatacagaaaactctgcccattatccaagaaacaaataattaagactaaaatgcaagctg

SEQ ID NO: 2271 - DNA, 448 bp, Homo sapiens
  I.2271 (AI932371)
  misc_feature (6)..(6): n is a, c, g, or t
  misc_feature (7)..(7): n is a, c, g, or t
  misc_feature (8)..(8): n is a, c, g, or t
tttttnnntttaacaattctaggtaaattttatttatattgtgcctttgacagctacctttccatctgttgcttcacttaatcctcctagtaaccttatgaggtggataattctgttatctattatccctactgcatgtgtgagggaagtgaagtccgaaaaggtgtctaatctgtaaaaatgggtcagtagaggatggttgtggtgacaaggggcatgtggaagggtcttagtttctgtttaggggtgatgtgatggtgctggtttcatggttaagtccaaaaaggaagccaggttccctttctactcccaagattaaaaggaagacatttgatagcagacatctagggaagtcttttgcattccgtcaagagatcctctctgtgctttcttcctttagtcagtgtctgcccagaggttagaagactgaaggagctgtcattgttga

SEQ ID NO: 2272 - DNA, 502 bp, Homo sapiens
  I.2272 (AI932290)
tttaagttttattttgtttatgtgatatttagtatgagtgactttagtttggtttggtctggtcggttggagcctagtacatgagtttagtcaaaagcaatagcctcttataattttatgttttatttatttatttgtttgtttgtttatttatttatttattcatttattggataggtgagagggtgacccaaactttactgttggcttcgtggtacttttagctattattattttcagttttcggtctcagtgtgtcttatatgttacagagacttgttgatcactttttggagtttttgttgtttgggttgaagagggaccagttgacagtttatagatgtctgtatgtaaacatttgagaaaatatagtattttggggaggctactattatgactattaggaagataatattaagagtttgaaatatggtttctggtcagagtctctatgaatcaattaaaattgaagagttttaaacgtgagttagataaatagtat

SEQ ID NO: 2273 - DNA, 485 bp, Homo sapiens
  I.2273 (AI927428)
gcggccgctgagcgcatcggagggcgggcgcgccgaggcgccgggtgggagcggagcatcttcacttctgcggggacctagtttgcccccacctgatgcaacccagaaaatggactgactgcgagtgccttggggcggagaatgtgtcttgctacgtgtaaagcacctagaaccctgccagattcaggggacacagcatcctgccgttttcctgccgtcccccgcccgccacacagtaggcgctccagtggctcggggcatctaccaggcaggccgcgctgtcctgccctgccggggctggagtggagcaaccctccggggccacccacatctgggtaccttttccccactttttccaccccagccgcgcacagtcaccagaaaactcttttaggtatctgaccttcatttgaacctatgttccctcacttgaacttctttttcctcattcatgagattctaaaggaaatatatgggattgggac

SEQ ID NO: 2274 - DNA, 394 bp, Homo sapiens
  I.2274 (AI926935)
ttttttttctagtataaataaagttttaatgagaaaccaatattgatttttaacaagtgattcgattctgtgaacttgaaaaatgatttgggaaggagtgggttaatgaggctaatgaggaggcttttgtggattagatgataactggagtggtttggtcataaaacttcatagtgcaaaatttcctagtaaagcccttccttctttcctttttcccctctttttcttttcggtctctccctttctttatgggcttttcctaaacactttcttcttttcttatgacctggatctcagtttcactatgcacttccctaacctatttctcctaatttcagttaaggtaaaaagtccacaggtatcagaactggaacctgaagttaggttaaaatgc

SEQ ID NO: 2275 - DNA, 377 bp, Homo sapiens
  I.2275 (AI926891)
tgaagatcaaaatttattgcagtttcaaataacagtgttatcaactccatttattcatcaaatacatttatttatcatttttccatttctcaattcattgctatttggttttatctttattgaatccttcttcctactcttctcaagttcattttattggtgtctttctaactcatttccaggcttggttactttctttcttgatttgtaatgaaagcattaataagctgtctttgagtgtagtcttggctttgaagcatgaataaataattatagtcaggcatgaatgactgatgacatctatatgatgtaatattatgcaacacttaatatacttttaaatgatttttatcacaagcaaaaaaaagaaacacttc

SEQ ID NO: 2276 - DNA, 350 bp, Homo sapiens
  I.2276 (AI926850)
tttttttttttttttagtattttctaacaagaattaaattgtttattagtagatgaggataaatgacaaaaatatacaagaattctgaacatcttttatagtagtaatttcaacattaagttacttgaacacaatgtaacagtgataggtgtcaagtaaagacatttaaatgaaagttgttgagcacaaagtaactgaagaaaatattattctattttattttgtgaacaccacagcaaagacactgttctacagcaaacatcagggaatgggctcttcctttctttccccaagtgtttataatgatgagcaaatgctttgaaagaaacatcaccatgacacctgcaatt

SEQ ID NO: 2277 - DNA, 322 bp, Homo sapiens
  I.2277 (AI926745)
taaagacgtgttttgccatgttgtccaggctggtcttgaactcctgaattcaagtaatcaacctgtcttggcctcccaaagtgatgggattacaggcatgagccaccgaacccagccagcatcaagagttttaaaattaaggacataacgccatttcacactttaaatagactatagtgtagtgtaaacatagcttctttttttaaatagagacaggatctccctatatgcccaggttgatctcacaattcctgggctcaagtgaccctcccgcctccgtctcctaaagtactgggattataggcatgagccatcacaccca

SEQ ID NO: 2278 - DNA, 474 bp, Homo sapiens
  I.2278 (AI926702)
ttttgtgttttttttaattagccattctagtgtgcatataagtcacccatattttgtttttttccaaactgcacaacagcccataggctaacgtcactactaaagacagcgacatgggagaaacacaacagtccataggtcaacatcacttctaaagacagtgacatgggaaaaacacaaccgcccataggtcaatgtaacttttaaagacagtaacgtgggcgtagtagactgactcagaggacctcaccttactgcttgctctccagctactgatgcaatgccattaggaaagaactgccacggctatttacaaagccctgacccagggctttgctcattcgttcatctcaccctcacagcaaactgccaaaggcaggcaaggaaggaattattctcaagagcttacataactttccaagtatgtacccgacgcaaacttcaggcctaccttcttctgattccagttcagtt

SEQ ID NO: 2279 - DNA, 473 bp, Homo sapiens
  I.2279 (AI926659)
tttttacagttaattctgagcatattcatttctcttctaagttgtgaagtctctgaaggcataaattagttttaatttttcctggtatcctacagtgtgcactagcatggtgccttgaacacagaagacatttaaggatttgtgggatgattcagtcctacctcaaatagatttgtgaatccctctaagccaatattgacaagcaaacagagcaagattttatgaatgcattcactgaccagtaactcaccaagatagtctactaggtgtttctttctttttgcaggacaactcttcaattacttggaaaaagtttatggctactatggtttcctcttcttcaaggaagatatgccctgtttcttcaactgtacctcaaatattttggtcctaagctcttcccacaccctggtcatggtgtaagcacaagtgtaattgtgggacatattccctttcttttgcatttagatagt

SEQ ID NO: 2280 - DNA, 437 bp, Homo sapiens
  I.2280 (AI926656)
tcttgaaatggagtttcactcttgttgcacaggctggagtgcaatggtgcaatctcagctcactgcaacctccacctcctaggttcaagacattctcctgcctcagccttccaagtagctgggattacaggcatgcaccaccactcccagcaaattttgtatttttcatagagacaaggtttcaccatgttgtctaggctggtctcaaactcctgacctcaggtgatccacatgcctcggcctcccaaagtgctgggattacaggcgtgagccaccgggcccggcctagactgtgcatattctcttgaagtgtgtgtataataaacaaattaacaaaaaaaagaactgctttaaaatgtatatttaaaataaaatagttttaactcaatcccattttctgtgatatagttagccatactggttaatttctcaaatca

SEQ ID NO: 2281 - DNA, 515 bp, Homo sapiens
  I.2281 (AI926605)
tttttttttttttttccgtttataaagaagagaggtttatttggtccacagttctgcaggcagtaccggaggcatggcagcagcatctgcttggggtcagggcctcaggaagcttaccctcctggtgggaggggaagggtagcagaggtgtcccacagtgacagatggagcaagagagaggagctaactaggctctttctaacaatcagatctcatgggaattcattaccacagggagggcaccaggccattcatgagggattggcccatgtcacccaagcacctcccaccaggtcccacctccagcattgagggtcagatttcagtatgagatttggagaggacaaacatccaaactgtatcaaccaccctacatgaaccagtgcctgcctttctgacctccccactcactctgctcccccttccccacactccccctccttgtgcttaaacaggccatgcagttcccacccagatgggaacgcagaagtgctgagaagcctctggctgctgag

SEQ ID NO: 2282 - DNA, 619 bp, Homo sapiens
  I.2282 (AI926561)
tacaactcgattctttttaatataagaactcaattagaatacaactcagttctaatataagaactaatacaagaattcataatgtgaaaacttatattacaaacggaaggaaattctgacacatgtataacataggtgaaccttgaaaacattatattaagtgaaagaacataatagatagtgatgaaaagataaatcaatttaaaaatgggcaaaaatatgacagctattcctccaagaatgatatatgaatggccaataaatatataaaaagatgctcaatcattagccattaggaaaacgcaaaccaaaaccacaatgagatatcattttacacttactaggatggttgtacaaaaaacacaaataataccatgtgttggtaagaatgtagagacattggaacccctcatgtattgctggtgggaatgtgtattggtgcagccactttgggaaccagtttggcagtacttcaaaagagtaatcatggagctactataggacccagcaattccactcttatcaatgcacccaagataaatgaaaacatatatccacacaaaaactggcacacatgtgttcatagcagtgttatttataaatagccaaagtatgaaca

SEQ ID NO: 2283 - DNA, 485 bp, Homo sapiens
  I.2283 (AI926484)
tttcaatttttaaaatctttaatagtgtctctgaaaaaaaaaaattatccatggaaatgctcagaggagaatcacagaacctcagtgtgagcaaggaagttgacagtggccaggaggcacccaggcagtccccacaggtggccatagcacctccatctccaaagatcactcataggcactatctcatcctgctcgctctcccaaaacagccaccctgggcagcatcccgcctccccggcaaacaggattccttcaccccatggctgaggaggaggagccttttgagagacccaagagagtccactgtcagaggtggggacagtcagggagctggctgagaacattccttttgggagtgcgagcctcctggctgacatattggaaaacaggtggggattctcttgatggacagtgactgccacctttctggtcagtccacacgcctgccttgtgtatgaagtcttacgaagcatagctattcactg

SEQ ID NO: 2284 - DNA, 256 bp, Homo sapiens
  I.2284 (AI925993)
ttttgaaattggagtaaaagtttaataagtgaaagaaaaaagctctccacagtggagatggggatccaaataagttgcccagtatgaggctggggtccggggtttttatggactgggaaggggaaggaatgcacttagcctgcgggctgtcttggagaaagcgtgattcagcttggtctgggaccttggcccgggaccaatcaggaaccgaagtgatgattcataagggctattcagcttggcccgggaccaatca

SEQ ID NO: 2285 - DNA, 298 bp, Homo sapiens
  I.2285 (AI925978)
ttttttttttttttggatttttactagagacagggtttcaccatgttggccaggctggtcttgaattcctgacctcagatgatctacccaccttggcctctcaaagtgctgggattacaggcatgagccactgtgcctggccaaattaatttcttttgcatggttgctttcaccagtagtggtccagaatacaaaatatggtaacagagaactgttttcatacttattcttggtacagttattaaaaataaaaactcgcatttaggattgggggaagtctggaaaaaaattttttaac

SEQ ID NO: 2286 - DNA, 587 bp, Homo sapiens
  I.2286 (AI925923)
ttttttttttttttttaaaaccttatgctttaattggagtgcctaatctatcctttttaccctattacaaatccagcaaaagtacagtactcatattcagaaagttctttattcataaaatttagttcatgtctagatttattcataatcttaaatttagttcatgtctagatctttgttaggaaatatttatacatactgaagaatataggtacagtatatatgaaccccgtgaacccactgcccaacttaagagctagatcgttaccaactgggtgggatctgcactgtgctgctcccctattgtaagcacccctctctttgaggttcaaatcatgacattaaaaatgttaacagtttgtactggtctcatttctatgccttccaaaaggaatacatacagttgtaaggatatcatctaagaacatatgtggaagtttatttttttctttaaacactgtatgtgtttaaggaaaatggctttggagacataatcttcactttaatatagtgacaaggtttactgctctgaagttccactagatggagacatttcatcattaaaaataacaatacccagctcctcc

SEQ ID NO: 2287 - DNA, 683 bp, Homo sapiens
  I.2287 (AI925740)
  misc_feature (458)..(458): n is a, c, g, or t
  misc_feature (538)..(538): n is a, c, g, or t
  misc_feature (605)..(605): n is a, c, g, or t
  misc_feature (613)..(613): n is a, c, g, or t
  misc_feature (624)..(624): n is a, c, g, or t
  misc_feature (625)..(625): n is a, c, g, or t
  misc_feature (642)..(642): n is a, c, g, or t
  misc_feature (651)..(651): n is a, c, g, or t
taagtgagcatttcttctttatatatgatgtgttcaggtaaataatcaggccttttgaagaatcacacaccagtttccttgatcgtagtagctttgcagaattctgacatcactcacagtcctgcaggcaccttccagttctccctcacggaacacatggtagtaacgatgaaacacaggacttgggtcctgggatcctatgggaccaaatggctcaacaggtttgcctttatcaggatttcccttaaggtgccagggaaccagtacatcttgagaataaaaagaagtcctgttaacatgaacaggcagcttggaattagaaacttgccttgaattacatcctccttcctgagagtcattaatgcgggggacagaagatgccgagtctcgactgcccatgtcacgcatttgctccacaagtgacctctgcactgaggtatcactgttcatctcctctntctttccttggctatttctgtttcctctaagatacttggacttctgcttattatattcttgttccattgcccagacatanatgagtgccttcccacctggtctcaggagtcgaacaatttcttggagagctgccactctacgctctngctgtganaatgatgaatnnacagcatggagatgcangcatcacangacccactgcggactggtactgccaatgcatc

SEQ ID NO: 2288 - DNA, 377 bp, Homo sapiens
  I.2288 (AI925642)
tgagacaggcaatcaaaaagcatgctgatgccaaaataccagaggacgattctgcagaggcattaagataacgctgtccagatacatactctcccgtgtgcatctgggatcctgggtcctgaggcctttcaggagtcccacagaactaccttcccgagcgtcctaagccgccaccagccttgctcactctcattctcacagagtgcacagcagaggcctccgtgggctgcaaggcctgtgatatcacaggaatgaacgcgagattcgagagcctatcttttatcaagccagacattaagatatttgcaaaaatgtaatgggtttttattgctaattaactatagaaatattttaatactattttaatttctaatatg

SEQ ID NO: 2289 - DNA, 432 bp, Homo sapiens
  I.2289 (AI925571)
aaatataattgggatataattcacataccataaaacttgttcttttaaagtatataatttagtgatttttagtatattcagagttgtacaaccattacctaactccagaacattctttttttgtttgtttgtttttgagacaaggtctcgctctgttgtccaggctggagtgcagtggcacaatcttggctcattgcaacctctgcctcccaagttcaaagtgattctcctgcctcaacctcttgggtagctgggattacaggcacccaccaccacgcccggctaatttttgtattttcagtagagacagggtttgaccatgttgcccaggctgggagaacattcttattactctaaaaaaaaaccttgtacccagtagcagtcatgccctccttcctgcctcccgcagcccctggccaccactcacctact

SEQ ID NO: 2290 - DNA, 445 bp, Homo sapiens
  I.2290 (AI925528)
aggagaaacaataccatactttaaatttttattaatttattttaacaatttatattaagaaaatttacatcagcataggagaaacaataccatattttaaattttaatttattttaacaatttatattaagaaaagttatatttaatgtgttaatttattaattaaaaatccaatctcttccaaaaagatgacaattgaatacactgaacttttaattaacttgctgccatttaagagatcacaaaataatctgattttctatacaggcatttttaatagtaaatttaaaaaaactgaaatgctgattttatgcaaggtatctgtaaaaattatttattggtgcttagatatgcatttatttaagagcccttataccctgcccccacgtttagtttccctgttgttccaatgccgatgattagcacattctaattgacaattgat

SEQ ID NO: 2291 - DNA, 499 bp, Homo sapiens
  I.2291 (AI925477)
ttttttttttttttgagctagagcacatgtttattaccattcagtaccccttatcaatatcccaccaatattctcagtctggagtgaaaaaatacctgctacaagcatttgttttttgaacaacatagactttatcattccaaatgaacaatggcccttcaaagcagtccccttgttaggatctgccttcaaagagccttcagagccagccaagaagctgtagcagagagacagcagtctcatcacttacaattcagactgtgagttctgatcccaaactgctttacatggtatattcaccccatggtttggtaatgaaatgacttttggctgtatccaaacattaaatccattctctgagatggagatgtgctatttcagagaaagtgatattcaaaataacaagctactttcaaattagggaagaggagaacagattaaaggttcttgctcttgcttctcctttaacaaatgaattagggacagctacccaaactga

SEQ ID NO: 2292 - DNA, 482 bp, Homo sapiens
  I.2292 (AI924806)
ttttttttttttgagatggcgtctcgctttgtcgcccaggctggagcgcagtggtgagatcttggctcacagcaacctccacatccccagttcaaacaattctgctgcctcagcctcccgagtagctgggaccacaggcgcatgccaccacacccggctaatttttgtatttttcagcagagatgggggttcaccatattggtcaggatggtctcgaactcctgacctcatggtccacccacctcagcctcccaaagtgctgggattacaggcgtgagccaccacgcccagccatcagcctgacttctatagtcttaatatttattaatcccataaaattaatcctttggttattcaaaaatatgaaaaggaaatatgattcttaggagtgcatcaaatggtttacatttttataggttgctttattggctctgacttttgcgtaatgaggttggtctattaaaagtgttttttctcacaga

SEQ ID NO: 2293 - DNA, 287 bp, Homo sapiens
  I.2293 (AI924733)
taagccactgctttacttcttcaggttagcaaaatgcttaggtaaatttgttggccatcacaaatgtgattgaggccaccggtttctatcatcaaatgaaatcacaatgacaggtttctgacaataaactcaacctaaggggagcgctaataaattcccttcccagcctcttcttgggtgtgtggtatgtgtgctgcctactgaaatgcccaggatggccaccctcccacacgggatattctaagccgctgacaccatctaacttttctgaaagaaattaacaactc

SEQ ID NO: 2294 - DNA, 391 bp, Homo sapiens
  I.2294 (AI924569)
tacaaaataaactgattttaatcagaaagataaattatgataaacattttctacaattcataaccatttttagttttccaatatattttttaccaagtaacaacagtaaaatctgagcataaatttgttaaaaatcaaaccacatttgcctcttaactagtagaatcaaatatcactaacaaaaacatctaattaatcccacatttatgactcatacattgaaacattttaatagtataatagtacttttcacttatagctaaaatatcaaaaacacatttatcataataaaacatgaacatttccaatttaatcacaatatatccaaggatttacctactctcccccatttataaattcctcctataaaagttattgaactcttacacag

SEQ ID NO: 2295 - DNA, 518 bp, Homo sapiens
  I.2295 (AI924558)
ttttttttttttttttttgttttcaaatttttattgtgacccacaatatgaaatacattatggaacagacacatagaacacttagacacaaataaactaagtatgtttcacaaaaacattacgtactttactattatattgcactctgatatttttctacttgacattattatagtctcttctatgctattcaattttaaagaaatgctattagagagctgctaaatttgttttatgacctacagctttaaaaaaatctgactgtaaagaaactaaactaaggggaaaatcaataaaaagtgaggtaaggtctcaattaacagatggtttcattacaaagtatgaaacagatatgtttatatattgttattggtagacttgatgcaatgtaatgtcacaacatcccaaacatcttataccgttacacctccatgcctttcctcatgctaaccaaaatgatcttttaccttcactgtctccctctgaagaaatctgattcactcttctagggaaagctt

SEQ ID NO: 2296 - DNA, 643 bp, Homo sapiens
  I.2296 (AI924296)
  misc_feature (567)..(567): n is a, c, g, or t
  misc_feature (583)..(583): n is a, c, g, or t
  misc_feature (635)..(635): n is a, c, g, or t
gctcaccctcagcagctcctcagggaggtccccgccctcgttgatgccgcggttcatggcgatgaaccgttctgccgtgggcttgtcacgcacgttgtggttgtggaggctggtgttgagcatgatgatggcgaatgacagcacgtagcacgtgtctgcaacgagtccggggtgctgggctcagccagaacctccagtggacagtgggaccccgcgtgctgggggcccgcctgcaagaggtgcccggcccacaggtcgtcctcgctcagggaaggcaggtccccaggaacacacgctgggctgtgcccacaggggccgccccctccagagctggaggctgtgcctggcaaggggccaggctgtgggctctgcactgacctgtggactggaagaccccggggttgcacaggcagtagcgagaagcgaaagcctccatcatgcgatcaatcttctgcgcctccccgggcagcctgaagctccataagaactgccttaaggcttgtacaaggttgagatcagcaaactcatggagttcaacaaaggcttgaagaactttaatattaaatncatccctttcacccangtagtccccaatgacggtcttatttaagccttctcctttataaacgaactgngcgacgtc

SEQ ID NO: 2297 - DNA, 478 bp, Homo sapiens
  I.2297 (AI924228)
  misc_feature (188)..(188): n is a, c, g, or t
  misc_feature (190)..(190): n is a, c, g, or t
caattttttaagtcacattatcccctaaattctcattgtgtaagattcaaacaacatagaacacaaagttctcctttggccagctccttctgttcccctccctgtttgaattctcatgaggcttgatctttaacattatcatttctgtttgtgtattccttaggaaggctaagattatgaaaatattntnaatggctttgtttttatgcataactctataaagagtttcttcctagtccatgaagaactttactttggaggtggtgttaaaaaggctgtgtaggccgggcatggtggctcatgcctgtaatcccaacactttgggagcccgaggcaggcagatcatgaggttaggagatcgagactgtcctggctaacacgatgaaaccctgtctctactaaaaatacgaaaaaaattagctgggtgtggtggcgggcgcctgtagtcccagctactcaggaggctgaggcaggagaa

SEQ ID NO: 2298 - DNA, 597 bp, Homo sapiens
  I.2298 (AI924075)
tttaaaagataattctttttatttttgagacagggtttcgcttttgctgtctaggctggagtgcaatagcacgatttcggttcaccgcaacctccgcctcccgggttcaagcaattctcctgtttcagcctctggagtagctgggattacaggcgcacgccaccacacccggctaatattttgtattttttgtagagacgaggtttcaccatgttagtcaggctggtctccaactcctgacctcaggtgatccaaccgccttggccttccaaagtgctgggattacaggtgggagccaccacgcccggccaaaagataattcttatcccactcttttgtatcccatcccacatagacagactgtttttttttccttcttctgttttgaacattaaattttaatcccctgagggggtgcactgttcctggaggtactgcaataccagatcgatgcgtgaagtgaacaagcaagctcctattccgtcttcctgctccccaaatccatttaatatattggactcggatagaaaatatatcagattttaaactggtaagaacagatccctcacttgatcttagccccaaggcagagaaacg

SEQ ID NO: 2299 - DNA, 468 bp, Homo sapiens
  I.2299 (AI924059)
ttttaatttagaaagtttattttgccaaggttgaagacatgcccagtgacatagcctcaagaagtcctgatgacatgtgcccaaggtggtccggccacagcttggttttatacattttagggagacatgagacatcaatcactatgtaagaagtacattagttccgtccggaaaggcggagacaggttaaagcaagaccccctattgggggcttcgaagtaacaggtaggtgagagacagatggttgcattcttttgagtttctgataagtctttccaaaggaggcaatcagaatatgcatctgtctctgtgagcaaatggatgacttgaatagaatagaaggcagatttgccctgagcagttcccatcttgaagggacccaagatatttttctttcacattttccccttttcttttttaacatctttggagaaagcatttttacaacagaatgagtctccagtctca

SEQ ID NO: 2300 - DNA, 554 bp, Homo sapiens
  I.2300 (AI924028)
ttttttttttttttgcattctgaagtcgtttttattcgataactaacaccataataaccagagttccatctgagaggagaggagagtgagaaggggccagaaccctttggtggctgagaagcctcctcaaggctatgttggggcagtagggaggcagagaggtgaagatcttagggaagcccctgacccagcctaggctgctgcccacagggcaggaggaaagcccaggaggggagacaagacctccctgttgcaaccaggaggctgagcaaggcactggtgtttacagcccacagcttcacccgggaggggcgagggctcctgccctgcgagagcctttaggtgtacagttggggaaagggcagttcagctgttggctggagccagttctccgggctccaggtggtgccagaggcctccatgaggtggaaagtgtaggcctggcgcgagcggtcagagaggttctgcttgctcttgtgtaccacttctgcatggatgaagaccagggcccgtctctgcactgaggtgggcacaaagaggctgttatccccggc

SEQ ID NO: 2301 - DNA, 422 bp, Homo sapiens
  I.2301 (AI923935)
  misc_feature (399)..(399): n is a, c, g, or t
aagtggcagtactgcagggctgacagaatctgcctgaacatggtccgggcctcctcttcctcctcgatgtggccatagtggtatatctggtggtgcaactctcctcctctggtttactccctcaccacctggaagagctgaatgatatttgggtgatggaaagtcttcaagatggcaacctgggtcccagttggcctatgctgagccagttccctatcagatggtgtctatgaactgatagttttgtatctccttgtcaagtgaggtggagggtgatccctgctccatggtgcctcccaactatactgactacaaatcctgcctctaaaagctatgctgtgatgcacagcactaactgtgctagctaggctaaggccactgtcggtgacaataccccangctccaaaccctctgggtctgag

SEQ ID NO: 2302 - DNA, 249 bp, Homo sapiens
  I.2302 (AI923559)
tttttttttttttttttttttttttttttttttttttttttttttttttttagagggggaaagatttttttaaaaaaaattcccccttttactttttttttcctttttaaaacccccccccccaaaaaaggggcccccaaaatttttaattcaaaaaccccctttttataaaacctttccgagattgaaggggaaaaaatttttatgctgggcaaaaaattaaaagggggccccccccggggcccgggg

SEQ ID NO: 2303 - DNA, 232 bp, Homo sapiens
  I.2303 (AI923479)
tgagacggagtctcactctgttgcccaggctggagtgcagtggcgtgattttggctcactgcaacttctacctcccaggttcaagcgattctcttgcctcagcctcctgagtagctgagattacaggcatgtgccaccatgcccggataatttttgtatttttagtagagacggggtttcaccgtgttggtcaggctggtctcgaactcctgacctcgtgatccgcccgcct

SEQ ID NO: 2304 - DNA, 483 bp, Homo sapiens
  I.2304 (AI923397)
tttttttttttttaagaaggaaattaagaaatttattgcaacacacagaaatgaaaacacaatgtaccacaacctatggaacacagcaaaagcagtgctaacagggaaatatatagcagtaaatgcctacatcaaaaaaaaaaaaaaaaaaaagagaaagacttcaaataaacaacctaacaatgaaccttaaggaactaaaaaatgcaagaacaaaacaaacacaaaataagtggaaggaaagacattataaagatcaaagcagaattaaacaaaatagacttaaaaaaatacaaaggatcaacaaaatgaagttgctttttttacaaaaatcttttggtcttcaacttttaagttctggggtacacgtgcaggatgtgcaggtttgttacataggtaaatgtgtgctgtggtggtttgctgccaaatcatcccatcacctaaatgttaagcccagcatcgattagttatacttcctgatgc

SEQ ID NO: 2305 - DNA, 313 bp, Homo sapiens
  I.2305 (AI923376)
tttttttttttttttttttttttttttagcattacatactttacttttcaatccttagtattcacagtttgagctaggaattaacatttgctaatctagttggactcagtttttcccacaatgctctattttctcacctagttttgacaaatttattccttctcttcccaaatactaggataagagacaggctcaaactggtaagttgcaaatttcttgggggttctgctttattatttccttgatatccacagcagaaattcagagggataacttcaacattaacaggggaaaagttctacaatgacttggt

SEQ ID NO: 2306 - DNA, 479 bp, Homo sapiens
  I.2306 (AI923251)
tttttttgagatggggtctcgctctgtcgcccaggctggagtgcgtgcagtggcacaatctcggctcacggcaaactctgcctcccagataccacacaaggacttctccgagccagctttctgagggttaactgagggctgaggggttcaagaaggaggacacgggcacagggactcacgggcagtgagaggcagtggggccaatggcgtgaggagcaccagagagcaggagggaacgggcccggggcgtgaatccggccccatgagtgctcttcggccgcccaaaaccggtcccatgggtaacagcgtggccttcggcaagtgactaaagggcttcctgcctcagcttccccacctgtaaacagaggataacaatggcatgtactggatctggcataaagtaaatgttcaatagatagctagaaaagaatgttttaaaacctcagagatacattaggcgaaaataaaagctgggctac

SEQ ID NO: 2307 - DNA, 432 bp, Homo sapiens
  I.2307 (AI923241)
gaataaattctggcacatttaattcaaagggataatacataataacaaaaatgaatgaaataaaactacacataactacatggataactcttcaaaacataatgctgagcaaaggaagaaagaatacacgattcataaagattaaaatgaggcgaaaaaagtaaacatactgcttaggaatacacgtaaagtgacaaagttatattaaaaattgtataaataattaccattaaagtcatgatactggttacctctaaagaaaagaaagcatatcaagagtttctgggatgccagtaatactctaaggttacaaagatgtatgctaaatatttaatttataattattcattgtattatatattaatgttcctgtatcactatattttacaacaaaaagttataattatatactttctaaaataatactaatat

SEQ ID NO: 2308 - DNA, 539 bp, Homo sapiens
  I.2308 (AI923201)
  misc_feature (243)..(243): n is a, c, g, or t
tctgatgcggttgcgtacgttttcagcgcttcccgctctccaccggttggactgaggcttttaaactgcagtctgctcccgagtccggcttcctactcggtctggtgccccctggtgctcgtcccctccacatcttgagtagttgcgaagagcacaggggtccaggcagacaaggatgctttcaagaaaaacattccatggcggcaagccgcatggatccacatttcccgggcccagagcctntgtagacattgcatgtggacattcaggagctctagagaaagagggggtgttgtttcacgaagccaccagcagaagaaaggtggaaaataagtttcaaccaactacaaaggcagaagtcagcccagccccccaagtgtggtcaaagacccatagatccgtagaccttatcttttcttgaatccaccgctcccccaaccccccttttattatttttcagacaaagcaaagatagagttcactaggatccccgatttcagtaaggcagcccttttttgagagccagaatatccgtctcg

SEQ ID NO: 2309 - DNA, 494 bp, Homo sapiens
  I.2309 (AI923117)
attatagtaaatttattttgtataaatacatattaacattatttacaatgctaatttttttatttataaagtatctttatatggacaaaaagatacaaactgttatcattttaagtacaaagtatttctagaaatacattataagccattaaaaaaaaaacgatatttcaagattggttcttacatgctatgaccaactcatatgaaagagcaagttgctcccccttcattccttcccccaactccaaagggaagggaatttgatatttaggctttaaaaaatttcctactacctttatcttttaaaaaaccctactcaaaacaactatctcttataagggaaaatatcatagataagattttcctttagaaaatgacattaaaagtggcatgagccctagaatgatatgtgtattagaggcacttaaaaaaaatcagaagggatccataggaaggaatttaattcagcaaatactgagtgtccactgcatgca

SEQ ID NO: 2310 - DNA, 416 bp, Homo sapiens
  I.2310 (AI923039)
tttttttgctcttgtttttgtactttcatgttaatttttcaatcaacttatcaaattttgtgggaaaaaaatggcattatgtttagaattataatgaatgtatggatgaaattggagaaggctgacatttttacaatatcaattctttttgaccatgaagatagaaaaactgtggtggccagaattccaagatgaccccagtgatccttacccttacataatctcctcccgtgaataagtcactcccggaattgggatatgttaggtggcacacaggacttttaaggatgggcagttgtcctggtgggtctgacctaatcaggtgaaactgtaaaccacacaggcttttcctagagattcaaagggcgagtgggagtcaatgtgaggcagcttctttgttgctgactttgaagatg

SEQ ID NO: 2311 - DNA, 452 bp, Homo sapiens
  I.2311 (AI922714)
tttttaacttaatatatacttattttaatattttttatatttttatcaacataaaataggtaaatatagttcacatacaataataaatgctaaaacatttacaaattaaaataaacataaaaccaataaaatggaaattaaccatcattaacataacaaataatgctgttttgctcaaacaaagtagatcacaagtatttggtttaatagcaaaaagctgtagtttcagatcccattctgtaaactgagtagttttactttaataataatgttgagaatgcttgttcacctaagtatcttattcaaactggtattgatcaattcaagcctttctttcctctttcaaggtaattagaacataatatttttctttcttttgagactgactctcgctctgttgctcaggctggactgcagtggtgcaatctcagctcactgcaacctctgcctcc

SEQ ID NO: 2312 - DNA, 537 bp, Homo sapiens
  I.2312 (AI922696)
ttttgagacagggtctcactctgttgcccaggctagagtgcaatgaaacgatcatggctcatcacagcctcaaccttctgggctcaagtaaacctcccaccttaacttcctgggtagctgggaccacaagcgtgcactcccaggccaaattgttttttcctttttgtagagatggggtcctaccatgttgcccagactggtcttgaactcttgaactcaagcaatcctcccacctcagcctcccaaaatgctggaattacaggaatccaacatttttaatacagtaaaccaaacaatttctaagtttacaatttatcacaatgcttaatgattaaaagttgaataaacttttctaatgcagtacacctggtttcacagaaaacaaagcaactcttaaacaccagctggcaaaatgatagggcttttcctttgaattagtcaccacaggtgtgaaagacagaatgactaatccatctgattaaacatagaccttttagaaatcaataaccttatttacacagatgacaattgctactg

SEQ ID NO: 2313 - DNA, 750 bp, Homo sapiens
  I.2313 (AI922371)
  misc_feature (706)..(706): n is a, c, g, or t
tttttttttttttttttttttttttttttttttttttagtccaaccatttttatttcaagggggttttaaaaatcataaacgggggttcataatccaaagccgaaacctttattcttcatagcttcaaaattgaccagcaattggagaccctgccttccaaatcccgccttctttgctatttttcaaatttctgaaatctagtataaaaccgcccccttctaaatggcccgttttagataaccattggccccttggtgataaaagttttctgaaaaccgcctatcaaatttaaagaatgggttctatcccaaaatcagccgggagggaagaaatcccaaacccccgtcaagaaatccgttattcattttaaaaaataaccgaacccgggctgctctctggcataaaaaagaacctggaaaatttatttttataggcttggggaacattatattccccacagaggccttcaatcctacttaaagatattttacacacgcggaccctcgggtttaccggggaaaaatctcaggtgttaaccctggccctaaagagtgctgttcccaaaagggacgggtgccttttggggaaaaacgccccttggtacctccctcccatgttatttcaacaaaaatggtggggggaggatttttaaacccccttggagttatatggctgccggcctcaagcaaaaaggaatcaaacctnttgccctgtaatgggtgcccccctcctgttgaaagacactcgcg

SEQ ID NO: 2314 - DNA, 426 bp, Homo sapiens
  I.2314 (AI922221)
ttgtttcatatttttaatagatactacatttatatgactcaaacatcaaaactactcagttccccagggccccaacaggaaataaccagtggttgataatttcttttttaatgcagatatttttctacatctacaagccaattcatattatcttccccctctttttgacacatacaggagcgttttacaaacactgctcttcccttgcttgtcttccttagcatgtgttagagagctttctgtttcaatatctagagaacatgctcattcattttacatttgtatggtatcgcacactaggaacaaccatcatttatctaactgtgatgcacatgttggttgtttccagtcttttaccattaccagtcatgctgctgtaggggccaagcttcccacttcctcctctgaaggttcactgacaaaagg

SEQ ID NO: 2315 - DNA, 296 bp, Homo sapiens
  I.2315 (AI922100)
tttttttttttttttttcctccataaaaataacatttatttaaaaaaattacacacagtaaaattcatcctttttagggtacaagcctatgggttttgacaaatgcatatacttatgtaactacaataaagacacggaaaatttcaattattaagacaaattcctcatgctaccactttgtagtcaaggagcattccaaccttaacccctgacatccactgaagttttttctccatccctattgtttggctttttgagaaaataatatgaatggaatcaaacagtaagcagccttt

SEQ ID NO: 2316 - DNA, 508 bp, Homo sapiens
  I.2316 (AI922007)
tttttttgcttttagaaaacttgttaaagtttcaccttctggctttggaagatgggggtagctaggcatatttacttttagacaaggactgagtcacacattaactaccttcttaactatgagattattacaaatatattttacaaatacaaaaaactgaagtacagagaggctaagttaatttctccaaggtcccacagcaagtaactgcagaagggcaaagcaaaaataggacaacacatgtaggcaataccaagcagttcttgtggcagcaattggaaaccttttggagacaccattctgcatttcgttgtagtcatacacaaaaccctagttatgtatccatgcttctttctcataatgccaaagtggcactattctaatttactaacaaggttttctaaaaactacccaaattattgaggtgtttttgctcacttcttcccattagaataaatgtagacaataagaaacgcatgagggatgacatagtcctccatcaaatctg

SEQ ID NO: 2317 - DNA, 463 bp, Homo sapiens
  I.2317 (AI921629)
gagaaagtcaaaaaataattgctttatttctctgtttcattagtactaattcacaggatctttgtaggttttatctgaaagaaggatataaaaacttaaaagtcagagcagggaaagggaagtaataaattattaagaacaaactcagtgagacttgacttcacttatgatacatgggtagaaagagcaaaccagccttcttcattctgtttctcaatctttgctcttggattaagaggtgtgaatctcccacttcctgaggtggcatttagtggagaacaagaattaccagtagccccggaagatcttcttgtatttatcccgctgacgggagagacagtactacattttgagctttctggggcttctgctcctggaatagatacctcaattgtcctctttgctccttcagtccatgctctgagaggtaactgaacaggtgacattggtggagaaagattca

SEQ ID NO: 2318 - DNA, 495 bp, Homo sapiens
  I.2318 (AI921613)
ttttttggtccattctgccaatctgtatcttaagtggagcatttaggccgtttacattcaatgttcatgtcgagatgtgagatactttctccgtcatcatgttgattgttacctactttattttctcattgtattactgttttataggcctgtgagttttacgctttcaagagattctattctggtgcacatcaaccttttgtttcaagttttagaactcctagcattcttgcagggcttgtctagtagtaacaaattgcctcagcatttgcttgtctgaaaatgactttatttctccttcatttatggaacttagttttgcaggatacaaaattcttgcctgacaattattctctttaaagagactaaagaggtcaggtgcggtggctcatgcctataatcccagcactttaggaggcaaaggagggcagatcacaaggtcaggaaatcaagaccatcctggctaacacagtgaaaccccatctctactaaaac

SEQ ID NO: 2319 - DNA, 446 bp, Homo sapiens
  I.2319 (AI921525)
aggataacagtgtttttaatatttaagtaacaaaacattcaggttaatactcaatgcatatacaataagatagagcaacaacaacaaaattacaaagcacaatctaactatatggaggctttcaaacaattaaatgttggatagagaatgcgctaattaaaaacccagctgagccacaccgcactacctgagacctgacccaggactttctggtggtagaagggagagctcattgtgccctgtggccttcaactcaaatggatgctcttcaactcaaatccagagagcacttaacaaactccatgctctagattgctcaaccctcctccttgcttttcttttttctttagttgacttgtctgctcatcctttacccaaactgaggcagtgagttccacaaatacttcctctggtttggtttaaatgttgctgtctcagtgagaagg

SEQ ID NO: 2320 - DNA, 419 bp, Homo sapiens
  I.2320 (AI921368)
  misc_feature (407)..(407): n is a, c, g, or t
ttttgataacttctttattaagatataatttgcataccatacagtcctcccatttaaagtgtatagttcaatgctttttatccacagagctgtgtaactatcaccacgaccaattttacaacacttttatcaccccagaaagaaaccccacaccctttagcagtcaccacattccccaggctcccccaaataacatgtatctttgaacctttctcatgccattgtgataccatctacgggtctttaggccatagaacacacaccttgtacatttggcttcattggaacctcactcccacagagcagctcaacttttctttaccaaaacatagtcccacaggtcctcctagggtaaactgctcatctcagcagtcaggataacttcatctctgtctttccttacaagncgatgggtaatc

SEQ ID NO: 2321 - DNA, 613 bp, Homo sapiens
  I.2321 (AI921300)
  misc_feature (499)..(499): n is a, c, g, or t
tttttttttttttgcatccaggtggggttttattctaatgctgcttccctagcaccgagcacagccctgcagtgagctctgtcatgagaagaaagtgactggccctgccccatgcgcttacagtctaagtcaatcaacagatcaacagcaaaccaggcagggaacatggggagcaggaggtgaaaagtagagagagcaggatttgcttttcttcatttctccttagagatgtggggctgtcttcctgagtttcttcatcaggtgctgcctcagctgattcaacctaggaggagcctgggtagttctggcagcccccagctgtggagccccgggtccagtggccgttgaacaggaccaggttccatttgtgcacctcctcgctactcagagagtccggggacaggttgcagatctccaaccgagagaactgcctcacgaaatctgaaagtgacatccagaattctccatcctcaactttcttgtccagttcttccttccngccggggtctatgtgattccactctggtgcatcatcgctccaggctcccgaccacttcacttcaccccatggattcctgagtctgatcagcttctctggatgcccctggaaatc

SEQ ID NO: 2322 - DNA, 251 bp, Homo sapiens
  I.2322 (AI921158)
tttttgtatttaacatagcttatagttttatttcactttacattacattcctctttggggaaagaaaaatacagtttccctcagctagaaaaaaattcattccaactcagaagattcaaacttcaaattcagatttggtttcaaataacactgattgaatacctgctgtatatcaaacagtggccttgggctttcacatatgtgacccttcttaagtgaactcttttggcttttttttttttttttttttg

SEQ ID NO: 2323 - DNA, 153 bp, Homo sapiens
  I.2323 (AI919567)
attttttattttttattttttattttttattttgagacagggtctccttctgtcatccaggctagagtgcagtagctttttcctggtctatgtaatccagaccaggaaaaagccctttacagccagtgtggcatggtccagggcagctctagc

SEQ ID NO: 2324 - DNA, 252 bp, Homo sapiens
  I.2324 (AI919520)
taaaaatacctatttattttcccagtatttatggagaccacagattttacaggtaagccagcaaagattagtagtgattacctaattttctattccattcaaaataaattcccacttccaggagactaaaatatacaatgaatgctaagtctagacttctgcaatccaacaattctttaaagatctgagaagtaaaacgtttgtctaaggaaaaggaaatgtagcatcagctagtatctgtgctaccttttt

SEQ ID NO: 2325 - DNA, 239 bp, Homo sapiens
  I.2325 (AI919409)
tcaacagcaactttattcgtgatcgccaatagccagacacagctccaagtgtccatgaatacagcagataaacacaccggtgtgtttacactggactgcttggcaatcaaaagaacaaactcctgagacatgaaacaacacagaagaatctccagaaacatgacgctaagggaaagacgccttacacaaggacatgtacccaatgatccattagtatgaactcttagaacaggcggaag

SEQ ID NO: 2326 - DNA, 281 bp, Homo sapiens
  I.2326 (AI918834)
agccaaaacaacatttattatagcaggttctgtgggtcaggagttcaggtgtggctgagctgggtcttctgtctcagggtatttcacaaggctgcagtcagccagggctgtggtcacctcaaggcctgtttgggggaaaatccacttccaagcttaccaatgaagttgttgtcaggattcagctcttcatgtgttgttggaatgatgacctcaggtccgtacagaagtctgtcctcaattcctcgccactgagactctccatagggcagctcaaaacaagg

SEQ ID NO: 2327 - DNA, 402 bp, Homo sapiens
  I.2327 (AI917754)
ttttcgttttatgcccctgagattttattatagttggttacacagcaaaagctgactaatacatagcatgaattatgacttattttagctcaaaaggtacacaacccagggttttctctatcctaagttgcttttctctcatataatctatcctgaggacacagtctaaaagacgactttcctcctaaggccctgctttcctaaaagctatcaactcttaaagcaaaataaacaaataaaacctcaggacaggacaaattattcaagtattttctttgaaatacacacgaaaaacacatatatagagaaatgtttgaaaacagaatattacctctaaacggggaaaatttcactcaatgctcactatagaaaacactcttctagcagggcactttttttttt

SEQ ID NO: 2328 - DNA, 466 bp, Homo sapiens
  I.2328 (AI917653)
  misc_feature (242)..(242): n is a, c, g, or t
tagtggttaccattttattgctattatttaaggaccaccaggacatggatttttcagaagaggaacttgaggctcaggtcgcctgccttctcaagcaccacacccttttgagataacacagcacttttatatctgccatcttacagcctcatgaaggtatcgatctcattctcattttgcagataggcaggacatccaaggaacctatagacagtcactcccccatagccagtctctgtggnggcttctcaactccaggaggaaagggagtgaggctggattccaaggcaagtttataggcataaagacacccctccgacttcctcccctctattggcaggagaaggggtgcatgcatgctcaggaatcacggtagagaccacatcctgtgctttgtcgccacccaggaagtatatcggagaggctgggtggggtgaggctggtgattccactgggcctccccaga

SEQ ID NO: 2329 - DNA, 507 bp, Homo sapiens
  I.2329 (AI916293)
gccgggcaatctcgccgccctggtccactcgtccgacgcccctctcagttggacaatcgctttacggagcagctacggcgaaaatgttccttccctacccccattctcaccggttgccagcaacctggagacgccgtcctctctccggtgcagggagttccggaggatgcggggcggaaaagcaaaataccaccctctctcgaagctccgaggcaaatgacgataaacagcactctcgccccctcctaacactatgggagcccttgattcgatcccgaaggaggcgggcgggcgagagcctggatctacatggctctccagttcccttcgctctccgcaccccagcgcggacctcgccaaggctacgcggcgcgccaggagcccttaggagcttggagtggagcagggtgcgtgcggcggcgggtccgctcggtccatttctgggcgctgcaagatcagcagaaacctgagaaagcgcctggaataccgagcagcgattggcccacc

SEQ ID NO: 2330 - DNA, 549 bp, Homo sapiens
  I.2330 (AI916280)
  misc_feature (441)..(441): n is a, c, g, or t
aactataaagacctacaggcttgaaggtccccttaaactggcaatcagttcctcccaatggttcttaaccaagggtgttaatcagactaacctggaacatctaaaaatacagatggccaagaggttctctatcagaggggctggggaagggccctggcattgtatttttaatttacatgtcacaggtcgctgatgctgctccccatagctaaggaccatagctaaagtcaaaccatatgatccaaacttcatgtgtgccatcaagaaaatgaacccaagttaaagaagaaaaaaaccctgactggacagagtaaccactagcgtaagctccttgagaagcatctatttgttaagacaacacagattcttaaacttttgaaaccttctgtcccccaccatacatgtcaagtttatgttattcttccaaacagaaagacattntgctgcctttgacagccttactctagtaataagcctcataattatgaggctctcttacatttaggaaaagaagattacagaaagagtaagctaggaagcttctattat

SEQ ID NO: 2331 - DNA, 494 bp, Homo sapiens
  I.2331 (AI916250)
tttcagataaatttattctttattcaaaataattttaaatagacatgagaaagtccctgattcccccgctagttccaccctccagatgtagtcactgttggcagttttatttataatttctcttcacatatttaatttcatctccagatagctttgagctgtaactaccaaactttctaaagttatacggcattctattatatgcttgaatatgtgctccatccttctaagaatgtcactgagaatacattttttaaaaaactggtttggtaagagttatacctcttgagataacttgcattatgatggagggtcatgaagccagcagtgagaaccaacaatgtaggaaataagaccttgtataacatcacaccactggtctctgcatcacactctcagggtccttccctttggtatatttatgtcgatgtcttggctggaatcataataaaaaatccaagccatgacactataatactataccctggatcgag

SEQ ID NO: 2332 - DNA, 186 bp, Homo sapiens
  I.2332 (AI915944)
ttttttttttttttttttttacaaggaatttttactttatttcgcaaagttttctatatctttcaagtttcactaatgaacatgcaccatttttgtaatcattttcttaaaaagacaaaaaaaaaagaaggtaagcaatgatgttttggtacttaaaaagttacgctttgcagagctgggaaattt

SEQ ID NO: 2333 - DNA, 769 bp, Homo sapiens
  I.2333 (AI915636)
  misc_feature (473)..(473): n is a, c, g, or t
  misc_feature (566)..(566): n is a, c, g, or t
  misc_feature (567)..(567): n is a, c, g, or t
  misc_feature (586)..(586): n is a, c, g, or t
aactgcactctcatgtttattaacacactattcacaatagccaaaatatggaatcaacctaagtgcacatcagtgatgaatggataaagaaaatgtaatgtatattcacaacgaaatataattcacacaaaaatgaatgaaatactgtcagtgccacaagatggatggaattggaggtcattatgttaagtaaaataagtcaagcacagaaagacaaatattatatgttttcattcatatgtgggagctaaaatacgctggtctcatgaagatagagagtagattgattggcgattaccaaaggccagaagggtagcacggagagagcaagaacagaagttgattaatgggtataaatatacaattgagtagaagaataagatctagtgtttgacagatcagtagggtgattatagttaaccataatctattgtgtatttaaaaataactagaaaaaaataattcaaatgttnctagtataaaagaaatatttaagggatggctacccccattaccttgatttgatctttatacattatcaaatttgataccaatgaatgtatcannatatcacatgtacaccaanatatgtacatttatcaataaaaaataattttatgagagcgaattgaacacagcagtctagacctagggcacattctttcttacatctatattattataatactctacctggttataaataaaatatcatacatgtttaaagaaaacattgatttttttatgaccagaccagaccaacaaaatg

SEQ ID NO: 2334 - DNA, 250 bp, Homo sapiens
  I.2334 (AI915474)
  misc_feature (172)..(172): n is a, c, g, or t
gcaactacatagtgtgtcatcatttttcttaaccagtcttttattgatgagtatctgggttgcttccaatcttttgtgtaataaataattttgcaatatcaataagcttgggcatgtcagtttgcattcacctagcttacggataagagctggaatcagatcccatttctgnacctacagggtggcagtcatacagcctcagagtcctattatcttatttatttatttgaacggaatttttgttcttctc

SEQ ID NO: 2335 - DNA, 225 bp, Homo sapiens
  I.2335 (AI915258)
gtagacattttactcattctatttttaatgtttcttcctttccttttcttttttcctcttctgtttccttcttttggattgactaagcgtaggattaaaaattttttctcactgctttttctctttttattagcttgaaaaattacatactattaatacattcctaaacatttagtggttattcttaaattttaaaatagctatttcacttaataaaatgtacaa

SEQ ID NO: 2336 - DNA, 423 bp, Homo sapiens
  I.2336 (AI914729)
  misc_feature (339)..(339): n is a, c, g, or t
ttttttctaataagatattttatttagtccaacatatccaaaatattatcatttcaacacataacaaatacaagataatcattaatgtgatattgcacattccttttctgtactaagtctttgaaacaccctgagtattttacacttaacatacattttaattcagactacccagattccaagcattcaatagccacgtgaggctagtgactatggtattaatcagtactactctagaaattttgctttgaaagtcagatatggatagaaaataaagttaattagaaaatatgtattcttcttgaaatacatcttataatacagttatatttatattanttttgttttggctataatttttcttttttatatgttttgcaaggaagtcagggtttagaggaagtaaagtttttttttgtaatg

SEQ ID NO: 2337 - DNA, 230 bp, Homo sapiens
  I.2337 (AI914506)
taactttaattttattcttttacggtttgctatggagaacaacttgtgacttgttaaagttcaactaaatatgaatgaatattccaaattacagattgtatatatctgatcaataatgaatcttcacagactgaactagcacatgaagttctaaagctaaataaacagggcagtcacaaagttctatgtagtatttagtttagaactataaaaaagcctacatgaccagt

SEQ ID NO: 2338 - DNA, 385 bp, Homo sapiens
  I.2338 (AI913713)
tctgtttttacaagattttattgattatgtcttgaatttataggaaaccaacatgaggtcttggaacagaacccgtaattacaacattgttcctaagggaaaataggatccactttatagtgtggcttttaggaacacagcgtggcaaaaatcagggtggccaatgccatgtttgcttcattaataaaacttcaagcatttattttgccgttcttgtgtgctgggtgcatactctgaggttgctctctcgatctgttccgtcgccctccgctccatctccctcagctgtattactgccatgcctttgtttatgaacacccatgcttcctccaaaccaacaagttattatccatttgtgaaaggcttcatttcaggattaatcaga

SEQ ID NO: 2339 - DNA, 516 bp, Homo sapiens
  I.2339 (AI912996)
ggttaaatacattatgtcacatttatgcaactaaattttatgcagcctttaagaagtaaagctcatgactgctcctcttggtttgtgtcttaggcatgctttgaagaagcatgagagaagtctgtgaacagaaggggttgggcccctctgtcagcacccctgggtagttcttggggaggcagggaggccaggaagaggggaagtgagactcagctccaagtaatcctgacccaggggaggggagggtgcgactggccagcggacagcctgagctctggccctggctccaggctctgggtttaaagagctttaaaagcttattaaaaaggttccttcgacatcaaatggctcttaaaaatcaatattttgatgatttaagtgcaagagaatcagaaacatatggatcaaattgccctaaaattatacacacttaaaaaaatgtgttggtctttagcaagatccaaatatttgaaaaacagagacattttcctcatctcctgacagagctctgctagg

SEQ ID NO: 2340 - DNA, 569 bp, Homo sapiens
  I.2340 (AI912970)
  misc_feature (484)..(484): n is a, c, g, or t
tttcaagcttttaaatatttatttaatgatacataaagcttaaacagagaaaggtgataaaactgatctgttgctaatactagggcaggaactacagtgagggaagcaagacactgatcgtgaaaaatctgaggcgctcctctgattcatgcaagtacagagttcatcgctgggaattagtgccccattaaattcctcgccctaggagcctgattgccttgccctaaatcctggctctggctactgtccctatcactatgaattagattacttagtatctactacatgctgggcactatacttgatgctttagataacatctcattaattcacaaaaccacctgaaatattcgttgtcctaaccccaattttacacataaaatatcagacaagacaaagtaatttgcacaaggctattttggggtcttgtacaaaccctatacatattatggttctccagttatcattctcaagcaaaactttntaactgctccaaataaaacacattcagtaatttggaatgacagttaatcgaatccaccctctccccaaccaagggaggctgacta

SEQ ID NO: 2341 - DNA, 541 bp, Homo sapiens
  I.2341 (AI912592)
cttgtctgtcctttacctcatggtgtggggtgtgcagatagcaggttgtggcttggtgagtgctcttcacttcaggtcaaggtgaggcacagttaacatgctaactactttcctcagttctctctgagttgtgtaaagctcccgatgccagacttcctcttaattttgcacattattaaagtccaaagagttaagatttggtgatgtggggcaaagggccagctgtcacagaaatcaatgaaatgatacacagaaatgggtatcatgaaaaggccactggacttgggaaaactgggtgcctgtccttgccctgccatgtacttacctgtgtgactggaggtgagatgttttacctatgggcctcagtttctcattacaaaatgacagagaagactagatacctaagttcctaagtttgtgacatttgtgaatttttcttggccctctgtgagtagagtgctaaatttagaggcttcctgtggttgaactgatgtccaattctcagggaacccagacttctcagttcagaacccagttccag

SEQ ID NO: 2342 - DNA, 449 bp, Homo sapiens
  I.2342 (AI912271)
tggccattaggtccattttattgtcatacaatcgtggtcaccgtgacaaggagggtggcagcgtggccaggcacaggatgcacccaaggagagcagcacagtagcaaaaccagagctgcggaaagtggcgaagcggcggctgcccctaccccccaccttgtccacattcttccacctgctggtgtccacctctgcccacatctcggatcccatcccagcgaaccccaaactcactgtcaacattctcctagcacctatgcattgcccaacaagaagttcaagctaacatcatcccacagagcgaagttctaggtcatgctctaggcttgggacacccgggttctattcgctgggaggctcctagctactttgaatgacttagaagtcactttgatctttcccagccttctgttttctccctctgcctttgatgtggggaaccagtattg

SEQ ID NO: 2343 - DNA, 339 bp, Homo sapiens
  I.2343 (AI911837)
  misc_feature (16)..(16): n is a, c, g, or t
  misc_feature (17)..(17): n is a, c, g, or t
  misc_feature (18)..(18): n is a, c, g, or t
  misc_feature (19)..(19): n is a, c, g, or t
  misc_feature (20)..(20): n is a, c, g, or t
  misc_feature (21)..(21): n is a, c, g, or t
  misc_feature (22)..(22): n is a, c, g, or t
  misc_feature (23)..(23): n is a, c, g, or t
  misc_feature (24)..(24): n is a, c, g, or t
  misc_feature (25)..(25): n is a, c, g, or t
tttttttttttttttnnnnnnnnnntttttttttttttttcccctcccatttttggggggaatatattttatttttacatgggctacaaaaacaaaaaacagttactttttttgccttacatagccaaatccctttgggggcaattaaaaagagggaaagccctcggatctgggtttttttctttctccataaaaaaaaggttcttgggaaaaatgcctgattttaggacgggggcaaaaaatccacaaaataggcctaaaattttttatggggccggaaaataaaaaggcgcctgctccccttgaaaaaaaaaccccacaaaattagggttttttcaa

SEQ ID NO: 2344 - DNA, 437 bp, Homo sapiens
  I.2344 (AI911659)
ttttttttttttttttttcttgttttttgtctttgcatatttctttattggcccttgtcaaacgtgacccactaactcctgaatgctttctctctccccatggattcctaaggatgtcaccacagtgctggccagatgcacagatcacaggtgactgaacctcatcaccccacgaacacacccttcaggttttgccaagaatgacactgtaaatataacaaagctcctgtgcttgttagtgaacaccaattcagcttctctcctgtatttggaaatcaggatgagatgaaaacaacaagcaggccaggcacggtggctcacgcctgtaatcccagcactttgggaggccgaggcgagtggatcacctgaggtcgggagttcgagacaccctgatcaaaacagagaaaccccatctctactaaaaatacaaaattagc

SEQ ID NO: 2345 - DNA, 479 bp, Homo sapiens
  I.2345 (AI911487)
  misc_feature (427)..(427): n is a, c, g, or t
ttttaaaacaatttgcatttattattttgcatgaatctgtaagtcatctgagtgttttgggtgtgtggggtcttagatgggctcactcagtcatacacctgtggtcagctgcagattaagtaggtacctctgataatccaggcagatctctttcacatgactaattagcgataagcatgtgtaggtcaataattctccatcagcctagcccaagctcaaggaggaggcaagagcagaagtgcacaaggcctcttcaggcctaggctcagaacaggcacaccttcacttctgtctcattcttggcctagatttaaggggtggacgatggactccacttattgttggaaggagagattctgggggtcaggaatttagacaaaaatgcagtggctgtcctttactggtttcaggaagacttgaagcttangagtagcttggcagctggaggctagaatcatctgaaggctcattcattcaca

SEQ ID NO: 2346 - DNA, 471 bp, Homo sapiens
  I.2346 (AI911416)
tttttttttttagctaagtcattatttatttattttttctttggaattccttcagcaattacataccctctatatcataattttgtcacattaaattgtatattgccttagatttaggtcttctgcctccatttttacatcataagcagggatcattcttcagctgctttggtttttaccacaatgcaggctataaggtaggcactataagtaaatttaaaaatcatgctgaattatttcagtaaagacttaggaagctggaatttgcaaacctttacagtctggaaacaagcttggtttagttgctatggcacaaattaatgatttaaatatatacaaggatgtttataatcacacaaaaaaacagtagaaagggagttaaatatccattaaatgtatatagtggggcagctatgctcggggtgtgattggcgttggttgtgtcggggtctagtgggcagagaagactct

SEQ ID NO: 2347 - DNA, 451 bp, Homo sapiens
  I.2347 (AI911316)
ttttaaaattccacagctttattctatatcataattttgtgtagcaggtatatgggcagggctcagttgggagattcttctgctacacatggagcttgacggaggtcacttggtggtattgagttgctggatggtctggtttaaaggatcaaagacagtcttacccaagtgtctggttgcctgacaggagaggctggaagacagctcacctggttcctcttcctctccatgtagtctcagagtctcttacatggtctcccagaaaaacagctggatttctaatatgctggctcagagttccaagaccaagtgatcctggagatgagattttggtcatggtagatacaacttcgcttgatccgctctcagaagcgctgacttaagttggcaccttgtccctccaatgcaaacaccacatgctcatcctcacagcatcagtcactcaggaaag

SEQ ID NO: 2348 - DNA, 508 bp, Homo sapiens
  I.2348 (AI910988)
  misc_feature (500)..(500): n is a, c, g, or t
ttttttttatggtaaatatgggcccctaatctcttctggattgtagggtttctgctgagaggtctgctgttagcttgatggggttttccatttgtaggcaacctgccctttctttctagccgcctttaacattttgcctttcattttgaccttggaaaatctaatgattatgtgttttggggatgatcttttgtgtagtatcttgtaggggttctctgcatttcctgtatttgaactttggactctctagtgaggttgggtaagtgttaatatatgatatcctgaaatatgttttctaagttgctgctttctctcctcctctttcagggatgacaatgattcatagatttggcctctttgcaaaattcgatatttttcagaggttttgattgatccctttcattcttttttctttatttttgtctgtcttatttcagagagccagtgatcacctgttgagattctttcctctgggtagtctattctgctgtaatacttgngactgcat

SEQ ID NO: 2349 - DNA, 406 bp, Homo sapiens
  I.2349 (AI910953)
ttttgacaagattcatctaagttttattctaagagttttacaggcacttttaggtcttacatttaggtctttgatccattgtgagttaatttttgtatatggtgtgaaacccttaagtctttaaatcatcttgaaatgttttttgtgtatctactcctaggtgatcatctatctgcaggggacacccaaatctttgggtgtaagatagaaattcaatttcattttttcctcatggttaacccatcattccagtaccataaatgggagttcctcttttcccacaaatcagtcacagaaaatctgtttctgggctctgggtagtctatttgtctgtcaccatcccaatttcacattatcctagttacttgagctttatagaaagtctggatttatataggacaagtat

SEQ ID NO: 2350 - DNA, 424 bp, Homo sapiens
  I.2350 (AI910941)
  misc_feature (393)..(393): n is a, c, g, or t
ttttaaaaattaacatattcctttattcgtttggtcagtatgtgaacctcaaatatatgctaggtgctgaggatatcatgaagaaaacagaattccctgacctcaatgagctcacattctactcggaggggataaaccataaatacgtgtagaatttcagatgctgatgagttgtgctatggaagaaattaaggaagtgaggggaaatttttccagggggtgtggtggtgggaggtgctgaactagtaaagtaggggatgcaggaagccttgctgatgttacagttgagcttcaatatgaaggtgatggagatccatttcggcatcgggaactgaagctgacagaggagatggcaaatgcaaaggtcctgaggcagaactgcggaggaggcanagccggtcgcacgcctgggtcccagcggagg

SEQ ID NO: 2351 - DNA, 503 bp, Homo sapiens
  I.2351 (AI910882)
tttttttttttttttttcttttttcatgctctttaccaggttaagaaagttaccttctatatctagtttgcaagagttcttatcataaatggatgctgaattctgtcaaatctggtaatgtgttagtattaagtgataacttccatactgcagacaaagaaagtcagagctggaaggagattcaggatcagccagttcagtcacctaatttatagatgagaagactgaggtccagagagataaaatgacatgttcaaagcaacagctagataagaagtggaatcaggtctataatttaaacctttatatgtctaaatttttttaatataattatagtgtttatatggtctagtagaaatgagctaaagcaccataaaagcattgagaaaaaagaaaatatagagatcaaaatctcttagcagtttctgagaaagggtaaagggtaacaatggatttttaactgaggctcactaggtttccagtttaagtggtaatatctaccg

SEQ ID NO: 2352 - DNA, 368 bp, Homo sapiens
  I.2352 (AI891161)
tttttttgtttctagtttttatttcagtctagtaaagaacattctttgagactctcaaagcttcagtttgctcatccgtgaaagggagcacataacatatttgcaagagatgcacccagaatgggggagcccccaaatcccagaacagcaccgtggctacgttccccccgtttcctaaatgtctgagtgcctccttaaggagaaacactgcatttggggtgaagagcagtcactgttcatgccaccccaacaggctcatggcttaggcaggctaggtacgctccttagccagagacatgaccccccccccacaccagctgagagccccagctccacaacggtgctgctgacccgtgccactcattaag

SEQ ID NO: 2353 - DNA, 441 bp, Homo sapiens
  I.2353 (AI890962)
tgccagcttgagagaaccttttccttcttgcatgtgtatcaaaggatacaggacaatcccagccagaagccaatagtcatgtcttctgtgccagatctcattgagtttccccgaggaaatagctgcccgttcctcattctgccacagtgtgtgaagctctgcaaagaaggcagcagacagaagaggtaacagggttttgcagactgcactcagtccaacagacaggtagagatggagaaactgaataatgaaagggaactaagggctcctgaagaggaatgggtaaaggttaggtttggaacaaactcagttctaaccaggttcgttagaattaagaataaaggtgggattagggccagctttggagttaagagggatacttaagaaagatttagagcaaggatcggagtcagcatgcaacatacttcattggaagttact

SEQ ID NO: 2354 - DNA, 577 bp, Homo sapiens
  I.2354 (AI890899)
  misc_feature (488)..(488): n is a, c, g, or t
ccagagttatttactttaatgcgttattgttctgttcctcgttccccactccccaacatgagagtcttgatattttactctaaaagtttaaagtattatacacatgcgtcttttaatacaaaacgctgcaagcaagttctttttggaagcaggcaggggttcataaataacaaatacaagaagtatttcaagaatgaactaggtgagtttgtagatttttgctggattgtctgcagttttatgatttcagcctaggagacttcctgttggctgttttcagaaaaccagggacatagcttgagggctgagttaattccggtagttcatcttccagttagatctatttttctgtccctccatcaacaataactgcccatcagagtaagtaatgttctaagcaagggttcttacattgctctgtaagttttgctctagtgatcactgcatatgaagtaatcacatgatcacatttaatattctgatggttntattaacaagtatataatatatattgcatactgtatatagtatatgaggactgtacagtacaaatttatgttcacagtttgacatgaca

SEQ ID NO: 2355 - DNA, 521 bp, Homo sapiens
  I.2355 (AI890840)
  misc_feature (457)..(457): n is a, c, g, or t
aatttaaaaaaatatctttaattaaagaagacttaatttaaggcatcatactgacatctactggcttggtactaaactgtaaatttgacatacactgcatttttttttaaaccctcaaaattaaaaggaatatagatgctattctgggaaagtagaaaaattaattgaaagcagtaacattgacatcaggacaactaatattatgtaaagtctaacccataaagaacaatactagttctctattgcttctttctttctgatatactgtctttcaaataaactgattttttttttttttctttttgagatggagtttcactcttgtcgcccaggctggagtgtagctgcatgatcctgagtgactgcaacctccgcctcctgggttcaagcgattctcctgcctcagcctcccaagtagctgggattacaggcacccaccaccatgcccagctaattnttatatttttagtagagaccgggtttcaccatgttggccaggctggtctcgaactcctaacctc

SEQ ID NO: 2356 - DNA, 410 bp, Homo sapiens
  I.2356 (AI890787)
  misc_feature (287)..(287): n is a, c, g, or t
  misc_feature (379)..(379): n is a, c, g, or t
cactgtacaaatatgaaaataaatctttatctttaacctcaattttatcttcagcaggagggttgtgcaacttgggtttatgcagatcacatcaagtgttaaataatcaaatgtcacatatgtcatataaagcagcaagtgaaaaaaataaattatgaaaatgcatgggctaaaagttaacagtgaaaaatatctccttatccaacattattttccacaatgaaattaaaatattttacaatgtatcaggatacatttaaaaaaggactgtagtataactatgattntaaaatatcttaaagaaaaacagggacaaggtgaataacttccatagtaatatgcaaatgtatcaagtctaagataaaaacattaaatattnttgttcttactgaaaatgtgctttaaatttg

SEQ ID NO: 2357 - DNA, 516 bp, Homo sapiens
  I.2357 (AI890418)
  misc_feature (447)..(447): n is a, c, g, or t
gattttcaaattatttttattaggtaattttataatttcatagcagctgttaggatacacaaacatatatatacaattttctaaacaagtaaataaaagcagtttagtatatctgcctgaattcatattattcaaaatcttaccaaaatatttattataaaaatcagtaaaattgtttaacacatttataaaagttgctgggtatgtatacataaacattttaagcttgctttacaaaaaaaagttaaatttctatccatgtgctcatagtgacttcaaaggtagttcaaagggggaataaagaaggtagcattgccttgtaatacagcattaattaatactgacttacccttggacattcatgaaagatcctttgttatcacatatggtgaaaatattaaaaattaatactccatttctatgaataaaacatagaaaataagactntatttttccagactaactcattagcatgaaagactgcattcattctgcagatattactgacaccccgta

SEQ ID NO: 2358 - DNA, 461 bp, Homo sapiens
  I.2358 (AI890300)
  misc_feature (199)..(199): n is a, c, g, or t
tctgagtcccctggtgctgggtgcatgttctcatattattttacctgcgttgtgtaccacagcctccccacacacccaccacagcctggtgatgggagagggccagggacatgcacactgcgaggctgcggggaggccctggggcctcgctgaggccagccattgccgggaggtggtggttaacaacacagtggcccanggttctgagcaccccactccggggcccttcccttcccggggaatcgccgttgcctgcctgctcttcctgggctgtgggcaggaatcttttggtctactcggagccctgggcagcatcccctatctgtgatatgcctgcagccaacggctggcgtggcagggactctgagggcaggcccagccagccctggaggcagaggtgtgtggaggccatgctgggcgctggagacagacaggaccagtcccacagtggaccaaggaca

SEQ ID NO: 2359 - DNA, 191 bp, Homo sapiens
  I.2359 (AI890242)
caacttcagcattcaattttattatagtcccatctccctcaacaaacaagatcagcagccagtgtgggatggtgctcaatggggctccacttcccactagagtgtaagctgcttccacgcatgctactgcgtgctccgagccatcgcagcggagtctcttctcacccagctttgatggtggggcgactccc

SEQ ID NO: 2360 - DNA, 399 bp, Homo sapiens
  I.2360 (AI889572)
tttttttttaccaatgttaggctttttatttcaaccttggttttaacagaaatctggtgacactttaattacatatttgcatcatcccttctatcacaagaaatatacaaattataatgtgaaagacaacagtgactggaagtcaaactacagcaggctacctagaacatccctaaatgttgtaaattatatccgtccacccagaatcacaataatcacttatgctgtagttcctgccatatccatttatttgcattagaaaaaaaattcacattcctctctgaaaactgataagctttataaagtggagttgagaaatctagacaaaagcagtctgttgtacagaagcttgaaaatgttgattagtattttacacaatggggaccaaatgaaagactt

SEQ ID NO: 2361 - DNA, 420 bp, Homo sapiens
  I.2361 (AI889352)
ccaactgcagaagacttgctttttccaagttggacaattagttactaatatttgagcattttggtaatttaaaaaacagccctttactagccactgggttgcaaagcaaccatagcaagtagaaaggaaggtttccatatatcagctagggctggacaacgtctctcatcctcatcttctcaaactttgcacctgaaagtgtccattgcataggatggaccaacttccaggttccttttttttcctttaaaacttttattttagtttcaaggggtacatctggaggttggttacatgggcattgcacgtcataggggtttggcgttcagaccattttatcatccatgtaattggcataataccaaataggtagtgtctcaatactcattctctggtgtctcttgttccccgctttgtgcc

SEQ ID NO: 2362 - DNA, 285 bp, Homo sapiens
  I.2362 (AI889339)
ttaatctcatctgtgtctaacccttgggatcctcaccacccaggtctaatggggaaaggttgcggtcgtcacatggcttcctgtttttggtcagccaagggccacaatggttcaaagagccacgcatggaaaggtaacccaaggtcagcaaatggaacaggcagtcatcttagcctcaaaggattcttttaattaaaacattgaggtctttgttaaatctatgttaaacaattgcattacagagaaaaaaacaacaacaacacaaacacacatcattaaacatat

SEQ ID NO: 2363 - DNA, 429 bp, Homo sapiens
  I.2363 (AI889310)
cctgcactctggcgcccagcagcactggtccggccactctgcggagatctccacgctggccctcagccacagtgcccaggtcctggcctctgcctcgggccgaagcagcacgaccgcccattgtcagatccgcgtctgggacgtgtctggcggcctctgccagcatctcattttcccccatagcaccacccgggctggccctggccttctcaccagatgacaggcttcttgtcacactgggggaccacgatggccgcaccctcgccctgtggggcacggccacctatgacctcgtgtcctccacccgcctcccggagccggtgcatggtgtggccttcaacccctgggacgccggtgagctcacctgtgtgggccagggcactgtcaccttctggctccttcagcagcgtggggcagacatcagccttc

SEQ ID NO: 2364 - DNA, 443 bp, Homo sapiens
  I.2364 (AI888911)
tgagatggagtcttgctctgttgccagtgtggagtgcagtggcgtgatcttgatctcggctcactgcaacctccacctcgcaggttcaggcgattctcctgcctcagccgcccacgtagctgggactacaggtaggcgccaccacacccagctaatttttgtatttttagtaaagagtccggtttcaccatgttggccaggatggtcttgatctctggaccttgtgatccgcccacctccacttcccaaattgctgagattacaggggtgagccaccgtgctcagccagaattatttttaatgacagtttgactttttttttttaacttttattttaacatttactttaggttaattctaagagttagaaaatgtatctgtaagtgtttattccaggagttttcaagctgtggtctctggataagatgcctcatcattacctg

SEQ ID NO: 2365 - DNA, 385 bp, Homo sapiens
  I.2365 (AI888791)
ttataataaacttacattcatttattaaatacattctaacaaaacaatcaaagactgtaattagctgaatggctttaagagatacttgatagaaagtggcattccaatggctttctttctacaaaactgaaaataggagatactccttatttcaagatacacaagacaaatctttagaaactgtatgcaactttataaaaaggatgggttctaagagaaagtcacatacatatacactatacaaaaaacactactattaaagctacacaagaaaactgcatgttttataatttctgtgtttaagttaacagcacccagagatgatgaaaaccagttactaaaaaatttactgcttggttaaaactcagtttacaattcaaagaag

SEQ ID NO: 2366 - DNA, 482 bp, Homo sapiens
  I.2366 (AI888790)
agcggccgccctttttttttttttttgatttttacaaaatgtttattctctgaaatccaacgcattcaaaggatgttaacacttaaaacgtttatcatttccaccaactgcattatcttagtaaaccaaaataagcacttttatcatagatgtagtcaatgattaatatgtttttttaaaggacctaaacttcccccaaatgtcagcacaggtagttttattgttatgtttcacctagtaggcaatttttaaaaatagtgtgtagaaatgaatagtttcaaactgagtaaatatagtagtataccatgtcataaaacaatcaaatcaaaagcaactgccaagctaataataagtcaaagaaatagtaattctggcttgtacagatatgtgcagtgttttcaaagctcttaacagttaaccactaacatgtatctccaaagcttaacttagagttggaagatgaatttcacagtaatgtaatt

SEQ ID NO: 2367 - DNA, 562 bp, Homo sapiens
  I.2367 (AI888606)
tttttttaatggaatatatttcctagagacaaaaatctttagcagagaaggtaacattaagtttggcacttaaacattttgaagtaacatagttgagaaatactatgttaaaagttatttattttctaaaatgtacaagtgactgactcatttttattatcactcatgcactgtaacagtctggagagcagcaggttgcttgaagatgcaacaaatattctttcaacacttcaataaacacaatgtaaacattcactttaataatgtttcctttgttaatgcaaaaccgagtgcattttttccttccctctggctgagctatgactagctgagtagcaacagcagagtgctgaaagaatttttcaacagcaatttgcttgttctaatttacttttcaaggttgatgatcagaatcattatgttgcttgcaaaaagatctatttctattaatttgatccagtcattcctcttcttctcatcatatttagtttccctggcagcttcaccaagtaagttaattgaatcagaagtgccattaccactccagttctggtttcatata

SEQ ID NO: 2368 - DNA, 515 bp, Homo sapiens
  I.2368 (AI888570)
  misc_feature (491)..(491): n is a, c, g, or t
ttttttttttttttttttccttttcctttacttttaatctttgcccctgcttcagttgtctctgaatacagcaaccagattaatgttattaaaatacagatcagtcatcttactcatccgttcaaaaccccacagtgactataattttactgggagcaaaagacaaagtttttataatgacctgcaagtctggaagacctgccttggaacacctgtccattacctctctgagctcaactcttaccagccgtcccatagtctctgagctgcagccatgctagccctgctggtccccaaactctgaagctgcacccctgccccagggttgcacataccactccctctgcctggatccccagaaagcctcatggcccctcacagccttcagatctttgtttaaatgccactttttaatgaagtcttccctgacccagccttggtagaatagcaactcttctctctttctctttatcacatttcacctttctttntctttaaaataagcattgcctctg

SEQ ID NO: 2369 - DNA, 248 bp, Homo sapiens
  I.2369 (AI888521)
  misc_feature (230)..(230): n is a, c, g, or t
  misc_feature (231)..(231): n is a, c, g, or t
ttttatttttctactgagacagagactaactctgtcacccggttgcagtggcgcgatctcggataactgtaacctccgccttcccagttaaagcgattgcccttcctgaacctcccaagaagatgagactccaggctggcaccataccaaacggctggatttatgtttttttaataaaaagggggggttttcccccccggtggttagagaggggaaaaactttctttttnnggggccccccccccccc

SEQ ID NO: 2370 - DNA, 473 bp, Homo sapiens
  I.2370 (AI888493)
aagtttttaaagtcatgtttattgaagtatgattttacattcagcaaaattcatcctgttaaggtttgacaaacgcacagtcataccataatcaagatgcagaactgtagaatcacactaacaattccttcctgcccttgtaatcaacccctttttgatcccaaggaactcactgacctgtttttctgtcaaaagtatcaaatttcatcactaaaatgatctacagtactatggaaaaatgtgtaagcacataaaatacacaaacctatttttttaaaagtgagatacttaaaatttctttagcataccaacaaaaaatgaaggtagcattgcattttactacagatgtgcggacattcaaagtccaccattgtcgtatatatggctcaacagtaatatttaagaatatactgctgggtatagtggctgacgcctgtaatcccagccctttgggaggctgaggcaggctgatc

SEQ ID NO: 2371 - DNA, 355 bp, Homo sapiens
  I.2371 (AI888390)
tttttaaagatatagacaggcattgctccgagccaagatcaaatgtggagaagcagtggctgttctgacaggtggcggtcttgtctcgatgtgagcggagtccaacagacgctgacatctccggtgaatggcttcaatgataattttaaaaaatcatggtggctgctttatggataatatacaattttgcaagcctcaaacggaaggtctacaatggcataattaactgaactgaactgcaaattggatgcacaaaaatcctacgggtttccccttagaaaggaagaatatgaccttattccaagaccaagatcttattcatagtatgtattggcaatttagctgtcaggtttaa

SEQ ID NO: 2372 - DNA, 471 bp, Homo sapiens
  I.2372 (AI888234)
tgcattagtaaatttttaattataaaaattcaatgctatcataaaacatacatgagaaaagtgtgatattaatcatctaacttgagaactagaagtaatttgggtgccaggtgcagtggctcgtgcctataattccagcaatgcaggagactaaggtgggaggattacttgagtccgggagttggagtccagcttgaacaacacagcaagatactaactatataaatgaaaaagaattagccaggtttgttggtgcatggctgtagtcctacctactcagcagatggaagcaggaggattgcttgaacccaggagttcgaggatgcagtgagttacaatcatgccactgcacttcagcctgggcaacagtgcgagaccccatctcttaaaaaaaaaaagagaaagggaattttgcaatactaagttaagcttttcctaagaggtagtctgaagtgtacaaatactgcagca

SEQ ID NO: 2373 - DNA, 492 bp, Homo sapiens
  I.2373 (AI888227)
gtagagacagagtttcgccatgttgcccaggctggtcttgaactcctggcctccagttatctgcaggctttggtttcccaacatagtgggattacaggcatgagccactgggtctggcctcaatctcctcgtcttataagaacatcagtcagattagaattgggaccacctcaatgatttcatttcactttaattacctctttaaagaccctacctccaaagacaatcacattttgagttactggggttaggacttcaacagatgaattttatgggggatacattcagtccataacacctccccatctctttgggctgtgtggtaattaggtagataaatttaattatatttaacaaaaattaattagcatatattctgttcccaggaaaaagagctgagttttgaaggacatgttgagtattaatcatccagcattgtatataaggaatgaaagtgtggactgaaggaggtatctagatggtaggcaatgc

SEQ ID NO: 2374 - DNA, 411 bp, Homo sapiens
  I.2374 (AI888072)
tccccaagtactagcttccagccagattgtcatttgtgcgttaaacagtacacacccatgctggtgtgcctttgcgcaaatgaaaataatctgattaggaagctacagagagttaaaccatcaatcctgcactggggcccactgcaaagacctgggcactggaaacagtgctctgtcacactgagtcagcagctgggacacgtatgatgtgtgcctcttgtccagagctttataaagagaacagaagcaggggacagggtaaggctgaatgtctgcagcctgtacataagacacgtttggggaaacaggaaaactctcagcgtggttaacttattgtttacctaaactgtttatgatatgactcccagggcaagcattaataaagcaacaaaaaatgttagcagaacactt

SEQ ID NO: 2375 - DNA, 502 bp, Homo sapiens
  I.2375 (AI887713)
ttagactgtatgctcaaaatttattaatctttatatccccaaggcttaccccagtacttagcacaaaacaggtgcttagtaaatgatggtgactggcttgagggcagagatggtgtcttatttatctatccttgtatgttgtgtttagtatggtggctggcaattgtttgacactcaagtgtttaaacaattagaaaacacattggtgagagaaaactgaagatattataaaacatctaactgctttaaatgaattaaagctgctgggacaaattatatccgtgatactgagagagagaatttagcgttgccagttttaaggaaccatggagaagaggaaggcgctaatttactgtgtgcttaccatatgccaggcattgagctagctgttctacatacacagtttcagatgtgttagaagcctggagctggcaaatgtggcttcagtccacagattctagtgtgactgcttgggacaatccacctgctaaccctgaaaata

SEQ ID NO: 2376 - DNA, 524 bp, Homo sapiens
  I.2376 (AI887642)
  misc_feature (519)..(519): n is a, c, g, or t
aagttggccaaaataatttattatctacattaggacctttctgagaaaggaaaggcttgcactgaataattatgttgagacaatagatgtaaaccaagattgtcctagaaataccaaatgtatggtcatcattatgaagcattttaataatgaacacctttgaacccaacttcaacatgagagcatgaccaatgctgtgggcttcctccttgtcccattcccctgccttccctatagaagtaactaagatcttaaattctgtgactaattttctcattaaaaacaaagaaacacacttttatcacctatgtatgaaaacctaaacaatatcatttaattttctttgttttggagccttacaagtgtcaaatcctgttgtatgtagtcttctgcaacaggcttttctcactccgcattataattctatgattccttctgtatccagccacagctatgttagactcattgccactgctgtataggatttcattatatggtgatgccacaattaattaattntactg

SEQ ID NO: 2377 - DNA, 442 bp, Homo sapiens
  I.2377 (AI887601)
ttaatgtttaagaaaatttatagatttgtgttgggctgcattcaaagctgttccatgggccaacagttggacaagtttgccctagatcatggggtctttgtgctctgagaatgggcgagtttgggatggactcagctttctgttggttggccctggatctggatctggtgctgccccctttctctggagcacacaaagggaacaagaaggcctgaacttgggcaaggaagccatccacagggctccccagaggccagggccaccaggagctcactgctgtgcagaggcaactcggcttggttatttcttgcctgaggcagggaacagggaatgcagggaagccaggcagcagcaggaggctccaaacgctggtgtcagcaagccagaacccccacctgacttcactcctgtctgcccagctcacagtcgcctgtccctggag

SEQ ID NO: 2378 - DNA, 425 bp, Homo sapiens
  I.2378 (AI887544)
tttttttttttttttactaaaaagcaagttttaatgaagctacaaccagggactggctgataaaagtgaagccaaatcccttcaagaaggtgccaagtccattctggtctggaatgcattgataattgggacattatgctcagagactccaaattgacattctgtcgtcatccctcttggaatagaaactctgatcctttaaagtaattagcaccaatttggagcatgtgtgcaaaaataaatcaccagtgtccaaaaacagatacattaggttcaatggttatgaagcaaatgttcttattagctccgcctacgtaaacaaaatcagaagtaattagcatttaaaaatagaagagacaagaagagatcacagttcccactggaaaattattatttatataaaggtccacaatgctgacacacac

SEQ ID NO: 2379 - DNA, 437 bp, Homo sapiens
  I.2379 (AI887389)
tttttttttttttttttttttttttttttttttttttttttttttttttttttttttttttttttttttttcccaaaaaaatttttttaaaggggtaaattttgggaaaaaagggggccaaaaaagggggccagggggggcaaaaaacccggggccaaaagggaccccccccccccacccccccaaaagccggggaaaaaaagggacccgggggggggcccgggggggggccgggggggggaaaaaaacccgggaaatccgggcccggccccacccggttttttggaaaaaacgggttaaaaggggcccccaaaaggggccaaagggaaaaaggggtccccggggaaaaaaggtaaccccccccgggcccaaggaaaaaaccgggggggggaaccgcccccggggtttttaaggggggaaaaaaaaggggggggggg

SEQ ID NO: 2380 - DNA, 351 bp, Homo sapiens
  I.2380 (AI887380)
tttttttttttttttttttttttttttttttttttttttttttttttttttttttttttttttttttttttttttttttttttttttggggggcaaaacccggcaaccttaatttttaaaccccggggggggaaaaaaaaaaaccaaacccgggtcccccccccccaatcccccccccccttggggggcctaaaaaaagggccaaaaagggggcccccgggggggcccccaaaacgggaaaattaaggggcccccaaaaccgggcctttggaccccgaaaaaaaaaaaaaaaccccccaaaggggggggcccccaaaaaaaaggggggggggggggggggtttttcccccc

SEQ ID NO: 2381 - DNA, 179 bp, Homo sapiens
  I.2381 (AI887363)
ttttttttttttttttttttttttttttttttttttttaaaaattggaataaactttattccccctacggcaaacaactttttgggatggaatttaaaggcaacaaagaaaaaaaaaaccccccaaaggacagggtataaaaaacccaaacttggttccccttttttggggaaaagggt

SEQ ID NO: 2382 - DNA, 407 bp, Homo sapiens
  I.2382 (AI886034)
ttttttttttttttttttccatttaaagggtacagtttaatgatttttagtatattcagatttatgcagtcatcacaattaattttagaacatttacattactccagaaagaaaccctgtatcctttagctatgatcctccaatccccccattccccacgactcaaagcaaccactaaccaccctattctttatggagttgtctgttttgaacatttcatataaatggaattatacaatatggtttcgtgaccacatattgtatgactggcttctttcactgaacatagcatttttaaggttcatgtatgttgtagcatgtatcagtacttcatgtacttttattgctgggtaaattccattgcatggatatgccacattttgtttattcattcattggttgataga

SEQ ID NO: 2383 - DNA, 286 bp, Homo sapiens
  I.2383 (AI885918)
cagatggagcctcgctctgtcacccaggctggagtgcagtggcacaatctcgggtcactgcaacctccgccccccagcttcaagcgattctcctgtctcagcctcccgagtagctaggattacaggtgcacgccaccaggcctggctaatttttatatttttagtagagatgggattttgccttgttggccaggctggtctcaaactcctgaccttcaggtgacccatccaccttggcctccccaaagtgctgggactacaaggtgtgagccaccatgccctggtc

SEQ ID NO: 2384 - DNA, 409 bp, Homo sapiens
  I.2384 (AI885997)
  misc_feature (303)..(303): n is a, c, g, or t
tttggctgggaatcaacgttatatgtaaaattggattacactatgggataatttttttttaatactaaacactgaagggctacctctatgcctaagattcttagactctttttgtttggtagcaagacattaaataattcttttttcacttatagtgtgtcagagcttttggaaaaacatggactcgagaaaccaatttcatttgttaaaaacactcaatctagctcagaagaggcacgcaagctgatggttagattgacgaggcacactggccggaagtgagtaataaaattaattgatctntgggtcaattaattttaaatattttaaaaagtatttctctttttctgacacctcatttgtgttataactaataataaactgcacatatttaaagtggtaagtataa

SEQ ID NO: 2385 - DNA, 505 bp, Homo sapiens
  I.2385 (AI885498)
tccagttttgggttttctctttttaattaagatacaattcgcactctaattcaaagtctcggcattaacatatattttgttgatctggttgatgattttaaaattatttttcctttgtattctttacctacggctaaatttctaatcttcaaaatgcctacattcatttcatttaccttacattttatcttactcatttttaaagccttcaacattttttgagttttgaaataattctcaatttcttagtctcttaattcttaaatttaaaaaggttgtttcttaccttttaaaatttttaaaaataattatgtcaagtaatttttgaatatagtaacctgattctacatttctcatgggataaattctaaggtaaaaaaaattgcaaataaatcttaaactttatttagtaggtttattattagcagcagatgtctagccagggtagattacttttatcagaccaacctctcaccaacaactactagaagagctagagagggag

SEQ ID NO: 2386 - DNA, 442 bp, Homo sapiens
  I.2386 (AI885492)
ttataattggaaaatgtttatttttttccaattttattttacattcagtgggtacatacgcaagggggatggggaaaatagcgatttgaaatatgctattgtgaacgatgctgcaatgaacaaaagggtgtatgtgtctttttggtagaacacttcatttttcttttggtaggtaaaccaaaaagtatctgagaagagcgtcaatcaatttagaggtttactttgccaaagttaaaaattataacccacaggagggcctgagaacatgtgcccacaatggttgtgggtaatagcatgatgctgaggttgaaagtatgaagaatccatcaaccaggtagtgattatagtatccaatagttagtcttcttacaacccttaacccctgccatgtccccttggattccccagagtgtattgtttccatctttaaaaccatgtatac

SEQ ID NO: 2387 - DNA, 457 bp, Homo sapiens
  I.2387 (AI884455)
ccttgtaacaatttattaatagatccactttacagatgagtaagctgagccatagagagggattaagtgatttgcccaaggttatggagtgagtgcttgggagagccaggatttgaattctgactgtttctccacaatctgtgttccccaccactacaaatgttcctctcgagggcaagggtggagggtgaggccgctggggatggttatgccacttgggcggagctttgacagccaccacggtgccacctccctgaacaggtgaggagagagtaccacggccccaccctgctgggattgccctggctcgggcactttgcatgtctgggcaccttggctatcagttggtggagcccagttttagggagttctgggaaagcagccagtggtggggctgggtagatggaagcctagtggatgaggagccatgagaggcatagaaagcactgggcaagtg

SEQ ID NO: 2388 - DNA, 530 bp, Homo sapiens
  I.2388 (AI884313)
  misc_feature (511)..(511): n is a, c, g, or t
taatataattaaatgtgtttattacggagaaggggcttgactttgtgactacaactttgtgcaaaaaggtctagacgttaggcctgtttatagaaggtagttaaagaaaatgtagctttgggctagcaatgttctgcttttagtacacatccattttgagaccaggcaaatagagggttagtgaatatgagatcatttgcaaaatctaccagagaagaaaatgatttccctttaggaagagataataccagtttttctcttgcaaacctattctgagttgttacaggtctcctgtcaaaataagcatgaaagcaccaatggccactacacacgacaggtatgctactttacaaacgacaggtatgctactttacaatcaccctgcccctagaaaagcttaagaaactttatgtattttaactagagaggtggtctcataactaaagatgagattcagcagagaaaagcaaagatatttcaaatgactgtcaggaacttcctggctccttgngccttggtcttccctcctg

SEQ ID NO: 2389 - DNA, 394 bp, Homo sapiens
  I.2389 (AI866945)
ttataaacaacagaaatttatttctcatagtttcgaaggctgagaagtccaagatcaaagcactggcagatctggtgtctgtgagggcccccttcctggttcatagagggccatcttctcactgtgtcctggaagggtagaagggactaggaagctctcctgtgccttctagaagggcactaatcccattcatgaggactccactctcatgacttaatcacctcccaaagaccccccctccagacatcctcacagtgggggttagaatttaatgtatgaattcaggactgggggcacaaatcttcaggccatagcacttattgtaacacacagatggcctccatagtcacaccacttataaccaacgccaggcatggtagctcatacctgtaat

SEQ ID NO: 2390 - DNA, 364 bp, Homo sapiens
  I.2390 (AI866862)
tttttttttttttttttttttccaatccaaattcttgactttcgtcaagacccatcttttattgagagaaacttttcggcccttttcacctaattttgaacactgaatgttctaaaataataactaatattattccataattgttcattactttaaattgcttacaattgtatttatgtatgtatatacatacacattcacacatgatctattatttattcttatcaaaaacaggatttttggctattaaattgattcaattgcttattcaaattattcagcatcaaacttattcaggcatttctcaaaataatggggatccaaactgacacagacagtattttgttctcaagaaagtcacaga

SEQ ID NO: 2391 - DNA, 499 bp, Homo sapiens
  I.2391 (AI866666)
agcggccgccctttttttttttttttttacaaaggtacaaaagcaattcaacaaaggaagaatagccttttcaacaaacagtgctagagcaactggacaactataagccaaaaaaaaaaaattgacctaaaactcatacttcattaaaaaaattaatgaatcatgaatgaaaatgtaaaatataaaactatgaaacttttaaaaaaatataaacataagacaaaatcttcacggtctaggactaggcaaggagatcttatacaaaaagcaaaatgtataaaaggaaaaattgaaaaactggacttcagcaaaattaaaaacttttattttgagaaagacttttaagtggttgaaaaggtaagctaaagactgggagaacgtatttccgaactacatacgcaacaaaagacctaaaacatacacctaaacacacacctaaaacatacacctaaaacatacaaagtactcttgacatccatcaggtaaaaggcaaacaatc

SEQ ID NO: 2392 - DNA, 489 bp, Homo sapiens
  I.2392 (AI866656)
aattttgctttttgtttatttattttcttttcttgatatagtggatatatatatctacttcataaggttttagggagaattatgtagcattcaatgagacagtcatcaccgtagtaaaaggaacagttggagggtagtagcaataataatactagtagaagatactgtgtttgaaactcttaccaaagtcacaactaaaaatgatcatagctggaattccaactcattttctgactttaaagcccatgttgaaaatactgtgtaaaatgcacgaagcacctggcaggcagtcatctgtgattactggtttctttattgcttgagttggatgacagtcctaggtcatctgattggattttggattcatttgagacatctggaacctctcttgggaacttcttcctccttgggcctttgcagcaggacagatgggctctcaacaccactgcagatttcaggctctctctcactggaacattaagaagtagt

SEQ ID NO: 2393 - DNA, 165 bp, Homo sapiens
  I.2393 (AI866414)
gctttccctttgcttggtagatcttcctccatccctttattttgagcccatgtgtttctctgcacatgagattggtctcctgaatacagcacagtgatgggtcttcaatctttatccaattgccagtttgtgttttttaattggggcattcattccatttacatt

SEQ ID NO: 2394 - DNA, 257 bp, Homo sapiens
  I.2394 (AI865298)
tttttttttttttttttgaagacagagctccacttttgtttcccgggctgcagtgcagggtggcgatctcggctcactgcaacctccacctcccaagttcaagtgatcctcccgcctcagcctcctgagtagctggaatcacaggcgcctgccactgcacgcggccaacttttgcatttttagtagagacggggcggtctcaccatgttggccaggctggtcttgaactcctgacctcaggtcatccgcccgcctca

SEQ ID NO: 2395 - DNA, 415 bp, Homo sapiens
  I.2395 (AI864931)
  misc_feature (277)..(277): n is a, c, g, or t
tttttaggagtccaacttttttaatgtgattctcaagtttttacaatatgttgaataatccatcttttccccattgatttaagatgccatatttatcctatactaagttcctgtacatatttagaactacatctggactttccgttccattgttctacttgttcaatcacatacaaatatgtttgtagagacagggtttcgccaagttgcccaggctagtcttgaactcctgggctcaagcaatccttctgccccggcctcccagggtattgggacncacaggcgtgagccaccacacccacccctattgttgccattgttctagttgctgtgatagaggaaatgtgggaggggggtgttatctgccacctctgtgtccctgtgtcatatccctgggccttccctctgacccagc

SEQ ID NO: 2396 - DNA, 585 bp, Homo sapiens
  I.2396 (AI863458)
agcggccgccctttgttttttttttttagtagacaaaacacttttattactgaataagcattaaacgagactgtgatacacatcacaggcaatttgctaagagattgcaaagacagaaatcttgcccttttgtatagccaagtatatacgacccattacatacacgttttcaagttgaacaataactagtcctcaagtaagaggacctgacatttgtgacattaactttacttaataattggggtgaccatctgtgttagttaattggttttatccagaggaaaaacaaacttctcctgtctttatgacggaaggtagttttgcaacacggagcaagttgctcaccgaagttacgctcctactctctcacagaaactgggagacagggaaggatgctactccgttgatatgtgcagcatttcaaaaaaaaaaaaaaaaaaaaggtccagagacattcctgactgagcatacagttgacaagacctatctagtcctcaagtggatttatacacatttcaaagagttgagaaagtacttaacaattaagaaagtacttaagttttctaagacaaatgctcggagaga

SEQ ID NO: 2397 - DNA, 413 bp, Homo sapiens
  I.2397 (AI863444)
agcggccgccctttgttttttttttttttttttttttaaaattacaaacctttataaatataatttttaaagtaaaaaaaaatacattgcatggcaatacaattgccatgcagatacatgcaatacaattgcatagcagatacaatacatgatcaatataaagtaatgtggcagaatggagacccaatatatcagttgtatcagtaaatatgagaggactcataaaaagaaaacatttttaatttgactcatcctcatcagccttcttggctagaactccccattctctcttgaacccatccagtcaggctccagttctcaccacccccacagaaacaactcttatcaagataaccaatggctttcaaagtttctattgctctcttcccagtccttatttttccaagtctcgc

SEQ ID NO: 2398 - DNA, 465 bp, Homo sapiens
  I.2398 (AI863135)
tgaattccttattccagacattttatttattttttcttgtaggcgtgtggtcttgctatgttgcccaggctggtttcaaactcctggcctcaagtgatcctccggctttggcctcccaaagcgctgggattgcaggtgcgtgctaccgcatcctgctggcagtcgtttcaaagcacatgttttagctctcggcaggtggcctggaaggacccgaccccagcccctgtgctccatgcaccatgccaagtgcccccatggccccacttacctgctctccccagccctccagggaggcagagcaaaggcaacagaggggtcgcctgtcacctctatatgcgagtggccttcacacccagggtggtcagtgcagcggccacggcttggaatgaggcccatgactttggcccacccgcagccctgccgacctggctaaatctgcaaatctggcaggagtggcccttgcag

SEQ ID NO: 2399 - DNA, 441 bp, Homo sapiens
  I.2399 (AI862991)
ttttttttttttttttaaaaaataatttcaacttttattttagatttaggagtacatgtgcaggtttgtcacaagggtatattgtatgatgctgaggtttagggtgattcctgtcagccaggtagtgaccacagtacccaataggtaatataatcttaagaccaaagcctgacaaggacaaaaagcaaaagaaaattatagacttatctaatctataaacataggtgcataaatttttttaaaaactagcaaatcaaatatagccagtatgtctttttgttagtgaccaagtagactttatctcaggaatgtaatgaccattaaatataagaaactgtaataatataatacattatcacaataaaagatgaaataatcccaaattaatacaaaataagcatttgataaaatttaacattcatgataaacactcaaatacag

SEQ ID NO: 2400 - DNA, 337 bp, Homo sapiens
  I.2400 (AI862880)
ttttttttttttttttttttttttttttttttttttttttttttttttttttttttttttttttttttttttttttttttttttttaaaaaaaaaaccccccccttttttgggggaaaattaccccgggggaaaaaaaccaaaggggggggggtaaaaaaaggaaccctgggaagggggaacccccgggaggggctctttaaaaagggcggcaacgggggggggggggtccccccccccccccaaggggccacccccttttaaaaaaaaaaaaaggggggggggggggggttttttttccccggggggaaaaaccgcccccaaaaccctttttggga

SEQ ID NO: 2401 - DNA, 447 bp, Homo sapiens
  I.2401 (AI862391)
  misc_feature (191)..(191): n is a, c, g, or t
  misc_feature (269)..(269): n is a, c, g, or t
ttttttttgttgtttatgaactttattcatagtacatcatgatatatattgtcttctctcagcattatatgaagaagagaactccacactgtaggtcactgtggttcatagattttcactgctgaataacattacacagtgtggttatatcatacttcacccattctcactggctgggtctttgggttggntctagactttttcctttttttggtttctttttttcctttttttttttttggggggatggagtttcgctcgttgcccangctggagtgagactctgtctcaaaaaaaaaaaaaagtttatagttttagcttttacatttatgtttatagttccttttacgcatttaaaaatttatcatgtttttgatgctattaatgtaacactttcatttcaaagtgttcactgctacaacaggttctatatactgaccctgtatc

SEQ ID NO: 2402 - DNA, 245 bp, Homo sapiens
  I.2402 (AI862063)
ttctttaagagatggggcctctctatgttgctcaggctggtcatgaattccagccctcaaatgatcctcccaccttggcttctccaagtgctgggattacaggtgtgactcaccatgctcggccagatcatcacttttctgtcacttaaatctcttgataaaggtgcttgatctcaaattttctcttctttaccttagctcctataccactaaagtcttctttgaaaaaaaaaaaaatcactttt

SEQ ID NO: 2403 - DNA, 399 bp, Homo sapiens
  I.2403 (AI862011)
tagggtgaaattttgttcttctatcttccccccttgcatggagaggaccctcattcctgcccccaccctcgcttcactgtgccaggcacaggcagagcccaggtgctgcctctgcttgtctgcagttgccgacgaggcctgcgctgagcattttggcaagtctggagaattgaaggcccaggcccttggccctatcaccgcaatgcaggcccagaggtggcaggcgggagctcaccgatggatctgccagtgtcagtcccagagcggaccccagaagtgttcaggcgtggactcgcactgtctgacatttccatcgatggcctgcatgaggaatgggcggtgagcatcctccttccatctccagctgggggtggagggtgtgagcctgcccgccgagag

SEQ ID NO: 2404 - DNA, 413 bp, Homo sapiens
  I.2404 (AI861979)
attttcatacaactcatttataatttattttcacacaactcactatgttacaaaactgtacacctgcccccaaagttggataacccaaagtcacattccttggaaagagaagaatcaacactgggccgctttttcaagagcagtctcttctggattgggcccaacaaggctagaccagaatgtggagtacaggaatggccattcttcaagtccgaggggtcaggttcttagcctggtgcttccagtcgttacaggaggggtgtctctgtttggaaagccagcaccagcacccagaacacaggagtccagagagacaggcaggcactgctggccaccatctggctgtggtgggaatgcccacggcgagggagccgcagttcagtggagatgtgcctgtccaggacagggacctg

SEQ ID NO: 2405 - DNA, 475 bp, Homo sapiens
  I.2405 (AI860121)
agttgtatgtaataattgtactatttatgggacacagtgacattttgatgcacgtacacaatgtgtaataaatcaggaccatcacctcaaacatttatttttgaacattcaaaacccgtcctctagctttctgaaaacacgcactaaattatcgttagccacattcaccctacagtgctacaacacaccagaacttactcctccaatctagcagtcactctgtatctgataacagacctctcaacagacctctccctatttatcctcccctctctctccctcttagcctttatcaacaattctctgcttcggtgagctgtttttgtagctcccacatgagtgtgaacgtgaggtatttcccccctttctgtgcctgattttccgttgagtcctaattttcaactcttctgacataaaacaaaacaaaaacagcaacaaaaagatacctgcaagtatctagacaaaaagtaaccca

SEQ ID NO: 2406 - DNA, 153 bp, Homo sapiens
  I.2406 (AI860024)
ttttagtgacttagcattttatttcgtctatataactaggcttaattttaacaccttaattttaacattaaagatggcacgtcagacacacagataagaaatcaatgttctgaaattaatatcctacttacattaaacatccctatcaggaag

SEQ ID NO: 2407 - DNA, 426 bp, Homo sapiens
  I.2407 (AI859777)
  misc_feature (329)..(329): n is a, c, g, or t
  misc_feature (331)..(331): n is a, c, g, or t
  misc_feature (340)..(340): n is a, c, g, or t
  misc_feature (341)..(341): n is a, c, g, or t
aaggagtgaaaatattttctaatgttgtcatgtgctttaaagatatgtatgaaatgtctgtggatgaaataatatatctggtatttacttcaaaaataacagagatgagagaagtgggtacacagacaaagcaagattggccatgagctgataattcttgaagctggtgatgaggccgctggagttcaatataagattctgtgtatttttgtatatgttcaaattttttcatgatagaaagttttaaaaagttactttttttttgagacggaatcgcgctccgttgctaattttttgtattttcagtagagatgaggcctcaccatggngncaggatggnntttatcttctgacctcgtgatccccccgcctcagcctcccaaagtgctgggattagggattacaggcgtgagccgctgcgcccag

SEQ ID NO: 2408 - DNA, 375 bp, Homo sapiens
  I.2408 (AI859710)
tttttttttccattcttttttttattttaaacaagaattttcccaccacctacaatgtgggctgtgctgggcattatgaaggacacaaagatggggactggaacagcctgtctacctcctggaaaggaggcactttttctgtccctgaaggcaaacagaggtgggagatacacagattatgattgctaaattgaccagaggctgttgataaccaattgcagtgtgcattttctatgctatggtaggagagtagcccaccaaaaaactaggcaaaacaggggggcaaaaggaaactttttattgcttggagtaaacctgatcacatgacgtcctttgataataaagatgctattactttcctacagtttcctgact

SEQ ID NO: 2409 - DNA, 579 bp, Homo sapiens
  I.2409 (AI831532)
  misc_feature (578)..(578): n is a, c, g, or t
tttttgacaaattaagcaaatcatttaattaaaaggaatttccagagtatacagccaaatcattcacattttatatttacaattaaatactacacagcaagttcagaatgatcctgaggcattaaaagataatgaatttaaaaattatagtcacttactgaaatgtagcaatataattttaagttttctccttgattttcacttgaccaaaagttcaagtgacaagactttacattttgattattattctgtagatactgtctgttctaatattcatttatattattcttattcttagaaatctaaatagctaccagaaggttgtattgggaatgaccattaccattctatgcaagtatcttcccatgtgggtaatatcaagaccagggaataatcgaaatttcttgtcaagttcccatcgttcttgagagaccaaaggactcgacattttcaaatctattagtttacgccccctctttcagggaagcgtggttgggagcgtggactacttataagttaagtccagctttatgggcaaatcactgccaatgccacggaccggatggtttatagatganc

SEQ ID NO: 2410 - DNA, 396 bp, Homo sapiens
  I.2410 (AI831472)
tttttttttttttttttttttttttttttttttttttttttttttttttttaacccagagcccctcctttaatacaaaaactttattgaaaaaacctacccctggccaggtgcccttttaaaggggggggccttgggggggttttgcccccccagcgggggggaaatgcccccggcccctcttttaaaaaactgtcccctgggggggggcgggggttgaagggggggcccctgcccccctcctgggggacccccgggcttgtttacccctttttggggtgggtaagggggcggagcatggggggggggcattaataaacccctccgaggaagctggacttttgtgggctggcccgggggggggcccggggggggcccgggggggcatggggtgatg

SEQ ID NO: 2411 - DNA, 499 bp, Homo sapiens
  I.2411 (AI830826)
ggcccaggcaaatagtgtcatcgattggcctatgtcgttatggtgggaggattgactgctgctggggctgggctcgccagtcttggggacagtgtcagcctgtgtgccaaccacgatgcaaacatggtgaatgtatcgggccaaacaagtgcaagtgtcatcctggttatgctggaaaaacctgtaatcaagatctaaatgagtgtggcctgaagccccggccctgtaagcacaggtgcatgaacacttacggcagctacaagtgctactgtctcaacggatatatgctcatgccggatggttcctgctcaagtgccctgacctgctccatggcaaactgtcagtatggctgtgatgttgttaaaggacaaatacggtgccagtgcccatcccctggcctgcagctggctcctgatgggaggacctgtgtagatgttgatgaatgtgctacaggaagagcctcctgccctagatgtaggcaatgtgtcaacacttttgg

SEQ ID NO: 2412 - DNA, 487 bp, Homo sapiens
  I.2412 (AI830491)
ttttttttttttttttcgatggaaaaatgaaactttattcccaatatctgacctcaaatgaacttttataacataacttgacagggggacttttttacatacactcacactcagggacaggtctgtctatcggtcatactgtccatctatctgtctgtccattcacatgatttttttaaaaattaagatacagaataattaccaaaggaatgtgaaaagtaaaaagctaagatctaaaagattaaagttaaacattttatattcactgagttcaaatcaatggttctgttgggaatttatcttcaacttcattcactgagttaaatgaatcaatttttaaaacaatctcttttttttaaatagtaagagtaagagacagggtgttataaaatatagtatatgagttttgtagttgtaaactgtgaatctcaggtcaagctacttaactttcccaagactcagttttcttatttttaaacaggggtta

SEQ ID NO: 2413 - DNA, 443 bp, Homo sapiens
  I.2413 (AI829026)
ttttttttttttttacatttaaacatatccaaggctttatgagaaaataatttaaaaagacaacatgtagtataaactatgaaagagaaaaagatttattttctagatctggttctaccagaaaagaaatactttcttttcccacttatggtaattggtttgttctcacgatgctatgaagaaatatatgagactgggtaatttataaagaaaagaggtttaatcgactgaaagttccacacggccagggaggcctcaagaaacttacaattatggtggaaggcactgcttcacagggcagcaggagagaaaatgaacccaagcaggggaaatgccagatgcttataaaaccatagatttcttgagaaatcactcactatcacgagaacagcatgggggaaaccacccccatgattcaatcacctcccactgggtccctccca

SEQ ID NO: 2414 - DNA, 365 bp, Homo sapiens
  I.2414 (AI828714)
tttttttttttttttttttttttttttttttttttttttttttttttttttttttttttttttttttttttttttttttttttttttttttttttttttcgggcccccgggggggcccccggggggggcccgggggggaaaaaaaacccggaaaaacccgccccggccccccccggttttttggaaaaaactggttaaaaggggccccaaaaaaggcccaaggggcaaagggggtccccggggaaaaaaggaacccccccccccccccaaaaaaaaagccgggggggggaacgccccccggggttttaaagggggaaaaaaaaagggggggggggccccccggggaatgggggggttaaaaaaaa

SEQ ID NO: 2415 - DNA, 381 bp, Homo sapiens
  I.2415 (AI828010)
tttctatgttagatatataatgtatttattatatatagtatttgattaatatatagtatattatttatatattataaatacatacacatatatagaaaaaagctggagggaaatacactcaaaatactaacagtagttttctctaggtggcgggattatcagagatttttatattcttccgattgctttttctattttatcggtttttccacacgagcctgaagatcagtggagaagaggactccagtcgggaaggaaacagagcggctgggttcttggtcatccttgcaggggaggaattcttcttcacttaagtcttagctgcccagtcttcaaaaccacttcaggtatctgcagtgcacagggagccagctgggaatt

SEQ ID NO: 2416 - DNA, 503 bp, Homo sapiens
  I.2416 (AI827655)
  misc_feature (6)..(6): n is a, c, g, or t
  misc_feature (11)..(11): n is a, c, g, or t
  misc_feature (12)..(12): n is a, c, g, or t
tttggnctaannggttatgactgtgctacagggggcagggtgttgttcctaaaaaattctcatgtaaatctgttacttggcacctggtacttcatttttctccagaaagaagtctctatgtgttagtaatataaattgtttaggactctccagaaagtttaatgaatcaaaatttaagtacaattctttattactgaacctgatcattatgtgtgacagcaaattgaaccgaaatttgcttcaaattcatgttccatttgaaggcacacatcgttcttgcccattttgatttcctaattctcaagtccctccaccatgtgactcatgctcttcatgagtcacaggtatctttgcttcccctcaaataggatcaagtgactaaacctgaggcaggggctccatccaatgtgatgatggctttgggtttgggcaccagctctgaagggtgagggacagatacagggtctcttagctcttttctttctgctaagggctattctgct

SEQ ID NO: 2417 - DNA, 484 bp, Homo sapiens
  I.2417 (AI827654)
  misc_feature (9)..(9): n is a, c, g, or t
  misc_feature (13)..(13): n is a, c, g, or t
  misc_feature (448)..(448): n is a, c, g, or t
accctaatnatanctttgaaatcttttcataggaatgggtagaattttaccccattcattttttaatgtggtaaaatatacataaaatttaccatcttaaccatttttaagtgtagagttcagtggcatgaagttcattcacattcttgtgcaactatcatcactatccaaatccagaacttttccatcatcccaaactttgaaatcattaaacataacagcctactttcccctcctcacagttcctgagaatcactgttctacttcttgtctctctgaatttgactattctaggtacacaaaggtggaatcatacagtgtttgtccttttgtgtctaggttattccacttatgatgtcttcgggcttcatccacattggagcatgagctagaattgtactcctttctaaggctgaataatattctgttgtatgtctctatctcattntgtttatccattcatccaatgatggacatttgggtt

SEQ ID NO: 2418 - DNA, 204 bp, Homo sapiens
  I.2418 (AI826029)
ttttttttttttttttcagaaggaagccggtttttaatggacaaataataattatatatatttatggggtccaacatattttatgcatgtatccaaggtaaaaggataaattcataataatcagcatttttaggggggagaacatttaaaatcctcccttgtagctatttcaaaatatacaatacattattatcaactatagtt

SEQ ID NO: 2419 - DNA, 534 bp, Homo sapiens
  I.2419 (AI825890)
aagtttaaactacagtctagtggatttagttcttcatgcttttgcctaagtgctacaatggcagggaaagaggctttggaatttcagatttttttttctttcttttttgtaaagaaaacctctcaagagggtatccaaccactttttggagacataaacatatgtaaagcaaagtgacccaaataaaggaagaatgaaaaaaaatatatatttattcttcaatttaggccaattctcttttacgggctccttgcaattagctggcaatcttgtcctgtgggtctgaaggattaaagcaggagcaaagaacaaaaggagtgtctgctacactcctccatcggtcctttctaaacaaatcagacttcatctcctccagtgcctccttaccacctcatcttctttcctctacccataatcccttaggggaaggactgttaacatgtgaaaatgctacgtaaatgaaattccttcagaatcaacacagatttgaaatggctccagaaactagagggtggtttttatggttctctcatt

SEQ ID NO: 2420 - DNA, 498 bp, Homo sapiens
  I.2420 (AI825825)
  misc_feature (486)..(486): n is a, c, g, or t
gcggccgccgccggagccgagcggggcggaagcgcgcgtcgcgctgctgctcgggcccgaccgcgccggcccgcacctcccggcccggagctgcgggctgcggtcagggcgatcccggggccctaggcggctgccgccgggcaagtttccgcgaagcctggctcgccggttccgggaaccaagcgggggaggctggagggtgttgaggtttcgtttctgccagccgaccgggcgcttggtttcgcaggtgccaggggtcgggggtgcgacctctccctctgggccattagacagacccaggctcggggaagaggctgcgccgacgcccgagggtttgcgtttccttcgcgtctcgtttgcacaccattttctcccccaaaagcaaagcttctgaccttctgggggttcgaagaggttaagtcattttcccccaggtaatctagtcagcgaaaggcttcagctgggagggcctcccgcctgggcggngacccgctggag

SEQ ID NO: 2421 - DNA, 372 bp, Homo sapiens
  I.2421 (AI825739)
cataaagctaaatccctttaatttaaaaaaaaacagcttttttggttgacttttcccctctcttttctaaaataagggtgatcttatccaggggttcttattttatattcttaatttagcaagataaaaatgtgagcagctgcacgccagcccccaaactctaggggaggtttttctggttcagactgtctcaggttcgagcctccttagggcaccccctttccgtccaccttagcctggaactgagacttctttttcttttgtatctgtccttctcagatctcctatttgtattttccaaaacaatctagttgaagaaatcctatttggtatgtttgaaatctttatgctcccagctcaaactctggatta

SEQ ID NO: 2422 - DNA, 388 bp, Homo sapiens
  I.2422 (AI825349)
gctaaaagtaattggaaaataacataaaaagatgatcagtggaaaaactggcttgctctttttgcctataggatgacagaaagaatccaatatgagacccaaagttaccagttcctgctgagctttctttcccatctagcccactgatcccaaaagagcaaagtccagtacaatcaacacggaagggacagatagggagccggaatgtgacactggcagcaaatgagaaatcaaacatttacacagcagtgactccactgaaaaagtctccccaaagacaactggctataattcccagagaatacatggggctggtagggttctaaaacctgtcttccctagacaccattgactgactacatcctcacagggtatccaggaagtgaga

SEQ ID NO: 2423 - DNA, 234 bp, Homo sapiens
  I.2423 (AI825033)
tttttttggtagcactccattttatagatcgggagatagaagcaaagataggttaagagagttatccaaaagaggtggccagctgtcatctctgcatgtcaaaacatctcatccatctttttccagccgcagcaacatgactttccttgggggagagacaccccttcccacagttcccacagtttgaacagggctgactccacctcttggttccagggctgggtacccaactgt

SEQ ID NO: 2424 - DNA, 156 bp, Homo sapiens
  I.2424 (AI825139)
ttttttttttttttttttttttttcaaaaataaaattttattccccatggatggaacccatgaaaaacttttaccctttcccatgttccagcccaatttttaaagggaatttttttggccataaaaaatttctggctgtttgggaaaagggaaaaa

SEQ ID NO: 2425 - DNA, 275 bp, Homo sapiens
  I.2425 (AI824764)
  misc_feature (262)..(262): n is a, c, g, or t
  misc_feature (263)..(263): n is a, c, g, or t
  misc_feature (264)..(264): n is a, c, g, or t
ttttttttttttttttttttttttttttttttttttttttttttttttttttttttttttttttttttttttttttttttttttttttttttttttttttttccccccccccgggaaaaaagggggttttaaaaaaaaaaagccccccaaaaaggttccccctttggggaaaaaaaaaaaaaaaaaaaagttggccccgggccccccccctctctgggaaggagggttccccctccagccccttttatagggggggggggtnnnggggggggggg

SEQ ID NO: 2426 - DNA, 179 bp, Homo sapiens
  I.2426 (AI824579)
tttgaaacagggtatcattctgttgcccaggctggagtgcagtgttgcaatcatagctcactgcagcctcgaactcctaggcccaacagatccttctacctcagcctcctgagtagctgggacgacaggcacacatcacaatgacgaggtaattttttgtataggcaaagtttgccatg

SEQ ID NO: 2427 - DNA, 110 bp, Homo sapiens
  I.2427 (AI824433)
atgctagatgtatctacgcctcaaataacagcaagtccatgttcattttaaatgtacaaaaatgctttatgaataaaaactgttacaaaaagaacatttcaaacaatgta

SEQ ID NO: 2428 - DNA, 534 bp, Homo sapiens
  I.2428 (AI822141)
  misc_feature (509)..(509): n is a, c, g, or t
ttttttataaaaataactttgttattaatcatatacaatcataacaaaagtacatcatagtatcacatccataattgcttgaatgctaacttgactgttacatggacctgttacaaataatgaacaacagagctactccagtatatgactagtcactgtgaaataaaaacagacccatggcacacatgaaattcctaaggggacttgctttgatcccctggggaataagagggtccttttctatgatttccctagagcagtaacgtttgttgagggagcatgtgaagttcatgattatatgccttaacaattacagtcatggtgtgttttgttttccaaatggaaaattatttttgacttgttgtgagatataaatattgactatgccaggaaaaaattcatctatttccctgaactcattattaataactttagatggctctattctacttgttgtttctggggcacaggctgagaagtggggagagatagtggggaatgacacccanaatatgatgggggagttgctacctg

SEQ ID NO: 2429 - DNA, 534 bp, Homo sapiens
  I.2429 (AI822129)
ttttaaatcaattatgatttattcacgtgatgtaatgcaaaggagccatttaaatcatattttggacaaatgtttatgcattagggaaaagttcacaatatgctttaagtgaggataaccaattttaaaagcaacaaacaaaatggcattctacatttctaaaatttagcaatattttatagctgtctttcacctatatgtttccattaaaagaactaaaagaaaccattgcaaaccagatgtcaaaagaaaggaaaaaaattacctttcccactgccttaacaaaccaatcattttcatgtttctgtgttcgtttctagttcaaaatgacagtcatgcagtgcttttcagtgctatattatgtgattttaatttttcatctttacacttttctacattccccatctgttctacaacacaattatactccccacatattcaccacgctgatattattaacattaccagtcagctgggacccacctccccttccacaggaaggtcatctccttcaccttatcctcactgaaggat

SEQ ID NO: 2430 - DNA, 549 bp, Homo sapiens
  I.2430 (AI822112)
gccctgccggccatgttcatccgtgcccagccaggtgctcttcaccctctttctgctcacccatgcctacccggaaagccagctacagctgggtataaaggaagagaatactggccctgggtgaggtgtggcattagtggcaccttctgggctcctgggcaggggtggggagtggctttcttgagcagctgggatcattcattgactgatttttggataaatgaggtgttagtggaccttgattcggaagattgtgaaagaggataatgggaaggcctggcaccccacggtcctcagatgtcagtgtttgccagccccgcagaaagggcaaggtgggcgagagggccttccattacccagcgagggctgcgcctgagccccgcgagttcccctggcttggattagggggagccaaaagtgttctcactctcaccaccaagtgctttgtatgcctgtggcaacacctttcctgttccagtgaattagggaagtctaggtgattggaggctcttctgacagacctgaagcgggtggtgtgttctcagggtg

SEQ ID NO: 2431 - DNA, 464 bp, Homo sapiens
  I.2431 (AI822111)
tttttttttttttttaaataaccacaattctttctttaatgctttttttaaaaaaatgttgatccaggtttcagttacatatcttttgtttccctaaagaatttcatttaaaatttcttgcaagacaggtctcctggcaacaagtttcttgaatttttatttttctgaggaaggccttaattctccttcacttttgaagggtgttttcagtgggtacagaaacttaggttggtgggtttttttctgtcaacattttgaatttttcatttcactgtcttcttgctttcacagtttctgcaatgttgaatgcagttcttatctttgtgtctctgtaggtaaggtgttttctgccccacctctggtttctttcagagttttcctttatcttttatttcatatagtttgaaaattatatgtccaagtgtaggttgttggcatttattctgcctggtgttctcggagct

SEQ ID NO: 2432 - DNA, 579 bp, Homo sapiens
  I.2432 (AI822108)
  misc_feature (565)..(565): n is a, c, g, or t
tttatatatatagatgatctttaatgatttggagggaaatgaaataatataacaattacacggtatttccattggcaaggccatcaaaagttgattcctcaagcacttctgctatccataaattctcacggttgatacttttctttgccctgcaatctgtattttattaaaagcttttgtttggggaattctttgctgctggctgaaagacctcatgaatgccctagagtgttgtaatagcacattaatgcaatattacattaatcaatagcaccacagacatatacaattttaaaaacaaaacaactgcaaaatccacatctgtgttgtatgggcaagtgtgatgctgacttggcaaaatgtcatattccaaattcagctatcctgaaacaaatccaatttgtgtactttacatcaacaacagaaaacactgactgagcaaaggtaatgtatttatggatccatcatttatcaccagaatatataatgtgaaaagaatgagacatgaagccaaagagaaacattcctttaaaatgaattagaagcttctaaagatacttatcanaaggattcatacag

SEQ ID NO: 2433 - DNA, 567 bp, Homo sapiens
  I.2433 (AI822106)
ttttttttttttgctaaataaatgtttatttaatgaacaaattatttaatgaactaatgaatgaatgatctattccaataaatatatgctcctagactgctactgacattttattccacttagggtctgccacattggctctccaacagccggtactataatccatgctaagtaataattacaaattaggagtaatatattggtagtgttggcagaaatccccaagtgattcattctgccagatatgttaaaattatagtttagtcattgaatactgaaggtgataagtacagtcatttttacaagttgttctggatccatggacgaagataggcatgtacacaaacggcactaaactatgaggcagtgaggtagcacagggttacgggggacactgtggagggacttctaaactcagtgtttgtgatcagggaaggctgattcctgatcagattcttaaggagtgagttattctgtgaggtgactggtggtggttgtatcaggcaagcagaggtaaaagtgtagacatctggaggaacagaaaaacagaatcaacagcttcatgga

SEQ ID NO: 2434 - DNA, 569 bp, Homo sapiens
  I.2434 (AI822099)
ctgacataccatgatatagtaaacttgaacttcatgaatgaaagcctctgcaaccatttaacaatctgaaaatccacacaaaatttaagaccaccatattactaaagacaatctactcaacaatctaattacagaaagattactttaaagggctttaaaactaaaaagaataattaacagtaagagattagagcatgcccaagtcctctgtctgatgagaggggagagttctgaggagatcagctcctatcaggatgttgaagaaactgaacaggtatgtttgaagttggaaaggaaacattagtagagttgttcaattctcagaacaattgaaatataagtcagcttgccccatcactctgtttactgaggaccattagtgagttacctttacttcaaaaacggaaagaagaccaagctgtggaatgaccaacctagcaagcctatctatagttaaaaataaatttaaaatagaagcacaccatcacatacaaagataagaatactccgtattcatacaattacagatacactaattcatacaccaccccccaacagataaacttaga

SEQ ID NO: 2435 - DNA, 81 bp, Homo sapiens
  I.2435 (AI822095)
tttttttttttttttttttttttcaaatccaaaagggattcatgtttattaaaaaaaaaatctgaaaattaaacccaggga

SEQ ID NO: 2436 - DNA, 616 bp, Homo sapiens
  I.2436 (AI822093)
  misc_feature (556)..(556): n is a, c, g, or t
tttttataatttaaaaaagaaaattattttattatttggaaaattaaatcaaagcatatgttctatgtttcagagtgtcatcctaactatgtaaaggatatatttggcacatatgagttttctggccataggggattgatgaagcctatactagttgtagagtgagcataattttcacctaataaatacaagctcttttctctctcttatcatttgatttggggaagtgcaaaagtctgaggcagtaattatattgtcaagatctcctagctactttcttagttctaggaccacaagaagtgcctctctgccccatctttcccaggtcctgggaatactggcccatccccttcatttcctcatctctccacaaaggaaggtagggtggtaccataccataatggtaaggaggctgagtacaaagctgcccaggaaaatggcgataccataaaaataaagtgtgctacagacagatgtgttggcagaaggtggaagttcagccatggctgatggtggtgagtgcatcaagatacacttgtggctctgactgaagttntggaaacattcactagtatttcccagacagaatacaggtgtcatcaatagcagaggtatc

SEQ ID NO: 2437 - DNA, 460 bp, Homo sapiens
  I.2437 (AI822084)
ctcaacctgttagtagaaatgttgacttcgattttttgcaccctcttcacaggacctcataagttgcctctgttcttggaaagcaatgggaataaaaatatgctgttgaaaatagtgcatggggcatgcattttagtttaggaaacccccctcccttcccagttccagagggagaaattataagctatactgtgccaaaagtgagtggggctgcagagaatggtgccttttctcaccttctgagttaatgcccgacatctgccattggattcattgaccaaaggaagtcatttctactgtataaactcaggagtatcatagcccaacaagtaaataataaatgttcattggttttggaaggaaggaaaggtgagtattaccccaccaaataccagcgaagagcaccctggctttggccatctttccaaggttcataattgctgtgggcctggtgagccct

SEQ ID NO: 2438 - DNA, 525 bp, Homo sapiens
  I.2438 (AI822073)
  misc_feature (418)..(418): n is a, c, g, or t
agggctatgtcatctgctagctcacttgtgaaggcagatggctatgggaagactgaagcatgggcctaggatttcaccagcaagtagtaatgggagacccttttttgggatttcccaggtcaggtggagattacacttagacaacaaataggaaatccttcagtgaggataaggtgaaggagatgaccttcctgtggaaggggaggtgggtcccagctgactggtaatgttaataatatcagcgtggtgaatatgtggggagtataattgtgttgtagaacagatggggaatgtagaaaagtgtaaagatgaaaaattaaaatcacataatatagcactgaaaagcactgcatgactgtcattttgaactagaaacgaacacagaaacatgaaaatgattggtttgttaaggcagtgngaaaggtaatttttttcctttcttttgacatctggtttgcaatggtttcttttagttcttttaatggaaacatataggtgaaagacagctataaaatattgctaaat

SEQ ID NO: 2439 - DNA, 477 bp, Homo sapiens
  I.2439 (AI822055)
caccaaactctggtgtagtccagggcagtggggcaggtaaattggcttccctggaaaatatgtccatctatgtgccttattcccagttcgtgcttttaagggatggagcacaccagccatgaactaaggctggagtagcaaaacatgaaatctgctttctacaaattatccagataatctcttccaatccccttctggaggaaaaacagagctgtatgagggtgacagtctggcaggtattcaaagctgcagtgaccatggcttggctcctgttgtatccacagagctgtttgattgggttaatttatacagtttttcctgtatgaatccttttgataagtatctttagaagcttctaattcattttaaaggaatgtttctctttggcttcatgtctcattcttttcacattatatattctggtgataaatgatggatccataaatacattacctttgctcagtcagtgttttctgt

SEQ ID NO: 2440 - DNA, 549 bp, Homo sapiens
  I.2440 (AI822053)
aattcggcacgagggtgttggctgatgctccctcttgccggctcctgctcttgaaacacacccaagtgcaatgttcaatcatctacttgtttccaaagttatttgggtcagcattttcctccacccaccacttaaaactgatttgtttcatacatttgaaatgtatgaaaagccagaaatccaggacccaccctggcctgctccctttttctcacctactgtgttaaggataagtcaattgagcttcacttctctaattgaaatcaccgtgctgatggagtctgtctgtggaaatgaaaggtggctaccataatctgttgggagttgaattaatcctctgggagtgaggctgacctaattactcagaaatactgggcttgctttcattctgtggaatacagccatgagaaagaggccagcatgccatttcctaatcttttcttgaattgcctgaaactcacctaacatgaaactgagaagccttttcatttgaaagtggtatttcttatgttttttatctttttgcttgaaagtattcttaaactaaag

SEQ ID NO: 2441 - DNA, 531 bp, Homo sapiens
  I.2441 (AI822043)
aattcggcacgaggattttttttttttgttgttattgttgtttataatagagctgttttaatttgtaagacattaatttgaaagccctttaagactgtttaaaagcttgactgaaaagccataagcagagagttttatttcaacaccagtagaaaagttagaaaattaggcagagaaatgaaatagagggatagagagagctaggaaggctctacacattaattctgtaattacaggggatttttagagagtctgaataatgatcaatcaagccttgagtctttcttaatgtaatttgcccatcagtttaaaaatgtgcatgagaacaggccataatacgtagtcagctagagtcccacaaacccttggcatgccttaatgtttgagaattccattctatttctcattaatctcttgaaagcaaagataattttataaatccttttggaccagtgttttagatggtagtggctgtggcagtgacttttaattagccatcctgaacccatcatttaaaatatttatttttgc

SEQ ID NO: 2442 - DNA, 545 bp, Homo sapiens
  I.2442 (AI822041)
  misc_feature (499)..(499): n is a, c, g, or t
tagcaattcgtttgctgtccttcctctccttcgaagatgacaaggcctaccatcgtttcttcctgcctttgggccgtcaggcagttggttgggacccgctccaaccctcggttcttcctgcaatacagtggatacaatttgtcatggctactctgagtgttataggttcaagttcacttattgcctatgctgtattccataatatacagaaatctccagagataagaccacttttttatctgagcttctgtgacctgctcctgggactttgctggctcacggagacacttctctatggagcttcagtagcaaataaggacatcatctgctataacctacaagcagttggacaggggagacggggtttcgccatgtttgccaggctggtcctgaatgcctgacctcaagtgattcaccgcttgggcctcccaaagtgctgggattacaggtgtgagccactgcacctggcctccttaaatgtatctttatggcctaattntcacctttgcacccagttggtgatagattatacttgtcgagtttgt

SEQ ID NO: 2443 - DNA, 524 bp, Homo sapiens
  I.2443 (AI822026)
tttggaatttttcaacatcattttattaacaatattattttaatagttacttgcattcttcctgacatatttaagtatagctatatatcacaaaatatcctgtgttttattagtataacaatcgaaagcatcatattcctcatcgattttaccgtactttataaatagcattgaaaaacatatgactgctcatcaatagcacaaagcgattatgagaactgcagattacctggttaggtgaagaaaaggtttttttcattcagtggcaatagtggcaacccaagaaacacagctagcaatatcagaaaagggaattgcccttcctggctaataacagttttattaaatatttgtgtaaaatgcacaaatggcaagataataattatgatattttagatgccgtcaaaaaacagacatgcatctactattcattaaacagagtaagatgcatcgcaagtcatggacactcccaatctcaagacattttattctcagctcatgtgagaaaaacatgagtcagagaa

SEQ ID NO: 2444 - DNA, 442 bp, Homo sapiens
  I.2444 (AI821875)
gcctactactactaaattcgcggccgcgtcgactttttttttttctccaaaatgctaatggcagaacttctgctactctgtactgtaccgcacctctgggtacatccagctgtgaccacaccacaactgtatcgcatccagcaacctaaagtactcttgtggttgctcatgtaaatacttggaaaatatctgcctcttccgactctcccttcacattatagaaatgctcaagtctcaaaaacaaaacaagaaacttccagagaacctattcacttcaaattacggagatcccctctctccttgatccacaataaacttctggaaaaggtcgcctacaggccttaaagaatcaccacgattttcctcccctatacaagcaaagcttttcagacaaaaatcttaacagtagaaatgtacccacataaacaagctggccctcagg

SEQ ID NO: 2445 - DNA, 429 bp, Homo sapiens
  I.2445 (AI821765)
ctttttctgtaaatttagtttgtatggtcgtaggacactctcacagtaactggatacccaaaggataacagaaatagtctgaaaggaaaaattgcaaattcaccaataaggattacactaaaaatatctatcaggaaattagaggcaatggattcaacaaattctaacgcagttcttctatgtaaatcccttcaatttctcatgtgaatctccactctactttctgcaatcactctactgatccaggccttcatcatctcctgctcagaatactacaatggcctaactcttcagcatttcttctggctctcctagctcaaaatccatcctccacttcactccaattttctgtcacttccctgaagaagtggggactgatttaacatccttttcactcagagaagagtccaaattcctaggcatggaatc

SEQ ID NO: 2446 - DNA, 564 bp, Homo sapiens
  I.2446 (AI821758)
  misc_feature (499)..(499): n is a, c, g, or t
tttgtaaacaatagaaatttatttggctcatgcttctgaagactgggaagtccaagagtatggcaccagcatctggtgggggtcttcatgctgtatcatcccatggtggaaggcagaagggcaagagagcactgctccctctcttctctctgctagagaccagaggccttgaaggaaggaagcccaagggtctctcctggctctgcttccccatcactgcctccacttccccgcatccctttccctggcagaggcttcttgccacagggctctgggcactcacaagacctggccacagtaaacgcccttgcatcctattgagtgagccaaggataagcgtggtccctggcagggtgcaggattctatcctgaaatacaccccctccactttctcctattccagtccaccggggcctctcctccaggcaggaaacatgatctccttttgacctgctgtgtgactttggatcagtgacttcacctctctgagccttgattntcttatctgtaaaatgagttgaggcaagacagcattcagagggtccttgcagatgtgattaaata

SEQ ID NO: 2447 - DNA, 459 bp, Homo sapiens
  I.2447 (AI821735)
tgtattgaaatatgattttttaatttagggcttgaaaatcttacgaaagttgttttaagtcatcgaataattctatctggacagtgacattgcaaaactaataaaatgaaaacactagaaatattatttggaggtgcagggagatgaggcacattttggggcaaaggtagagaaaatgtagtatttggatagttagatgttttacttagatttttgtttcattagcaactaatggttgaggtgtctatttatttaatgaagtagaggtgtatttcatttaatacaaagaaagcttctccccctccccaagcaatgtagaaattggaacaaagatacaccaaagccctgttaggacattttccacaggattaaaaacaaatcccaaactgtacaatgctgtaagagagagacattacactatgtaagtgtgactagataaaagtatttcaaggaaacttt

SEQ ID NO: 2448 - DNA, 755 bp, Homo sapiens
  I.2448 (AI821689)
  misc_feature (493)..(493): n is a, c, g, or t
  misc_feature (587)..(587): n is a, c, g, or t
  misc_feature (632)..(632): n is a, c, g, or t
  misc_feature (641)..(641): n is a, c, g, or t
  misc_feature (643)..(643): n is a, c, g, or t
  misc_feature (666)..(666): n is a, c, g, or t
  misc_feature (697)..(697): n is a, c, g, or t
ttgtgaatgaaaacttcggttttattataatttaattctgaaatttctcacctcttccagaaatcaatttgaaaacagctattggacaaaaatgaactaagacaaagttataaggagaacgccatcctgctcaagggctgtatgaaggctttgacgccgggctgccagcggcagatgaacaaggagcgtggcgggagggtaccctcggtgacggcgccacccctgtcaccagcaaatgaccaacggggatgatttgggcacgaaaacgagaaagggccgacggctctaccgccagctgcggctccattccctgtgggctgagaccacctcgagcacacgcccgcaggccctgggctgtctgtgccgcccgcgccgggtcactatggcccgatcctgggtcaccaggtgcaccacggcgccaggtgggctcagaccttggggctgtctcctccagacgtgtctgcctgctgctccgacgcggcctttgctgcanactctgctgccagctgcaggtccgaggtcacgttctgcacaaagcggtaactggaggagccggcaccgcgtggactggctgggcaggagttggngacactgatggtgccccgtcgggaggggacggggctgaccatgcnttcggagtncngctttccgggatgtgatctttanaaagggagattctggggtacagtgggccganccggggagtctggggcctcttctttggataaaagcgagtgaaactggatcttgatggc

SEQ ID NO: 2449 - DNA, 548 bp, Homo sapiens
  I.2449 (AI821631)
gttatgatatgttcatttatttttcaatgcatccaaattcctcagatttcaaaaagaagggatccttctaagtgttcatgctggatcttactggcttctagtttgagatctggttggtagtgtattaattaatttaatgcttacgtggagcttggtagggaaaggaggttggtgggcactctgagaggcacattgccagcttccaaggacctttgcaaggggcagctccagggcccctaccctttctctctctctctccctgaggcagggggctgaagatgtggccaaggagagcttcaggctgtgtctccattggtaactgcctttgttgcacatttccagaaaaccacaactggaaacctcttctgttgggacatgaattctttttcctttgggaagggcaacagaagcaagtggtgatcccaggcagtaatgcctgcagcccagagactgcattctcatgaggctgatcaatccttgtgcagagttgtccctggcaacacaacatccgtcagaaatcacagcacaaacagggttattgtgtggag

SEQ ID NO: 2450 - DNA, 582 bp, Homo sapiens
  I.2450 (AI821568)
tactgttctaatttactgtattttcacagcttgttgttatatctgttacaatacatctcacaccactgtatttttttcacaatttttttggctatgaattttaaaaatcaacttgtcaaagcccattcttaaacatcttgcagcctggtgcggtggctgatgcctgtaatcccagcactttgggagggtgaggtgggcagaacagcctggccaacatggcgaaacctcatctctactaaaaatacaaaaattagctgggcatggtggggcgcacctgtaatcccagctactcgggaggctgaggcaggagaatcacttgaacccgggaggcagaggttgcagtgacccgagatcacgccactgcactccagcattgttcttggtgctttgtgtgtattagctcatttaatcttcacaacaactctagaacccccattttacagttgatagaaacagggacaaagagggtaggtatatcacttggccagcgtcacaccctgctatgaagcactcacatgaggcaacgtaaagcacacacaatacttagcacctataaactgcatcaattaaggtcatccactg

SEQ ID NO: 2451 - DNA, 480 bp, Homo sapiens
  I.2451 (AI821526)
ccttttaccatttattaattatattattctctgtttagcaacagagagatatgtacagaagccacaaaagctctagataattacattttccaattacaagagtttcagtttttgagactatgacatcagaatatttcagaataagtcttcagtttagaaccagggttacgattctttttaaagaggattactttatatgtatttctgggttgctttgaaggatccctgagtaatttctatgcatgtgtcacaggttttttttttcttgtccttccttcctggtgtctgactggcccccgccactgccccaagtaaccactcccgccccgagattactgggtctaaatggcacaggtgttctccttttatcccgattacccttgaaaggatagggagaaaacattagaaatcatgtcccacatagggtcaaggctgccatgagcttaaggcaggaagttaagtaaacattggagaccaaag

SEQ ID NO: 2452 - DNA, 426 bp, Homo sapiens
  I.2452 (AI821500)
gcgtcgactttttttttttttttttctttcctttttctcttttatttatttatttttatgcctaatgaacctggctagcaattccagtatatgttgaatagattggtcagagtaggtggtatcatctgaacactgtgtcctcaaaattcatatgttaaaacctaattcccaatgtgatggccttaagagggtgagcctttggagatgattaggtgattaggctccacctttatcatgagattaatactcttataaaagaggcctgaggaagcttgttctccctatctaccatgtgagaacagaggtagaagatgccaacatgaaggaaagaacaagccctcacctaacactgaatccgctgacaacttggccttggacttcccagcctccagactgtaaaataatttctgttgttaataagttact

SEQ ID NO: 2453 - DNA, 459 bp, Homo sapiens
  I.2453 (AI821471)
caaggctaatcaactgaagctgagggagtgaaaaaagaacaaagaaatctgtgactgcttgtgatcaattagtaaacttaattttttagattaaaatgaaataatacatgcaaagcccttggcacagtgccttgcacataatacatttcggggttaagttgtgctagctattctgttattgattgtcttgccctttgttctctggaaggttggatcttgccatttggggatggccaatgggaaggctgagcaagacatcagagggtgggaggaaaggaggtatatttattttccttactccttctctgctgggcttctattttgtcactagctgcattcctttttatgaccacaactccagtctaatggccaccctcccataactagagttcataatcaaactaacactgccacctcctcaggcctaggaatggtcatggtttttcttctcaccttgct

SEQ ID NO: 2454 - DNA, 497 bp, Homo sapiens
  I.2454 (AI821218)
  misc_feature (484)..(484): n is a, c, g, or t
gctggaaatgagatatttatataccaccttataaagcaagatggtgtgtgattttgacttgtagaccacaagcaggagattgatttttttgtggttaggataaagtatccagaggcaacatcatatacaggccccaaaagtgctgcatgtcaaacagcttatctggaggtgaatatgacgtggtttgcagaactgttaaagtttgggaaagtggttctagtgatggcagagacctgatgtaaaagactcgtgtgaaaagttttaataaaatagattcaaggagtgtgagaatggcaaaaagcaaagtattattttataagatgctttttaaaaaatatttacctgtaacatttaatgaatagtatttttctaacctagtcacacacactataaggtaataagttcaattcagtctaccttgtgagtggcagactcatatatttgatatccaacacaatagttggatgtctattaggcatctcanacttaacaggact

SEQ ID NO: 2455 - DNA, 464 bp, Homo sapiens
  I.2455 (AI821166)
ataaagtcctttgagggaatctcctaatggctaggctctctgtcgtaagtcatattccagccccaggcttctgagctcttataacatacaactgagcattcttaagctcacaacctatttccagaaaagagacccacatctttctatgttttatactacctttgtttttacaccatatagtttttttctattagtttaaggtacctagtgttacaggtctagaaagtgcagagccatccctacctagaagagaatagatgggaagagaactgaaagaaagaattcctcaagcactgaagtcaggaaaatccccgtaggcactgtattagttgttccatttatcccagcactccacttgtggatgaaggagttgtatagaaaggagatgagaaaatggcaggagtggaagcagccaagaagagatcgatgactgaagatctccttcaccttcaggactgtctcaa

SEQ ID NO: 2456 - DNA, 525 bp, Homo sapiens
  I.2456 (AI821165)
ccacgcgtccgcggacgcgtgggggcattctggagaggtgattggagaaccatgagagcaggcagacatctgggtgagagggcacgaggggtgagtgacggcagagccagacttgctggagaggcagaaagggaaggattcaagtagcataaccaggaaatagaattgataggatttggtccctgctgacctgtggaataagggggaaggcagaggagttgattctagtatttctaagttgggccacttagtgatattggggtaccaggaacaggcttagtggacccacagaagtgaccggacccaggagtctctctgagcgcccaccctggcttctctgtgttggcttaccctttcttggttgggggtcatgggtgggtcagcttcagtggtgtggtctgaggtgacaggtgctcaggagtgaggacagggagtagacatcaccaatgtgaatgtgaggtaggcaacaagagttattctagaactgacaaatttaatatattttgctgactgctgagttccatt

SEQ ID NO: 2457 - DNA, 487 bp, Homo sapiens
  I.2457 (AI821132)
ttactactactaaattcgcggccgcgtcgacaagggccccatgtttgtgtgaatagtagtaatgtttgcctgagggccagcttgtttatgtgggtacatttctactgttaagatttttgtctgaaaagctttgcttgtataggggaggaaaatcgtggtgattctttaaggcctgtaggcgaccttttccagaagtttattgtggatcaaggagagaggggatctccgtaatttgaagtgaataggttctctggaagtttcttgttttgtttttgagacttgagcatttctataatgtgaagggagagtccggaagaggcagatattttccaagtatttacatgagcaaccacaagagtactttaggttgctggatgcgatacagttgtggtgtggtcacagctggatgtacccagaggtgcggtacagtacagagtagcagaagttctgccattagcattttggagaaaaaaaaaaagtcgacgcg

SEQ ID NO: 2458 - DNA, 461 bp, Homo sapiens
  I.2458 (AI820940)
cacggccatcaagatccagttcacttcgctctatcacaaagaagaggccccagcctccccgctgcggccactgtacccccagatctcccctctgaagatccacatcccggagccggacctccggagcatggtcagccccgtcccctccccgacgggcaccatcagtgtccccaactcctgcccagccagtccacgcggtgccggctcctccagttaccgctttgtgcagaacgtgacctcggacctgcagctggcagcagagtttgcagcaaaggccgcgtcggagcagcaggcagacacgtctggaggagacagccccaaggtctgagcccacctggcgccgtggtgcacatggtgacccaggatcgggccatagtgacccggcgcgggcggcacagacagcccagggcctgcggcgtgtgctcgagtggtctcagcccacagggaatggagccgcagct

SEQ ID NO: 2459 - DNA, 558 bp, Homo sapiens
  I.2459 (AI820883)
tttttttttttttttgaaaaacatagagttttttacaactttattaagttatcccataatcagacccgtataaacaaaagccataatgtaacacgaatgtaacatttcaccatagttaaccaagtcacaacaaatttcaaaacatcagaattctttgaatttactctcataacatcctttatgaattcagtatatagcctgcaaagaagccacacagccattaagtagtagaattctaggtgagaatccaaaaacacctcaaagcaagtttccatatcctgccgacctactcagccaaatgcctgcctgtgtatgaaaccgttttgtttgtctgtttgcttcttcaactgagagcctcttgaacaatctgaatagcctgtggatagtatattaagtctttgcccgtatatatatatgtatgcatatatgtatatatgtatatatacacgtatacacgtatatgtatgtgtatacgtgtatatatacgtatatttacacatatacgtgtatatatacatacacacatatacatataaaattatatataaacacacatac

SEQ ID NO: 2460 - DNA, 470 bp, Homo sapiens
  I.2460 (AI820874)
aggcaagtttattaaaaaagtaaaggaataaagaatggctactctataagcagaacagctcaactagcatggtttctatcccctaactagactccaacgaatgcaagagggataatagcatctacctcctaatacaacactaatacttattatcattagtatattaggctacagaagccaaaagcagaaattaagaaatgttatggtcagtagaatcaaatatacaaggatattggattaggttattgttgttggtctttcagagcaaagttttaaaatctgatttgagaaaaacctcccagcatgcacacacagccggactctcagaaaatgtttcctttttagtcaattcctacatggatgccatgcaaaaccactccatctatcaagctgtcagaatgaactgctaaattcttaatagtctcattcacacaaaatgtccccacagtccagtgcatctggagggtctg

SEQ ID NO: 2461 - DNA, 491 bp, Homo sapiens
  I.2461 (AI820873)
acggttcatatctttattttgttacttgattcccagtcttacaatagctcttctcagattattctcaactttacaagataatttggagttactgcttttcaaaatcctttggtaattgcttgtgcctaaatcatgccaccttattccatgggatccattaatatttgggtaactagacaagggtatttagcaatccagggatgcagatgctgtgaaatgggttttcacagatacggagctgcagcttaacgttatcttcagagagacagaaagcggagtctcattatcattttctaaattttttgccaaagggaagttcagttccatatctcttgcttttctttttgcttatcttgtttttctacacacctcactggctgctccttctcagcctcctttgataattcctctgcacctcccagatctttaaacacgggtatgtttcaggactcagttctctcacacaggtgatctctttgtattctgcagct

SEQ ID NO: 2462 - DNA, 526 bp, Homo sapiens
  I.2462 (AI820840)
tactgtcacatagcctttaatcatttacaaactactttcacactatctcattgaagagatgaaagaaagaaggaaaaaggggggaaccctaggaggacattctttttacaaattaagaaattgaggctcaggcaggttgagtaatttaccaaatgtcacaaagccaacaagtagtagagctggttcagaagaatcagtcttttgattcccaattccaaattctttctattgtattattctgatgttcttgaagtcattagtagcctgaaacaaattctcaaaacaggatacttgttatttgttagaaatggcatctattgacaatgtgtcacgttacagcccagctttatcagagacagaaaaatacaagaaaccaaatttcattacaaatagcgtctaatttttttttttttttttttttttggaggcagggtcttgctgtgttacctaggctcggaagtacagtggcatggtcacagctcacggcagagcaaaacaaaataaataaataaataaataaaggaaa

SEQ ID NO: 2463 - DNA, 530 bp, Homo sapiens
  I.2463 (AI820773)
gaaggcatgaaaaggcaagatctgtcaggacattgcgaatcagtaaaaccagacctttgctcttgagagactcccacacgtgaaggttcttaataaactttctcacctgccagaaagtgtgaaagccttgaatgtggaccccttttgatatgcctggcattgttgcattgagttttgtcatccgtttctagaaaagataaagcaagcttattttataacttcttttcttgtttttacttactatgtcttcatcttcattaacgacaacaaccaagagtgccagaattctcttgtagcactaacccccttctctgcctccttgtctccctccgtgaaaaggcaacaggcatctgtttctttaagggccacagatctccttactgtttgtgccataactaagagttgcttgtgtgtctccacggaattccccccaccccgattgctttacataaatgtccaattaatgctagttaaaagttcttgttcatgatctgtctgaagggagagacaaagaagggaagcggagatgg

SEQ ID NO: 2464 - DNA, 454 bp, Homo sapiens
  I.2464 (AI820737)
cacaactcaacccttccaaacttttttcttcccagcaaggaaggtgaaagcccatccttctgtcttctcttttcttcagctgtgggaccatccacccaggcttcctacatacaattcagcccctccctgtccctccttccactcctccagttcaggtgcattttctcatctctatcttgatttctgacatagctcctgagtggtccagctgccaaaagtcttactcttcccatatcctcttaccatctgtctgaaattcaaatctgactgtgtcattccctttctgagacttaccatcaccatagggatgccattccataacatctgcaatcccgaccagatgttccattatcaggcttccatatttgtcattgctatctcccattatgcccggcattgcactttgtacttgagtaatatagaactatgtgtagttttcagaaatatcatgctg

SEQ ID NO: 2465 - DNA, 538 bp, Homo sapiens
  I.2465 (AI820707)
agattagctttttctagccccagaaccgtgaaagacaatagacttgctatggaggtcgccacatgcctcttttttctccctttgtgaatgggattatttataatggttaccccatacctactccactatgtatattgggtatgagggagagataatttgtctcactagctgacagatttttcagacctcaaggaatgccacgtgagctgtactcacaggaccacacacaagtatctttatccacacgtgacctgatttcactgataaagtcctggaccttgagcctgagcccaatgtcttaataaatgagaatttcagaaggtcttgggagggggtgagtatattttgcatgtgggaaggatgtaaataatatgtggcctgagagcagattatggtggtttgaaaatgtgtccaccaattctttaatactactctcaacaagaggtggaatctgtgtctcttcctttggaacatgagtggacctttgtgattaaatgcagcagaaggatgctgtgtgaactctgagacagggtaataa

SEQ ID NO: 2466 - DNA, 331 bp, Homo sapiens
  I.2466 (AI820655)
ttttagagaaaagatactcaacctctttaataatgaggaaaatatagaaacaaatcaataataagatgccttggaaggatttgaaagacaggaatgataggttcagaatggtttcaaaacttgtccaacttttctaacatggtgatatctgtgtaaaaaaaaaaaaaaacttgtccagctttgatttgaaattgtaatgcagtcttctggatgtatctcctccatcactttctacctctgtagccttcatcttccagtgcctcagtttcctcagtttgtcacttccagttaaactgtagccacattgtttgcaggaagggaggaaagggaa

SEQ ID NO: 2467 - DNA, 539 bp, Homo sapiens
  I.2467 (AI820654)
  misc_feature (506)..(506): n is a, c, g, or t
ctagctattatgagtaattctaccatgaatatttgtgtataggtttttatgtgacgaggcataatattttttaaaaagctcccctagtaattctgatgtgcagtcaggtttgtgaaccattagtctcaaagatgacagatgactaaacagtatttttaattgagttgacaatcatttggtctgtttgtccactgctttatctgtcacttagggcagagtgtagcatactgtagaccctaattaatatttgttaaagtggaaaagaaaaaccaaactccttcagcttagaaacccaatgaaaagatgtttcttttcataatgaaggcaccatttcactagggattcaagatccatacagaagtgtgctatatctttagaaaaaaaaactttttcagacaatttttccaagtttgtgcctgtcgtcatcatggtgatggtgttggggctggtgaaacactgcccactgcatcaattccagagtaaaaactagattgaatccaaaattntctataaattaatgttgacctttactgagttct

SEQ ID NO: 2468 - DNA, 481 bp, Homo sapiens
  I.2468 (AI820576)
tttaatttataaacaatagaaatttatttctcatgaatctggaggctggaaagtccaatatcacaggaggtgctggcatctggtgagggccgtcttgcttccttggtttgtgacctcttccctccatcttcaaagctggcaatgtagcatctttctgcctttgcttctgttttctcatctgcagcagcctcattaagaatgactcccgggcgaacgcagcatctaatgggttaatgaggctgggcagcctcagcctgctagcagctgcttaagcagcaggctggggaaagctctgttgattttcattcttcactgctgagtgatgaagggcaacaaaatgccctcgcatgatcctgagctggaagtccgccctcagaacagtggtacaggaagtgatcgctcactagctgagccaatagattttttccaagttccccagtgatccctagggagtagctgtgagacttgaagaatctgtgtt

SEQ ID NO: 2469 - DNA, 556 bp, Homo sapiens
  I.2469 (AI819516)
  misc_feature (218)..(218): n is a, c, g, or t
ctttttttttttttttttcttttttttttttttttttttttttttttttttttttttttcgggaaggtcccaaggccttaattggcccccccacctcccagaaatggccttattaaataaaccccccacccccccaaaccaaaatttggaaaaaccaaattaatttccaaattcttttttccaggggggaagaaaaaagtgccccctcaccccccccnaaaggtggaaacaaagagggaacccccccccccccttttttgaaccagaaaaaatattcgggggggaaccccaggtcagtgggggaccaggggccccggggaacccgggggggggctgtttttccacccccccaaattttgctaacaggaacccaaaccctttaaaatccctttggaaaaagaaatcccaggggcttttgagaccccaaaggaaaggggggaaaaaatcctgctttttactcccaaccagccggttgttttaggctttacaagcgagaagagactcaccaaaaccccgggcactgttggtggcccagccggaaagcagctcctctttt

SEQ ID NO: 2470 - DNA, 556 bp, Homo sapiens
  I.2470 (AI819386)
ttttttagtcaatcaacatttattgatcacttattatgtaccaggcactgggataaagatgactgttagtcactcacagtaaggaagaaaactagcaaataagacgattacaatatgatgtagaaaatgctaagccagagatatagaaaggtcctattgggtccttctgtcaccttgtctttccacatccctacccttcacaggccttccctccagcttcctgcccccgctccccactgcagatcccctggatttttgcctagagctaaacgaggagatgggccccctggccctggcatgacttgaacccaaccacagactggaaaggagcctttcgagagtggatcactttgataagaaaacacataggaatgaagagaagtccacaaatggccacccgtgctggtgctcaagaaaagtttgcagaatggataaatgaaggatcaaggaattaatagatgaataattgaatggtggctcaatagatgacttcatgaatgagtcagaaaataaacttccaatcttgaggcaaaactgaattttagcatttccaatg

SEQ ID NO: 2471 - DNA, 438 bp, Homo sapiens
  I.2471 (AI819159)
  misc_feature (394)..(394): n is a, c, g, or t
attaatagacttatgtggttatctgcatgagaaatgaagtgcttatgttaacattttctgaattgggaggggatggttgctgttcccctccatgggcctttgtctctaagagatgagcacttccttagtaccgctcccgctgatgtttccctgggggcccaggatggatacagccttaggttccgtgtcctgttgcttgtactgatggccgcaactaatgacggatggccacctctcccgccctagtctgtttcattcctttggcttcagggaggggaagagttgccttcttcgcaactccttgtacgtaggaacaagaagccaaagtagtgggcccaggagggaggagagccaggcttctggagacgggaaccaggccttctgaacccacggnggctccacagctgttgcttctgaatgctcaggcatctgatctgc

SEQ ID NO: 2472 - DNA, 475 bp, Homo sapiens
  I.2472 (AI817381)
ttttttttttagtctagttaggggtttgtctattttatttatttatttattttttcgaaaagccagctcctggattcattgattttttagagtttttcatgtctctatctccttcagatccactctgatcttggttatttcttgtctcctgctagctttgggtttgttcactcttgtatctctagatctttttgttgtgatgttaagctgtcgatttgagatctttctagctttttgatgtgggcatttagtgctataaaattttctattaacactgttttagctgcatcccagagattctggtaccttgtctcttttttctcattagtttcaaagaacttgttgatttctgctttaacctcattatttacccaggagtcattcgggagcaggttgttcaatttccatataggtgtgtgaggttcctaatcttgagttctaatttggttgtgctgtggtctgagagactatttct

SEQ ID NO: 2473 - DNA, 467 bp, Homo sapiens
  I.2473 (AI817123)
ttttttttttttttttttttaataggactgaacgtctttttaatatcaacagagtaaattcattatgaataattacactttgaccctaaaatattctcaagtgctcagttacctcaatgtacttaaataccaaaaaaactgcctgtgctgaaatatgtactggctaggcttatctgaagggctaagggtgactaaattcacatccaaagttaaatcacaatgtagtaaataacaggtttctacttcttgctgaattctgtgagaattcaaagagaatgcttgcggttacaaactgctgtgtgaggttgaaatcgtcagccactacacttcgtgggcgctcctttaaaaaccacagcaaaacacaaggatgcaaacagatggctttgaaagaaattcgcgtgaggggaagcaggagaccaaggaggaatgagcctgcagaggggacggtagccgccccctcagctctc

SEQ ID NO: 2474 - DNA, 521 bp, Homo sapiens
  I.2474 (AI817071)
ttttttatgggggatagtctagcagtttttatttctatttctaaacactttacattttatgcacttggaaatacaaattttacagtcttaaacgaaagtgaatttgaaggcaatacaacccatttccaataatccaattccatattatactctcaaatgtctaagtaggcaactacatcaacaaagatatcaaaaaaaagcttaaaagtgacaaatacattcaacgtccatgttttcaatgtatcatttggtaaaatctgtaatggcaaaagcccacaatttcttgctttagctattaatataaaagaaaggcctatgtaaacagatgttaaaacaactaagatgataaatggaatctacacctttttaataaagtctgtaaactaaagtgagcactaagtaaaatttcaacacacagagaagtacttgtattttaagatactatatcaagccattattaacaactcaaattataactgtttctgttagaaatttatctatgcacatttgttagaattagt

SEQ ID NO: 2475 - DNA, 526 bp, Homo sapiens
  I.2475 (AI816138)
  misc_feature (489)..(489): n is a, c, g, or t
  misc_feature (518)..(518): n is a, c, g, or t
ttttttttttttttgataaggagtctcgctctgtcacccaggctggagtgcacagcgagactccgtctccaaaaaaacaaaacaaaacaaaacaaaataatgttttaaatttcttttcctcctttttttttccattttcctaatttggagtcactgaaaattaagccgtactttcttacagccctgcaaactgaagccagacaacttcagaagaaaataacagcaacctatttacatacataagccactttcatacctgcctactgatgtatagacttcagaagaatgtggcctatattgatatccaggattgttcttttgtttgttgttgttgttttcacttcctccccgtattttctcttcataggacatgagacttcacaaccttctaaaaatgaactttcctaataactcggggacctatccgtctaggaataaaccatcctagccgtaagagatcagatgaaacctaagaccagagattcattntcttctaaaatgctttctccaaaagattntaaaaaag

SEQ ID NO: 2476 - DNA, 481 bp, Homo sapiens
  I.2476 (AI816097)
gctcaagtgtatccttaatttttaattaatccccccccccccccccccccccgcgagcagtatgaggcgttagctggaggcgggctgggaccccccaagtttgggaaagcttcttttaacgggctattgcgaaagttctggtccaaaggcttgctcacatgccccgtgtctgacgtggttgtcatagatgaatatgagcctctctgttaccttgcgcatcacaacacgatagtaacttgtccctactgaaggccccaggagtgctccagccaggtgtggaaagctggtcacgattctatgctacttggttcattttctacacagcaacagaagagccctcctgagattgctattaccatacccgcctgtcaccttgccaaggctggccaatgtgtgttttgtcataggctgtcatggaggccatgatggaggaaaaggaaaggggaggcagatgttgaggccagaggccacagtgagagca

SEQ ID NO: 2477 - DNA, 618 bp, Homo sapiens
  I.2477 (AI812032)
tttttttttttttttttttttttttttttttttttttttttttttttttttttttttttttttttttttttttttttttttttttttgggccttcccaattttttttggaaaaaaaaaggggccttgggggcccaaatttaaaaaacccaaaaccccttaaaaaaaaaaaaaagggggggggggggggtccccccccctgggggggaaaggggggcccaaaaattaccaaccccggccctttcttttaaaaaaccctttaaaaaccccccggccccccccccccaaaaaaacccccgggggaattttgggaaaaaaggggggcccccccccccggcccctacccccaggggggggaatccaaaagggtccccccccccccaaatcccatttgggtttcccccccccccaaaccccccaaaaaaaataacccaggaaaaacccggggggtttaacttttcccgggcccaaaaaaaaaaaaagggggggggaagggggcccccctctccggggctcccagggtaaaaggaaaaccacaggccccctcccggtttggtgggaaaaaggcactcttggggcccaaaatggggggggggaaccccaaacacaatatggggccc

SEQ ID NO: 2478 - DNA, 343 bp, Homo sapiens
  I.2478 (AI811774)
ttttttttttttttttttggggtttaaaacaacatgaatttattattttatagttctggaggttggaagtcctacagtcaaggtgtcagcagggttttgttcctgctggagtctctaggggaggatccattttcttgccttttccagcttttagagaccacccacattccttggcccatggccctttccttccatcttcacatctgtctctcaccactgcgtccatcatcacagctcatctgtgactttgacactccagtctccctattataaggacccttgtgattatactgggcccattcatgtaattcagagtcacctccccagctcaaaatccttaatc

SEQ ID NO: 2479 - DNA, 559 bp, Homo sapiens
  I.2479 (AI811701)
  misc_feature (136)..(136): n is a, c, g, or t
  misc_feature (137)..(137): n is a, c, g, or t
  misc_feature (138)..(138): n is a, c, g, or t
  misc_feature (358)..(358): n is a, c, g, or t
  misc_feature (361)..(361): n is a, c, g, or t
  misc_feature (363)..(363): n is a, c, g, or t
tttttttttttgacaggaaatagatctttattatgtcagtttaagccctgcgccatcccacccttgtatcatatctgtgcagcaggctcccctgcacaccctgaggctgtggcgggtaggggtggggtgaggcccnnntagcctcctctcacccctgctccagcccaccacagtcatgtcagcaatgcctggcgcagcatctgcttcttctggggtgtgagggcggtggggaactggatgtcgaagaagatgaagagatcccctttcttagtggggtcctccggcaatggcatcccctcccctggcaccttcttgaagtatttggggtggatgatgtcattgatggggatgtgagcanacngncatctagggtcctcacctccacagtgcagcaggtgacagccttgccaagagggatggggttcacgaaaaagagggtggtattctccctggggaagcgacgcggtagcttctcctttacgatgaaaatgatgtctggttggatgatgtagggcccttgtccctttcctctcaaagtgatgcgagtgccctgctccca

SEQ ID NO: 2480 - DNA, 451 bp, Homo sapiens
  I.2480 (AI811650)
tttcacacatttaataattttatgtgattcatgaataactttaattctacaacttggctgtttaaacgacaatttcattcacggaacaaatatccatcgagcgcctgtattgtcctaagctccacgtacacatcaatgaacaaaccagacaaacacctttgccgtttgggagcttcttctattcttcagcagagtttatctgtggtcatccactaataattttagttgggagcgctgatagtccttcttcttcttttcctgaaaatgctgcatgcctattcccttccagctggtaccctaggtcagtttttaaaaagttctacaagcactacttattttttcctctgctttccacctgactacagaaaagcaatgattactgaacatcagaatgccaactgtcagtgagaatgggcacctcacgacattttcacatggcattatcttccgg

SEQ ID NO: 2481 - DNA, 422 bp, Homo sapiens
  I.2481 (AI811413)
tttaaaaataattcactttattacaaagatagtaatacaatttctagaaaatacatgcgtgtacaaagattgaaataaaaaaaacactcataaatatccagatttaaatgtcagcatataccttcctgatctttttctatcatactgtatctatcaacatctaacctgcttttttaactataagtcatacattttgccatatcagaacacttttttctgcaacattatttttagagcatatcaaaccatagtcttattaaccaatccccaattaattcataattagaatatttagtgtttttccagtataacagctctataatctttgattataacctttgtgtaaattcctataagtattgagtcaaaggagacacacatcttttcaggcattacatataaaataaatactaaactagact

SEQ ID NO: 2482 - DNA, 389 bp, Homo sapiens
  I.2482 (AI811203)
gagtttaggagtggaagtttaatatgcaaaagaaaaagaaaggagaaaggaaaccagctctctctagggagagagaggggcttcccagaggaaagactggctggcagtggactcacaggattttatagtcaggcttgagaaggcattgtctgatttacatagggctcacagattggttcagtcaggcgtgatgtttacatagtgcaggggaaggctggtgggccccaccctaatcttattatgcaaatcaactttacccttggcccgagccatgttgtctgctccttactgtacatatggctggcagagaagggagaagggagccaccattctgaacatgattggcacaactgccggcatctatgtctgcagcttgattttacaggctg

SEQ ID NO: 2483 - DNA, 450 bp, Homo sapiens
  I.2483 (AI810161)
ttttgccatttcaatatttatttggttataaatgcccggataagtagctctcggccccagggcaccatgacctttgaagcacttggtgctcggtgttggaaagcaaaccagagaagatggtcagtgacgtcttcatgtggagaaaagagaaggggaggatgcatctgaggcacttctggaaagaaagcaggacgggaaaaagagagctccacgtcttgaatataatcagggactcgggactccgcagcatgacctctacaggtgacctcacctgctagtgaagactgcgggaggtcagtgtttagggaggaaagaaaatcaacaggaaatgtggaatacgcgtttcttccactctgttctccaggattttcattccttggccagttgcttccgggaatttattcccttgtctggaaataccatctctctgttgttcttattaaagattct

SEQ ID NO: 2484 - DNA, 511 bp, Homo sapiens
  I.2484 (AI810113)
tttttgaagggataattagtttataatgatcctttgtccccaccacagattaaattgaaattctcagaagcctggactctggccaggcgaaagctattggaaagcagaggcctttttttcttcttcttaaatttctaccattccagatcccacgacgactgagaagaagacaaacatttcagaaggaaggttctagctgggtgcagtggctcacatctgtaatcccaacactttaggtgcccaaggcttgagcccatgagttcaagaccagcctaggcttggtgtgactcttaaggtgattttccactgcaccaccgagcgatcgtgccctcccgcagtgaaggcgtagcagccatcataggaaacggccatgccggccaccccgttcgggtggcaaacaatagcagatgtcttatgtggattgccgtcaactggtaagatctgaagtcccaacttgtctctgttaataaacaccaagtagcgtttctgtagctccgccatgcttctcact

SEQ ID NO: 2485 - DNA, 511 bp, Homo sapiens
  I.2485 (AI809890)
tgatctccaggagcgccggctccagactgcctggagcgctgaaagagttaatcaggaacgcctccccgctgtggttttgtggtcgaaaccatgattgccaggagcaaatttttgtcgtgcacgaggtgtgttattaaaagtcggagctacgctgctgctgaatgaaaagttaaaagccctctttgagttcgggctgtaaaactggcggactgggccgagaggcttgagccaaccctaacggcggcggcccgggcggcgcgggggtcctgcggctccgccagctgctgggagcgggcaggctgcgcagtcccagcagtgagtggccgcagccaggcggtcggcagagctcccactgacccaccggaggagtgaagagggaaaacggggctgaaacccagatgggatcatccagctttctcttacgttagaacaaaaatgacagccaacatttatggagcgctgactccgcatctgacattgtgtcgagtgcttgataaatacacgctcttct

SEQ ID NO: 2486 - DNA, 510 bp, Homo sapiens
  I.2486 (AI809873)
aattagctgggcatggtggtgcacacctatagtcctaactacttaggaggctgaggtgggacgactgcttgagccgaggagtttgaaggcaatagagagagactctgtttcaaagaaataaaatgtaaagacaaatttctccttcctcttcaaatatgagaatcatcatagccctccctaactcctatattttttagattaatcaaactcagatttctcaaacattctagaacacaacttgatcttgcctcccaagattaacccttccagaactttttaactttgttaaagtgcctgtctttccatctttttaaaatagagcttatcaaagaatttctgtgaaagtttccctttgcttcctcaccggaatgatctgtgatcacattaggattccatctttgaaaactactatctaagccatctttccattttaagatttctgaatacaaaaaaaaaatccctttttcttaatttctctaaaattcactgacttaatgggtcttattcttt

SEQ ID NO: 2487 - DNA, 489 bp, Homo sapiens
  I.2487 (AI809252)
tttagctaatagtttttctttaataatcagttacataatacaaataacacccaaaaggggaagatccaacaatttagagatccgcagtattcgcagagaaattctgcctatgagatctcaaggcacccagaactcaacaaggctgttcttcacctccaggtggagcatgtctttcaagtgagcttcattttcagcccagtaactaagctgcaaattatcttctcaaacacacacacacactgagcaggatgccaatggaaaaccagacaaatgcctgctttctcacttggcttcagaagacacaaagcatggttactgtgggatgtaggataaatttctaagtctgccaaattaaattatatttttatactacatcctcaaggactcttccctggaaatgaatgtttcgcaaaatgtcgctggcctcaagagcagtttccgtggactacacagttaccataggttgagctaaatgcagagcatactttg

SEQ ID NO: 2488 - DNA, 468 bp, Homo sapiens
  I.2488 (AI808903)
ttttatagaattgattttaatacatcattatcagtatgtggccaacagggaaatttgctagatctcagatgcactttgtctccattgggtggcctttccttggtgtttttgaatagtagagataatctagttttaaagctggtacttttgtgaatgtgtactttcatactccatgtctcaggtacccctagaggactcacttagaatattaagtgaataatatagaataaccccaggagtattcacttctcttcttctcaggctgccttggtgcagacaaatatattgtccccaacttcctgccttgtgccccaagaagtcttactaaaatggtacatatggaaacagcagaatgtgactctgttctctgtgtctggaaatgaatggatcaacccccagttagggatgctgtagagatgtttcctgggcatcttcatgtccatttctcagtttctgagctggttctgg

SEQ ID NO: 2489 - DNA, 418 bp, Homo sapiens
  I.2489 (AI808460)
tttaaccataagaaaaaatttaatatcacaagctaggataaatacaaaacatttgggtgccccccatcacacactgagtaggatacaacattacttctgtggaatttctggcaaaaatgcctaatgtgaatctagtcatgaggaaacattaggtaaatttaaggtcattctacaaaaaattgcccagtactctttcaatgtcaaagttatgaaaagacaaagattgacaaatcattccattttaaaggagactaaaaacacatgagaaataaatacaactcataaacccagcttgtctgctggaccaagaaaagttttcttttgctatgtagaacattagtggtataactggtgaaaatgtagtaagatatatagactagataacacatcatcaatgttaacttactaattctataat

SEQ ID NO: 2490 - DNA, 464 bp, Homo sapiens
  I.2490 (AI808445)
  misc_feature (12)..(12): n is a, c, g, or t
cccattgaatangttttcttctggttttcatcagcgctttaatttcacagatattttagatttaaagggtgatttggatatgcttttttgttaactgagattcatgccacagtcagatactggtgatagaaaagcccaaaaaggcttgtagaaaagaggcaagcagcaatccaccaggtcagaaaagacagaagtcctcgaaaaagaagaggagtaaaaatattttttaagctgctcagtgccactgttatttgtgtaacagttaccttcattttcccttcagctgatggtaattcagagtaaacagaattggacagtagactattatccactggtaaggtagagatagattctggataaataccccaggaatgattaccattttctgtagctcaaccgtgcttattcgccccgcttctttcttcatctgatccacacatttttgggctaaatttaaataagct

SEQ ID NO: 2491 - DNA, 487 bp, Homo sapiens
  I.2491 (AI808410)
gcccagccgggccgcgcccgccacagctcctgcaccagcggcgggcgctcggagtcgcccagcacgcgcaggtgctccgcccgccactcgccgcttcccacgcccgccgccgcgggccggcccagagcgtcgcacaaagcgaaggcgtccacgcagctgctctcgccggggccaccgccggggctgcctgctaggccgtagcgctctagcgcctcggccacgagctcgcgcgccgtggagcgcgccgtggccagcacgctcttgtagttggcgcccgatgccagtccggcgccgaagatcttgaggacccccggaggcgccgtggcgcgggtagccagcgggggctcgggggccacgcccgccgccagctccggcagcttcttctcgctggcccagcgctgcgcgccccccggggtcccagggccttctgcgccgctggaccccgtggtcccggtccccgagccccggaagagctgggagatgcgct

SEQ ID NO: 2492 - DNA, 267 bp, Homo sapiens
  I.2492 (AI807985)
tttgagaattgaaactttgatttattggctaggggagagagatgaaaagaggatcactctggtagcaggagttttgggcatgtccctctgagatccatttgatgaaaacattttttaaaacatggtagggcctcattttgcacattttcttcacggtgtcatcaaataaacatcatggtaaatataaacttgttcgcccgtcagaaagcggcgccgggagggagcgagcgtgagaaagtgagcgtgtgcgctgccggagagcacgac

SEQ ID NO: 2493 - DNA, 353 bp, Homo sapiens
  I.2493 (AI807802)
actcttcatgaagcaaacaattctagcttcttattagttccagagaaactacccaacccccctacagaactacacagtcacagagtgaagaaagctgatagtattggtgatatcctaggtgatatcatcatccaatgggtctgggcaaacttcatcatgggaaatggagggaaatggagaaatttcagttattgagaaaaagcataaggaaatggacctatttaacagtgttgaaggtatttccaggcttgtctttgtctccggatcctgttttttctctgtttatgtagtattattgtagaaactggaggacgtggaaaccagtgacttaatttgcttcatataatgcagtt

SEQ ID NO: 2494 - DNA, 453 bp, Homo sapiens
  I.2494 (AI807674)
gactttacaatggagcaaaattgatatgtattcactacactccttgacttatgatggggctatctctagataaacattataatttgaaaatatcatgcatttttgacttcagatttttttacttacaatgtgtctctctggacctaaccccactgtaagtcaagaaggatctatatacgtttaaatgactttgagggactaaagaagaaaagaggaaagcagcctctgcacaaagaaaaaaattagaagtggtcacaaagatttaactgagcagacaggccaaaaaaagctcgcataaaactgctgttttcttgcaattaatggttaagtgttgtcaatgactgtgctgagtgacagacacaccattcaccgagtactttcctgtattagcctcatggtggctggctttcttgctgctgagtgttcttctttttctaatctataatttgtctt

SEQ ID NO: 2495 - DNA, 520 bp, Homo sapiens
  I.2495 (AI807649)
ttttttttttttttttttctccttccttccttcctgccatccttcccttccttccttctttcttaaatctcactttatagtccaggctggagtgaaatggggtgatcatggatcactgctactttgaactctgggactcaggtgatcctcccaccccagccacacaagtagctaggaccaccatactcggctaatttttatttatttattcatttttgtagagataggatctcactatgtcacccaggtgctctcagactcctgagctcaagcaatcctcccacctcgacctcccaaaatggggggattatagacgtgagccaccgtgcatggcctgtttgggtaaagtttaaaatgttagcagtatatatgttcccctagctaattattgtagttattcttgcacatctgccgctgttcttcttaacctcctttgtctggatgatggaaaattttccttaccactttagaggccactagcaccccacacaatttttcaaaagcataaaagggaccttct

SEQ ID NO: 2496 - DNA, 530 bp, Homo sapiens
  I.2496 (AI807627)
tttttagtttaaaaagtatatttacaagtattagttgtcggccagcttgatctcatacaaagtcatttacatcctcttacagctaaagttttaaaaaagtatcttcacaaagtaagtctcaggcacactaggggttctatcataaaacaccaagtagatcagaatgtccaaacttactagagaagaaaagtggaattattggctatattttcaaattgcattcaaaggaaatttaagttctgaatttttttcaccttcatacttccaagttaatagaattcaaccagaacactccattccttcaaagcctctagccagacaaagttttactggattacttcttgctttccatggatatgaagcagagtcctggtaggcacattttgcatacctgcaaagatgcagaactaaacagttccatctgttccatattaaaacaaaagtcctgtgaaccttggatggtgagtgtaatacttcagcactagcaccaaagcctcaaatatgaaaagataccaagaacaccactagca

SEQ ID NO: 2497 - DNA, 375 bp, Homo sapiens
  I.2497 (AI807398)
agcccccgagggcgccagggcgggatcgcgaccggtgcaacttctagccttgttgtcctcctggtgcgaagagctcggccgcctgctgctgctccgacatcagaagagccgccagagcgatccccctgggaaactccccatgcagccccctctcagctccatgagctccatgaaacccactctgtcgcacagtgatgggtcgttcccctatgactctgtcccttggcagcagaacaccaaccagcctcccggctccctttccgtggtcaccacggtttggggagtaaccaacacatcccagagccaggtccttgggaaccctatggccaatgccaacaaccccatgaatccaggcggcaaccccatggcgtcggg

SEQ ID NO: 2498 - DNA, 507 bp, Homo sapiens
  I.2498 (AI807373)
ttttaactttcatcacaactttattttaaataaaagagcagggtaatctctattattttttgtttgaactattagatgagcaaaaactgtaaatatttgattgatggaaatgtagaaaatatatacaaatgccgtatcacgtatcacaaggaaatactgagaaatgagtaagttgaggaaaggtagttacataaataattaaaaaggcaaatgcccatatgtcaccatgcatttacggtatcattgtttttctcctgcttttcaaagacttgtcttattagatgactcttttctatttcctaagacctacctcctctaagacgatttctggaaaacagatctcaccatgagaaaaatgtagcagccttacactaataaggattgtgcacacatacctccatgcctagatcaacttcgtttcagttgcctcaaagctttccacgcacatgacccagctttagattacaggattgtcttcatcctcccatgagagaatgctgctttacc

SEQ ID NO: 2499 - DNA, 599 bp, Homo sapiens
  I.2499 (AI807341)
gtgtgttctcaatgcccttaactcttcgactttcattgtgagctgcccaacatttcctagttattagatttaatattaagaaagaaaatggaacactttatggaggtagtttttttctttcctgcccaataagaacaatctcaccttgtccttgatatatgatgatgttcaagggagaaatataaatccaagtgtcctgggtgaagttatctttttatattaagtagcaggtacttaggagaatcataagaattcatttagggctctcaggttgttatataatattactgaagagcaaattcagttgttaacctctgcccctgacttactttagtgggccactagaaacaataaaggtctaagatttaaaaaatatataaatcaaataaaaaggatgcataaatataattgacatatttaccctttacctatatttgatctgtattatgcattttaaatattactattcttttatgtgcttttatgttttatttatttagtctatatgcctaatacgcacatctagtgtatgtctctaagattaaaatctctagatggaccaaagcttcaacaataagattctaagattcagaagagcc

SEQ ID NO: 2500 - DNA, 444 bp, Homo sapiens
  I.2500 (AI807063)
tttattttttagttccggggtacatgtgcaggatgtggagggttgttacataggtaaatgtgtgccatggtggtttgccgcacagatcaacccatcacccaggtattaagcccagcacccattagctgttcttcttgatgctctccctgcacctcacaggccccagagtgtgttgttccccttcatatgtccatgtgttctgctcgttcagctctcacttataagtgggaacatgcagtgcttggttttctgttcctgcgttagtgtgctgaggatgacagcttccagctccattccagagtctacgaagaactgaggtcacagaaccagtgagtggttcaattgacacagcagatgcagatccaggtgtgtgctgggaaatgtttaacaaccacctttccaaatgtagttccaacatggcctaaagactgtccaggacttggc

SEQ ID NO: 2501 - DNA, 580 bp, Homo sapiens
  I.2501 (AI807052)
tttcaggattgagaaggattttattttgagataaaacagaaagatgcaaaaatagtgcagagtcctgtggttcgttctcccagattcccccctgctgggcctctcgagcctggtgggtgtgacatgggggttggccatcttcaccccgttgggcctctccaccgtctacatctttgcacttttcaactccttgcaaggtgaggcccctgcaccagggaggtgatgggctgtgttgtcttgcaagttgggtgtccatcgtccatctctggtccaatcagctgcgaccagaagggcagaatcatgtgatatgatgtccacatgacatggatgggatctccagggatccttccccacagagacattccatctccagacacccagagacgctccagaatggaggtcctgagggagaaggtggaggaggaggaggaggccgagcgggaggaggcggccgagtgggctgaatgggcgaggatggagaaaatgatgaggccagttgaggtgcggaaggaggaaatcaccttaaagcaggagacgctcagagacctggagaagaagctgaggacacacagcaagcctg

SEQ ID NO: 2502 - DNA, 389 bp, Homo sapiens
  I.2502 (AI806074)
tttttttttttttttatgctcatagccattttatttgtaatagtcagaaactgaaaagaacataaacatcaacagatgaatgaataaatatattgtggtgtggccataaatggaaagttacttagcaatataatttttaaaaaagatttatatatgaaacaatttggatgaatcttaaaataaatatacttactgaaaaaagccataccaaaaaaagtgcatgttgtttgattccatttatatagacttctagaaaatgtaaaataatctccagtgataaaaagcagatctggttgggaagaggggaatgagtagaggaaaacaagggagagagggattacaaagaagcatgaggaaactttttggggtaatgaatatgttcactatct

SEQ ID NO: 2503 - DNA, 529 bp, Homo sapiens
  I.2503 (AI805995)
tttaagtgttttctcttttattctatttgttttttcagctttacatggtttttgtttcatgtcttgcccctaatagactgtgagttcctccaaggaaactatttttgtaatatcatgatctcaaatacacatggcataattttatggacaaggagtctaaaatacagctgttggctgactgatggaatgagtgagcgcatacataaaagaggacattttttaaagggcaagtgagtcgttttgaaagtctgaaaccccgcgtaatgaacaagctactgagagcccagagaggtgctcctcctctcaggcatgttcaatcttcaggattcagaaattgttctgagtagaagttgtatttcaggtaacactgcctctgctgcatggcctggtaatggaaacttaatggagatggccctggggggttattatttctcaagacaagaggattcaagccgggacaggaagggcctttccatcttaatttacagggccatgcagcagaataatcatgggtcattcttttaaaatg

SEQ ID NO: 2504 - DNA, 441 bp, Homo sapiens
  I.2504 (AI805734)
ttcaccacatgtaaaactttatttatgcataaaaccaccacacacacacaacctacacaaggaatgtgcagtcctgagtctatttagctacatgtgagtatatactccataaggcatataaaaccagtgcacagaaaatgcatccagatattaatatatctacattttaaaactgcatggaaaatacattattatatatacacaaagtgcatacctacccaatgtatggaaaatatattctgtgagttgtgtttatatacatactgtgtgtgtactaaatacattgaaattgcgttcttctgggttcatgaactgtttaagacacaattctctagcaatcttaatagcaggaggaagttcaggcattgggaatggtaatctccatctgctgattttttttctgttcttctgtacttctattatttctgtcttttaaatacc

SEQ ID NO: 2505 - DNA, 486 bp, Homo sapiens
  I.2505 (AI805595)
ttcaaacaaatgattttatttagtggtatagtcattataaggaaaaatcccacatgttggatatcatttgggtaaagttcattagaacaaatatatttgcaatctataaacaatagtaactgtaatagcattagattaaaactttttgttttatcaaaattagtcaacataactggtacagtgttcttttcatcatactctttcaaattctaatgttaaaacttcaggtaaattcttttctagagaaaatttagattgtttctgaatgttaatgtcaaatagctcgaagaagcagttatgagcttttatttcagttaaataaaacccttctaacacagattcacagagttagaaaacttaagagtttaacttaaaattattttcatgaattttaacacatcagtactaggaactaattaaccaaatgaaattaactgaaaacaaataaaacttataaatgtattactctcattatatcatcaacat

SEQ ID NO: 2506 - DNA, 499 bp, Homo sapiens
  I.2506 (AI805321)
tttattatttatcgagtttatttacttgtgtttttatttgtctttcccacaagactatgtgttccacatggtgggaactttgtcttatttaccattgtaccccattgcctagaccagtgcctgatacatggcaggtactcaaaagtgcagggtgctctatccatgaaggagagtgtccgcagccttatccctgttctcattcttggcagggtgaaatctgtctctgtaccagcaggatctttgtccagaagagcatctatagtgaatttttaaagagatttgtagaagctaccagaaagtggaaagtcggcattccctctgatccactggtgagcataggtgctctgataagtaaagcacatttggagaaagtaagtaaatttctgccatgtaagttacagaataagttcttatttgaagagaagctcagtacaggcatagcacaatcagactctgaaatattggtagttactaccccatttttgaaaaattataacct

SEQ ID NO: 2507 - DNA, 515 bp, Homo sapiens
  I.2507 (AI805308)
  misc_feature (16)..(16): n is a, c, g, or t
tttttattaactctgnaatatttatttgcagccaaatagaaatttcaatacattatttttaggaaccataaagttccaaatgttaaacattttcttctgaattgaattattgaattattattataatattaatagtaaatgtctaattaaagacaaatatattataaattttcataataattatactaaaaacattcattgaaaatataagaaaaaaaaacctcatgcacaacttctgtgtcctgttaaaccatccagcactgtgagcactggaaaaagtaatttggggcacttccctcttatgggccaataggtttaaaggcccacacccaactctgccatcctgagagctgcttcttgctttctcaggctggggcagttccagcctcttggtggtaatcagcagggacatggacaaggtgtgagtctcagggacttccagcctcagccactcccctgtagtcgaggctttgcagaatgtggatactgcaggcctcagggagggaaacgtgttt

SEQ ID NO: 2508 - DNA, 527 bp, Homo sapiens
  I.2508 (AI804954)
cccaccactcaaaaattttaatatgtattgaagattttggccaaaaaatatgcaaaagacaaggaatataaaaataacttacaacaaatttctaaaacccctcatatattaaaattggtaagacaaaaatatgatttataatacatgtttgccattgtggtatatataagaaaatagtactcatactaaattcaatctacttatcaaaattcttaatataagaatgaaaatattcagatgttataaatagaaagacaggtattaaaaagtttcttttggacaacattctttggtgctgataaaactgcatgttattgtctatggtaaagtcttttcagactttactacatatctagttacaactggaaatgaaaaaaatataaattagatatgactatagaaagtagttatagggtattttgatttcatggtgctcaaatgtttatgaacaagttttacttattaaactttgaaataactacctattctttgatatttcttatatatctatatgttccagaaattag

SEQ ID NO: 2509 - DNA, 535 bp, Homo sapiens
  I.2509 (AI804425)
ttttttcatttccttccagtttaatcctccgtgctaaaacaatcaaacaaacaaaactagttctcagtttggtgtcagctgctaatgagctcagtttacaaaaagaaggggaataagtttgaagtatatgcatttttcagtaaaaggcttttagcggaaaatgcaggatgagttgctgattgatggcacaagcacatttttcgtaaacagcagagaatatagaaatgctaactctggggatcttgactgtgtcagtgctgagtcatctgcatttcccatattattttataccagcaggcctaagaaggcccagacagaaatcacgcatacaaacacctccacacagacatctcacccccacacagacatctgcctccttatgtccattacactacatagaaaagtccctccattcccacctggggctgctacacgcgccactttgtgagcaggttcctcaagatgtgtgactgatgcttgccaaaggtgaagaaagaacaggggcaaaaaggggaagagtccgctgtgagaatca

SEQ ID NO: 2510 - DNA, 495 bp, Homo sapiens
  I.2510 (AI804325)
aattggtaatgtatttattttcagatctacacagaagttgctaaatacaatgctgtacatcaacagaagttctgcagaaatagtaaaattttcctttatctccacctgggaagtctgaaaacatcatagggcttgtgactggggcctaataaccccgaggacaacgtggtgggctgagcgaatacctcaatgtgcgagagaacgaaaagctcgaaccacgaccgtgcctagggaccaggcttttcctgtggccgatgcggggcagatgcagacccagaggccacccttgcgcgcgatctccaacccgacggtgcggctcctctcggacctggagctgtggggagaaggcagccttttagtgaggagccgccgcgtggcgggacgcaaggaaaaccacccgagccgctgaacagtattccgcgactgcactccagggcaccgggaccgccagggtgaggagggactctgcgttctgcaaagctagcggttcccact

SEQ ID NO: 2511 - DNA, 483 bp, Homo sapiens
  I.2511 (AI804162)
acacatgttcctggggctcatggaatttactagtttattataaaggatattacaaaggatacaggggaagagatgtgtagggcaaggtatgggggagggacgcagagcttccatgtgctccccaggcgctccaccctccaggagcctccacatgctcatccatccagaagctcccggaaccccatccttctgagtgttcacggaggcctcattacgaaggcatgattgattcaatcattggccgctgatgatctgcttaaccttcagcccctctcccctacctggaggttgcggggtggtgctgaaccttgtgattctacctggtcttccctgggaaccatcctgaagctgccagctggtctgtcaatcatgagcatccaaaaagacatcactttggagattccaaggattttaggagttgtgtgccaggaaatggagatgaaaaccaagtgtatatttcacaacatgacagtcagtctcttt

SEQ ID NO: 2512 - DNA, 355 bp, Homo sapiens
  I.2512 (AI804001)
ggggaactgcagggaggcgcgggccgcatccctcccggaggtctgcgagcttcttgaggcctcacgcccccttttgagccccgctgctgccctgtggcgctgcttctccatccctgcgggtgaccatcgacgcgttccccttgctcgcttcttggttacgggccaggggatactcctgcccgaccctcggcattgcccaagggagtttgcacttcccactgtgctctgccaagcctctgtggagaggagccctccacctgcctgaccgggcccagctttggggaagaccttcttggttttgtctgctggctggactgaccctggccctcagcccaggtgaggcgaccagcggcat

SEQ ID NO: 2513 - DNA, 492 bp, Homo sapiens
  I.2513 (AI803939)
tttctaacaatgaaacatacatacactaatttattggtttatgccaatattaagaagaaacataaaataatacatcttatttagttagttatacatagtaatattaagggaagtaaatcaatgcaatttgttccattagaccagtggctccaaagcagtagttctcaactttggctatacattataatcacttagggagctttaaaaatacttgtacctgaatccagcaatccaagtttctgatttaatggatctaagatgcaatttggtctgcagcggtttcttccccaggtgattcagagcctatgatttccttgcatcttggatttccatgttggggaccaagaatttctttttcttttttctagtccatccacactcctactctcctagatgagtatttctttatcttctcttcaaactcccttcccaaaccacgttattagctgaacaccttgttcctttcttcacctttccccagaaaagacaaca

SEQ ID NO: 2514 - DNA, 468 bp, Homo sapiens
  I.2514 (AI803880)
tctaagagatttttacatattgaagctccttatgtcagatacataattagcaaataattttcccattatgtagattttctttctgttttcttgatagtgccttttgaggcacaaaagtattttattttgatgaagtccaatttatatacatatatatatatatatatatatatatatatatatacacatttttttaacttgagcttttggcatcatacttaagaaaccattttcaattccgagattatgaagatgtatgtctatgctttcttctaatggtttcatagttttagctcttacgtttatgtctttgatccagtttgagttcattttgtatatggtgtgaagtagagctccaaattcatactttttcatgtggatatccagttgtttagcaccatttgttgaagagactattccttattccttcccccattaaattcttttgacattcttgtcaaaagtcaa

SEQ ID NO: 2515 - DNA, 274 bp, Homo sapiens
  I.2515 (AI803868)
ttaagattggtatcgctttattaatgtggaatgtacaggcagtaaaacaggttatttaattagttgaaattatctaaaatagatcttaagagttcacttagaacacttttctggactgcctttcaaagtagataacatcagacacagtgataacataataactcattcaaaactaaattgtacatcacctatgatatcaacattttgtattcactgaaggaaattatatttgaaagtgtttgcctgtacattatttgacaaagttggggggatt

SEQ ID NO: 2516 - DNA, 313 bp, Homo sapiens
  I.2516 (AI803793)
ttttttttttttactaaaagatgtcagttttatttaagacaaatcaaaaatagattgcttttcagataagactatcttatataaatgatcagtatatggtatagtttcaatgtgctctttttcttacataaagtaaaaattctaattttagcaaaaaattaaaagatgttatattctttatcggaaaaacttctaaacagatgaaagaaaacatttgggcttgtttggatataatacttattggttgattgaatttatttccttatgttcatatatataaatacatatataaataacgatgattagaacaata

SEQ ID NO: 2517 - DNA, 994 bp, Homo sapiens
  I.2517 (AI803139)
  misc_feature (517)..(517): n is a, c, g, or t
  misc_feature (549)..(549): n is a, c, g, or t
tttcagagtacttatttgccctctttattctctgttttactcatttgtttggggcaatattattaaattaaaggtgtggagtcactagtttcctccccagatcatctgtgaaagcactggagtatttgaaagccacggcccacaatgctcagctttagtcagacagctgggcatatgtcctactcagtggattgttgacagttcaggcatggggagagtgctgtgcacagtaacaacagtgctctaaagacaaatgtgattttgttgaagaaatggaaatgcacatggtcaacattcagcacaaaattgagaaacaattacaaaggaacatgttagaaattatcaacctgatatagaaagacaggtggtcatacttgcagtcagagaatactttcacttcttattttttcataaatcattggtttggtgctacttcagattcctgtcctcttcccctttttgcatgttactgtttgcttttcagagacctcaaatagctgctgtatcctgtccaggntttagagccacattttgagggagacacaaggngcaaagcatgcttgcttcatcttacctggagatatttttttctaatttttcattggaaagaattttacccttttccccctcttttaacttttttctctcttttcacctttcacatccctaaacaaaactctttggattctatacgccggcctaacttaaatctttaaatctggcaactcccaaacctgagttttagccggccctggaccttgtaatgttgctttacctgacaaattgtttgaaagacatgtggtttaacaatttaaaactgcccccaggtaccattgtctcacttttaaaaatctggccctggttaccggaaataaaagggcccttgtggcgttccccttggcccatacttgccccgaggccaataccttatggagcgattaaatcgaaatttggtatgttttcttggggaaatttttgcttcaattccacacaa

SEQ ID NO: 2518 - DNA, 125 bp, Homo sapiens
  I.2518 (AI802839)
tactatacggctgcaagaagacgacagaagggagagaaaagggcagaggaacccttgaagacacgacggccaaaaacctcccaaatttgatgaaaataacaataataataaaaaagtcgtatcga

SEQ ID NO: 2519 - DNA, 115 bp, Homo sapiens
  I.2519 (AI802591)
  misc_feature (6)..(6): n is a, c, g, or t
tacaangcttgaagattgctttttattgagaaaggaaaagggacctgaccagaattctttgacaagccctaggcattaaatgcttccaggtttgggaaaagaaggtaaaaataaa

SEQ ID NO: 2520 - DNA, 199 bp, Homo sapiens
  I.2520 (AI802581)
ttttttttttttttttttttttttttttttttttttttttttttttttccatttttagtttggtaaaaaaaaaatcctgcccaaccaaaaaggggggtccaggagggggggggacccaaaaaagggaacccaggggggggggcccgccaggggggggggccgaattgcccccttccccccccccccgggggccctcccc

SEQ ID NO: 2521 - DNA, 450 bp, Homo sapiens
  I.2521 (AI802554)
  misc_feature (405)..(405): n is a, c, g, or t
tttttttttttttttttttttttttttttttttttttttttttttttttttttttttttttttttttttgggaaggggggcaaaacccccttaaatgcccaacattccacaaggaaaaacccaaaacaacagccccggggggggggcaaaaaagcaacccccccgccccaaagctggtgggaaaacccctgaatcccctccttaaacccccccccaaagggggggatcaaaccctgcacaagccagggggcccccgcacccaaaacacaaaatgtatggccctttatttgcttgctatcccccacaaggaggaaatttggccggccgggatcccccctcacaaaaaggccataaccttgtttaaccatccacaccctcacggggttggggacactggccacaagntccgtgcttataaaactcaatgaggcgggcgaagcttttaacaat

SEQ ID NO: 2522 - DNA, 396 bp, Homo sapiens
  I.2522 (AI802527)
  misc_feature (308)..(308): n is a, c, g, or t
gggggttaggtttatttctgttgttaaaaacccggtgaacaaaaggttgtggaaaaaacacatgcaaaagacaggcgaaggtgtgagctggatagggacaaagatgggggaacccgtggggtcactccttgaccccacccgggacacctagacatccacagtgtcgggggaggggccccagaccaggcagaagacccttccccggccctggggaacccaagatttccgagagtaagcggacctgtgcaaagacccacaagggaggccagtggcctgtgctgggcactgtacagccgccccgaccccgnacctacgtgggcctcggaggctgcagggacctacccggccgcgcgccgcccaccattccaggtctaccgcaggggaatcccccaggct

SEQ ID NO: 2523 - DNA, 459 bp, Homo sapiens
  I.2523 (AI802162)
tagcatttattggatatttattaagtgataaattaccaaggtatttttatccactccagtcttcctctcagactgttagctccttgaggtcagattttagatctagctcacctctgggtcctcagctcccagcacagggcttggcactgagggacatgaggaaatgtttaaattgaaggaaatggggaagggttggcccaccttcagccaggagctgatgggatcaggagtccagtgcattgccgaatatcaagaaactgactcgaaggctgtgggcgttggactgtgagctgcagaggtattccagcattgctgactggacaaggagtggctggctgttgctgttgtctcctgaaggatggggagcatttcacgcctccaagaaggagctccatggctcagtaccagaagatcaagctgcagataggcgcagggcttgcttgtcttccctgccgcgcg

SEQ ID NO: 2524 - DNA, 451 bp, Homo sapiens
  I.2524 (AI801798)
agaataatattttattgtatgtataaaccagcttttgtgtatccattcaacatcaacagacacttgggttccttctgcagtccagctattgtgaataagagtagtctgaatatgggggtatgaatatctcttcaagacccttctttcaatttctgtacatatacgccaataaataagattattagattacacggtaattccatttttaagtttttgaggcactgccgtactgttttccacagtggctgaccattttccattcccatcaacagtgcccacggattccgatttctgatcatagaagccaccctaatgggggtgaggtggtgctgtgttgtattcttgggttgcatttccctagcaaaaaaagagtgagtctcttttcatgtgcttactaaccatttgtatatcttggagaatgtccattcaagtcctttgcctatttttaaaa

SEQ ID NO: 2525 - DNA, 320 bp, Homo sapiens
  I.2525 (AI801695)
ttttttttttttttttttgagacagagtctcgctcttcttgcccaggggggagtgcaatggcgctatctctgctcactgcaacctccacttgccaggttcaagcgattctcctgcctcagcctcctgagtagctgggattaaggcgtgtgccaccacgtccggctaattttgatttttagtaaagatggggtttcaccctgttggtggtcaggctggtctcgaactcctgacctcaagtgatccacctgcctcagcctcccaaagtgctgggattacaggcgtgagtcaccacgcctggccttcacccttttcaatactg

SEQ ID NO: 2526 - DNA, 434 bp, Homo sapiens
  I.2526 (AI801666)
tttttacaaactttccaaagtgacaatggaccaggcttcagttatttctgtccaagtcctacccatttttttcctttctaatccaacccctcattttccaatgacataacccttacttaggaaactgcaacctcttctctctgtctttaaatctctatccggcttcaatccttcctaaatactccctaccagttacaaccaaggtagtcaggctgcttccctcaagtatcttccctagcaccttactgttgcctacagcaaggcacaaaatctgtagtttctttacagctacactctctttgtcacctccgggtcagtactcagacagtttcacttaattgtactatctgcccacccctcttagcatgtgaatttgccaacttgatataggctagattaacataaaaatggcagacttaggaacaaaatttact

SEQ ID NO: 2527 - DNA, 446 bp, Homo sapiens
  I.2527 (AI801595)
tgagacggagtcttagttgtccaggctggagtgcagtggtacgatctcagctcactgcaaccactgactcccaggttcaagcaattcttctgtgtcagcctcctgaggagttggggctgcaggcaagtgccaccacgcctggctaacttttgtatttttagtagagacggggtttcaccatatcgctcaggctggtctcaaacttctgacctcatgacctgcccgcctctacctcccaaagtgttgggattacaggcgtgagctaccacgcctggccagaactatcatttgattcagaaatctcatcattgggtatctacccaaagaaaaatagtttattatatgaaaatgatacgtatacttgcacatttattgcagcatgctcacaacagcaaactgtatatatcagaaaagcttaatattcaaaatatatagaaaattcaaag

SEQ ID NO: 2528 - DNA, 431 bp, Homo sapiens
  I.2528 (AI801540)
ttcgacagtcttgctctgtcgcccaggccagagtacagtggcgtgatcttggctcactgcaacctctgcctcccgggttcaagcgattctcctgcctcagcctccctagtagctgggattacaggcgcccaccaccatgcttgggtaatttttgtatttttagtagagacggggtttcaccatgttggctgggctggtctcaaacttctggcatcaagtgatccgcctgcctcagcctcccaaagtgctgggatgacaggcgtgaggcactgcgcctggtccattacatattcttattcggatcttattcggatctagggcttctattagccgtacttccaaaggagggcaattgttcgtccttctagtagccattgctgaagggtctgtgagaaatgatttggaaaaaaaataggtgagcagatacaaat

SEQ ID NO: 2529 - DNA, 441 bp, Homo sapiens
  I.2529 (AI801504)
  misc_feature (392)..(392): n is a, c, g, or t
gtagagacaggctctcactatgttgtccaggctggttttaaactcctggcctcaagccatcctcctgcctcagcctctcaaagtgctgggattacagacatgagccactgtgcccggcctcaacacatttctaatgatatggccacactaagtcactgaggcacaaaacctggacttaaagttctccctctcaccactcccacgtgtattcagaccctgccagggcgcagagtactcctgtgtggcgcctcttgctgcatccttccaccacctttcggttctgaggcctctgcttgagttcaggccctttcaactctcaccaggagacaggcccaacagccacctcctcaaccctccccattgccacggctctgtcatcaagacaccagctntcaaagctctgtattatatctctattatctagtgaattcagaacaaact

SEQ ID NO: 2530 - DNA, 232 bp, Homo sapiens
  I.2530 (AI801425)
ttgagacgaagtgtcgctcttgttgcccagcctggagtgcaatagcgcaatctccacccactgcatcctccacctcctgggctcaagtgattctcccgcctgagcctcccgagtagctaggactacaggcgcccaccaccgggcccagctaattttttgtatttttagtagagatggggtttcaccatgttggccaggctggtctggaacttctgacctcaggtgatccacc

SEQ ID NO: 2531 - DNA, 412 bp, Homo sapiens
  I.2531 (AI801415)
ttttttttttaggaagtacctcatctctagaccttaaagaatgggcagttttttggtcagtcaaaacaagagaggcaatcctattcggggtgccagtaggtcaatgcaaggactgtagtggtggctaggtggtacactgaagctagatgatgaaggctctaaatgccacactaattttcactgaacatttctgaagagtagcatataatttataattcactaatctattcttcagcaatcacagaaaagcttaagatttaggaggccactatagtagttcatcaatgaggtgttcagagcttggattagagtaacactaagaacagaaaagaacgattggctaagtcctttcaaagagaatctgaaggactttgtaagttggatagatggaaaagaggagtcaaagctgact

SEQ ID NO: 2532 - DNA, 128 bp, Homo sapiens
  I.2532 (AI800441)
tttttttttttttttttttttttttttttttttttttttttgccacccaattttgaataaagtttattaaataatttgtccagcaaatggggtaattcaacacatttttttttcaaatcaatcccctg

SEQ ID NO: 2533 - DNA, 309 bp, Homo sapiens
  I.2533 (AI800359)
gttatcaaaatacaactttattttcagatacatgagcacatatctatagatcataaatgtgctttaaggtaagacatacattattaatttctttcataatatcagaaaataattttagataaaaatgtaacaactgaaagggtcaaagaagaaagacagtaaaaagtcctgtagtttcaattagcattataggctcagtctttctcattaattacacagaaaagcatggcctttaactaatctaaaacacctttgatttttactgaaactattttataatccattttctccctaaagtttccaggtcag

SEQ ID NO: 2534 - DNA, 701 bp, Homo sapiens
  I.2534 (AI800272)
  misc_feature (550)..(550): n is a, c, g, or t
  misc_feature (551)..(551): n is a, c, g, or t
  misc_feature (563)..(563): n is a, c, g, or t
  misc_feature (646)..(646): n is a, c, g, or t
  misc_feature (647)..(647): n is a, c, g, or t
  misc_feature (665)..(665): n is a, c, g, or t
  misc_feature (674)..(674): n is a, c, g, or t
  misc_feature (681)..(681): n is a, c, g, or t
  misc_feature (693)..(693): n is a, c, g, or t
gccatatccatatctttcatgatttctttgattggctctgtggtaaatcctgtgaagtcatgcacaatatctggatagttttcttcagcaggaatttattgtttcaatcttgatgaccttcacaacttttttttataacaacgatgacatcttcaatggtgtaatcattccagactgtcatgatgctctctctatcagaattctcttccatggcattgacagtcctttccattgagtaccctgtgtaataaggcttaagggttcttaagagccaaggatctagaagctgaattaaagacattgtgtttgggggcaagtagaccacattgacagcttcagttttgacctcatggggttctgggtggccagaggcactgtccaatatcagaaaaaaatttaaaggtagtccctatgggcaaggtaattcctgacttcagggacaaagcattgatggaaacaatccagaaaaagggttcttattgtctgggccttcttgttgtacagctattaagactggcagctgatgtttttcttttcccttcaggctcanngatgagcagctntatagataaaggcagtcctgatcataacccccctgcatttgcacaaaacagtataggtagcctatccctttcctgcttaaatnnctgtgctcacttctcttncttactaantaatgtnctttggtgattntttttcca

SEQ ID NO: 2535 - DNA, 296 bp, Homo sapiens
  I.2535 (AI799787)
ttaaatgtatttttagtgtttactgaggttatctctgggtaatgaaggtgcattaattttctaggtgatgctgtagcgaggtaccacaacctaggtggcttaaataagtggaattggttgtggtatagctctggagactagatcaagttgtcggcaccactggctccttctgagaactgtgagggaaaaatctgttccaggcttcttcttttgacttttagatggccatcttcttcctgtgtctggtaaatctcgataaagcaccacagaagttacaagatacagtaagaaaagaa

SEQ ID NO: 2536 - DNA, 428 bp, Homo sapiens
  I.2536 (AI799767)
ccaactgacaaaagatatatattaaccaaaggtagcatggaaggaaccatacatgatacacaaagtgtgaaaatgagctgaatttatgctctggggctgatattcaaggactgagttctgcttctaaaatgcctttcttaggtagcaagtaacagacaagagtttgagcctcgtggaccactggcagtcaaaaatagtttggcccaagggggaatatatgtgctcttggagtggaaaggcagagaccagtgagcctacagcaccatgcgctgctgagaaagaaggggcctcggtggcatagaacagccacgtgggatatggctactcctgcataccagagtctgccaagaacaagcccttctgctgtggacatttatgtttcttttgaacatcactgatacttaactgtttacttttgaggactccgc

SEQ ID NO: 2537 - DNA, 513 bp, Homo sapiens
  I.2537 (AI799645)
  misc_feature (466)..(466): n is a, c, g, or t
cactcacactggaaaggacaccagatacttcttgggccctcttcccttttctatattttctttctgttatttgatacagtctcattgctttaaatatcatctaaatactccacagcattttggcagatctgtataaccaaactgccaaaatttccagttggaaatctaacaggtatctcaaaccaacatatctaaaactggattctggccacgtgtggtggctcacacctgtaatcccagcactttgggaagccaaggtgggaagatcacttgaggtcaggagttctagaccagcctggctaacacagtgaaaccccgactccactaaaaatacaaaaattagccgggtgtggtggcggacacctgtaatcccagctattcgggaggctgaggcaggagaatcactttgaacccaggaggcagaggttgcagtgagccaagatcgcgtcaccgcactccaacctgngtgacagagtgagactctgtccaaaaaataaaaaaataaaattggat

SEQ ID NO: 2538 - DNA, 455 bp, Homo sapiens
  I.2538 (AI799630)
  misc_feature (282)..(282): n is a, c, g, or t
aaacatactagaatctcaagagataaaatcaaacctagctttctttctttctttttctctcccccagctacccagtccacctctgcaggacagactgaaaatcactagctgaaatcaccaaagtgaaactcctatgtaaaattcagatatggtgttcagaaatataattatgcacactcaattagatcctcttcagtaactactgtgacattaccttcctttagtcccaaggacagaggttttagaatttgctcccacttttcagactcacgtccactgcanatcactttacgaaaatactgtgaaatgtaataaacatattctatcaccctacactatcattttctcttgtttttgccaaataacccagggttcacttcttatttaagtgcctgggatttattttttcccttctccgtttcccattactgcaccagatcccatgttatttccat

SEQ ID NO: 2539 - DNA, 433 bp, Homo sapiens
  I.2539 (AI799547)
tggtggtatgaataaatgccgtttattctctttctgacgggataattttcaaagcagtgatttttataaaaactcaggaagaaaacaattttgtttcatttccataacagaatccagaccttgagcttcaccctgcgatcagtgattacacacacactgcaccgtttcggctgcagcggctcctgctgtccaccggctcccgtcctccctgcctgtaaccgtctgtggtgattcgcggcactgcaggaccatgatggcccggatctgctcggacgctccgcctcagcttctcatggccgccctcgctattgccacccctgcccaggctgcatcaaggaggtcaggggccaggggagaactcttttgttattgagaagtttgattgcaagacctgacccttcctgtgtggacggatgggcagatgcccagactg

SEQ ID NO: 2540 - DNA, 363 bp, Homo sapiens
  I.2540 (AI799487)
ttttttttttttttttttttaaaatttactagatctttattaacatggaattaaataatgagtaaaagaatgatatgcccagtatgatactttttatatgcatttttatacatacaacatgtagagagatattaaaaataaactgaaataatatatatcaaattcatggtagtccttgcctatgaaaaggaaacaaaaagaagacaggggggagaataaaagggatctcaactctataaattgttttcattaaaacatttaaagtcaaaaggggacaaagatctgaagatttataaatactaaaatatggagttgtttgccataatacactctgggggtttcaactcaaaattaaaaccagaa

SEQ ID NO: 2541 - DNA, 389 bp, Homo sapiens
  I.2541 (AI799385)
  misc_feature (248)..(248): n is a, c, g, or t
  misc_feature (378)..(378): n is a, c, g, or t
  misc_feature (381)..(381): n is a, c, g, or t
ttttttttttttttttttttttttttttttttttttttttttttccaaaaaaaaagggctttatcacccggcctcacccccccccccggcctccccaggagtagggggtcaaccccccctgttggcggccccccccccaggggtagggcccctcattgccggggttggcaatgatgctcagggccccctcccccagggccaggtacccggggtaggaaaactccaggggctcctggcccttgacccanaccactttccctttcttggggaggatcttctggccgaagggaaaggtcacgttcctgccctcggccaccacccctggttttggtcctggggggcgggggggggtgggccacccgtgggaaagggaattcntancaaaattc

SEQ ID NO: 2542 - DNA, 354 bp, Homo sapiens
  I.2542 (AI799350)
  misc_feature (9)..(9): n is a, c, g, or t
  misc_feature (152)..(152): n is a, c, g, or t
ttgtgttgnttttcattttctttttttttttcttaaaaaggacttatccaaataatctggataataaatcgtttgcgtttcctaagaaactgggtttttcttttcccttgtggttttggtgtttttcttcttctttgagccttactagcggnctgaagctttctttctttcctttgcctttttgcttttggacaggagaaagcagtttgtctgaattgtacttgactcttcaaagaggaaaagggcgtggaagcagaagggggcttagggagaaaggagaaatcaataacggaggaagaaaacgaagaacggaactaaaacccacggaacccagaagttgccgggctgagggtg

SEQ ID NO: 2543 - DNA, 206 bp, Homo sapiens
  I.2543 (AI799204)
tcaaatgtagaacaagttacttttatttcagtactgaatgcaaaacacaggtcaagtgtgaggacagtggtctaaaaaagggtggctctattaaagcaaggaggccatttccttttgcatttttatatttctggaattctatttttgacgttcactttctctactttcctcccctgagcactaatttatttaaaaaaaagattcaa

SEQ ID NO: 2544 - DNA, 569 bp, Homo sapiens
  I.2544 (AI799094)
ttttgattatttttattttgtttttatttcaatagtttttggggtacatgattattgcttacatggataagttctttagcggggatttatgagatttgagtgtaccattacctgaacagtgtacattgcatccaatgtagacactaagttttctggttgtttatgatgcagcaacacagataattgatgcatttattatggcctaccagcactttcatgatctggcccccacctactgtccgtcctctcctccctcctgctccctctcacctctgcccactgtcttcaaacaatccaagctccgcctggaacatcttccaccaaatagccacaagactcactcattacagcccaaatatggcactgactatacctttatcctgcctccctcttctccgcagcacataccaccaccaaacatatgcactggtttgctttgtgtatctagtaatttttattgaatgctggacattgttgagtatctctcccactagataggaagctccatgtgggcagagaccatgtctgccttatttgcagctgtgtaccagatgctaaaaccacgcctg

SEQ ID NO: 2545 - DNA, 639 bp, Homo sapiens
  I.2545 (AI799024)
tttaattatatttatttggtgaatcacatttgttgatttgcatatgtcaaatcatccttgcattcctggtatgaaacccacttgatgctgaattatcttgttgatatactgctgaatctggtttgctagaattttgttgaggatttttgcacctatgttcattaggaatattggtctgcagttttccttgtttgttgtgtcttttcctggctttggtattagggtgatactgggttcatagaaagaattagggaggattccctctctctccatcttttagaatagtttcagtagaattggcatcagttcttctttccatgtctggtaaaattcagctgtgaatccatctggtcctgggcattcgttgttgttgttgttgtcgttgggagattttttattactgattcaatctcactacttattacttggtccattcaggatttctgtttcttcctgattcaaatttgtgggattgtgtgtttctaggaatttatccatttcctctagactttctagtttgtgtgcacagacatattcacagtagtcttagatcattttttccagtgttctacacattcagagaaactctctaataataaactacagaagtgatctctgaaagtatagtcttcatgttga

SEQ ID NO: 2546 - DNA, 316 bp, Homo sapiens
  I.2546 (AI798598)
gcggccgccgcgcttctgctctcagtgtcccggacttcatgagccacacaggacagttgacccaacacttctgccacctgaagaacgacacctgcattcctccatctctgggaccaccaaggaactcagggagcttggaatctctcagatcaaaaagatactgactcatcggatagccatgccatcctgaaaacggccttccttgtgtgtacattatttgcaacaagcaacaagtttataagcactttggtaaaattgcatgtgagggttaaaatattaaagtcagtgcgtcaacttgaaataaatgatgagttat

SEQ ID NO: 2547 - DNA, 328 bp, Homo sapiens
  I.2547 (AI798573)
tttttttttttttttttttggatttttaggagagatggggtttctccatgttggtcaggagttccagaccagcctgaccaacctggtgaaagctcatctctactaaatacaaaaaattagccaggcgtggtggtgcatgcctgtaatcccaaccacttgggaggctgaggcaggagaattgcttgaacccaggaggtggagattgcagtgagcctagattgcgccattgcactccggcctggacaacaagagagaaactccatctcaaaaaaaaaattaattaaaaaaaaaaagctgaaggatcagtggggcacggtggctcacgtct

SEQ ID NO: 2548 - DNA, 352 bp, Homo sapiens
  I.2548 (AI798545)
tttttttttttttttttaatttttttttatttatttattttgagacagagtctcattctgtcccccaggctggagtgcagtggtacgatcttggctcactgcagcctccgcctcctggattcaagcgattctcctgcctcagcctgccgagtggctgggattacaggtgtgcaccaccatgcccggctaatcttttgtatttttagtagatatggggtttcaccatgttggccaggttggtctcaagctcctgacctcaaggatccgcccaccttggcttcccaaagtggctgggttacaggcgtgagccaccatgcccagccagaatgcaaccatatgtttaaagataata

SEQ ID NO: 2549 - DNA, 275 bp, Homo sapiens
  I.2549 (AI798514)
aaactgaacttctttattaagtgccaagggtccaggcgggcgctgccccctgcggccccctccgccgaggcctgtgcgtggcggggttcccaggagcgggagtccgtgcggcctgggggcggccccctccccgcatcgcagcggggcgtgcaaagcgtctgcggctgtagtgtgggcgctcacttcacgtgctcggcggcgtgcgaggagcagtaatacttcttgtgggcgatgaaggtggacaggctgctgaactttgtgttgcaaagaccgca

SEQ ID NO: 2550 - DNA, 569 bp, Homo sapiens
  I.2550 (AI797843)
tgcatacataacttatggattttcaagacaagacaatttattctgataactatcatcctagaaatgtcaagagaacttcccaaatccaaaaataagaagaaaatctgatattaactggagaggaaatttccactcaaatcataaataaaatgtcatcaattaagctgaacatcaataaaactcagtcaaaaatcaagcctcaatacagaacccacacataacccacatgtaatcaaaatatcacttatatttgctagcggagttcacagatgaattctgtatgtgcgccagatttatcttattttgtaatgctggggttaatatttattggtataaatcagggcccacactaagtgtcctggggagaggcaatccaaagaacgcttagtagcatgataaaaccggtccaaaacgaaaaaaagaaaaaaagccaagtcctaacacaacagagcgaataagcgacaaatagatcacagaaagcaaaacgaaaacggtcctctccggagtagcctgaataaaagatcttcactcataacgtttaatagtatcctacctcacttcattcactt

SEQ ID NO: 2551 - DNA, 462 bp, Homo sapiens
  I.2551 (AI797715)
aatttcatgtgaattgcactttaataaaaataaacaagtatttaaaaatccaccaatgcaaacacttctctgttcctctgtggtggaggaagggacacgcgcttttttttccgaccttaggaaggaacaagggagccggggtcccctcccagcctgggagccctgggcacagtcccggctcatttgtcagagctatcggagccgtcctcgggctggtgggagttcagggctctgaaaggttttctgtcaaggcttgaaagggggccaggtttttttccccccggagccgcgcagtctcggggctgttgttctcagcaatcgcagggcctcgtgttagcaggaagcacagccaagtagggtttcccatccatgaatcctggagactccagacttcccatccatccagggttctgcagccctctctgaggctggagccaatctccccttccgtcaagggatccg

SEQ ID NO: 2552 - DNA, 466 bp, Homo sapiens
  I.2552 (AI797283)
ttttagctaacgaataagaaatggtttttaataattggataattaccttaattctccacttcattttgtatgatgcaatgtattttgagttctgcaatgatgttctcagggatggcttctagaagcagaaaagccatgactgcaggggccacctggatagggggatgtagaccagcctctgccctggttagcaggaaagtagctgggaaagcctccttccctctcttggatcttcctccctttttattctggctatagccgattggactgggcagataagctgaggccacagaaaggccatgtctgggctggacataagggatgtcagaggcctccggggtgcctgggggagagtctgcttaatccaggtgcccacttgactagtagaaatcaaatcaaatcaaataagtgtcttctctttcaagttaatgctaagaaatctggcaggtcactgaactcgctaccg

SEQ ID NO: 2553 - DNA, 507 bp, Homo sapiens
  I.2553 (AI797060)
gtaaattttcagtagaaaaagaactgatcttatatttggtcacacactgcgtatgtacaaatatacatggaaaaatgacttggatagctctgcctaggaaaagtgcatattttaatctacaggagacattgtgtgtctccaggcacaacacatagtgttgtatgacatattattttagggccagttcaatgtcctcccagtgatctggtaaaatttttgattaaaaggatgaaagaatttgcgcaatttagtaatgacagaggggtccacctctggatgaatgcgccccttgctgcccgccaggcacttattaaagataatattaaaccgcaagcagtaaaaccctctggtagcattgaagtataaattgtattgacttatccttggaggcagatttaggaacttctccacgagctgaagttctggcagaggttccgtgatgaggcgatctccatcgacgacatgaaattgctcaattggaaagtatttcaaccacctttccagatg

SEQ ID NO: 2554 - DNA, 447 bp, Homo sapiens
  I.2554 (AI797009)
aaggtggattttgcccactctgggtgtcactgaccaaaggaattccatggacatagtgggttaaaggagagtcaaacattgatcaagtggggattgtgattgaagccactgggaaggcacagattggctgctttagcatcttagccaggtctctgaatgcatttgagatttattgactctccctttgtcatacttaacaatgccctgaatactgggtgttctgccactaccagaagatgccaagtttgggctatacccttgaggtgtttgtaaaccagatgcctcaaaaatcactacctcaacaagaacagttggtcaaatgccaccacaccataagccaagtcttctattttttcactctttatgattttttctttaaagcaatcgtctgtgtcaccctaagagtttaacactgcccactttactgtcttgatgaaaaagtatgtt

SEQ ID NO: 2555 - DNA, 455 bp, Homo sapiens
  I.2555 (AI793234)
tcacatttgaatcatctacatcagtttaatggttgaatctgattcacatcacaatcatagctctaagcatcctcaaattcctgggctcaagcgatcctcccatatcatttaattcttagagtactattaaacccatttcacagatgaaaatattgacacctagagagggactatcaatttcccaaagccaggcttaataactcactcaagctcatacaactagtaagtgacagagctggggcttgaaccaggcagtgctttgactctgtcccccactggccagggcataaccatcatttatgacaaagtctagatttgaacctgggctccagaattcctggctcttccattgggcaaccctgattcccagccctcactcccagctccctgtgggtggcagttgacagggaagctcatggttaaggggtttggggttagaaccatctaggggccct

SEQ ID NO: 2556 - DNA, 252 bp, Homo sapiens
  I.2556 (AI793230)
ttttcactggggtagcgcatttaatattcacatctacacaaatgggaagtaatattcttatcgccattttacaaataagaagaccaaggcccagaagggttgaatatcttgctcaagatcacacacattttgccaccccccattccaagtcccataggcaactcagactcagcatgtccatgatgtaacttatcttcctctccaaaccatttcctcacttgtgccctactctcagtggggacatctccaatc

SEQ ID NO: 2557 - DNA, 569 bp, Homo sapiens
  I.2557 (AI793194)
ttttttttttttttttttttgatgaaaaaatatttttattaatttattatttaaaataccaaatagtacatgaatacatacttattgggaaagatgaaaccataaaaattacaacaaataaagtatccctttactttctgcttcatttccctccccaaaaataacttggcttaacagattaatatatattcttccattgttttttgtaaaatacgtttactgacacatacacaaatgcacacatgcttttctccctaaaatatgttaaaataataatttaaataattttaaaagtggctaaaatgtattggtcctatcagtgatcattgctttaaaaacacattttttatcaagtgttgtcatcttgaaaattttgaaatttaattattaaacatacagatttccaccatcttgatgttttactcgaaatattgtgtacattgtcaaaatagagtatataacatgatatagttccactaaagatgcttctacctgtggactttcagaagaaacagtccccctggcaatattgataactgctcagtccttgggtgatattggccccatga

SEQ ID NO: 2558 - DNA, 515 bp, Homo sapiens
  I.2558 (AI793203)
tttttttttttttcaggagaagacataccatgtttattaaatttgagatcccacacataatggacttgttcatttcatgataacagttatcttctacagaattttatctgaatgttttatctctgtaattcatcaattctgatttattcattattaccttcactgataccctctcttgatcatactgtttcacatatcatgaatatgaatctagggatgactttttttaacagatttaaaagttaattacaaagtaaaaatataggaccttagagacttaagggttgggggtgttgagaaaaacatggtcctaccctcatggagctaaaataatccctggtaacttcagtcattcttgagtgaccttaccttatttctttctggcctatattcagttcagaggctcctctgatgcccttagtatcttttatttttccagtgatacttatcactcaatactatgaacatttacatgtgtaagactgtacattctgagaagatgtggactttgtctt

SEQ ID NO: 2559 - DNA, 462 bp, Homo sapiens
  I.2559 (AI793161)
  misc_feature (461)..(461): n is a, c, g, or t
gctgatgccttctgcgtggtatgtgcgcgggcggcgtcacctctctgctactctggtgctgcgctggttccagtcgcatctgcagcgctccttggccactgtgcgttacagcctggaggggcgctgtcgggtcaccttgaccccaggtggcctggaacagccccccaccttacacatcttgccctgccgcactgactacggctgctgccgcctttctatggctgtgcgtctcatccccgctgtccatctgggagatggggtcttccttgtggcgccaccaccgccacccttgcccagcgcgcccctgttggagctccctgagggcctgcgtgcggaggcactgtggggtgtgaacacagcacgccaggagcagaagctgctgagttggctgcaggaacgggcagctccaggtgcctgctacctcaagtgcctgcagttgcttaaggctctgcgcgatctgng

SEQ ID NO: 2560 - DNA, 508 bp, Homo sapiens
  I.2560 (AI793145)
gaacctacaaaggctacaaaattgtttaatatttaatacacactcacaagtacacatgcaatgagtacaagtaaaaccaggaaaatctacataatatcaatgggttttattaatgtcaatatcatggttgtaaaattatactatgttttggagaatattatcactggggggaatctgggcaaagtatataagggctatatctctctgtattatttcttaaccactgcatgtaaatctgtgggatatagctaaagcactgcttaggggagatttatagcaataaaaagctcatcctttaacccaagttgccactaatttttgctcagaaagctctgactgcaaaactatgaaaatattagctgtattagtcgtattctagacaaatagatcatagatttaaatgtgaaatgtaaaatgatacaacttttagaagaaaacaggtgaaacttttggtgatctagggttaggtgaccagttagacatgacatcaaaagcatgagtcataaaa

SEQ ID NO: 2561 - DNA, 495 bp, Homo sapiens
  I.2561 (AI793128)
  misc_feature (13)..(13): n is a, c, g, or t
  misc_feature (14)..(14): n is a, c, g, or t
  misc_feature (18)..(18): n is a, c, g, or t
  misc_feature (19)..(19): n is a, c, g, or t
ccgccaacttttnnctcnnagagaatcgtttttgtggtacatgtgtgttagataagcattatcaccttggcttctctaatatggggctaatagtacataccacacagagttggtagtattaaatgtaacaatctaaggcactagaacaatgctgaacacataatagtgagtccaaagtctcaggactcttcactgatgctgcttctactattggaccctggaactcaacaatggcaaaagaaataattcagagacccctctccccaacacacatacctgctgcttggcccctgatcttttacttcctgaaacaggctgttctgataaatgtctattaatttggtgcagggaaggtgtaaggggaaagagttaagtgggtcactttgaagctaatatagtctaattacccacattctggtcattccattgtggctagaaggctctcagtctcccctctgggcctctgtccctctgccaacaatgtcctctctcctt

SEQ ID NO: 2562 - DNA, 531 bp, Homo sapiens
  I.2562 (AI793104)
cccaggacccaggcaatggtcacgagtgtgacccccccaggccttcccctggttccgtttccctccctagcccggtccccacgatgggtggggacagtgggctgtgacaatggatcgcgactgctgtttttacctggcggacgatgcgcccgaattcgctttaaccagatgcccctcttcgcctggagccctgggagcagtccccctctccgctcaacaataattagccttcgatctgattacctaccaggaatggcaagtggcctcgctgaaagtctcggctctttgagaaatgagagatgggagccctcactgccgatgtttcttccacacgctttgctgggttagaggcaagctcatgaccgccttgaaaagccattttagacaaatcttcctttgcattcttgctggagcccttctcttatgcccttccttggacatttgctctttcactccctcccccatgcactcaccccacccatagtgactgcgctcctcctgcctgcgacgctggcaacaggcagcacagtc

SEQ ID NO: 2563 - DNA, 513 bp, Homo sapiens
  I.2563 (AI793103)
  misc_feature (14)..(14): n is a, c, g, or t
ttgccttccgccangtttgtaagtttcttgaggcctcctcagtcatgcagaactgtgagtcaattaaacctctttcctttataaattacccagtcttgggtatgactttattagcagcatgagaacagactgacacagatggtatatgtgcataataacttggaaagctagatatttattttcgcaatgctacaattaaaacattttgaggacttttaaaattacctttagagccaccatgcctggcctagatattttttattctttccaaaatttaattctccctgaagttaaaaattttcattactgagaatgtacatagagatgtgtcacaaccctttagtaattccaaaaggtgtttcaaaaattttatacaatgataatcactgttgaaacaggtgtatattctcctcagatcatgactgaccaagatgatattccaagaagtaaactactggcctttatagagtaggatgtaggccattttcattactgataacatacttttaaaag

SEQ ID NO: 2564 - DNA, 462 bp, Homo sapiens
  I.2564 (AI793058)
cctacagccaattgtcaggtgtggccagagagggtccctagggcccctagatggttctaaccccaaaccccttaaccatgagcttccctgtcaactgccacccacagggagctgggagtgagggctgggaatcagggttgcccaatggaagagccaggaattctggagcccaggttcaaatctagactttgtcataaatgatggttatgccctggccagtgggggacagagtcaaagcactgcctggttcaagccccagctctgtcacttactagttgtatgagcttgagtgagttattaagcctggctttgggaaattgatagtccctctctaggtgtcaatattttcatctgtgaaatgggtttaatagtactctaagaattaaatgatatgggaggatcgcttgagcccaggaatttgaggatgcttagagctatgattgtgatgtgaatcagattcaa

SEQ ID NO: 2565 - DNA, 270 bp, Homo sapiens
  I.2565 (AI793054)
gaaatggcttcctttaccagcttgggcctggggattggagatgtccccactgagagtagggcacaagtgaggaaatggtttggagaggaagataagttacatcatggacatgctgagtctgagttgcctatgggacttggaatggggggtggcaaaatgtgtgtgatcttgagcaagatattcaacccttctgggccttggtcttcttatttgtaaaatggcgataagaatattacttcccatttgtgttgctgtgaatattaaatgcgc

SEQ ID NO: 2566 - DNA, 536 bp, Homo sapiens
  I.2566 (AI793026)
  misc_feature (530)..(530): n is a, c, g, or t
cacaaggtaacactatcaagtaggtatatcataacttatcttatcctaaccattatgatagaatgtttcttgtaacactatttcttaataagggtagtgagataaaaatttgactttttcattaaatccagacatcactgctcctaaagcaactaaagagttagaaaaaagaaaattctgacactagaaattttcatggggccaatatcacccaaggactgagcagttatcaatattgccagggggactgtttcttctgaaagtccacaggtagaagcatctttagtggaactatatcatgttatatactctattttgacaatgtacacaatatttcgagtaaaacatcaagatggtggaaatctgtatgtttaataattaaatttcaaaattttcaagatgacaacacttgataaaaaatgtgtttttaaagcaatgatcactgataggaccaatacattttagccacttttaaaattatttaaattattattttaacatattttagggagaaaagcatgtgtgcattngtgtat

SEQ ID NO: 2567 - DNA, 548 bp, Homo sapiens
  I.2567 (AI792987)
  misc_feature (494)..(494): n is a, c, g, or t
gcacgaggctccagtctctattggttgtaagagacttcggggacactaatcttaatgcgccatttcctataggtcttgttagttcctaaaaccatctgtaagaagttattgtatttggctttcttcagccatattttttaagcacgacatttaattagtgcttgttaagatgtttcaagtgctttggccacttctctcacccctgctgtttcttcatggtcagcatattttctggaaatgttgttttcgggaaagggcatcagatgcgtctgtgtctggagaattgctctgtgtatccatgtgaagcaagtctctgagagcaactggagggactgtcaggctggctgtggggcctccgtgttcacagcagctactttgaaaggcctccagttttgacgttctcatggaaaaagcagagacctcaaaatgggtttggaaccgacaacaataggagggtacactggagccctggagaagaatgtcacataagtganatgtatttgaaatatttaatctaggaacctttggattaacttcattaaaaagag

SEQ ID NO: 2568 - DNA, 505 bp, Homo sapiens
  I.2568 (AI792973)
  misc_feature (498)..(498): n is a, c, g, or t
tttttttttttttttttttcatgtctttaattgaatgggatattggcccattttttcttccagtttattacactgaatattgacatgttattttccaatattgagacaatcaatgacaagactttaagagtaacaatgtaaaaaaaaaaaagttgtctgagtttatcaacaatcccctggattagaaccccctaccagttctaggtcatctaatatatagacattgtgttcagtagaaataaatatatatattttttattatgctttaagttctaggatacatgtgcacaacatgcagttttgttacattggtatacacgtgccatgttggtttgctgcacccattaactcatcatttacattaggtatttctcctaatgctatccctccccctgcccccaccccccgacaggccctggggtgtgatgttccccaccctgtgtccaagtgttctcattgctcaattcccacctatgggaatacatttttaaatcattnttaaagg

SEQ ID NO: 2569 - DNA, 175 bp, Homo sapiens
  I.2569 (AI792850)
catcatcatcatgatcgctcgacatcgatacgacttttttcttttcttttctttttttttttaagagacagtcttgttctgttacccaggctggagtgcagtgcaatcctacggagaatttctagcccattagaagaacacatccatgaccccccttctgtcgtcttctcgcagc

SEQ ID NO: 2570 - DNA, 554 bp, Homo sapiens
  I.2570 (AI792835)
atctttctagttactaggtgaatttaggataaactgtgccaaatggtgctgtcaaattttcctacttgagggctactaatattaatcttgacaacacatatgttttatagctcaaaccagactgtgatgtttaaacactacatgttttgcttctgatgcacatcacattctggtttgagttataaaacaattttatctctcttctacctttgtggggaggcattctaggttgggaggcaatgttgttttaattatatttcccaagcactgttcagaattacaagatcaaatataaacataaaaggtaccgatcaggtttcatactagaagggactttggcagatacccatcaaattttctttcaggctttcttcccccaagccacaattgttcagtgaagatcttgcctgccctcaaaatgtgaatgcagtatgatcttgctgcctattttgggctctgcagtttcatctggggcatagttagaaaagatttgtaataaaataacctcataaagtggcaatcatccgttccagccctgtctttcaatgtacctg

SEQ ID NO: 2571 - DNA, 731 bp, Homo sapiens
  I.2571 (AI792721)
  misc_feature (437)..(437): n is a, c, g, or t
  misc_feature (454)..(454): n is a, c, g, or t
  misc_feature (520)..(520): n is a, c, g, or t
  misc_feature (550)..(550): n is a, c, g, or t
  misc_feature (588)..(588): n is a, c, g, or t
  misc_feature (589)..(589): n is a, c, g, or t
  misc_feature (626)..(626): n is a, c, g, or t
  misc_feature (640)..(640): n is a, c, g, or t
  misc_feature (650)..(650): n is a, c, g, or t
  misc_feature (673)..(673): n is a, c, g, or t
  misc_feature (724)..(724): n is a, c, g, or t
gggagtttgggtgctagaggagttaggaagcttgatgctgttgttggccgtgactttggtgacagtgtgaccttggacaagttcctttatctctagggtctcagcatcttcatctgaagcatgaaaagtttggggtggtcccttccttctttaacctcccgagactctgtgcctctcacatgtatagattccctgtttgtagacagcagtgctgttatggggacctctgaaggctatctgaatgtgcctgcatttagcaagtcaaggccagaccctccagatgcactggactgtggggacattttgtgtgaatgagactattaagaatttagcagttcattctgacagcttgatagatggagtggttttgcatggcatccatgtaggaattgactaaaaaggaaacattttctgagagtccggctgtgtgtgcatgnctggaggtttttctcanatcagattttaaaactttgctctgaaagaccaacaacaataacctaatccaatatccttgtatatntgattctactgaccataacatttcttaatntctgcttttggcttctgtagcctaatatactaatgatnnatagtaatagtgtgtattttagaggtgatgcattatncctcttgcattcgntgagtctagnttagggatagaaaccatgctagnttagctgtctgcttaatgagtagccatctttatttctttacttttttatanacttgcc

SEQ ID NO: 2572 - DNA, 541 bp, Homo sapiens
  I.2572 (AI792720)
ttcatggggagaaactcagaagtggagagaacgtctgaggctacatagccagtacaaaatcgcttcttgacctgcacaacttttttttttgatgagttcaacagaaaccaactcaagggagaagaataaagacattgttgaacttagactttgacaagatgcatattggatatctaaatagagatatcaagaaatgaagatatgcatttccagttccagagagaaattcacactggaaatataaatttaggaattttaaagttagtggtcacatttaaagctgcagaatacaaagagatcacctgtgtgagagaactgagtcctgaaacatacccgtgtttaaagatctgggaggtgcagaggaattatcaaaggaggctgagaaggagcagccagtgaggtgtgtagaaaaacaagataagcaaaaagaaaagcaagagatatggaactgaacttccctttggcaaaaaatttagaaaatgataatgagactccgctttctgtctctctgaagataacgttaagctgcagctccgtatct

SEQ ID NO: 2573 - DNA, 458 bp, Homo sapiens
  I.2573 (AI792677)
  misc_feature (410)..(410): n is a, c, g, or t
tcttcctttcatctaacatatttattgagcacctactatgtaccaggccttgtgctagactctggggatatggaaatgagcaaagtagatgtacccccgaaacttgtggactaatggaggagacggaccttaatcagatcgtcattcaaagatactattacaaactgttctgagagccgaggaagcaggaaggagctgtgagagactgagctctaaccttggccatcaaagacaagctgtgcagctctggttttttgagggcaggacatggagggtcaggcccagctggaggcgcaccaaagcccagagaaaattcagaaccacgtgaacttgttggatttcagccccttgaagcacatgttgctattgcagctgccttgataactgtggggacaggaggagcacggctntcccatcttgtacggtgactcgccaatccagttgcccctgcaagagaa

SEQ ID NO: 2574 - DNA, 493 bp, Homo sapiens
  I.2574 (AI792666)
  misc_feature (52)..(52): n is a, c, g, or t
cccaagaattcggcacgagggctttttttttcctagtagccctggggtgggngagctccctcaagtgttcacatgtgtgtggaatgaggaacacccatctccttggccctctccaccctgaagagttagttattaaaataattggcaagctcttgcaaatgtcagtcatccattgttcagaatggaatagcaataatacatccctggctgccctgggcttggccaggattactcactgaaggcctcagggttactggcacacactttcttttcctaataatcccatcccctcagctttcctaaggctagagtgaatttcgtgttcctttagtttacataagatggtgaacttggcaaaagctatcattaaacagaagctaagagaaagcctatgtcgtggaatccagaatgggtattgccattcactgctgtccacagaagctgtcttgaatttctttctgtgtcttttctttttttttctttaagactgttg

SEQ ID NO: 2575 - DNA, 527 bp, Homo sapiens
  I.2575 (AI792600)
  misc_feature (428)..(428): n is a, c, g, or t
cctcccgccgccgccccgcccgctcctcccggccgttccggcctccgcttttggggaaagggaaggcccccaccgcgaagagagtctggcaacgccggaccgggacccccgagggacctcttcctccccgccgcccacctcagaattccttcctccccggcccctagtgggagcttaggccgggagtgacccctgagagggaggaggagcggtgactcctggaacagcccgcgggcggagagggctgcgcgagggcagtggcagagccattgaaaacacaccactctattcagaacccctccagaaacactgagtacgcgtggatacaaaggagaaaaccgaagacacctgggcctacttgagagcggagggtgggaggagcgtgaggatcgaaaaactacctatggcttactacgcttattacctgngtgacaaaataatctttacaccaaacccccatgacatacaattaatttatccatgcacatgtaccctctgaaccaaaaataaaagttggaaagtaaagg

SEQ ID NO: 2576 - DNA, 520 bp, Homo sapiens
  I.2576 (AI792396)
gcacgagggtggtgccgactttccaggctgactcgccgttgcatttgcaaacctggggctccccagccatccccacagagctgctgaataggttgctaagggcttggcaatgttctgcacagccactgctgatactaaagaggccgcaacaggctggatcccagaagaaaggaactgctaacaggttgagtcaccatgaatgcgggactccttcctttaataatctcagacaattctttctgggcttaaacgccccacagtcctgtgacaatgtcccagagattcaaaggagcagtatgacaaaatcatgtagaaggatttgttgtgatatcatccagttaaaccccaggaaacagtgatgcaacagctcttgggaaagatcctgcggtgttatcagttctttctttcaaattctcttcaagcttgtacatctagagtatctcctgctaaatggcaaataagcattgtttcataatgcttataaggcattcacaaaataaaatacggacattttttgaca

SEQ ID NO: 2577 - DNA, 520 bp, Homo sapiens
  I.2577 (AI792394)
gtgtatactgtttgggtgttgggtgcaccaaaatctcacaaatcaccactaaagaacttactcatataaccaaataccacctgtacctcaataacttatggaaaaaaaaatgggactacggcttacttgggagaggggctggtaaatgctctagactttcgtttgagaacttgaagggctgcatcctatgagtaagagtgagcaggaaatagactagccccataaagactgaagctgagctatcagttaggtcaatccagttggattaagatagtttggaattactggtgcccttcagctacctgccagaagcaaaatttttcctctctggaggaaaatagcatcatccagagcctctaattatctctgataccttttcatttaaaatattctgtactcaagcagaaataactaggcatatgagtagacaagatgtaactgaaaaccaaaagaagaaataggtgatacaaaaagatccgtcagggttgcagataatgaatggagttatcagatatagtct

SEQ ID NO: 2578 - DNA, 489 bp, Homo sapiens
  I.2578 (AI792238)
atccccaccaccacattcagtctataccacggccacactgtgcatgtctctccaccctcaactgctttgggcctgtgcacaggctgtttcttctgcctggaacaccctcctctcaccatccctgggcctgggtaagaggtactcctcccttcaagagcaatggagaaactgcctcttgcaagttgctttcctggaccagctttcaaccctccggcaaccaaaacaccactgtatttcccaaacccttgaggcgtgtgccccactgtaccaagactcctgtcaacagtctgtccccatcctagacctggccttgttccttgtgctaccaatgtccttcccccgacaaactcccgctctgcctcagacaggctcttctgatcatgcgactggaaatacacagtctccttccttcactcctttattcccgcagcagcacttgctgcaggggcaggtgtgtttatttagatgttccccttccccaagtgtctg

SEQ ID NO: 2579 - DNA, 569 bp, Homo sapiens
  I.2579 (AI792206)
  misc_feature (13)..(13): n is a, c, g, or t
  misc_feature (18)..(18): n is a, c, g, or t
gatgatggctccnattcnaacctaccctgctgtgtgcaccatgttaagattttttggacctgcagataaaatgtttcagccttaggagttccccactgtaagtaaaattttctggcaagctcaatactaccatctgatgagaacaatgtagtctgttagctgcctgcaagatgactagtctatactcccaagaaaacacccccttcagaacaatagagaaggaactgttttgcatgtggaccacttaaggtccaatttgaggctggtttggggaaaacatccactcctcctcaaacctatctttagacttaaagtcaacttaaatgtcattgagtttcccaccctgggttaagcactttcacttatctttgcttacactatttttctatctaaacatacatttttaaagcagaaatcctcatttaatctttaaaacagatctgtgattttgaaacactatttaatcaaaattcagaattgtggtagcatttttgctgtttgtaagttaaacaaaatagattgtaagtgtgcaatgccattcattcattcaactaatgtgccaataattt

SEQ ID NO: 2580 - DNA, 320 bp, Homo sapiens
  I.2580 (AI792185)
aatcatacaaggcttttaggccagcccacattcaaagggaagaaagtcagacacttctcttttctatgggaatgtcacagaatctgtggccatcttgaacctgcctcagaggccatgacatcacgaattctgttaaagacatgaccatctcatttcctgccaggtctggaccctcaattccttcacttgaatgtgagtcagcctcatgaggacagttgcatttgcctcccgcctattctcatgcctatgatcactcctttcacaactattaactcatctcacacagcctctctgcatagtacaattctgaaataaaattt

SEQ ID NO: 2581 - DNA, 482 bp, Homo sapiens
  I.2581 (AI792109)
acgcgtccgaagaacttacaatggatagtctatcctttggagtttggttcattatggaaaatgaaaaacaaatagctttctaaattaaatttttatttgcttattctttatttgtgtgttgtgttccttaaaatagcattgaaacaaaagctgaataaaactaaaatgttttttgttttcagatgtcttcagtaaatgtaaaggtgacctcttagaagttaaagatggtaacttgaaaacacatcctactcttttagaaaatctagttttctttgttgaggtaagtttttgttctcttcctaaaagacattgttgttcttaatggtctacaggattcatttttcaacagtgaacaggtaataggcaccttatacctgtaacttaaccctccatccctgtttttgttaattgaaaagcaatttaaatcattttctaaaccaatttcttccaagaattctaagatgatttcattcataatactt

SEQ ID NO: 2582 - DNA, 453 bp, Homo sapiens
  I.2582 (AI792101)
atgggaacagtccctatcatccatccagggctcccaatctccaccccgagctggtctcctgccctccctgccttaccttaacctgctcctgagtggagcctaagggaaggctggttctagggaccccagtgggaggcaagacaaggaggtcttgctgggagatttctggttcccacacaagggtccccaagactagcttctccacctggagagggtgggagaccagctggaaccccaaggagagtcaattttctggccttggaattaggtattttttgttttgaaaattccttggtatcaagtttacatgactggggccactggaccctgtaggcagggctgggggtacaaagaggatcacaagcctggcctctttgggagccatagctcaggcaccactcaaggaagcacatttgttcaagggattagcatttctggatgtcagttcagcga

SEQ ID NO: 2583 - DNA, 430 bp, Homo sapiens
  I.2583 (AI792075)
ccacgcgtccgattggttttgatgcacttgcagtagcacaaagtgaagtcctggcggccttatcctagtttcataaaagaaaaaaaaagttaaagagatggggaagataatagctaaaaaacaacaacaaaaaagctgaattcaaactgcgatgactttatcaaaggactgtcctactgacattcaacataacatcaaaattaacatcaccttgccaatatttgtagtttagtcacaacttttcaactacactctactctcttttggggaaaagaaagttacgcatgctagctgttttcaagtttggcagatgcactttgaaaatactcgttggagagtgagattaaaaacaaaaacgctgtgtaatatttctattaccaggagcaaaattgtttctatgaaaaaatatttgaggaacatctttaatttg

SEQ ID NO: 2584 - DNA, 349 bp, Homo sapiens
  I.2584 (AI792049)
ggcaagggcagagtgccttcagagcgttttctttttccctttcctcccttcctgcaaacaatgtggctacagtttaactggaagtgacaaactgaggaaactgaggcactggaagatgaaggctacagaggtagaaagtgatggaggagatacatccagaagactgcattacaatttcaaatcaaagctggacaagtttttttttttttttacacagatatcaccatgttagaaaagttggacaagttttgaaaccattctgaacctatcattcctgtctttcaaatccttccaaggcatcttattattgatttgtttctatattttcctcattattaaagaggttgag

SEQ ID NO: 2585 - DNA, 497 bp, Homo sapiens
  I.2585 (AI792048)
tttgagttaaagaggcttttaataattatgccagcaaaacaggtatagaataggactccccaagtaaaccagaatgaatggctctcaaactgtggtacttccctggatattaatagaccgaataatcatgatatataataactaaaatgttccacagaggaattggccttaattacaaagttagaaaccacagatggtgttaatacaagttcttttctctctccacccatatccttggtgtgaaacatcaaatagcccttttataattacaaagcacagcagtaattaatattgatctcagaactcagtaaaggtcaacattaatttatagaaaattttggattcaatctagtttttactctggaattgatgcagtgggcagtgtttcaccagccccaacaccatcaccatgatgacgacaggcacaaacttggaaaaattgtctgaaaaagtttttttttctaaagatatagcacacttctgtatggatcttgaat

SEQ ID NO: 2586 - DNA, 509 bp, Homo sapiens
  I.2586 (AI791976)
cgccttgatcatggactcctgggctccggaactgtaagaaaatttgtgttgtggaagccacccagcccatggtatttcgttatggcagcctgagcagaggtggtagctatgtggacagtttttggacttctctattgtaacacaggaggcaacacagattcttcaagtctcacagctactccctagggatcactggggaacttggaaaaaatctattggctcagctagtgagcgatcacttcctgtaccactgttctgagggcggacttccagctcaggatcatgcgagggcattttgttgcccttcatcactcagcagtgaagaatgaaaatcaacagagctttccccagcctgctgcttaagcagctgctagcaggctgaggctgcccagcctcattaacccattagatgctgcgttcgcccgggagtcattcttaatgaggctgctgcagatgagaaaacagaagcaaaggcagaaagatgctacattgccagctttgaagatgga

SEQ ID NO: 2587 - DNA, 543 bp, Homo sapiens
  I.2587 (AI791870)
  misc_feature (463)..(463): n is a, c, g, or t
  misc_feature (472)..(472): n is a, c, g, or t
gaattgtgtatattttagtagttggaagaagttggagtgttaatgtgtaattagagaacagtgagaaataaaattctacagattgttttattctggtgtgctgttgtgttctcatatggttgtctttttggtcttgatagtgtatcagtaacagagtacgagtaacaaacagggatctcttctgaacggcgtgacattagaaaagctgtttacggcctcaactttgctgtggtttattaagacacagatatgtgttcattctggggccaagcagtaactggagagtggcacttattgaggccagtatggaggcagtacagagattattgagattaaaagaaagaaacaggtggaacggatctatgtaatggaaagctaaacagaatagttcgtggtacacagtagaaaagcattacatgtttattaagatatggtcatcttccatttattaaagttacatgtnttataattnttagagtatatagaaattctctaccctatcatgtttgccaaagtcagaacaataacttcatttattaaata

SEQ ID NO: 2588 - DNA, 396 bp, Homo sapiens
  I.2588 (AI791831)
gtcgacattaagtattcatcgtgattcttgcaatttttactgtgatggttacaaagcggtgattttccagctccacttctacttccacattaaggaaagggtttccttttttccctattcatttattttattcgttcatttacatgtctaaatgttaacctcttttccctttccctctaaaccaattgtgttcctcagggatgtcagagtctcctttaaaggacaaggtggaaagtgagagggtagagcccaggcccctcacccctgctgctccccgaggagtgccacatttatctgcttcctatagtaaggttcatttacaaaacaagcggtctgctacttttttaaaagtttgaaaaccaccatcttaaataaatatcctctgtgcccattaca

SEQ ID NO: 2589 - DNA, 465 bp, Homo sapiens
  I.2589 (AI791675)
gatcagcatgttcctatgtatttatcaatatgtaaaataatgtagatttcccttctctatggaaataatttgaacaatttgatgaaaagtgtggtaaatgaagattaaatgctgtgtcacacctgattcccctgagctgtgagcactagagtcaatcagctgctctcattgccctctgacatttagatttttccccagagcctacatctgtgggaatgtttctttctatcatttatccagaacaaacaccaggaaacactagttcttcaaagtttatcttttaaacagaggccattttacaatggggttgtataggtcttcacgtatgtgagagccaggtaggtgatcctccttgtggtatgcttttggcaagggagtaatgggctgagaaatccgactatccaaaacatagattcccccatataccaagagatgcctaaaatctgctgttatggtattctttct

SEQ ID NO: 2590 - DNA, 464 bp, Homo sapiens
  I.2590 (AI791640)
gtcgacttcaatttagtggcaaacacttgataccttttcctcgaccatttcatctgcttgggctattgtaagaaaataccttagactcagtaacttattaacaacagaaattattttacagtctggaggctgggaagtccaaggccaagttgtcagcggattcagtgttaggtgagggcttgttctttccttcatgttggcatcttctacctctgttctcacatggtagatagggagaacaagcttcctcaggcctcttttataagagtattaatctcatgataaaggtggagcctaatcacctaatcatctccaaaggctcaccctcttaaggccatcacattgggaattaggttttaacatatgaattttgaggacacagtgttcagatgataccacctactctgaccaatctattcaacatatactggaattgctagccaggttcattaggcataaaaata

SEQ ID NO: 2591 - DNA, 464 bp, Homo sapiens
  I.2591 (AI791614)
gaagacagtttcataaagtgacagtttagagaggccttaaaggaacaagaaaagagggtggagcatctagcgcaagcaacagtagggaaaaaagaacctgaagcaaggtgagaagaaaaaccatgaccattcctaggcctgaggaggtggcagtgttagtttgattatgaactctagttatgggagggtggccattagactggagttgtggtcataaaaaggaatgcagctagtgacaaaatagaagcccagcagagaaggagtaaggaaaataaatatacctcctttcctcccaccctctgatgtcttgctcagccttcccattggccatccccaaatggcaagatccaacctttcagagaacaaagggcaagacaatcaataacagaatagctagcacaacttaaccccgaaatgtattatgtgcaaggcactgtgccaagggctttgcatgtattatttca

SEQ ID NO: 2592 - DNA, 516 bp, Homo sapiens
  I.2592 (AI791596)
  misc_feature (215)..(215): n is a, c, g, or t
  misc_feature (222)..(222): n is a, c, g, or t
cacttgctggctttacctgctggctagctttacccccaattttctccacaatccatgctaattggatttccatctacaccactgctctgaaatgtcactcataaatgtttccagttgtctaccccttgctagagccaatggtcagttactggccatcagctttcttggcctgttagcactatttcactttcatgaccttgcatcttgaaaccctntcttctncagacatttcttcccaccctcgctagatttccttctatttaactggacattttctctctatttgtttgttggttctttgactggccctctgaaagttggtgtccttcagcatcttggttgctaaggatatgggtagaattttaacacacagagataaacatgaggaggactgggaaaagaagaaaaggtaaacatgctgtaaatcttacagagaagttctgtttggctggagaggaggtgaagaggagattcatttatgggagaagtttgaaacatcccatcaaatatataaga

SEQ ID NO: 2593 - DNA, 460 bp, Homo sapiens
  I.2593 (AI791551)
  misc_feature (443)..(443): n is a, c, g, or t
taacttaggctgagacttatttgaatgcctgtttcatatggagcttttaagtgtaacagttgtgagtgaaattgccccttttcaaggtaattgaattccatttttcactttccatttccctctagaaaaatcaaaacgttttcagagcttggcttcttagtgggtgattttctaaggtgggaactttagaaccataaaacattctagtgtggcaaaggcattcaggaaccggatgaccaggccccttctccgcaggtgaacagcctccaccagccggtcttggagaacatattgatttcactgtgtttttatttgaaacaccaaaggaatgcccatatcttgtccttgggccagggctgtgggttaggggagctgggtttctgtccagaatcttgtcatctgtagggcagctgaggggcattattacccagaggtccctgganacctgtgctaaattggt

SEQ ID NO: 2594 - DNA, 292 bp, Homo sapiens
  I.2594 (AI791507)
ctactactactaaattcgcggccgcgtcgacctagtgccctgccttctatgacaaattcgcgggcgtaaagggaaatacctcttctagggatccggagcctgggaatttaagtaaccctgacatcagcgcttcctccttttagtgaggcttcagtggacaggcgtatttggggtggccgcgggcggtctgagatgttttttggtggaatgagacaatggcaactacaagaagtggtagcttggagacgctttttcagaatcgtatgtaaatgtaaataaaagaatctttgga

SEQ ID NO: 2595 - DNA, 560 bp, Homo sapiens
  I.2595 (AI791500)
  misc_feature (506)..(506): n is a, c, g, or t
ctactactactaaattcgcggccgcgtcgacccccatccaatgcctgccccctcccccatcactcttttgcactttttactgtggtgaagtgtaaccaatgtctttagagctgaggtctaacagacttctgtgaaaactttctgaaaaaaaccacaaaacaaaaataaacaaaagtgaagagccaagaatgcaaaattaaaaccccctggataaaattactaatcacaacagcatgttattatagggttaattttaaataatgatgcaaatcccaaacctgatctagtagagagagaactggttttgacagaccttaaaagagctatcttagaactcatttcaggtttgtaatatccaattaagattttagtttgttggactatttctagtgactctctggcttcttgtgtggaaactccagttgaattttacagatttctgcttttgtgccccaaatgctttttaaaaatctgatttttaaagtttattgaatatcaataaactntatttcagagtttattttgatttgctgtatttcacagtatattcccaaaatgag

SEQ ID NO: 2596 - DNA, 458 bp, Homo sapiens
  I.2596 (AI791472)
gtcgaccacaacagaaagagaaaactacaggccaatattcctaatgaacacagatggacgaattctcagcataatactaccaagccaaatctaatgatgaatgaaaaagataatataccatgatcaagtgggatttatcccaggaatgcaaagatggctcaacgtacacaaaatcaatgcatgtgatacatcacatcaacaagatgaaaggcaaaaactatctgatcatctcagcagatgcagaaaaatcactcggtaaaacttaccattgcttcatgatgaaaactctcaacaaattaggcatagaaggaacacttcaacataagaaaaggcatatatgactaatctacagctaacatcctactcactgggaaaaattgaaaagcttttcctctaagaactggaacaagacaaggatgcccactttcaccactcttattcaacacagtatgggacat

SEQ ID NO: 2597 - DNA, 511 bp, Homo sapiens
  I.2597 (AI791419)
gtcctatggggactgcagcataaaagtgaaaaatgtataagataaacctttagatggtaagcaaggcaagattctcaaattctgtatgaatcagctccacctccgccccatggacagtagatgaccgttaatggcttttaaggaaagatgcaacctggaaaaaaagaaaaaaaacttgttttagaatggtaaccactggcaatatgaagaataattagactaaagaagagaggtaggataatcatgggcattggcagtggaattgaaagagtaatttcagaagcagaatggtcagatgttggaggtgattggttatagagtttaagaattgtactgattttctattgtgtaacaaactaccccaaaacttaatggcttaaagcaactattatttctcctgattctgtggttgactggatggtcgtctgctgctcttgcttagacttaggcatctgcatttagctgagggttcagccagggctggacatcctttaatggcctcattcccatg

SEQ ID NO: 2598 - DNA, 358 bp, Homo sapiens
  I.2598 (AI791390)
cagatagatacatgtggtatactttgacccaaagttaaggaaatttttaaatattaaaaagatgaatttttggccaggtgcagtggcttacgcctgtaatcccagcactttgggaggccaaggcaggtggatcaccctgaggtcaggagtttaagaccagcctggtcaacatggtgaaaccccatctctactaaaaatacaaaaattagctgggcatgatagcacgtgcctgtagtcccagctactcgggaggctgaggcaggagaatcccttgatcctgggaggcaaaggttgcagtcagccaagatcacgccactgcaactccagccagggcaacagaacaagactccatctcaga

SEQ ID NO: 2599 - DNA, 468 bp, Homo sapiens
  I.2599 (AI791366)
tgtttcttctcctctagaagcaaccaaattccaaatgggtgttataaactggatcacgcgtggacacgccctatttccaagaacccttagacagaccccaggaagagccctagctgctgttccccattcaacgtccattttcagcaggaagtagccagaaaaagtcgtcacccaataaccccctaacagcaattaggttgtctccatggggggctggggggaatgtgataggagttactaagaaattattttaggcagatagagaggaaaagcggtccttggaaagttttcatttcttttaaagcagctccagaaaagtttcttgtcaagaaggaaagcccaggcccttagagccaagcaggcaaccttaggtatgcagataccggccattagaaattgggtctacccaacatgatgattcccatggttgtcctcttgcccttgcgctgacatgtgcctggcaacatg

SEQ ID NO: 2600 - DNA, 463 bp, Homo sapiens
  I.2600 (AI791354)
gttattttcttagagaggccttccctgatcacttattctaaagtgggaactagtgatcaagtgatcaagtttaatgttttacagtgatccaggtgacatttgtgaggtctcaactgaagaagtagcaatgggggtggaaaagaaagggacagatacaagaaataatttaaaaaaaaagaattgtgagtgtggtggctcacatctgtcatcccaacactttgggaggctgaggcgggaggattgcttgaggccaggagttcaggatcagcctgggcagcatggtgaaaccccatttcttaaaaataaataaatacataaattggccacgcatggtggctcatgcctgtggtcccagctacttgggaggctgaggcaggagtatcgtttgagcccaggaatttgaagcttcagtgagctatgattgagccactccattccggcccgggtaacagagtgagacctt

SEQ ID NO: 2601 - DNA, 320 bp, Homo sapiens
  I.2601 (AI791349)
ccgaagaaaccttggtccctgaagtcttattgattggtgcaggtcactgatttttttaatgaactcctgttcaatacagaatatgagtggccatctattgattcaagttcaatttcaagggatcccgtctttgcagagaaaggcccttctaaatgtttcctgttttcctttttttagtttggctttttttttttttttttttgcttttgcttcattctgtgctgtttgcttgtagttgaataaaaatagaaacctgaatgaaaaaaaaaaaaaaaaaaaaagggcggccgctctagaggatccctcgaggggcccaagct

SEQ ID NO: 2602 - DNA, 471 bp, Homo sapiens
  I.2602 (AI791338)
gtcgacggtgccaggctccctccagaccacacactgcacagcccggctcttcatctttcaattgtaggactttaaaggaattgacagatgctcatagacagaccttgcattgggagcaggtaaaaaatgcccacctggattctgcaggagacaaggaggccgtcagcatggaacacctgggcacatctcagatttgcagctacctgtaggttcgtcttagcccagaaaccgcaggtatctgccctcatcctgcccaggagaactcatttccagcctccaaatgcttaaccacacgttgttttgtatctctgtctctttgcctgcctctcctactggggcagagcctgagctggcttgccttgccctgccccacagtttcacaaggatgtggacatggttggggaccaatcagtgcttgaaccagggacgccgctagactctatccaaaacctcactcattatgccttccaa

SEQ ID NO: 2603 - DNA, 481 bp, Homo sapiens
  I.2603 (AI791313)
ctactactactaaattcgcggccgcgtcgaccctgcttcttaacaagatttcttagtcctcagtatttacatttaaaaatccaaacagctttgacaacaattgtaaaaaaaaaaatcattaaacttctgcttttccctatcttgaagtaaaatgcatatgtatagttaatttatcgaaaacacaggacagtgtagtgttctaggaatgagctatataaatttgtgtattcagattcaacctcttttcccttgatttctacttatcctagttagaatacatcatttttagtcactgtcaaaaatagggcttagagcaccctgtttaacagatgtgttaaatgttaacatgaatggaataagcatctgccgtgagcatgcttttctgtttcattcagtgcttgtgttgtagtcttgttccttgttcctgctgaatatggaagatgttccttattaaacttttactggcatttcttgtgaaact

SEQ ID NO: 2604 - DNA, 352 bp, Homo sapiens
  I.2604 (AI791312)
ctactactactaaattcgcggccgcgtcgactttttttttttttttttggtattttcactgtcaattatgcctcgtattatttatttatttgccaaaatacgactgtatgaaaaaaagctacctcatagagctcatgacacataataggtattcactgagcatttggtgatttgttaagcactcacatcaataaaaatatttcagctcaacaggcacactaggggccagatgagcactgactttccccattgaggagtctcgattacctcatgtctcacttcaaacaatttatttttcttgtatgcatagctgggttcaagagttctttcttgttttgtcgacgcggccgcg

SEQ ID NO: 2605 - DNA, 509 bp, Homo sapiens
  I.2605 (AI791247)
ttggggatgatagaaatgcttagatccagctctgggttacaagagaaagtcagactttcccagaaattctgggaagtatggagagattcatgggatgagctcagcacaggataccagagtgtcttggcatcagcagcatgagagcaaagtatgagccttgatggcaggaatcatggcagacaagcatttagaaagtttattctgctctttggccaagtattggttaaaaggaaagcagttgaaactgtaaccaaagaaggcatatgcttccagaaatatctcaagaaaaaatattgcaagtaacagtagtagctgttggattgggctctaaagtgaaggttgaagagattcaaccagttagcatgaaagttggtgataaagttcttctccaactttggtgccagaatatgtagtgaaagttggagataaagttcttctcccagaatatgcaggcaccaaagtggtgctaggtgacaggaattatttcttatttagagatggtgacattc

SEQ ID NO: 2606 - DNA, 281 bp, Homo sapiens
  I.2606 (AI784200)
gatgtatttattaataaacttatagttaaatatatttgtaacactattattctaaataagatttaagactgtttatatgtgtaagatgctttacaaaatatggttgcacacagcaactctgtgagacatgtattatcactctcattctgcaagagaaattaccgagaattagaaaggttaagtaactggtgtaagaataaacagtaggtgaaaaaacatatatttctttttttattattattatactttaagttttagggtacatgtgcacattgtgcagg

SEQ ID NO: 2607 - DNA, 193 bp, Homo sapiens
  I.2607 (AI783890)
tttttttttttttttttttttttagccttttgaaaagggaataatttcatatttcctttttatttatcacagtaaatttcacatgacataaaattcgccattgtaaagaacacaattcatcacagggttgtacatccaccacctctatctaatcctgggacatttcatcaccccaaaaagagaccctgcactc

SEQ ID NO: 2608 - DNA, 515 bp, Homo sapiens
  I.2608 (AI770013)
  misc_feature (300)..(300): n is a, c, g, or t
tcggggcagtgctcgtgatttttattaattgaagtgcaggagtaaaagcttgggagggtgttgctaggagaagcagctttgctacctcctgctttccaggaatggggaaggagttccctagcaaaggtgtggagactgctggggatttgttcattctgcagtgagtgttgagagatagcagctgaagcagcaattgaagatgaatgaacgagcttgggatttattttcctcttgtgggaaaacatgaggaaatggataaagcaaaggacagaggctggcccaggggctttggtgacttanttttagggtatttctttctagagttccaaaatgtttgaaaggagactaacagcggttgtgttttggcctcaaaagttttctgcaggacaccccacgccctgtcagggacgcgaatgggtgccagcatctgagcgcctgtgactcgagtcccgcagcccctacgctgcccaccgcaggccctctggctgccgcctggtgctgtggacgcctggtta

SEQ ID NO: 2609 - DNA, 433 bp, Homo sapiens
  I.2609 (AI769783)
cgcctcggcgaggggaaccgccgccccccctctccgccgccccctcccgctcccgctccgctggcggccggggaagttcccaccaaaggagtcaggccgctttgtgtgtgctttcggggccaccggccctggttctcctcctccctccctgctcgccctgcgccttggccgcagacaatcaggcttgccggaggacgccccctggggaccccgagggcggggtcggtgaacggccgccaggttctcacattcagaattctcctgccaccaaagagaacctgaagttcatttacaagttgacgagcgggatacctacatggtgtccctttgcaagacgccagttagaaaataacccaagttgtaagtttccggcgctttacttgccggtatccctttcccaccttgcctaatctaatcgcagtccttctagttt

SEQ ID NO: 2610 - DNA, 598 bp, Homo sapiens
  I.2610 (AI769514)
tcaaaggtgattctttcagtatttattagtaaggctgaggcaacagcctttatacggcacagtttacataagttatcaagatacatcttgtatacaatcacaaaaccaagacatatttttacatagagtaaaactcaagacggatttacaagcatttttttttaaatgcaactctcatgtattttcaggtcaatttatacagtccttagtccaagaatttgcatttgtccattagattttccaaagggatttgggtaaaacaaacaaacaaaaaaacacattagcaaatcaccaacatggcatgcaacatatagttagaaacaagacatatcttcaagtactttagtttttatttcaaaatcagttttattaagatgtttatgttttcagacaagaaaattttttcttaaacctcatatgtgtttttaggatattagcacacacattaatcagtagtgggagcacctgagcacgtcaccaaacaaatatacagacacaatcaaacaataatcatattcacatgctaaatgccaaatgaaattaatatttcaacttcgtctactttaccaagtgtatacttatgtacaaggtaatgcat

SEQ ID NO: 2611 - DNA, 319 bp, Homo sapiens
  I.2611 (AI769053)
ttttttaatgtgacccatttatttatttatttatttatgatggagtctcaaaaaaaaaaaaaagaaagaaaaacaattcttgtaatcccagcactttgggaggcatatcacttgaggtcaggagttggagacgagcctgaccaacatgaaaccctatctctaaaaaagaaaaagacctctttgcaaacaaccttggtgcaaaagtttactactaccatttcattctcaacattaaggacctagtgtgcttggtgggtggacaagaaaacaaatctaggaaagggaaagcttttctacacaaagagtagtagcacctcaa

SEQ ID NO: 2612 - DNA, 465 bp, Homo sapiens
  I.2612 (AI768440)
tttttttttttttttctttttttacaactgctttaatgaatgggtcagcttttttgaagactcttgggtgatatccatttgggatctggggtaactcttctcaatgtcatggcccaccttttgtccaggctttaaattaccacttttgttcagtatagctttaggcaccagggattttatagttctgacttttggtcttgttcttgtataccatgtgtctccttcagagaagccacatttatgtatccagcctcagaattttgtgaacacacaagattctcaggagacttttcaggggactttgaacttgccattgcttcttttgacttgatctcttcagtctcttgaagacttgcaaatgactctaccaaaccttttcctgaaaaactggagtttgataaaggcaatatttcattcactacttcggattcaaggatgtcactaattgttgtttccatctgctca

SEQ ID NO: 2613 - DNA, 305 bp, Homo sapiens
  I.2613 (AI767946)
tttttttttaggagcatacagaagtttattgagcactttctgtaatgaggaatagtgtgcgcagagtaatgaaaatttttgaaataggttaaacatttctgaagaactttcgagacttcctggattaccaaatcttcttatatctcttcattgtgtatgaagattggttgaggtcgtatgtttcctgacacatgtcaaatcaaggctagctctcacagtagagtgtcctttatgctcaattccttggctgtcctgcctcttctgccttgatagaaacttgatttggttggtttttaggccacata

SEQ ID NO: 2614 - DNA, 204 bp, Homo sapiens
  I.2614 (AI767910)
tttttttttactggttatagaaaaaatttaattgttatggtaagaagacaataataatgtaagactattcagaattgttgacaggcataatttacaagacattatgcagtactttgcaactccatcacctctcaatcatttgagttccgattgtccaccctgtgtatggttgaaatcttttgcgactgcttgtcctattagacc

SEQ ID NO: 2615 - DNA, 395 bp, Homo sapiens
  I.2615 (AI767808)
ttttcatcattaaaacactttattaaaacactaaacatggccacaaagctttacggataaaacagacactatctggatattttgcatgaatcaaaaaaaaaaaaaaaaaaaaagaaaagagaaaggagtaagtagttgggaccatatgaatcattatttaaaaaggagaaagtgaaatgattaagtaaaaggggaaaagtggcaaaaatttatggtgtaaaactgaaaaaatatctgcaatatatgtgcctactgtttttaaataaaacaagtttttgtattagataatttttaacaattataatatttgttatagtatttcaaaggatattttaaatggttggctattaaacttgattatttaaacactaaggaaaaaaaccttaatattcttt

SEQ ID NO: 2616 - DNA, 404 bp, Homo sapiens
  I.2616 (AI765050)
agtgctggaactgcctgaaaaattcagctgtgtctcaatttgtttccctcatacatttttctattctaatatttaatatttaacatgtaatatttttctaattagctttagattattagaattctgatttatggcttgtaggaggacacatcttctttcttcctaacattttataacatgtgaatactagagaaatttcattaggacacattaggacacattatttttcctgtatgttcattttctgaggtcaaagccttaccttttcgtccccaggtttctctgaaagaactgtagtgtctggatttgttggcgtatcccaggatctaacttgatttttgaactctctcctcattttcagtgctcgttggcctccaagcgcttgcatagtaagccccttcctc

SEQ ID NO: 2617 - DNA, 391 bp, Homo sapiens
  I.2617 (AI764969)
ctgggcatctaaaagtattgtgttccttagacactgtgcttacagggcctactgggttgattctaaagaagaaagaaaatctatatgcatgaaaagatgtcttaaaaagttttgaactactcaaagttaagatttggggaaatagaaatagtatataacttaagaaaattgccactggctgtgaacccccatggcattttctttgcacttttttgcttctcgttagattgtatgtgtttttaccatttcacacaaacttttaaagattattccacgccgttagctctgtgcttctattagtgtctctatctctctttctctctctcttccatctgagtacaatggctagaaaataatacacacttgaatgaataaatgtcatttaaatatt

SEQ ID NO: 2618 - DNA, 752 bp, Homo sapiens
  I.2618 (AI763386)
  misc_feature (556)..(556): n is a, c, g, or t
  misc_feature (614)..(614): n is a, c, g, or t
  misc_feature (615)..(615): n is a, c, g, or t
  misc_feature (670)..(670): n is a, c, g, or t
  misc_feature (671)..(671): n is a, c, g, or t
  misc_feature (684)..(684): n is a, c, g, or t
  misc_feature (686)..(686): n is a, c, g, or t
  misc_feature (687)..(687): n is a, c, g, or t
  misc_feature (688)..(688): n is a, c, g, or t
  misc_feature (713)..(713): n is a, c, g, or t
tttttattcttaaccataattttattgaaggaaggaatcaatgaataaaaatttcctgagtttactgtttactgcaaaaagactgtatgctgttttacgttttcttcttttaaggtctaacatcaatatgttgatgtttggtaaatataatttcaatcccagttgcatctctgagtccaggcaagagtactacaaaaagtataaatagaggtcaagtgcagttgccctctgcaagcaagaccacttagaactcttcaatggctctttgacaaaccttcagtgggatttctgtcaaagctgacaatggataaaattatagaaaggagggaaagccttgataaggagtccttaatgagttcgtcactaagttaattcaacattgaaagggatagaagatgttaattccacacacacgtgaaagaaatcaacaatcaggcctcatcttttcaatgctaaaaccaggctttcctgtcggagttggggccagagatgtttccatcccctcttgcaaaaagggtattcttaagaggccttaagtcttcagcattgatagttnttgaaccagttggtgacggtcatcatcacatacagggaagctaggaagaacacgaagnntgagtaggagtagatgtagacggtgccctttcttctcgtcataaaatgacccgtnngtcccttcttccncnnngctgctgctctttcatgtcctctcncaccagactgaagcaaaaacaacagcgagctatctgcaa

SEQ ID NO: 2619 - DNA, 490 bp, Homo sapiens
  I.2619 (AI762495)
tttcttttcttttttttttttttttttggggcgggtggggaggggggattgtcccagtgcctagaacagtgcctggaatataagtggcacccaataaatatctctgtgaataaattaagggcttaggaaggatatacagacacacgggagactggtaactggcggggaagggtggctttgggaaaagagtaaatgaaataggcttcctggagggtccctgagtccaatagctaaaaggtcctcgcccaatctccgagtcctctccttgcacctcacctgaagtgggttcttggtgctgatcgccaggacctggtacttgaagtagcagagctcacagctccaggagcccctctcgctgatccagcggatgaggcagggctgatgcgtgcagcgcactgagccgtcgcagcggcaggggcttaagagctccccctggaggaagagtgaggaggggccctgtcagccatcaccaccccgaccccactcagcc

SEQ ID NO: 2620 - DNA, 218 bp, Homo sapiens
  I.2620 (AI762224)
  misc_feature (43)..(43): n is a, c, g, or t
agattgcaagtagtttatttggaggtgatcccagagggcaccnatagggaggggagaagtaagacttaagagggaaggaagccaatacaaggggatttcaaaaagttcatggaatcacaaccagttacagatttctttgctccttttccactcccactgcttcacttgactagcccggctttcttgaggtcttgcagctctacaaggataatctgtgg

SEQ ID NO: 2621 - DNA, 478 bp, Homo sapiens
  I.2621 (AI762202)
attttaatgtattttattacacctcataccaatcctttggtttacttttcatatactaagcagttggatttagagaaaatggtataatttaagtggaaaattatttgaaacattataataatgatctcttggctaaagagaaacaaatggtaaactcacagccagccaactcaactatacctctcattccaaagtagtaattttgaagcttgtacaaaacaaaaataccatgacaatggcaattttgctctaaatatattccaaaggaaacttaccatattggaaaaaagccacaaactgcaccaaaagcactcaaatagaggtgagcttggcttgattagggcttgtgttctccttagcaagatcagcacctttccctcagttacttcaacagcaagagtagatgctctgcacaggccgccctgccagtaaactcccagccaggaaatgttgcctttgcaccttgaatttatacagg

SEQ ID NO: 2622 - DNA, 255 bp, Homo sapiens
  I.2622 (AI762177)
tagaaggcaattttattaatatgagtacactaaaacatttcaaactagtacatattttaacagatcataacctcagccatgtgtaccactcacagcatgcacaagcatttaaatagggttttaaaaattcccggcggtaggagagcagtttgccattcatacacacgtattgaaagactgctggcttcatgctggtgatcaaaaagtttcagattttggggcattttggatttttagattaggggatgctcaact

SEQ ID NO: 2623 - DNA, 460 bp, Homo sapiens
  I.2623 (AI762074)
gcggccgcccccctcggggcacggggaaccctcccgaggcaccccgcgcctcacctcgcctcagcccgacactactcccctgtctctgtcgggagccacagcctccctcgccccggccctaactcgtccgccgtgccgcgccgcgccgtttcgctcgcagcccctcctcggtccgcggctgccgcgccgccccgcgctctggtcccgcactcgggccagggagcctgggtacagccaaccggcccgccctgagccagccgacggccagactccctcttccgggcgtggtggagccgggctctgaggcagggcaccgtgaagaccccagcgcgggaggggcggggcggggtgcgaggggggactagttctgaaagcccaccctcctcatctgcaccgacgagggttccccctcgaccctcgcgccgctgtactcccacctacgcggctttccctcctctca

SEQ ID NO: 2624 - DNA, 533 bp, Homo sapiens
  I.2624 (AI762019)
ctaagtatttttaaacttgcatacaatcagttattttaattctctgtgtatacaggcatatctcattttattgtgctttgctttattgtgctttgcagatattagctttttttttttttttaaggaacagtgttttgctctgttgtctaggctgtaatacaggtggtatgatcatagctaattgtaacctcaatctcctaggctccagtcatcctcctgattttgcctcccaaagcgctggaattataggcatgagccactgcacccagctagatattgcattttttacaaattgaaggtttggggcaactctaccatcagcaggtctattggtaccattttcccaaaagcatgtgctcacattgtgtccttgtaccacattttggtaattctcacaatatttcaaactttctcatcattattatatctgttatggtcatctgtgatcaatgatctttgatgttacttcataattttgagggtgagctacaaaccacacctatataagatagcagacttaacccacaaatgtt

SEQ ID NO: 2625 - DNA, 461 bp, Homo sapiens
  I.2625 (AI761144)
tctttaatcaacttctgtttagggagctaatgagccatgacaagaacaaaaggccagcagccaagaggagggggaaacaggagctggcagaccagaccggactgcggctcctgagctggttgtttcccttctcaaaggcgcaagtaaggtgtcgctgtcctttactccgctcaaaactttaggcctcctctgcgaggctgctcccctccatggcacccacccacagggcagaaatgcagaaagcaaggctttgcctctagggtgggagggggaaggaggagctggttcccaagggaacaaggaatcccgtttgagagactaggatgttctcagcctcagaactggcttgcgagctggccaaacatgcaaatacccacaggtgcagcatgtaaaaagaaagtggccttgggtgaggctgcaggggcagctggccgcacattttgcatatgctcctaggaagc

SEQ ID NO: 2626 - DNA, 501 bp, Homo sapiens
  I.2626 (AI761032)
gtttccattaggcctgtctgtttaataaccacagacatattctacacggaagccttgggtctgtgagagccaggccaggccacaccaggacgttcctgcatggtggctgtggccagtcctcgtgggcctcccccccccagcccttcccccacagtctgggagagctggcctctgctttgacccttcctgcctcctacacgggtaggagaggcccgtgtatcccctgcttcctgacccttagcaaacttctttgagccgttaggatttttcccttccatggtattctggaaagagctctaagagacccctcacctgccgcagctcccaattcaaagaaaccaagatcaagggtcggagggagaatagaacttgcccaagactccgcagcgggtcgtgggcagagccaggctgcaagccaggcctggggactccggcctctctccctctaggcttttgtctgggggaggggcttctggagaggagaggcctgtgagagtggcg

SEQ ID NO: 2627 - DNA, 688 bp, Homo sapiens
  I.2627 (AI760818)
  misc_feature (3)..(3): n is a, c, g, or t
  misc_feature (4)..(4): n is a, c, g, or t
  misc_feature (593)..(593): n is a, c, g, or t
aannctttttttttttctgtcttctttcttacaaagatcaacagttatttattcagctaacatttaccaaatgcccctgttgatggaacatggcaccaagtgttggaaaacaggcaaatcaataggtgctttgcctgcaagaatcgtatagtctagtgtcagcttaaaagagaatcacagcatggaacggatttttgagatcctgtaggggtctagcatcttatttgacacatggacaaaccaaagacaaagaagataaagtctttactgtcactgaaagaatgaagcaaagtctcagttctctcccagttccccatctagtgcccttacactggagctaccttgattccacgcacagagtatgttctaacagacaccaccttccagggtattattcctaatctttaatgagagcaacaaattggttattttctaatttaatgatgtctcccactttgacattcatccatttttcattctgcagtttgctgttgatgagcacttcagactgccgattattcacttgattatcactcttgtggcgaaaatagtcatctgtggcatctttgacagctgtcatagttatcaccagnaccaaaggcacaatggtggtaaaccaggtcaaggaggaaatttctggaattagctgtaaaatcagaaggcaaagaaaataggcattttgccttcg

SEQ ID NO: 2628 - DNA, 553 bp, Homo sapiens
  I.2628 (AI760793)
ttttattaggctttttattttgagataactataaatgtacatgccattatgaggtaatacaaggacatcacatgtgtcctctaccaagtttcctccaatggtaacttttgcagaactgtagtcaagagcacatgcatgatcctgccactgctattacagttccatgactacaagaatcaatggggtctttttaatgatgagaaatacacggtagatttaattcacagttactatacaaaatgtgtggatacaaattctttaaagctaattctcctaaccttccctcctcctctgacaaagtatttggttaaactaatatgtgaataatatttagttactttcttgctactacccaaatgggacaataataaaatttcctcccttccattttgtttgagagatcttagttaaaacaatctcagaagatttccatatcaacaatgcagaaagttgcttctctgataaacaatagaagccactgtaaaaatacagcaaagtctctgtgagttggtgactccatggagctcagcaggcgcagaaataggtgcccttg

SEQ ID NO: 2629 - DNA, 499 bp, Homo sapiens
  I.2629 (AI759999)
  misc_feature (474)..(474): n is a, c, g, or t
  misc_feature (475)..(475): n is a, c, g, or t
ttttttgctgcaggggttaaatatctgggagaatccagggctgtgttaccctttaagatagaaaacaggttttgcagcttataagtaggaatgcccaaggtggggtgaagccagttaaaattacctagtaatttctgataatcatttaaggtgtgtaagttgctagtatttaatttaaccttttgaggtcttactgaccaggaagtatgtacccaagatacttccaaggagaggacatttgtgctttttcaggtgcaatgattaaaccacttagctgtgcattctttatgacagaggtatataaacttaaaagcactggctccactggggctgctagtagaatatcatccataaaatgaataaccttgcaatgaggaaattcttttctactggggaacaaagcttgatttacatgatactgacacatggcagcactgtttagcattccttgaggaagcactttccaatgaaatnncgcagctgaccttttcatattgac

SEQ ID NO: 2630 - DNA, 420 bp, Homo sapiens
  I.2630 (AI758898)
ttttttttacagcagaccatctttttatttcagcaattacagaggggcgtgcagctacatgcgccccccgcaacaggcaaccctcctggggcgcctgaatcaggggatcaccagagaaggccctgccattgcccactcaccggcagtgcggccccgactctccctggcacacgcccatgtgcgccgactctgcctgcctcgcccaggtgctgcccctgaattccctgcttttttcctcccttgccttcttgtcgcccaggctggagtgcgatggcgcgatctcggctcactgcaacctccacctcccaggttcaagcgattctcctgcctcagcctcccaagtagctgggatgacaggcgcccgccacccctgtccagctaatttgcatttttagtagagatggggtttcgccgtgttgc

SEQ ID NO: 2631 - DNA, 468 bp, Homo sapiens
  I.2631 (AI758773)
gagtctttctctgggtttcatcctggatagttactattgctatctcttttcatattcaccatttttcttcaatgtctaacttgccattaattctatccagtgtatttttttaacctcagataattttcatttctagaagtttgatttgggtttttattatctttcatgtctcttcttactatctttgagctttcctctagttttttaactatatagaatatagctataataactttccattttatctgctaattctaatatctgtgttagttctgggtggttatgattgatttttctctttattatagattatatttttctgctgcttttttgtatgtctggtagttctcaactggatgccagactttgtggcagactttgtgaattttacctttttgggtattggatatttttgtattcctatgaatattcttgagctttttttctggactatagttaagtgacttg

SEQ ID NO: 2632 - DNA, 375 bp, Homo sapiens
  I.2632 (AI758473)
  misc_feature (304)..(304): n is a, c, g, or t
ttctttttaagagaaagatttggccgggtgtggtggttcacacctacaattccagcactttgggaagttgaggtgggaagattgcttgagcccaggagttcgagaccagcctgacaaaaagttaaaaagttagccaggtgtggtgttatgctcctgtagtcccagctactcaggaggctgaggtgggagcactgcttgagcctggaaggccaaagctgcagtgagctgtgatcatgctactgcactccagcctgggtgccagagaccctctttccaaaaaaaaaaaaacaagagagagagagangagatttaattctctggctttcttgtcacttccacagctagagggcttggcagagaataaatgataagacc

SEQ ID NO: 2633 - DNA, 248 bp, Homo sapiens
  I.2633 (AI758295)
ttttttttttttttttttttttttttttttttttttttttttttttttttttttttttttttttttttttccccccaaccccaaaaaaaaaggcccccccccccttttaattttttgggaaaaaccccggccttcccaaaaaaaaaggggaggggttaaaatcccccccctccctttcccgggccaaccgaaaaatttgggggcccaaaaaaaaaaaccccaaaaaaaaaaaaaaccccggggggggg

SEQ ID NO: 2634 - DNA, 485 bp, Homo sapiens
  I.2634 (AI750178)
aatcatcaaattttataaagagagggggggagggggtacataaggaatcgctccctgggtatttttttggatcgttttctggggccatttatctggaggaggggtggcacctcccttcttcagcacactggaaagagagaagttgcagggacatgtgggaaggtggtgcctggattggtgacttcgtccccctctggctggcccctgctctactgagtgggtcagcattagagagagagagagagaaagagagagagggagagaacgcgcgtccaggggcgcccggtggatgatggcttgatgcaacgagaacgtcaggccagatgtggtggctcacacttgcaatcccagcactttggcaaggttaggtgggtggatcacctgaaaccagttcaagaccagcctgtgcaacatagtgagaacccatccctacaacaataaaaatagtaataataataataataataataataaaatgattagcc

SEQ ID NO: 2635 - DNA, 412 bp, Homo sapiens
  I.2635 (AI749952)
  misc_feature (262)..(262): n is a, c, g, or t
gcgttagaacagcatttttaatttccttcaagaactttttgtttgcattcacaatttggctaactgtttggcaccggacgtctaacttttgcttatctggatttctgacatgccttcctcactaagtttatcatttctagcttttgatttgaagtgagagaagtatgactcttcctttcacttgaacacttagaggccatggtaaggatattaattggccgaatttcaatattgttgtgtctcagggaatagggaggagcangagagggagagaggaggggaacagctggtaagtggagcagtcagaacacacacaacatttatagattaatgggcatggtctgtggcaccctaaaacaattacaatcgtaacatcaaagatcagtgatcacagatcattactagtgaattc

SEQ ID NO: 2636 - DNA, 551 bp, Homo sapiens
  I.2636 (AI749213)
tttgaagacagtgtttccattgcccagctggagtgcagtggggcaacatcagctcactgcaacctctgcctcccggattcaagctattatcctgcctcagcctcccaagtagccaggattacaggcatgtgccaccacaccaagctagctttttctatttttagtagagacagggtttcaccatgttggccaggctggtttcaaactcctgacctcaagtgatctacccgcctcggcctcccacagtgctgggattataggcataagccaccgtgcccagccaagttttcttttattttgagatgggatcttgctctgtcacccaagctggagtacagtagtgtgatcaaggctcactgcagccatgacctcctaggctcaagtgatcctcctgtctctcatcctctcaagtagctgaggtcacacctgtgtaccaccatgcccagctaatttttgaaaaaatttttggtagagatggactctccctatattgcccaggctgatttggaactcctggactcaagcaatcctcctgcctcagcctcccaaag

SEQ ID NO: 2637 - DNA, 344 bp, Homo sapiens
  I.2637 (AI745409)
tttttttttttttttttatttatgttttacataggtttaatagcaacctcatcaatggtataatgctcactttcagtactgaaagttatgtaggacaagttaaacaaagccagccctctgtaagtgtataatataagggagcatatacttttatgcaaagacctaatgtctgtaacacagagatgtaatcctgtcagcctcctgttcaataccctttgatgtgtctccaccagcttgcagaataaaatccagaattcttagtccagtagtcagccctatgccatttcatccaaactcctctttttgtcttgagtaacctatgctggatgctgtgagaaactact

SEQ ID NO: 2638 - DNA, 400 bp, Homo sapiens
  I.2638 (AI745042)
cctgtctttcattctcttcacaacattagtatggtaggatagattctcatcactttttgcttggagagctgcaaaattctcataaattttggcctgctttccatgctgtttctaacctttctacctttacttctactcttgtgtctgtcagtagacgtccttcactttctgccaatccctctttacctagataattactacctgttattttgtcatcaggctatatttctcctccttcaggaaatttacctttactctaccttccttgttgctttcttagtgcttctctatcattgcacctagtgcattgtattataagtgtctagtttaacctctgtgtttctcattaagacaagatctcttcaagggcaagaaccatgttttatttatctttgtatct

SEQ ID NO: 2639 - DNA, 479 bp, Homo sapiens
  I.2639 (AI744963)
ttttttttttttgagacagcgtgttgctcttgttgcccaggctggagtgcaatggcacgatctcggctcactgcaacttccgcctcctgggttcaagcgattctcctgcctcagcctcccgagtagcagtgattacaggcatgcaccaccacacctggctaattttgtgtttttagtcgagacagagtttctccatgttggtcaggctggtctcaaactcccgacctcaggtgatccgcccgcctcagtttcccaaagtgctgggattacaggcgtgagccaccgtgcccggcccccacttttttcttttcattaaaaaatgcaactctaaaatattggtttttctaaatgggatccattcaatctaaaaattagtgttctttccagttatcaaacattcactgtgtgccaggcattgggtaatagctttcatactcattatttcatttatttacaaacaccctatgaaggagacacca

SEQ ID NO: 2640 - DNA, 195 bp, Homo sapiens
  I.2640 (AI744832)
ggggtttttggagtggccctgagatttttttggttgttttttttttgttttttttggggttttttttttcgttttttttttttttttttttttttttgagacacagtttcactctgccgcccaggctggagtgcagtggctcgatctgggctcactgcaacctcagcctcccagattcaagtgattctcatgctt

SEQ ID NO: 2641 - DNA, 426 bp, Homo sapiens
  I.2641 (AI744807)
agtagagatggggtttcaccatgttggccaggcgggtctcgaactcttgacctcaggtgatccgccctcctcagcctgtcaaagtgctgggattacaggcgtgagccaccgtgcccagcctcaatgattattttaacctttatagctgtacttctgctttccatctttaattcttatttaccatatactttactacttttttttttttttgagacagggtttcgctctattgcccaggctagagtgcaatggttcaatcacagctcagtgcagcctcaacctctctggcttaagcaatccttccacctcagcctctgagtagctgggactatggaagcctgcctgtatctttagtagagatggaattttgccatgttgcccaggctggtctcaagtgatctacttgccttggcctcccaaagtact

SEQ ID NO: 2642 - DNA, 407 bp, Homo sapiens
  I.2642 (AI744740)
gaaaaataattttgattggtccctcactcacagaggactccagaagccagggtctgttgcatccatgaacaccgctccatgcgactgggagctccgcccaccacaccaacgctggctcgctgcttttccagcattggaaacttccacaacaagggattcttgggaaaggcagtggctcagactaccttccaccaccacttgcatctgtcagagcgttttagaaacccttaaaattcaaacatttctgctggcttctcttttagcttcctaacttttcggtagccctttatggccaggacagcccccagggcaaagaccacaatgcccagggcagcaaagattccagctcctatatctgctccgtggaaactgcagccgaaaccgctgtagcctttgctttggtacag

SEQ ID NO: 2643 - DNA, 491 bp, Homo sapiens
  I.2643 (AI744597)
tttttttttttttttattcttactcaatgccaacatttattcagggtgcatggtggaccaggcatggggctaagcaccttatactcaatatcccatttactcctcacatcatgcctatgaaccatgcattatcattatccgcattttacagatgaagaaactgattccggagcctgagcgcttaaccactgcaacacactggctcgtagtatagtgttcagggtggggcacaaagaaagcatgagctctctgccttcatctttgccatacaacatccacattgattcactagaggaaggaatcaatatttcatcgttttgcagccgtggagcacaaatgagggtagaaaacggagacacaaagttattaattgtgatctagatgctgaacaccgtattcagggccctcgtctctccaacattcctcgttctcctctgttccctctcagtccacctgctgtacctgaggatcccttgaaacatgacagtcca

SEQ ID NO: 2644 - DNA, 424 bp, Homo sapiens
  I.2644 (AI744669)
  misc_feature (388)..(388): n is a, c, g, or t
ggcagtttttttattatacatatatctacctcagcagccacatgaggagggctggctgggtctttctccattctttgggcaagtatatttcaaaatatgtttgagactatcacatccaaatcaccagacaggagatcatagctagtcccaggcttttttcaatgtaacttaatagaaatatctgtgaatagttccccaaattctgcattttcaaaaagctccccacttatggagctgtctccttgagtgcaggaaggacaggctgttttactttatcactgggacaccaagtacagatcctggttcctaggaggtgccctttcttccagttgattgcatctgctcctgaggcttccgcattcttcacgtagttctggagccttggttntcagctccatcagctcctttaagcacttctctgtat

SEQ ID NO: 2645 - DNA, 528 bp, Homo sapiens
  I.2645 (AI744284)
  misc_feature (514)..(514): n is a, c, g, or t
ggctgtatatttttgtctagattaataacaatcgcattctatcttacccacaatttctatagatgtattacttctatatttaaatagaataaatactcaccaagtctttttacctttctctactcttaagttctttattttgatttatctcttaatttgctatttcctggattttattactcagcaagtttttgtttttccaaaaacggttcatgggtgctgaattccctttgttcttccggaaaaaaaatatgcccctcggaaaagtttctttcccttggaactgtttcctcacaaccatcatagtctggcatttagtgctgcactgaagtctgaggcgagcttgattttgtttttccctcctttactttttcttcttagattcctaaatctttttctttgaatttaaatagtttaagatatcgtagtgcttccgtattcccacatgacattttctggaacatggcatgttcctttggcctacagaccattttttcttcatctcaataagctntctttggacttatt

SEQ ID NO: 2646 - DNA, 481 bp, Homo sapiens
  I.2646 (AI744264)
gagatggagtctcactctgtcacccaggctggagtgtagtgctgcgatcctgactcactgcaacctccacctctggagttcaggcgattctcctgcctcagccttccgagtacctgggaatacaggaatgcaccaccatgcccggcgaatttttgtatttttagtagagacggagttccgccatgctggccaggctggtctcgaactcctgatctcaggtgacccacccgcctcagtctcccaatagattagatatattattaacgaattgcttcctttaacacgctattcattgaattttccagtaaaccacaattactaattactcctgaaatcagaaaagaggttaaaaagattttataacagtatcttatgaaatctactactttcaagtaatagtagttgaattaccaaaacccgtcactcaagccaatgactacaattaagatatcagtaatatttcctagataaataaagtcaa

SEQ ID NO: 2647 - DNA, 578 bp, Homo sapiens
  I.2647 (AI743977)
tttgggtattaatcatgcttttattttttttgaaaaatcacacatttcttcttctaaattctgagggaactacttgtgttttttagaaccacaatctaaaagaatcaaattatacaaatattaatttacctgtatctgaatacaactttacatcttgactagcatcttgagaatgccttttaaatgtgaatgtttcaccagtttcttttccatctgtgaataaaacattgtgaatgcctaaagaacggtattaaaaaaaatgtaggtgattcccaaggaagattgtaatataagcctagggaaccaggactcacattcccaatttttaattaaaataacaaccctaacatttaaatgggtaaatatatttagcagcagataatgaacataataacaaaaccaggagtaatttcagtttattataatgccaatggatctaaatagaaaaaaacaatcaacagtgcccttcctgaggcaactaacaccctcttgactcctagaggtcaatgatgtgcttacctcagagacacagggcagaagaatgccttcttacccatggatactggcaatattggcat

SEQ ID NO: 2648 - DNA, 497 bp, Homo sapiens
  I.2648 (AI743701)
tttttttttaaggttattcttttataaatatagaaaagcctattgaacaaagcaaaattggccacagttccctgagcttgctcctgcagacacttagatccagagatgtgcatgaacacccggtcctccccaccctgcaggctcagcctgtttgcttttcagttcacacagtgggatcgcccatcagctgttctgcacctgcttttactgctctagtttcttggtgatcttttcatgtagcacaggctggccaaccatgggcttttcctcttagaggcgtgtgtgcatgctgcaaattcagagagaccccaagtgtctcctggttggctcccctcctgcagccgctgtgcatgtcgtgccacagcgcacacatctgcgccattgttttttgcgttgtagcgtgtcctctgcccgatgtgtttttcatttcgcgttccatctgggtcctcttgtgtgggcttgcagagtggtgctgtcaacagccagcatggagtgcc

SEQ ID NO: 2649 - DNA, 493 bp, Homo sapiens
  I.2649 (AI743268)
  misc_feature (228)..(228): n is a, c, g, or t
tttgtacaacaggcttttactccaaaataaagtggcttgtactgtatttctcctctggagccttgccgctggctccataggaaaattctgcctcacatagatacctgaggcattggattccctaaacaaaattgtagatccacttgtactgcaggcctctgtagtccaaaacgtttctctttctctgagtcccactcacagctgacatccttcttgacatttgcattntatttagaatacacatccaaatatgttttatgttgcctctaacattcaaaagagcctctaacagtcttcctttccctatcccttccttccatttgaaagatgtttgctccacatcactttctactgcattcttagactccctgaaggtaggaaacccacatttttgtcattggctcgatgtgtctttcctgaagtctatggtagctgctatttttctctagagcatatcaaccggatgctgtccatgtattccataagttatgtc

SEQ ID NO: 2650 - DNA, 541 bp, Homo sapiens
  I.2650 (AI743199)
ttttttttttttttatggagcatgctttattatgtcagatgttgtattaagtgttttaaacatctaatttcagttttcacaactacatgaagtattttgttatcctcactttacagatggagaaatggaaactccaaaagattaagcaagaagcccataggaacacaattagtagaggtaggatttgaatttatatctgtctagttccaaatcttatactatttactatgatttcacattggtttttgcttcaaaaattataaacgattcataataaagtatactaccataaaaattgtttcatgcatttcaagtttgaatagcatataaatttacattatcaagataatttttttactttggaaaactttttgttcatttaggtgaataattttctaacattaatgtcatattgaattacggccaaaaaatcccctttaagttcttatattagcactgagagtggatgaagagaaaatctaccaattccttacttagttttatatctccttttgacaaatggaaacctcatctgtagaca

SEQ ID NO: 2651 - DNA, 454 bp, Homo sapiens
  I.2651 (AI743194)
gtctttctgggctcggtttatttcacttaaataatgacctccagtttcatccatgttattgcaaataatcaaatctagttctttttttatgactgtacatatgtaccacattttctttatccatgtatctgttggtggacacttaggttgctccaaatcttggctattgtgaacaatactgcaaacatgggagtgcagatatctcttcgatatgctgatttcctttcttttgggtgtatactcaacagaaggagggctgaattggatagtagccctatttttggttttttgaggaaactccaaactgttctccataggggttgtactaacttacattcctaccaacagtgtacaagcgttcccttttctccacgtccttgtcaacatttgttattattgcctgtcttttggataaatgccattttaactggggtcagatgatatctcattgtag

SEQ ID NO: 2652 - DNA, 760 bp, Homo sapiens
  I.2652 (AI742629)
  misc_feature (577)..(577): n is a, c, g, or t
  misc_feature (597)..(597): n is a, c, g, or t
  misc_feature (689)..(689): n is a, c, g, or t
tttttttttttttttttttttgggattgaatggatttatttatggatttgacaaaatgattagcttcagggaaaacctccttttaaaccttttgttaattttttttttttttgatatgggatatttctgcaatttagtatcatactgatctcttttttcttaagtagttacagtaagtaaaattttggcattgagacaggttccttatgcatttctcctattttttttggctctaaactgtttcttttctatcttagacattacctgctatcaatataagaaaaaatattctggaacagcattacttataactgactataccctttccaaacacctgtagttttgttttgttttgtttttgtttttgttttttttaagaacaaagacaaaattacctgtgataaaagcctctagcatgaggcctaggagcatttgtatggcaagtaaggcgattgcacttggacagtcaccactggggaacatggtaccataaccaattgtgagttgtgtctccagggagaaggagaatgcagctgtgaaactggtgatatacttgacacagatagtgtgttttcangtggggcatcatgatctagnttcagatcaccattcatctcagccagaacataccagagcactgcaaagacaagccagtggacaacaaaagaagcagaaaagacaacatcatncaacgccagcgcatgtccatttagatcccccaagcatcctcgagatatgcaagacctcttttgagcgcatc

SEQ ID NO: 2653 - DNA, 595 bp, Homo sapiens
  I.2653 (AI742533)
  misc_feature (477)..(477): n is a, c, g, or t
caagtatttatagcatcagcaaaaatgggcagagggcgggaagttgagaacactaggttctgtgctatgttacctgtattcagtagaagtgtttctggagtcaggttttaagtcatgatcctgaagcttccttcccctcttccactaatgatgcaataatagctgttttcattttaacgagcagagaactaagaggaaaggtcctagctctgccttccacttgcagcttccctttacctcctcttattgctttcatctcaaatatccctgctactcaaccaatcctaaagctaaagtactgagatgcacacaaaggaaaggtgtgagagtgcttggaagcatccagctgagcccactggatgaaaatcagacgatagggcctcctgttgtaatatactagccagagaaaagcgccaagaacttcagggatattattcactgctttattgctccctaaccctagatcagattggattntactttgtagttcaggagttaagaagtcaaattgctgaccgaggtggggaaggatgatggaaattaaaggtttacatttgtttaatggcagaactgagatttgctcagcttatctctt

SEQ ID NO: 2654 - DNA, 509 bp, Homo sapiens
  I.2654 (AI742529)
ttttttttttttttttttctctgggaacctcagttttttaatctataaaatggggaaatgttaatggtacttaatatttggagcttttgagtccattaaatcaggtaggattgttcgttattttttttttttaggaagactaaaaatatgttgctccctttttctcccccatcaagcttgatggggggaattggccctggagctgtttactgtcagttcctgtccagcttcactaaatttggtctggggtcacattttaacttggggactgtggggttctgtggtcccttctcgacttggcccagctccacttgaatgatattgttgtcaaattgctataatagaatccagttgatggacagactatccaatgaatccattatgttggtggtggagctggtgcaaagagctccagagcagctgttggcactgacccccctccaccaggcagccctggcagagagggcactacaaaacctggtaagagtccaccctaccagactcagatt

SEQ ID NO: 2655 - DNA, 600 bp, Homo sapiens
  I.2655 (AI742287)
tttttttttttagtaggtaatacatgtttttattcaaaaataaattgtgcatctaatgtctaccaattaatgtacttgtagatgtatcatcttaacttgagtctttgttgcccctaatggggcatgaaggactcttctcccatggggaagtttttctttttcaggagggaggagggctttcccaagtaatgtgtctagagtgttgggcagaagaatctgggaccacaccacaccagttctctccttaacccacgtcattttgcctctatcccagctgtgtttccagtgtcctctgggtgtttccaagagcaacaggaaacgaataaatctctggtgagttgtttatttgttcttcactttgttttacactgtattttctgagtttattggtgtttggtttagaaacccactgggaaatagaccagtgagatttgaaaaggtggaacaaggacttgagtagaatatatcttcttatgctggaacatcctcagtcaagtagttctggcaattatttgaagtctgaggcttgaagtaggaattcttacgggcatttggggaatatattttcattgagtcctatactagtaagattttcaacac

SEQ ID NO: 2656 - DNA, 502 bp, Homo sapiens
  I.2656 (AI742237)
tttttttttaataagttttattctggaataattttagatttacaaaaaagttacaaatatagtttacggagtttctgaatgtccttcacccattttccttaatgttaacatcttacagaaccatagtacattagtcaaaaccaaaggactaatattggtacatcgctattaactaaagtccacactttatttggatttcacctgcttttccaatgtctttcttctgttccaggatccaatccaggatatcaaattgcatttactcattatttctccttagtgtcctctggtctgagatggaagtttctcagtttttccaaggtttccatgaccttgagagtcttgaagaacactggctaggtattttacagaagatcagagcatttaattaaccaacttcagctatcacttcctcctccatttctaggatggagaggacaatctagagttgaaaggctttgctacagatgtcctttgtttcactgcaggtcccagtgtgtcc

SEQ ID NO: 2657 - DNA, 534 bp, Homo sapiens
  I.2657 (AI741934)
tttttttttttttttctcactcctttttgtaccttccctcctaaaagcagagtaatggctgagacacaattattagcctgacttcccttggagattgtcttggttaaacaaattttccagaaactaatctgggtagcttagatcattatttatttgttactttttaaaatttgttaataccaggctttcacttagttatcttgaagttaatgcctcttctataacataattattagctcatgatcttcttgttcaatacaaagtgtcccaacactggaggaagtgaggaggggaggggacaggaaagaagaacactccagtagctataagccaacgccttgaaagtttcatcaatagcctcctccttcccaagttgctgagaacccaaatgaagcaaatgtctgtatagagggtgtggccacagcagcaaaaacatgagttcaattcatcaagtctcttctttaaactatttcaagttctgcaaatgaaggaactgaccatttatagattgggtcactggaacaagatggaaag

SEQ ID NO: 2658 - DNA, 592 bp, Homo sapiens
  I.2658 (AI741506)
ttttttttttttttgtagatacaggatctccttatgttgcccaggctagacttgaactcctgggctcaagggatcctcctgccttggcctccaaaagtgctgggattataggtgtaaaccagtgtgcctagcctacagttttttaattttataaaatgttatttctaatttttctccaaaagtaaaagtggcattccaatggcaatattaattcaggtatccagaactcttaacctaaatttgggtgagatgaggaaaagtgtattgttaattttatgtgtcaacttggaaggtgtttctggatgggaataacattgacactgatgtcctctgagtaaagaagattgccctccatgatgtatgtgcactttatccaatcaatagaagacctgagtagaatgaaaagaccaccttctccaagccagaggaaattctccagcagacttctgtgagactggaactgcaccatcagctctcttgggtcttgagcctgccagaccacattgcagattcttggacttcccagttgccataatcacatatgccaattccttataataaatgtgtgtgtgtgtgtgcacgcacgtgtgtt

SEQ ID NO: 2659 - DNA, 534 bp, Homo sapiens
  I.2659 (AI740806)
aaaagatgaaagctgaaaaaagttaggtttggtgtaggttactggtcctaacaaaaatataagtggtaccagcaggcactacttcgcataccaatgtgaagtaaaaattccctttcatctgtggtcaagtatggaaaaattatgaaggtcctcattaaatccacattttttaacccattaaattatccttataaaaattcagataaactactgtcataaatgcaactgcactgcctcaaggacctaaaaactgttttcctaatcaactagatggcataatcaggtaacagcagaaacagatagtctagtgaatttccgagagtcaaaatatgctactttgatgcttattaaacactgaaaactttcacaatactaactccagttaagttggtgaggttaaaaatgactaaactaaaaataatggttcaattaaaacatcccacagggatctactgtaaataatagctgcaaccaagttctgttacctcaagacttgaagtcccaaagatttcccacagtaggtggctaataaag

SEQ ID NO: 2660 - DNA, 556 bp, Homo sapiens
  I.2660 (AI740544)
tttttttaccatataaactttattataaaacttcagcaaatataaatatccaggtgcccctttggaatggagccacagcaccggacaggagaacagcagccgcactgaggatggcagggagggtgccagagacgccgggcagattcccaccctaacacccgcagcctggcttcccacctggcattatagaaatggccagactcaccgaaaaaaaaaagattaaaatctcacaacacacaaaaacaaaacacaggactctaaggttattgtcacataggctgtgtggctgacgtctgctataatagaaccataactcttctcaggatggtagggttttgatgtaacctatacttcgatctgtcatttacaaagaaaagcatgaagaagtgtgtttttaaaaggacactcacttgcaaataactgagaaagataaaacataaagtataaaaaatctctccttcaatgcatgaatctgaaagagatagaagcaccttagcaggaatttcatttttcccatttccataggcaaagtcccaaaccagaatgcagtcccctg

SEQ ID NO: 2661 - DNA, 480 bp, Homo sapiens
  I.2661 (AI740476)
tttttttttttttttttttgctaactctacatttatttttaacattgctttttgaaataaatgctataattaagagggaactggtttatttcttaacatgatagataaaagaagacaagatatgggtctcataaaattggggttccaattacaaggtaagttgcaacaagttcaatgaaacaacttggccaatatctatgaggaattcatgtttactgtctcaatccctcatcctcttaaaaaaaaaaaaaagcacgtgttaatactactgtgataaattagaattagggactaaaacagtccatgcatttttccagaggcatcaaattatcctgcagagtaattacataattttaatttcataggtttttacttcttagctttgaaagaattgtttaaaattttgatgttgtttaactttgccaagaatatttcttagtggtaaaaagtagtcaaacattttaatttaaaaagtttatt

SEQ ID NO: 2662 - DNA, 517 bp, Homo sapiens
  I.2662 (AI739495)
tttttttttttcaagaagtatagaaataggaaatacttgatattgtttcttgggaagactggctcaacactgacagtcaaaagaagtcacaaacataatgcataaacaagcagccactgggaggggctaataaccaaaggaatcacaactttaaaaagcaaaaaaaccaaatatgatacaaaaaatcaaacccagaaattgaaaggttgggggagagattcccatactgacgattggaaacatagagaatacattatcacagacaactaaaaactgtcaaataactacggagcaagttctccaaatgccaatgggtgccgatgtattggagaccaagtcaagcatggcactgtgatgtaagatgggctggatatggttcaaaggaatcacaaccacaaaacctgcaaaaacagcgtcccttatgttagacactcacagccatggcgtgggaggagaccccgagaaaggagggggccatgggaggcctggcaagcacctccttctgtttcacacttgt

SEQ ID NO: 2663 - DNA, 400 bp, Homo sapiens
  I.2663 (AI739381)
tttttttaaaagaatgatgcacattttaataaagcacagcacaaactgttctttccactccgggctggcagtgtatgtctatccgtcgggcccaccagctgctctgcccagtccaataacactttcccttccgcagcctcctcgtttggacccagccttaggggcccgcccttccgcctttcaacctacgccacttcactcctctcgtatcttgctggtcctgacccctcctgggcagcctttcccttgggccctgccctggtccatctctctaaccctctggtgattctccggtgaaattcacatcactgtgctggaccctggcaacccacagaagcggggaacaggaggaaagaggtggaccgacaagtaacatagaatacagccataggccacccac

SEQ ID NO: 2664 - DNA, 332 bp, Homo sapiens
  I.2664 (AI739233)
  misc_feature (267)..(267): n is a, c, g, or t
  misc_feature (285)..(285): n is a, c, g, or t
tcggggttatagtaaacctttggaaagccctaacccagagataaaccatatttattatataccttttcggggatgctgagttctttgtgatgggtagtccttcaaagtagaatcactacaagtgtctcacttcaagccttagaaaagccctcaatgtaaaccttatgtttgttactagggtggcctctctcccatttcccgctgtggctgagccaaacttcattactttccttaggccctctgcccctcccctagcatatggctctntctcctattgaacagaanattgagactatgaagaggtcaacttgtatttaccaactttactcatt

SEQ ID NO: 2665 - DNA, 181 bp, Homo sapiens
  I.2665 (AI739085)
gtggccctcgccgccttccccgccgcccccgggtgggtcagagacccggacccgggccggcaccgggagtcgggacgctcggacgcgcgagagaacagcaggcccgcgggccccggcaggcggctcaagcaggagcgcggccggctagccgggtcaccggtaggccagagccccgcgcgca

SEQ ID NO: 2666 - DNA, 388 bp, Homo sapiens
  I.2666 (AI738831)
tttttttttttcgagatgaagtctcactctgtcccccaggctacagtgcaatggcgtgatctcagctcactgcaacctccacctccctggttcaatcaattcttctgcctcagcctcccgagtagttgggattacgggtgcatgccaccacacccaactaatttttagtagaaatggggtttcaccatgttggccaggcgggtctcgatctcctgaccttgtgattcacctgcctcagcctcccaaagtgttgggattacaggcatgagccatcacacccagccctccttcctttttaaggctgagtaatattccactggggcgtgggatggatggaccacattttgctcatccattcaccagctgatgaacacttggcttgcttcca

SEQ ID NO: 2667 - DNA, 560 bp, Homo sapiens
  I.2667 (AI738592)
  misc_feature (526)..(526): n is a, c, g, or t
tcttcctttgtgattaggtgattttctctagtggtaggctttattccttaatttttatctttcgtgtatttactaaagttttttgctttgtggttaccatgagatttacgtaaaatataattataatagggtttttaaaatttttattttattttgtacatttcttcactatgtcctatgctcataacaggctattttaagctgataaaaactttattcacataaaaaaaaaaaactacacttttactctaccctcctcacattttaaatttctggtgtcataatttacatctttttatattgtgtatccctaaaattattgtagctattattattttaatagttctgtcttttatccttcataccaaagctataagtgatttatataccaccattacagaattagagtattctgaatttgactgtatacttactttcaccagtgagttttatactttcacgttttcatgttagtacttactgtccttttctttcagcctgaagaactcccttttagcattctttntaagacaggtctgatggtaatgaactccctcagc

SEQ ID NO: 2668 - DNA, 582 bp, Homo sapiens
  I.2668 (AI734279)
gaggcaggtgaatcacttgaacctgggaggcggaggttgcagtgagccaagatcacgccactgcactccagcctgggcaacagagtgagactccgtctcaaaaaataaataaaatttttttaaaaaggtcaaaatgctataaaatttaacatctactatttaaatttataaaggagatgcagtgataattatgcatatgcgttttttgacttgttagctacattcttttttactatacttgctttctttattaagttctacattttgtcctacattaatatgaatcatttgaagtactttattctaatttaaatttgaaaatactattttctgaaaaaatgtattttattttggaagctcttcatttttaaaaatttgtggtttatattctgagcaaattaaaagtagctgttttggccatttaaaaatgttaaaagaatatgagtgcattaagagatataatgaccactataactattacttgacctgtttttatattcactacctaacatttatttaatgcctgctaaatacaaggcagtataattgagccagtttgtgtgatagaatatatatttgatt

SEQ ID NO: 2669 - DNA, 574 bp, Homo sapiens
  I.2669 (AI734261)
  misc_feature (525)..(525): n is a, c, g, or t
  misc_feature (551)..(551): n is a, c, g, or t
ctgaaccacatataagtatacagtatcagtgaagcagctagctgtaaaatgtgggctgagtagcataacacttttatctgaaaaccttcaattcatagtatctgaaagcattaatattctcagtcattaatttttccaactacaaaatgaaggcactttgcaagcatcacagacttattgtaatagttaattcttgtttttgattattgtcatcttttgggggattaaagtgttttggcatgttgggctctctaatcttttcgctactttcagaatttgtgctttcaagtgtcattgtatatgcacaggacacagttgggacatgaagataaacctcacctaatagagtagatgtcatttctgggtaaggttaactgtgggaaacagaaatgtgttcactaaggaaaccttaggtcacaacctccagtttcctgaaggaaatgccaaaaatgctccaaagacaaaaggctggaaacaaactggaatgtctctctccatctgtctgctaaggcggaaggaatgatntcatgttacattcacttcctagactntcattacagagtcaagcataatg

SEQ ID NO: 2670 - DNA, 575 bp, Homo sapiens
  I.2670 (AI734255)
  misc_feature (512)..(512): n is a, c, g, or t
ccagggtcacattccttcctggaggcactagaggagaatccttttccttgcttttctagcttctagaggcctaccacattcctccaccatcaaaatccgcaactgcattttagatgagtcttttcgcaatggcatcaccctaactttctctcctgcctgcctcttacaggaagacttttaaggacccctgtgactgcatcattgggaccaccagtataattcagaatactgtccctattttaactcagctgattagtgtgactaatccatctgccaccttaattcctctttgtcatgtaacctaacatattcaaaggttctggggttagaaaatagagatctttgggaggccattattatgcttaccacacagagcaattaatttttgtggaactttcattagggaaaaaacgaggagtaatagaatatagaaaatgagctcagtggtagataaggatttattacttatttgcctttgttgtgatagttacaatatattacccacaactcanaaataattaagtttgcaaaatttatcaagcatgctgctatggtctgaatgtgttcattcccca

SEQ ID NO: 2671 - DNA, 471 bp, Homo sapiens
  I.2671 (AI734249)
aattcggaacgagggggaagtatattagctttatgattgaaataagggtaaatgagcaatgtgtgaaggttttcactgacttcacctaaaagatagtttagctacttgaattttagtaaatagaatttttcctttatttcatcggtccccccaccttttttttttttttgcacctgccttgtaaatttaatagttaagtgacctctgcctagaggatgatatttggggaggtttgatgtttcctgtgggaataagacgattcacaggtgagagtggggccacattagctgttattgtttccatgggtcagtgtggaaaatggattaatcatattctaaacgttcatggacctcattacagtcacaattgtctattctgtttcctaccctgaacacattaaaatggtaggaactaatgcttatttaattactaaaagccaccattttctttgatagattgagctacagattg

SEQ ID NO: 2672 - DNA, 550 bp, Homo sapiens
  I.2672 (AI734248)
ccaaagtgctaggattactggcgtgagccaccacgcctggccagttttatggtattctgtaattgcagcccaaactgactaagacgtgaagtttaggtaaacatttgcagtttgctatgctgatattgaagtattatctgttggtaaatattctttgctgatacttaataagtattcttattaataacaagtattaataatatgtattcctcactaatgcttaatacaaatccttactaatagcagtattagtattaattagtattaatcagtattctttgccaataagggttctgacagaaaatcagttgttcattaaatattattgagatacttcttgatcttatagtagacaggtactgttttagattctggggattcagtcgtaactgagatagatgtaatccctaccctcaaagggttgccagagaaaacacaggactcaattgaattggaatttcagataaaaaacacataatttttagtataaatatgtttatgtgatacttatactgaatataccatgtgatatttggaatatacttatact

SEQ ID NO: 2673 - DNA, 491 bp, Homo sapiens
  I.2673 (AI734231)
ggtggatcctgcctgagaccagtcagaaggccctggaccagctggactcccaggctctattgatgctgggatcacccagatgccaagatatcacattgtacagaagaaagagatgatcctggaatgtgctcaggagagaagaaaaaagcagaaagcagctgggaagctttagcctgcttgagtgatctgggattctcaagtagcatacataacatcaccttggctttggttcctttagataccaagcatgtgttctgtggaggacaagaaaatccatttttttttgttataaagttataaacacacaagagaacaatccagttagggagaatgttaataaatacaacaaactctgccattagacctgaagataatcagctagtagaattatcaaagagattgtaagactcttactgagtacctgtttgaggtcctctgaggatagatgaaggaaggaacttaattcttaccatcactgtggcttggattag

SEQ ID NO: 2674 - DNA, 517 bp, Homo sapiens
  I.2674 (AI734140)
  misc_feature (212)..(212): n is a, c, g, or t
tgcaaagatgcttcctgagaaaccactctaaattcaatggcctacgacaacaaataatttcttcttttaaaaattatttattattttattttttgcatcttttttattattataactttaagttctgggatacatgtgcagactgtgcaggtttgttacgtaggtatacacgtgccatggtggtttgctgcatccatcatcccatcatctangttttaagccccacttgcgtacgtaattgtcctaatgctatccctccccttgcccaccacccccaacaggccctggtgtgtgatattcccctccctgtgttctcattgttcggctcccacttaagagtgagaacatgtggtgtttggttttctgttcctgcgttagtttgccaagaatgagggtttccagcttcatccatgtccctgcaaatgacatgaactcattctttattatggctgtatagtactccatcgtgtatatgtaccacattttctgtatccagtctatcactgatgggcatttg

SEQ ID NO: 2675 - DNA, 327 bp, Homo sapiens
  I.2675 (AI734138)
gcaggcaccccagggcggggcagcaagcaggcaggaggggcctccccgggtggccttctagggaggatgtaccctggctgcccagcagcagccctgcttggccgtgtccctgccacaagcaggcaggacacaggagggatggcactgcccacggagccctgggctcatggcaccttctgcagagtgagccgggagcagagagcctcttttccccactctgtgaggccgggcattttcctcagccctgccctaacccccaccattcctgtgatgggcccaggtgctagacgggccttgtccttgccgaggaaacccatgcaggctggg

SEQ ID NO: 2676 - DNA, 440 bp, Homo sapiens
  I.2676 (AI734074)
ctactactactaaattcgcggccgcgtcgacacctatgacctcattcacagtaagtcatgagtaaaaggcacctactcctgttccctgatgtagcccagtagagcctgcaccaatacggctgtggcctgaccagtcactatatgattatgaaaggagatccaacttaaactaaagggaattattttgaacaagattcatcaaaatcagagcacatatctcaccatattcagacagctgaggatagttgtccatccctctactaaccaatcactacctataacacagtctggattctttcgtaattcttggtacatagaagcttctcagaaattatttgatgaaaggatggataaatgaataaataaattattataaacacttgctataagatctaagaataattacactggttgttaagggtgtgtatgaaataacaaaa

SEQ ID NO: 2677 - DNA, 513 bp, Homo sapiens
  I.2677 (AI734064)
  misc_feature (471)..(471): n is a, c, g, or t
  misc_feature (510)..(510): n is a, c, g, or t
ctactactactaaattcgcggccgcgtcgacgttttcaagatgtattccctctctgacatctattaactagcacagagtcttcaggatattattaggtgctcaataaaagtttattgtatgagaataagcaatattttctttatctctcatttggttgtatctttccctactttgttatttcattttttcttacattttatctttgtattctgacactatttcttagttttgcttctgttttccccagaagagtactttggttaaaatgtatcacttgcaaaatagaataacacaccgccatgtagtgttgcttcaggttataattttccatatatgtacagtatgccaaaaggatgctgcttctagagagaatgtttaaaactcacttctctagatttttttaaagttactttagtgtttcacatgtttgccagatatcattgtcattgaagataagcattgattaaatntcagaattttattaatgaaagcaatcttttgagcaaatntag

SEQ ID NO: 2678 - DNA, 470 bp, Homo sapiens
  I.2678 (AI734020)
cttgctagtaagggaggaggtcacctactaagacactcataacagaataagtcatgccaagaactgagtgtagaagggcactggacccagatgaaacaacatctgaaagattgaaatcctcaagcaggaagaagatttgatgcctcaagcagagggaagccaggctagttctctgacccgtgagacagtgcataaatatcttaatggcagacacactccggctcaccaccaggcccagtcatgatcccagaagaatgccctgctactctggtgcctcattccaatgccagcaagccctgcctaccctcctggcaacattcctctccccttcctagtatcccagacacctgcctgacccagaagtcattgtcctcagacttggaggtcagccctcgcccactagatcttgcaggtcagctgcctcccacacagatctcaggctcttggaatggcctccacacaataaccct

SEQ ID NO: 2679 - DNA, 155 bp, Homo sapiens
  I.2679 (AI733939)
acggctgcgagaagacgatagaaggggggtcatggatgtgttcttctaatgggctagaaattctccgtaggattgcactgcactccagcctgggtaacagaacaagactgtctcttaaaaaaaaaaagaaaagaaaagaaaaaagtcgtatcgat

SEQ ID NO: 2680 - DNA, 510 bp, Homo sapiens
  I.2680 (AI733844)
  misc_feature (15)..(15): n is a, c, g, or t
tgaatggttaatggnttatttgaccactctcttatgtatgtatctttagattgttaccaatattttgtaatgattaaccatctcccaggacacctgtgttccacagagcccagtctggtaaacaacagtcttaaagaaaaaaaaagaaaagacacagaaagaaattcaagacagcttctgtggacagcagtgaatggcaatacccattctggattccacgacataggctttctcttagcttctgtttaatgatagcttttgccaagttcaccatcttatgtaaactaaaggaacacgaaattcactctagccttaggaaagctgaggggatgggattattaggaaaagaaagtgtgtgccagtaaccctgaggccttcagtgagtaatcctggccaagcccagggcagccagggatgtattattgctattccattctgaacaatggatgactgacatttgcaagagcttgccaattattttaataactaactcttcagggtggagagggc

SEQ ID NO: 2681 - DNA, 457 bp, Homo sapiens
  I.2681 (AI733672)
ttgtcaaaaaatgtccgtattttattttgtgaatgccttataagcattatgaaacaatgcttatttgccatttagcaggagatactctagatgtacaagcttgaagagaatttgaaagaaagaactgataacaccgcaggatctttcccaagagctgttgcatcactgtttcctggggtttaactggatgatatcacaacaaatccttctacatgattttgtcatactgctcctttgaatctctgggacattgtcacaggactgtggggcgtttaagcccagaaagaattgtctgagattattaaaggaaggagtcccgcattcatggtgactcaacctgttagcagttcctttcttctgggatccagcctgttgcggcctctttagtatcagcagtggctgtgcagaacattgccaagcccttagcaacctattcagcagctctgtggggatggct

SEQ ID NO: 2682 - DNA, 481 bp, Homo sapiens
  I.2682 (AI733670)
ctctccttcttgtcttattttggatttatcactaatttttattattctattttccccctctatttgcttgttagttgcacattccttaactattcttttagttattactccagccattaaaacatgcatctttgactaatataaatccaatctaaattcatatttttactacttcttagacaatgcatggaacatagaacacttttcctccatttaaccccctcccaaattatgaactatttttgttgtgtattttaatgttgcatatattttgaattatttttggatagccaacaatcatttaactttacctacatatttacactttttattgctcttcgtcctttcctgtatctctgagcctccatctgagagcttgaacatattaatcatagttattttaaagactatatctgataactccattcattatctgcaaccctgacggatctttttgtatcacctatttcttcttttggtt

SEQ ID NO: 2683 - DNA, 486 bp, Homo sapiens
  I.2683 (AI733518)
tttttcttgggcgtaacgatactttcttgttttatttctcatgattccgtttctaggtcctaggcccgtgcctgatccaggatccaagctcccggaagctggcactgggcccgccctgggtaggcagcagtgagcaaggcgggcggacagcgctgggctcgcggggtcctgcgtcctccgcgggagtgttggcggcgggggtcgctctgcgcggggacactgggcagagggggcgtgcggcctctctaggaagctttctcggagccccagacactggcgaggcgccgcgccccctcttctggattccggcgcgccccctgaacccgggagctacgagcggagtcgcttctccctgcagccgtcctgggtctggcgcggacgcaccccccggccgaccccgagccgctgcagccggcgcccctgcggcttccaacccgcgctgctccgcccgcagcggaggccccgcacttcgcgcgctaggggttt

SEQ ID NO: 2684 - DNA, 527 bp, Homo sapiens
  I.2684 (AI733498)
ttttttttttttggggaaaatcttttattgtatatatttaaggtgtacaaatgatgttttgacatccattacatagtgaaatgattgctacagtcatgcaaattaaatatgcatttcctcacataattaccctcttttgcagtaagagcacctgaaatctactcttagaaaatttccagtattcaatacagcattattaactatagaacttatgctgtacatgagatctctagatttatacatcttatgtagctgcaactttgtagctttgaccaacatcctcatttcttccacctccatccccctgtgtgtttgacttttttagcttccacatatgagattacgcagtatttttctttctgtgtctggtttgtttcacttagcataataccctccgggttcatccattttgtcataaatagcaggcttttatcaaaaaggcaagggataacaaatgttgatgagggtatggaggaaaggaaaccctggtacattgttggtgggaatgtaaattagtaccccatttt

SEQ ID NO: 2685 - DNA, 302 bp, Homo sapiens
  I.2685 (AI733595)
ttttttttcacaatcaaattttatttcagaattgtactatgcagagaggctgtgtgagatgagttaatagttgtgaaaggagtgatcataggcatgagaataggcgggaggcaaatgcaactgtcctcatgaggctgactcacattcaagtgaaggaattgagggtccagacctggcaggaaatgagatggtcatgtctttaacagaattcgtgatgtcatggcctctgaggcaggttcaagatggccacagattctgtgacattcccatagaaaagagaagtgtctgactttcttcccttt

SEQ ID NO: 2686 - DNA, 449 bp, Homo sapiens
  I.2686 (AI733469)
tattttataaatgaagttattgttctgactttggcaaacatgatagggtagagaatttctatatactctaaaaattataaaacatgtaactttaataaatggaagatgaccatatcttaataaacatgtaatgcttttctactgtgtaccacgaactattctgtttagctttccattacatagatccgttccacctgtttctttcttttaatctcaataatctctgtactgcctccatactggcctcaataagtgccactctccagttactgcttggccccagaatgaacacatatctgtgtcttaataaaccacagcaaagttgaggccgtaaacagcttttctaatgtcacgccgttcagaagagatccctgtttgttactcgtactctgttactgatacactatcaagaccaaaaagacaaccatatgagaacacaacagcacacc

SEQ ID NO: 2687 - DNA, 496 bp, Homo sapiens
  I.2687 (AI733339)
tgtggggtttttgtttgtttatttcatcctatagcaagtccctaagataaaaacatctgagcagcaaatattccccacaagagaatgaccactatgccagagggctgtctttttgtttggatctgtagggagaggggagatgtaattgtcaagctcaaggtcccctacccgccttccttacaggaccctataccctaaagctattagacgttcacagtaaaatataaatgactagaaataatgtaaaccttattctatgctcctcaatagcacaaagtcttaacccaagaaagaataccataacagcagattttaggcatctcttggtatatgggggaatttatgttttggatagtcggatttctcagcccattactcccttgccaaaagcataccacaaggaggatcacctacctggctctcacatacgtgaagacctatacaaccccattgtaaaatggcctctgtttaaaagataaactttgaagaactagtg

SEQ ID NO: 2688 - DNA, 412 bp, Homo sapiens
  I.2688 (AI733225)
gcccccagatcgcgttgagccttatagcaactgcaggcacttgaggtagcaggcacctggagctgcccgttcctgcagccaactcagcagcttctgctcctggcgtgctgtgttcacaccccacagtgcctccgcacgcaggccctcagggagctccaacaggggcgcgctgggcaagggtggcggtggtggcgccacaaggaagaccccatctcccagatggacagcggggatgagacgcacagccatagaaaggcggcagcagccgtagtcagtgcggcagggcaagatgtgtaaggtggggggctgttccaggccacctggggtcaaggtgacccgacagcgcccctccaggctgtaacgcacagtggccaaggagcgctgcagatgcgactggaaccagcgcagcacc

SEQ ID NO: 2689 - DNA, 528 bp, Homo sapiens
  I.2689 (AI733212)
cagtttaaaggagcacagatttattattttacagttctgtaggtcagaagtctgatacaagtctcactgtgatgatatcacagcataggcaaggctgtgtttttttctggagtatctaggggaaaatctttccttgccttttctagcttctagaggctcccagcattccttgctttgtggctccccttcgtccatcttcaaagccagcaatatcacatctctgtgacccttcttctgttttcacatatgtctgactgcagccaggaaaagttgtcaccttttaaggactcatatgattagactgggatcatcttaacctcaatcacatctctaaagtctcttttgctaagtaagacaacgtattcacaggctccaggaactaaggggtggaaatcttttggagaccattattctgcccagtataataatgctgttaaatagcttttgatgtatttatttgccacccacatatctcctttggtaaagtgcctgtccacatccttctaattacacaattactaattggct

SEQ ID NO: 2690 - DNA, 581 bp, Homo sapiens
  I.2690 (AI733198)
  misc_feature (567)..(567): n is a, c, g, or t
tgaatgggcatttcaaaactttatttacaacaacaggtgggaaagacaggattttgctcatgggtcatagtttgctgagtctgcttctagagacttgaaaaagcaaaacgtattgcattggccaagacaaaagtgaggttcaggtggctggagaggaggcaagaaatgagttgggtttggggttaaaaagtgacttaagctctgagtagaggaaggaaaggagagaggacattgttggcagagggacagaggcccagaggggagactgagagccttctagccacaatggaatgaccagaatgtgggtaattagactatattagcttcaaagtgacccacttaactctttccccttacaccttccctgcaccaaattaatagacatttatcagaacagcctgtttcaggaagtaaaagatcaggggccaagcagcaggtatgtgtgttggggagaggggtctctgaattatttcttttgccattgttgagttccagggtccaatagtagaagcagcatcagtgaagagtcctgagactttggactcactattatgtgttcagcattgntctagtgccttaga

SEQ ID NO: 2691 - DNA, 467 bp, Homo sapiens
  I.2691 (AI733177)
aattggttcaatcatttatttattagagtgagtgcaatacagttcctgcccgcatggggggaaacaggctgggaggagggccaggggcaagtaagtgctaggaggggaaatgggagggggctgggcgggcactgtggggaggggcaggggttcccaaggcaacgtcgaaatctccaaatacagtgggcctgacggggatgacagagaggctgaagagacagagccgtcctgcacagtccaggcaccaccctgccctgccactgcctggcgggcatcttgagctccagacccttagcctctccgggccccccagttttttccgggtaagagactcgaactgatgctctctaaggattcttcaagctctgaaattctctgctgacatttgccagcagcaaggttgactcgaatctgaaacctctggggaaagtgggggcctctcccagaatggaaccctctctgaacac

SEQ ID NO: 2692 - DNA, 519 bp, Homo sapiens
  I.2692 (AI733176)
  misc_feature (483)..(483): n is a, c, g, or t
tctttcctcaaatctttattgtcagtctatcacctatatatctatagttagggaagctttcatatagagcaagggtgcactccagatatatgattcatctactaattaataatgaataacttgcaatgtgccaggtgctcttttaaaagcatttagatgttttaacttatttaaatctgtaaacatttcttttaaaagtatgttatcagtaatgaaaatggcctacatcctactctataaaggccagtagtttacttcttggaatatcatcttggtcagtcatgatctgaggagaatatacacctgtttcaacagtgattatcattgtataaaatttttgaaacaccttttggaattactaaagggttgtgacacatctctatgtacattctcagtaatgaaaatttttaacttcagggagaattaaattttggaaagaataaaaaatatctaggccaggcatggtggctctaaaggtaattntaaaagtcctcaaaatgttttaattgtagcattgcg

SEQ ID NO: 2693 - DNA, 508 bp, Homo sapiens
  I.2693 (AI733100)
ttgggggggaatattttctttattcttaagtatacaaaaattatttatctatatctggaatccaataaaaagataaaatattgcatttcattatttacataatacatgcaagtacaagttgtgtgcatcagcatctcaatatttaagttgaaaaatgaatttgaaaagaagacctaagaaaaaaatgtacatagttataacaatttaaatataaaaattaggcttcatccacaaatagcatgagttagatttttcatatgataacaataaaatatacaactttttaatttaattttaagtcaaatttatgcttaaaatgtttatataatttttctcaaatcaagaaaggttaagatgaatgggatagtataatctcatgtctgaattacattgtttataaaaattttataagataaatcttataaatcacttataattttctccaaacatttaaagagaatacattgttagcaaacatttgaaaggaccttcaaaataaaatcaatct

SEQ ID NO: 2694 - DNA, 517 bp, Homo sapiens
  I.2694 (AI733061)
tatggaaagtataggattttttatttattcttaatggccgcatgatattccactgtgcggctgaaccaaaaatcatttaaccagttccaagttgttgggcatacagcttgttttcaatcagtcgctttatacataccagtgaaataaacatcactgctgttgctgctaaaggattctctggtcaccgaccaggggtagacgtaactggggtgggcccgcatggctctcagactccaaaatgtgagtttcatctgccttccactgttgttcttctcagtagaggtctgcctgcgccacctgtgcttctgagcccatctgatgcactagattcatctggaggagcaggtttctggcaaggaactgaatttgtgggttcccctaggaatctcttgcaacttttctagtgtgttggcttctgatttctcccaaacacaccgacttggcaataataccgagtctgaattggaaaggcttcatgaatattaggcccagggcaaatttctctctggctacgtga

SEQ ID NO: 2695 - DNA, 492 bp, Homo sapiens
  I.2695 (AI732996)
taagattactactgtagaatttatttctagagatggaattgctaggtcaaatgttatcagcattcaaaatttttatacttcttgttcagctgccctcagaagaagctgaaagaatttatactcctaccccattgccatacagagaagttgtacaaacattttagaaaccattccatttttttaaagtcagttttctcactgccccaggaaatcccaagctatgttcctgtctccttgcctgtaaccttgtactcctagcctagaattccccttctcaattgaatctatctgcattagcagggctcattcagttgcaagtgacaaaactcaaatgaaactagcttgaggaaatttaaaaggtgggtatggggggataattcttgagaggatcctgagtagttgacagaattgacagatgagctgcaggttctaggacagtcctagagactttggggactggagcctgcacacactcctctactcatccattct

SEQ ID NO: 2696 - DNA, 446 bp, Homo sapiens
  I.2696 (AI732979)
tttttttttggcttaatacacatttattctctgatagttctagaagtcagaagtctgacacaggtctcaatggactaaagtcaaagtattggcagggctgtgctcttttctggaggctccaggggaaaacccatttcctctccttttccagctttcagagactgctgcgttccttaagttcatggccccttcctccattgtcaaaggcagcagtagctgagtccttctcacgttgcatctctctgacctccttcaaacatctccttctgatctcttctctgcctgcttcttccacttttacggaccctgattattacactggaaccatcagataaacctgaatatattccttattttaacatcagttgatcagcaacctgaattccttgtataatgtcaattcccatggccatgaaacctgacatatccacaggttccaggggtct

SEQ ID NO: 2697 - DNA, 485 bp, Homo sapiens
  I.2697 (AI732971)
tttttttttttttttgccttttggcagtccttttattaaaacaaaagtaccatattgatatgtataaaaagaaactaggaatacagcaaaattaacaatggttgataagattacagatatttcactttccttatgcttttcagttttctatgttgaccttatgttacatttagaataaagtaaagaaaatgtatttaaaaaatcaaacctatatatcaagggcttgtttgttcatagaattatgggagcagaacttgtattacacagggttaacctatgagaggacggtgaggaactggatgctcagtgtataaacctaaaatgggtcttatagaattatagagtttaagtgtatttaacacagttttataaccgagatgtactgaacaatttctgggttcaccaaaccatggaatttcctcttcctgtccgaccaacaaaaatttttaaattcttggcagagattataagacattaagtgtgga

SEQ ID NO: 2698 - DNA, 445 bp, Homo sapiens
  I.2698 (AI732958)
ttttttttttgagacaaggtctcactctgttacccgggccggaatggagtggctcaatcatagctcactgaagcttcaaattcctgggctcaaacgatactcctgcctcagcctcccaagtagctgggaccacaggcatgagccaccatgcgtggccaatttatgtatttatttatttttaagaaatggggtttcaccatgctgcccaggctgatcctgaactcctggcctcaagcaatcctcccgcctcagcctcccaaagtgttgggatgacagatgtgagccaccacactcacaattctttttttttaaattatttcttgtatctgtccctttcttttccacccccattgctacttcttcagttgagacctcacaaatgtcacctggatcactgtaaaacattaaacttgatcacttgatcactagttcccactttagaata

SEQ ID NO: 2699 - DNA, 282 bp, Homo sapiens
  I.2699 (AI732949)
ttttttttttttttcattcaggtttctatttttattcaactacaagcaaacagcacagaatgaagcaaaagcaaaaaaaaaaaaaaaaaaagccaaactaaaaaaaggaaaacaggaaacatttagaagggcctttctctgcaaagacgggatcccttgaaattgaacttgaatcaatagatggccactcatattctgtattgaacaggagttcattaaaaaaatcagtgacctgcaccaatcaataagacttcagggaccaaggtttcttcggacgcgtgg

SEQ ID NO: 2700 - DNA, 488 bp, Homo sapiens
  I.2700 (AI732929)
  misc_feature (222)..(222): n is a, c, g, or t
gatataattcatttattataaaagggaggcacgaaaattgtttacatgatgaaagatttcagaacttcagtggaatgcacgagctcatgttgatgctatttcaatagtgatctattttagtctacgtacttcccaagaatgtcaccatctctaaataagaaataattcctgtcacctagcaccactttggtgcctgcatattctgggagaagaacttatctncaactttcactacatattctggcaccaaagttggagaagaactttatcaccaactttcatgctaactggttgaatctcttcaaccttcactttagagcccaatccaacagctactactgttacttgcaatattttttcttgagatatttctggaagcatatgccttctttggttacagtttcaactgctttccttttaaccaatacttggccaaagagcagaataaactttctaaatgcttgtctgccatgattcctgccatcaag

SEQ ID NO: 2701 - DNA, 572 bp, Homo sapiens
  I.2701 (AI732878)
  misc_feature (368)..(368): n is a, c, g, or t
tttttttttttaagaatatatctgcattcccatgtttattgaaacactagtcacaatagccaagatttggaagcaacctaagtgtccaccaacagacaaatcaataaggaaaatgtagtatatatacacaatgaataattatttatccataaaaaagaatgggattctgtcatttgtaacaacatggctgaaactggaggtcatattgttaagtgaaataagccaggcatagaaaggcaaacgttgcatgttttcacctatttctgggagctaaaagttaaaacaattgaattcatagagactaaaaggatggataccggggcctgggaagggtagtgggggttgggagaagtgggatggttaatggnaacaaaaatataattagacagaatgaataagttctagtatttgatatcacaacagtgtgactgtagtcaacaataatatattgtacattttaaaataactaaaagagtgtaattggattatctgtaacacaggaaaggataaatgcttgaggtgatgtataccccagttaccttcatgtgatcattaggcattgcatacctgta

SEQ ID NO: 2702 - DNA, 512 bp, Homo sapiens
  I.2702 (AI732853)
tttatattcaataaatcatctttattataaagaacacaataataagagatagagactaggtcaggaggttcatcatgttataatcatcatgtactaggatttggtttaaatcaaccaacgagacatggtctggagttggtttacaatctgagaagacactctaaaaaatctaccattataggattggtatgaggatcaaatataataagttgtggtacaggatgtgtagcatgtggtacctagagtcagactacctggatgtgaatccctgctctgctagtcatcagctttacggccttcggaaaattgcttaacctctatttactttggtttcttcacctgttcaactaagaaagtatactggtaactaaatcatagggttgttttgaagacagttcaaacatgtaaatccatattatggaaatcagcacatggtgatcactcgataaatattacttattgtgaactaaaatttgtgtagttgctaatctatcattagtacaaaatcaaag

SEQ ID NO: 2703 - DNA, 573 bp, Homo sapiens
  I.2703 (AI732851)
ttttaagtttttaaaattagtttatttaaagcaaaagactgagtacatgaaaatacagagggttcgttcatatggcaatgactatggtacacaattaggaagtttaggcaaacttctatgatcattgctacatagtcaacacttattagtgtaatgctgcaacccagacttcactgtctttaaattatccttagttcagacctttcctactgggatttgagaacagacatacagcgcaccacacaattaccacagttcacccagagaaagcattccaattgcaccttacagatttagtctgccttgttgcaagaaagacgtgctcttggctgtgagatgggatctagagcagctcaacaggaaatgcgtgggagaaagaagcactgtgagcccctttattgcccatgctttcttccctcccctgcattcagcacacagaaggatgctcaccttttcccattcccggtctttgttcagcacaatcaccaccagcctggggtgcacctggtagccttcctcagtgaaggataagtctttgccatcccatgtaacattgaccataaatctagaaag

SEQ ID NO: 2704 - DNA, 525 bp, Homo sapiens
  I.2704 (AI732743)
ctctgttacacatgtttattgtagcactatttacaatatcaaagacttggaaccaacccaaatgcccatcagtgatagactggatacagaaaatgtggtacatatacacgatggagtactatacagccataataaagaatgagttcatgtcatttgcagggacatggatgaagctggaaaccctcattcttggcaaactaacgcaggaacagaaaaccaaacaccacatgttctcactcttaagtgggagccgaacaatgagaacacagggaggggaatatcacacaccagggcctgttgggggtggtgggcaaggggagggatagcattaggacaattacgtacgcaagtggggcttaaaacctagatgatgggatgatggatgcagcaaaccaccatggcacgtgtatacctacgtaacaaacctgcacagtctgcacatgtatcccagaacttaaagttataataataaaaaagatgcaaaaaataaaataataaataatttttaaaagaagaaattatttg

SEQ ID NO: 2705 - DNA, 323 bp, Homo sapiens
  I.2705 (AI732741)
taaaatgaaactgcattattggcttgggacccagcctgcatgggtttcctcggcaaggacaaggcccgtctagcacctgggcccatcacaggaatggtgggggttagggcagggctgaggaaaatgcccggcctcacagagtggggaaaagaggctctctgctcccggctcactctgcagaaggtgccatgagcccagggctccgtgggcagtgccatccctcctgtgtcctgcctgcttgtggcagggacacggccaagcagggctgctgctgggcagccagggtacatcctccctagaaggccacccggggaggcccctcc

SEQ ID NO: 2706 - DNA, 470 bp, Homo sapiens
  I.2706 (AI732702)
  misc_feature (284)..(284): n is a, c, g, or t
  misc_feature (285)..(285): n is a, c, g, or t
  misc_feature (293)..(293): n is a, c, g, or t
tttttaaatccagtcatttattcacttcactcttctaacaaatctgtattaaacgctgcacatgccagcattgcactaggtactggaaacacaagataagctcactaagtagacaactgggagagaggcagtttaaagagaaaagaatctaaacacagactgatgcaattaaagaagacaagtagaaaactgcagcaaaacagaacaacagaacacagtggattgggggatgcaggtaagatgggagaagaggacagggaggaggtgggggtgggggaaggagnntaaagggngctgggggacacacagacaagactggaggaaggaaagagagcaaagaggttgctgaaatgacccacaaaaggtgaaggccagaacaaagaaaatttaagatttgagaaaaggtcttaaaacacacaccatctgatacagatgcgaatcaagatgcacatgtgtttatatgtgcagga

SEQ ID NO: 2707 - DNA, 297 bp, Homo sapiens
  I.2707 (AI732550)
gcgtcgacttttttttttttttttttttttccaaagattcttttatttacatttacatacgattctgaaaaagcgtctccaagctaccacttcttgtagttgccattgtctcattccaccaaaaaacatctcagaccgcccgcggccaccccaaatacgcctgtccactgaagcctcactaaaaggaggaagcgctgatgtcagggttacttaaattcccaggctccggatccctagaagaggtatttccctttacgcccgcgaatttgtcatagaaggcagggcactaggtcgacg

SEQ ID NO: 2708 - DNA, 492 bp, Homo sapiens
  I.2708 (AI732543)
gccgactactactactactaaattcgcggccgcgtcgacttttttttttttttttaacaactgagccatatggacaaattaatttttaattcttaccagtttgtatcaggagagcaaagtaagaggccatttaaataaatggagtagttctgaagaagaaagtgggagaataaagtaaaatcacttaaaaaaaggaatcagtgagggcaatgtgatacgtcatataaacaaaagtgccttctcttgggagaatctgtatttgttgagaagatacagtatgtgaatttacacatataaatttattaaaataatttataccaatacaaatttgttcaattatataaaccaatgaaaacatccagaatctcaaacattctagatctgaataatgctttaacatgagggtaagcctcattcaaagcaacttccataacttagtagtaaattacattgtcctaggactttaaaaaaagccctcagatcattgtgtag

SEQ ID NO: 2709 - DNA, 498 bp, Homo sapiens
  I.2709 (AI732517)
cgcgtcgactttttttttttttttagtttggatgccttttatttctttattttgtctgatcactctggcttggatgtcccatactgtgttgaataagagtggtgaaagtgggcatccttgtcttgttccagttcttagaggaaaagcttttcaatttttcccagtgagtaggatgttagctgtagattagtcatatatgccttttcttatgttgaagtgttccttctatgcctaatttgttgagagttttcatcatgaagcaatggtaagttttaccgagtgatttttctgcatctgctgagatgatcagatagtttttgcctttcatcttgttgatgtgatgtatcacatgcattgattttgtgtacgttgagccatctttgcattcctgggataaatcccacttgatcatggtatattatctttttcattcatcattagatttggcttggtagtattatgctgagaattcgtccatctgtgttcattaggaatatt

SEQ ID NO: 2710 - DNA, 612 bp, Homo sapiens
  I.2710 (AI732314)
acacttgttttttctttattaaaaataaaaaattataataacatatggcctatgaaaatatggtataggtatacacagagaacactttcatagaacagcaaagggctacttccccaatcctacaaaaggaaggatcatgaacaatttgctaaagaagagaaagtcttacctaaatcataatcggaaagtagaaattatcctactggaaatgaagaggtagaggaaggttaatcaaccttggcaatattgacatttgggccagataattctttgttatggaagggtgacattcttggactctatgcactatgtgccagtagcacccctccccaagttatgacaaacaaaaatgtctgcagatgttgccaactgtctcttcaagggacaaaattgtccctggttgaaaatcactggggtagagttttataggtagaggaaaaaattgtaaccaaaggcaccaggtatggaacagcatgatatttctgaaaactacacatagttctatattactcaagtacaaagtgcaatgccgggcataatgggagatagcaatgacaaatatggaagcctgataatggaacatctggtcgggattgcagatgttatggaatg

SEQ ID NO: 2711 - DNA, 461 bp, Homo sapiens
  I.2711 (AI732200)
ttttttttttaagaaaaccaagaatttattttagtcctgttaagtttgagatgcctaatagacatccaactattgggttggatatcaaatatatgagtctgccactcaacaggtagactgaattgaacttattaccttatagtgtgtgtgactaggttagaaaaatactattcattaaatgttacaggtaaatattttttaaaaagcatcttataaaataatactttgctttttgccattctcacactccttgaatctattttattaaaacttttcacacgagtcttttacatcaggtctctgccatcactagaaccactttcccaaactttaacagttctgcaaaccacgtcatattcacctccagataagctgtttgacatgcagcacttttggggcctgtatatgatgttgcctctggatactttatcctaaccacaaaaaaatcaatctcctgcttg

SEQ ID NO: 2712 - DNA, 480 bp, Homo sapiens
  I.2712 (AI732155)
tttcagaagtagctatctttaataaaagaattagatggtacctttctttaaaatagtatgtatgttttttggctcaatcctatagatgaaaaagtttacaaaaattagatttctgccatttttggaatatctgcttttttttcccaaaagacaggaaaatgtcagagagaatctagagtgctgaattcaacacaagctcatttgaaagtaagtctccatcaatggaaaagctttttgactataggcaatttgaaaataatagcaattcactggaagacaaatttcactgccaaaacctgcagacgagttctccctgtcttttctattactgtgtttcctaatattttaagtgaggtaagaattacaagagtgattctaaaaattatagcaggttctacccagatgggacccatctagttcctaagatgctgagagccatttattatttaaaaagtaggaacaacatgaggaaacagaagc

SEQ ID NO: 2713 - DNA, 459 bp, Homo sapiens
  I.2713 (AI732132)
tttttttactttaagttctgggacaaatgtgcagaacgtgcaggtttgttacataagtatacatgtatcacggtggtttgttgtacccttcaacccgtcatctaggttttaagccccaaatgcattaggtatttgtccaaatggaactcagcagtcagcaaaatatattaaatttgtcagttctagaataactcttgttgcctacctccacattcacattggtgatgtctactccctgtcctcactcctgagcacctgtcacctcagaccacaccactgaagctgaccaccccatgacccccaaccaagaaagggtaagccaacacagagaagccagggtgggcgctcagagagactcctgggtccggtcacttctgtgggtccactaagcctgttcctggtaccccaatatcactaagtggcccaacttagaaatactagaatcaactcctctgcctt

SEQ ID NO: 2714 - DNA, 475 bp, Homo sapiens
  I.2714 (AI732100)
gcgtcgacttttttttttttttttcttgatataaatgtaaatggaaatcattaaatatattctactaattaaggattcattatattttgttatttcatacacacccttaacaaccagtgtaattattcttagatcttatagcaagtgtttataataatttatttattcatttatccatcctttcatcaaataatttctgagaagcttctatgtaccaagaattacgaaagaatccagactgtgttataggtagtgattggttagtagagggatggacaactatcctcagctgtctgaatatggtgagatatgtgctctgattttgatgaatcttgttcaaaataattccctttagtttaagttggatctcctttcataatcatatagtgactggtcaggccacagccgtattggtgcaggctctactgggctacatcagggaacaggagtaggtgccttttactcatgacttact

SEQ ID NO: 2715 - DNA, 449 bp, Homo sapiens
  I.2715 (AI732089)
gcgtcgacttttttttttttttttttttttttttggtttcctgactaggacatcagagtgagcacaatgaacacagactttcccagtcataaatcagaagtaacaacaggctcacaatttcagcacagccaagcccagtggcactcacaaatcattctttacctttgggaatttactttgataatgtaaaacactgactattatctttgacattatgaagaaataattttgctacaaaaaataaataatataccctaccaaaactaaatttattttctaaatttgctcaaaagattgctttcattaataaaattctgaaatttaatcaatgcttatcttcaatgacaatgatatctggcaaacatgtgaaacactaaagtaactttaaaaaaatctagagaagtgagttttaaacattctctctagaagcagcatccttttggcatact

SEQ ID NO: 2716 - DNA, 299 bp, Homo sapiens
  I.2716 (AI732076)
gcgtcgacgtttctctttttgtatatttaaaatttttaatctatactctgatttttgtgatataaacatctagctagttttctccaaaaatgaattatgaacaatccatcttttttaaataatacaaaacatcaccattatcaagcgctaaattcctacatatatttcggtatttctaaatttcctgttctgttttattcattgatgtcttttcagctgttagtaagcaatttgtggaaataaataacatgcacattttgacatctggaaaaaaaaaaaaaaaaaaaaaaaagtcgacg

SEQ ID NO: 2717 - DNA, 600 bp, Homo sapiens
  I.2717 (AI720051)
  misc_feature (589)..(589): n is a, c, g, or t
gtaactggttcctgcaaggcaggcctacatgaaaatgtgactgataagatttgtttttaatatcctccgactccctttttcaaacccttcttctgtctatacctgcatactcctttccatacaagttactagttctctgacagccttgaggaagaccaatggtaaagccactaatggtggagtatgaactcagtgatttccattgatggaatacatgtcacctttcagaatgaggtattgctcaccctctcccaaatgaggtagcacaggctgttgcctcctcatccactggtaagacacaactagatttttatactcatggccaaaccactcctgcttaataccaacttacttcaactcagattgcttgagactcattgtggttcatctataaggcaaaactgagacagggattaaaaaacctcatctctaattcctgctttctctacattgaggtgtgtcccttggagctgccaagtcaggctgaattttcagcacattccattcaccctcagtgagtctgcaagttgcatagaacctaaagaaacaatcaattctgtcaggggaaaataaatcaatcccaccattnttttgtctttg

SEQ ID NO: 2718 - DNA, 348 bp, Homo sapiens
  I.2718 (AI718871)
ttttgacagagtttggctctgtcacccaggctggagggcagatctcggctcactgcaacctccacctcccgggttcaagccattctcctgcctcaccatcctgagtagctgggattacaggcacacactactacgcccaactgatttttgtatttttagtaaagacgggggtttcaccatgttgtccagactggtctcgaactcctgacctcaagtgattcacccacctcggtctcccaaagtgctgagattacaagcatgagccatggggacccggccttgtaactggcttctttcactttgccataatgttttcaaggttcatccatgttgtagtccatatcagta

SEQ ID NO: 2719 - DNA, 490 bp, Homo sapiens
  I.2719 (AI709236)
gatatggggtttcactatgttgcctaggctaatcttgagctcctgggctcaagcaatcctcctgcttcagcctcccaaagtgctgggactacagatgtgaaccactgtgcccggcatgctgttctttttggagggactcttctttctctctcccacccctgtttcacctggttaacgcttaggcatcttgaagaaaccagaccaggcactaacgaactggaggaggccaaggtccctgtacttcctcaaagctcttattatccttcataattatagagtcttatgattatttacttatctatcactccagctagactataaattctgtgaggccagcagaccttggctgtttgcttattactgtattcccagtgcctagtacagagtaggaccttggtgaatatttattattattattattttgagaaggagtttcgctctgtcacccaggctggagtgctgtggcacaatctcggctcactgcaacctc

SEQ ID NO: 2720 - DNA, 237 bp, Homo sapiens
  I.2720 (AI708030)
tttaatggatccaaggccaaatacagtcttcagggtcatgggaacctaaaggtaattctcaactgtccactcttattttggttgtgtttggttttttaagaaaaattgtcatagaattagaggaatgaaaaggggattaaccattctagccaagcctccatctttttcattttataaatgttcagaaaatgcacctgtgtagtccccgacccccactccccaccattgtgtctcaat

SEQ ID NO: 2721 - DNA, 439 bp, Homo sapiens
  I.2721 (AI707917)
tggagagttggatctcgtatcctgcctagactggtcttgaacacctgggctaagcgatcctccacttcagcctccccaagttcttggactacaggcgtcagccaccatgcccagctcctagtgtcctttttagggtcttaagcaccacaaagggaatcttgattaactagtgacaatcacaacaagtccacagccttgctcctagcctgcctccatacagacagcaattaaataccacctgtgtaaactgcaggagagtagttcaaatttggctgagtaactttttcctggcatgaaagaaccggctctaatgactagttcattccagatttcactggacattagatctagtgctttgttttgtttgcaacatttcctatttgcccacacataaatggactttggggtctaaggccccactgctcttcaaatggacatg

SEQ ID NO: 2722 - DNA, 498 bp, Homo sapiens
  I.2722 (AI703449)
agacttacatttctttatttaaaactatacaaagtaggagtcataataatgcagatgtttcaaatatgagaaactcatgggaatacaagtgctgttatatttcagattggagctcatctgttctcagaagctaagcaggatcaggcctggttagtacttggataggagaaagctcctggaaaagttagcaagacaactaactagaaatcagactaaaaactaaatggaaatcagataaagccacctaatgcatagatacttatacaaataatttttgtcttaatttttaaagacttataaatgttcccaatatgaagctgtcggcttagttttgtccgtttgattgggcaacatttttgttctggccccaagtcaaggacagatcttcgtgatgaaactcattatacaatcctataaggtctaaccatgttttttggatttcagagacattcctaaataggtatctgtaattctgtctacctctacgaaaatcatacg

SEQ ID NO: 2723 - DNA, 394 bp, Homo sapiens
  I.2723 (AI703164)
tagccatccagatatttattgaaagtatcaacataggaagtatttgtctttaaaaggcacttagtctctgtttctttgttttcagaacccacctttacaaatcatctacaaacacatgcattatgggactcttcctggaagagcacagtaattaaggaccaggggagttctgactgatcagaagatggtttaatcaccaccagccagtcagaagggatttgccttgaacaggtttcatctgcacaaggcaaaatcacgagaacaggacagggtggatgcagggacgtgagtttgggtcaaattgggagattgggaaccaagcacagcattaggagatggcacaggcagcttagcatatcagaaaccagcaaagtcaggaattattttcttaatt

SEQ ID NO: 2724 - DNA, 182 bp, Homo sapiens
  I.2724 (AI702834)
agaaaaacatgctccactaatgtatcattttctaggctacctttcagtgttccctttaaatttagtgcctgtttctttaattgccatgactgagtagtgctcacagccatttctccatgaagcatggaagacccctacgagcatctggaaaggccagcagctgactgacagtcctggagctg

SEQ ID NO: 2725 - DNA, 239 bp, Homo sapiens
  I.2725 (AI702360)
  misc_feature (169)..(169): n is a, c, g, or t
tttaagaagtaatctgctttggtttattcaaaatcaaatttcctaaaagaatgaaaatatataaggtattaacatataattgctaaccatacaatttcggggtgttttgctatcttttgaaatgttaattcctgcttctactagtcatctgatgctgcttctggtagtnttttttttccaattaaaattatttttagatcaaaccaatcctttctagaaatgacacacatttcaagaga

SEQ ID NO: 2726 - DNA, 423 bp, Homo sapiens
  I.2726 (AI702039)
  misc_feature (363)..(363): n is a, c, g, or t
  misc_feature (395)..(395): n is a, c, g, or t
  misc_feature (400)..(400): n is a, c, g, or t
ttgaaatatctttattttgttttattaattttagaaataatatacggttattggaaaaaatctttcaaatgccagaaaatgtatagagaaaggcaaagttttcctgtagtctatcacctagcaataaccaccattaatattgatgtctacccttctagaattcttttctttgcatacttagcacatattttagtagaagtgggtgtatattacacatatttctgtaacccagcccagcaaagtactatagatatcttcccatggtaaatatgacaatcgtatttataattgcatactctgacatcatttcaatatgctgagagacgaagttcctttaataagcaactttctgccatattttgngcctaggacttcactttatattcacaaggttntgcanagtccacttctactttatttttg

SEQ ID NO: 2727 - DNA, 428 bp, Homo sapiens
  I.2727 (AI701936)
gaactaggaatggaggtgtcactgagcaccagggtagtgaagaggccctcctggaaggagggtgtggcaaaatgactagattggtaaggtctgaccagtcggagggactaggttacagggatgagggaataagcattgggagctcagggtagtaatatccaagaccaaaataaagggagaaactggagtccacccagccagaatccacaaagtaatcttttcctattccttcatcaggacccattgcctcttaattgtcactagtcccatcagatatgtctgttgagtttgacttttacacctttttagctctattataatatttgctcacttgctccataattagtattagttctaccctcccatatgtgtatgactgacatcagtgaaaatccagtatagcttaccgaaggttgtaataaacacac

SEQ ID NO: 2728 - DNA, 469 bp, Homo sapiens
  I.2728 (AI701905)
ttttttttttttttttttggagacagggtctcactctgccacccaggcgggagtgcactgccatgatcacggctcactgcaatctcaacctcctgggctctggtgatcctcccacctcagcctaccaggtagctgggactacaggcacacaccaccacacacagctaacttttgtaattttagtagagatagggttttggcacgttgcccaggctggtctggaaatcctgggctcaagtgatccgcccaccttggcgtcccaaagtgctgggattacaggtgtgatctaccgcgcccggaccacctgcacatttaaaattgtgaacctctctgtatacttcagtaacttttcaaagatttctttgacacaaagttctcagaaatcttaaagctagcatttcacaacagaaaaaaagagcttctggttcactggtgaaattttactaataaaatttaaaaacaaaaagct

SEQ ID NO: 2729 - DNA, 420 bp, Homo sapiens
  I.2729 (AI701877)
tgcttcttaggtactttgtaaaatttattcttcttgagatgttagatttgtgcatcaaattgtacaaatcattaagggtgcagcttggtgaattttatgtaatgcccacataaccaccacccggtgcaagcacagaatgttttcagcaccccaggaggttccctgaagcccctcccagtcaattccaccttccagaggtaaccactattctgacttctatccccatagatctgctttgcctgttcttgaatctcatgtaaatggaatcatagcatatgcacacttttgtgtctgcctcgtgctgtgcaatattatgtctgtgaagttcatccatgttgctcaagtaacactaggttttccttttgtattgctgagtagtattccattaagtggatatgccacagtttatgtacctattct

SEQ ID NO: 2730 - DNA, 436 bp, Homo sapiens
  I.2730 (AI701077)
ttttgagatagagtcttactgtgtcaccaaggctgcagggcaatggcctgatcttgactcactgcaacctcagcctcccgagtagctgggactacaggcatgcgccaccacacccagctacctttttttgatgttgttgtatttctagtagagacagggtttcgccatattggccaggatggactctaactcctgacctccagtgatccacctgcctcggcctcccaaagtgttgggattacaggcatgagccaccacgccccacctgactcccagtctcttattacccaacctgcaattttcaaaaccccagtccgactgctaacctttgacctcttggatttccctccccgcactcccctatctggatgaaggacccacctcaggttcttgttgaagctcagatcttgtaccgctgtcttcttgatctctaccc

SEQ ID NO: 2731 - DNA, 547 bp, Homo sapiens
  I.2731 (AI700656)
agagaagataaagtaattagctgtttaatgactacattgtggtgaagttttaaagccactaaatgggaggtccattcccatggcaccattgctagcagcccaaacacagtctgcagaaacactcatttcagtggctgacttcagtcagtaattgatacagcaaaatttcattctaacatttcaaagctgtctcacagaatttctgagaaaaaagtgttcccaatcactgatttcatcatatcgcgtcaatattacttcagcacctttaatgaggaaatcattgaaacacactcatcatctttggctagagagatttatgttactcagaggttttgcagctggtgtggcagtgggtggcaatagtgaatttgcagttttgaaaaaaattaaaaagttacgagaagaaaagagaataaacaaagagaaagggaaatgaagcaagaacaaaagagactcaatcatagtgttagaaaattcctgcaaacttcttgatcctgaagtctccaaaaaacctcagacctcccaccgatgttacagtatctttcat

SEQ ID NO: 2732 - DNA, 604 bp, Homo sapiens
  I.2732 (AI700612)
  misc_feature (214)..(214): n is a, c, g, or t
  misc_feature (590)..(590): n is a, c, g, or t
ccagcttaatcgccataagaacattcacacaggtgagaaggcatcttgaatgtaaggaatgtggaaagtcctttaatcgtgtctcaaaccatgttcaacatcagagtattcgtgctggtgtaaaaccatgtgaatgtaaggggtgtgggaaaggcttcatttgtggttcaaacgttattcagcatcagaaaattcattccagtgagaaactctntgtatgcaaggagtggaggacgacctttagatatcattaccacttatttaacattaccaaattcacactggtaaaaaaccctttgaatgtaaagaatgtggaaaggccttcagttttctgacacagcttgctggacttcaggtcattcatactggcgagaagccatttgaatttgagaaatgtgggaaggccttcaatagtggctcaaaccttgttcaacatcagagtattcatactggtgagaaactctatgaatgtaaggagtgtgggaaaactttcagatttagtttggtcctgactgcacatcaaagaattcatactggtatgaaaccctgtgaatgtacagaatgtgggaagacctttagttgtagctcanacattggttcacat

SEQ ID NO: 2733 - DNA, 463 bp, Homo sapiens
  I.2733 (AI700561)
aacattggaagtgttttgggtctttctgagtttggtgatgtttttgtgaccagaaatgtgccatagaaacataactatttatttatatcaattagcctgtggtacaactggtttcattataggtcagttttcaagaacatattaaatcctcacgttaagtaaggacttactgtatttgataggcaatagaaagtcagaaaaagttaagcaaaaatgtgtaattcttctaccagaacatagttgataacacaaaattttatgaaacatcagatttataacaaagttattaagttatgtagatattattaagattatgaaaataaagtccacataggcccatttatttgtgagtcagcacataaacatagaagaatgattaacaatataagcttgtagcttatgctaaatgtgagctgcaatagatgataaattatagaggacttcagagaacactaagcttgca

SEQ ID NO: 2734 - DNA, 495 bp, Homo sapiens
  I.2734 (AI700473)
tttaagaattagaaaacacatcagtatttattgtgctagaaataattacaaatacaattccattaatccttacgacaacccaagtaagtaaggtattatttatcatattttataaggaatgcgaacatagtctagagtggttgggaatgtactgaatttctctgtggggaaccttcatcactaagttctgacattaaaagccagctcactttggcttctgcgctcagccatggtcaactcagggtcaatctcgctgtgtccctctggatcccagaatctttctcctgtgtttcagattggttgtataagagttttattttagagaaaagatttatcaaagtgctagcagttacacactctgttcacaacttctttaattccagtgtttactaacttccctatttcttataactccaggagatagcatttaattagtctccagtgtcaatggcatatcctcccattttatagggcaggagccctcttcaacaggct

SEQ ID NO: 2735 - DNA, 416 bp, Homo sapiens
  I.2735 (AI700444)
  misc_feature (366)..(366): n is a, c, g, or t
  misc_feature (400)..(400): n is a, c, g, or t
tttccatttacttgtttattgtttgtctccaccaaggactgtcaacctctgagagtaagtaccttaacgcagtccttggcagtcattggcatcgataggcatttgttgaatgaacagacaagcttttcttgactgcccgctatgttcaggcactgtttttggtgctggagactcggtggtgagcaaggcagacacagtccctgtgttcctggagtgactgaattgaaatccactcaggcgaacattttatttcctggccaccagtttcatgtcaagttgtatcttaactgtttcttgagagtgcccagtacaaatcttatttcatgtgtctaatgcttttctgcctttcttctcaaaaccatgganagatggtgatctctctgtgctgttgttagcatcnctcggtgaaatcgttc

SEQ ID NO: 2736 - DNA, 556 bp, Homo sapiens
  I.2736 (AI700226)
ttaacatattaaattaatgtaaatttaattaccaaaataaataataaaagtgaaagaatccttccttctacatcagtatatctgagtcagagccactaaagctatctatttctacttcaccaaacatctcattcccactcagtacttgaggagtttgatatacttggcttcatctccctatttctaaccttaggaatctgattcttcctcctcttcttcctcctcctcctcttctttttcttcctccttctcttctttttcttctgtggccacttctgctgcttctggctttatttctggggccggtggtggagccactgctggaggagcttctgccggggcagcctctggtgattttttaagcaagcagatcaaataattgtacttaataataatattataaaaagtataatgaatgataatatcatcatgtctacagcatgttcttcacgtctggaatgagtcatattgtgatttcaccttcttcctgaagtgtcccacctagcttacccagaaggccactgtccacactaccctcacttccctgcagaacaca

SEQ ID NO: 2737 - DNA, 187 bp, Homo sapiens
  I.2737 (AI700169)
tttgtaaatggcaaaaaatttaatctcatctgtagtcctccttaggaaaatctaatgtaaccaaattcccaaatcccattctgaggctctccatgtcaaaagtttcaatctctcgctcttgcctttccaataggttctttattctctcgctgcggtccttctgaagggcagccagcttctcttcaat

SEQ ID NO: 2738 - DNA, 523 bp, Homo sapiens
  I.2738 (AI699945)
  misc_feature (434)..(434): n is a, c, g, or t
cagttttcactgttcaagtctcttccttctcacagccacttcagacgttagcctcaatcttggagaactggtgaggccagggaccccaggacacgtgtggggatgtcaggcagggcctgagtaaaggtcaaaggactccttaatttttaggagaaaatatattctagcagctctcaggtctgaaagcagtgagttaatactcaagtcttcaaacattaaaaagtgtcttccagcgacagattactctcataaaaaaaattgtctttttaactttaaaatatcaccaaaaatgaaacataaagttaaagattgattcgcccaaaaggaaaaccccaatattaaaaaaaaaaaatggctctcagggaccagcagggcccaagctggagcagcatttcccccacgtccaaggggtcagaacgttttcaggggcgggnccgggtgcttttactcttataactgtttgggggggggggggggggggggagacccccaaccccaactttctattctctgtttgggggtt

SEQ ID NO: 2739 - DNA, 439 bp, Homo sapiens
  I.2739 (AI699377)
tttgtatttgtggtgcttgtttattccttgagtgtgctgcaggaaaggggctgaatttacctcattctattttggtctggacctggaggctggaggaaatgcggtccccaggagaagtctagaaagatgagtctccccatcctccatggctgcccgcccacctccacagtgccagatgcaggcagctgcccatccgtgtgggatttcccccagagccgtgtcagaagctctgcagtgccccccagatttttctggggggaccccccagagttcttgatgtttcaccagagttcttggtgtgttctgtgagctggaatccagctcgcggctcagttccactgggtttctggattggatcatgctggccataaggatgcagaggataccagcacatttgtccagcgtgcatctgaggcctgctttgtgctaagctgtgtgc

SEQ ID NO: 2740 - DNA, 384 bp, Homo sapiens
  I.2740 (AI699371)
  misc_feature (370)..(370): n is a, c, g, or t
tttaacattgtaagtttgtgaagcaggatgaagggagtccaggtttctatttctgtacttgtgctccctagaaggaacagagtttggaggactgtaaaagaaaagtggaggtaaaagtgtttcctccagattggaaggagatgcctgaggtgcaagggaggagcagcaggagtggtcagttggatcagatcgcagcaggtgcatttcactttcctgtagcctcatcgtcctagcaatggctcagcattccaaccatggaagctgcagaggagagtagagggacgctggatgggattccctgcatgcctttgactgatgtttctctccagggctctcacatcagcttcattatccgtgaacaccaacaaangcgcggtttcctcc

SEQ ID NO: 2741 - DNA, 265 bp, Homo sapiens
  I.2741 (AI699229)
ttttttttttgctttcccagacttttatttgaaatgtgactgctttgtaaaactccagagtcaaggactcataggcaggaggatgtcataaattaacaggaaaggatgagaaatctccactccactccctcctccctcccttgatcactcattccctctcttccattcattaaccacccactacatgccatgccctaaggaagcagctatctaagaagtccctgcctgcaggggctttacagaccaggaggaaggcaacccatag

SEQ ID NO: 2742 - DNA, 347 bp, Homo sapiens
  I.2742 (AI698903)
  misc_feature (288)..(288): n is a, c, g, or t
tttcaatattctgtcaaatttttttaataattttaatggaaatgttaaattaacttctattgccattattaatctctcaaggaccatctgttccacctgttcctatagatgtttctaattaatggtttacttttcctcaaagtctgtgtatttgtaattatgattgaaggattacagtggtccctgttgatcattcaactggctttcttcagcaattgtagagtgtaccatccctacagcagagctctctcctgaatgggagcatactccagtcctctttgggtgggntgggtgcgatgcaaatggatttctttccaggttgaacaaacaaacagcatgtaagtagg

SEQ ID NO: 2743 - DNA, 263 bp, Homo sapiens
  I.2743 (AI698275)
  misc_feature (210)..(210): n is a, c, g, or t
tttttttttaaccttttagttttattggaatgattaattttatgaatctgggcctcattccattctccaataatatctaaaacaaggcaatattaatcacctaacagttatctgagaatagaaatttaagaaaagtttaagatgtcttttacaaaagaaatcttaacatgatttctgcaaagaactagtatcaatattttatcaactgtnttagtcatcacttggacaagtcacagaatgatttactttcagaatgaccccaa

SEQ ID NO: 2744 - DNA, 500 bp, Homo sapiens
  I.2744 (AI697796)
tgctgaaaagtattgtcttggcctcaattttttgccctttaagataagaatctcctcattccttttagtatggaaagggggtcttttatatgagaattttattttttgcttttaagaaacagcacgaaggtcaaaataatattttttaaaatatctgctagtttttacgtgttttttacttaaattgtcagcatgccagcctagctgaggagttttggaaaaagagagttagcttagagcaagagagtaagaaggaattctaagaaggggaggggcaagctccaaagaggagagtctcaaccaactttgagatagtattttatagctagtcagtctttgagtccgggttgggtttggtttttttagcctaaagatatcccttgagatatgagtcttatttggaatgtatgattttattgccatggtcttttagtttagttttaagaacaacagactgcatgatccctgtaatgtttgaacatgttaccagctggaatctc

SEQ ID NO: 2745 - DNA, 534 bp, Homo sapiens
  I.2745 (AI697662)
tttattatgctgaaaaaaatgcagtgaataatacgggtgtcttgaggcctgttacttttagtagcttaatgtgtagtaaagaattggagttgttgacatttctttctgtggtattttgtaatttctgagctacaggatagccttttaaaaatgtgttcactagatgccatatggctttaattgggtctaacaaggtcctcctgaagctttgttgggtccatatactagttctctgatacatttctttgtggctttgcaatgttatgttgcactatgcaggggatgtgtgtatgtgtgtagtgggcgtgggaggacatggtgacgaccagaagcaccaaatactataaaacaacaagtgttcagaatgcaggcttttttgagtggcccttgagaactccatggatggtgctggtgtcctgtggatactggtgctgctttccatcctcacctctgactaacttgcagacattacagatctcacttagtttacgatatcagcagtggcctaaacctaaatttgcagatctctcacaa

SEQ ID NO: 2746 - DNA, 407 bp, Homo sapiens
  I.2746 (AI697563)
tgaagatttctgttgaggagctgcacagacagctgcaattcatgggcgacgctgattgccagaaacgctatggattggcatggggtctgcagctcacagatccctgatcaatacccctacactaacacgccagatggtttggggaaggacaaaaataaaatagtccaaatcaacccaccattatgtttttttgtgtgtgtattgctctgataacctagttgtagcataaatgtgttctaccctgacacaaaacctgacaagatttcgagcattggggtagaaattagcagctctcctctaccctagatttgggtcgtggttactgttgtatagtaaaaacaaagatattgggccccttatgcagattgggtttacttgtggtctgtttatctttttccgtgaataat

SEQ ID NO: 2747 - DNA, 467 bp, Homo sapiens
  I.2747 (AI697430)
taaagacagagtctcattctgtcacccaggctggagcccagtggcaggatctcagctcagtgcaatctccacctcccgggttcaagcgattctcatgtctcagcctcctgagcagctgggaccacaggtgcccaccatcacgcccggccaatttttgtattcttagtagactgggttccgtcacgctggccaggctggtctcgaactcctgacctcaggtgatccgcccaccttggcctcccaaaatgctgggattacaggtgtgagccactgcgcccggcctattgtgatatttctttacttaataactagcagatgaatctcttaacagtattctgttttcctctaagcatgcataaaaagtggtcaaataagtccatgatgactcatcaccttttccctgcaaggagtgtactgtagattaccaaacctgcagaagccgtctgtgtggagacaggaggaggaca

SEQ ID NO: 2748 - DNA, 448 bp, Homo sapiens
  I.2748 (AI697368)
  misc_feature (360)..(360): n is a, c, g, or t
ttttaaactcgtaattaaaactaactttttattatgatcctcacagaagcagataatgttctgacttctgcccatcgtggaaaacacactaaactaggattcagacaggccatttgtgtagccagctgggaaaaatcagaaccctgaaataaataacaactgtttaactcagctttagttattacttttgagcagatcaaatacatgagctcaaggatcatcctcaaagtaagtcatagttcagagttttttcaacactgattacaaaacctcatttttgaaactacgtaacttctttgaaagataacagatttttcttaacttacgacattatacactgtgccgcatataaagaaactntaagattcaaaatacactcatttctaaggctatcctctggaactggttaatacagaaagcaagcagaatacactgattaataattcct

SEQ ID NO: 2749 - DNA, 426 bp, Homo sapiens
  I.2749 (AI697121)
catactgtcatagctatttttttttttttggtctttattcaaccaagtgaattttaggatttatctcatcaagttccttgaaaatattatgttattatttttattggaattgccttaaacttagatattaacttagggaaaactttcatctttatgtcatcagaacttcctgcccatggacatggtatatctttctattagattttcttttacaataaagttttatgattttccccacacaggtcttgaatgggattttaaaaatcagactttcaaattgattgttcctgattttgatgacattgatttttatattgatttttatccagcaactttgtccatccacttctttgcgttaatcttcattgactaaatttatattattcaaaagtcaaaaggatataataaagcatacaatgagttttg

SEQ ID NO: 2750 - DNA, 439 bp, Homo sapiens
  I.2750 (AI696984)
tttttttttttacacgataaaaccacataatttatatcattataaataacatacaaaattttggaggctgaaataatatacatgagcagtcataaaatacaatgaaatcatgtgctttgcagccacatggatggagcttgaggtaattatcctaacctcggaaacagaaaatcaaatagcacatgttctcacttataagtgggagctaaataatgggtacctatggacataaagatggaaatagcaaacactgggcactccaaaagggggtgagtgggagggggggcaagggttgaaatgctacctgagtacaatgttcactatttgggtgataggtatgacagaagcccaatccccaccagtacgcaatatacacaaacacgcacatgtggctgggcgcagtggctcacgcctgtaatcccagcacttgggaggctga

SEQ ID NO: 2751 - DNA, 386 bp, Homo sapiens
  I.2751 (AI696956)
ttttttttttttttttttttttttttttttttttttttttttttttttttttttttttttttttttttttttttttttttttttttttttttttggggggggggcccggggttaaaaggcccccccccccccccgaaaaggggaaaaaaaaaaaaaccccccccccccccaaaaaaaaattgggaaaaaaaaaagggtttcccaaacccttttcccgggggggggaaaaaaaaggggcccccccgcccccaaaagggggaaaaaaaaaggggacccccccccccccccccgggggaaaaaaaaaaaggggggggggggaaaccccgggcccgggggaaccgggggcccaaaggaccccagggggggggggtccccccccccccccc

SEQ ID NO: 2752 - DNA, 264 bp, Homo sapiens
  I.2752 (AI696569)
ttttttttcccattagatttaagaacattttcaagttttatatttttattttttctttaaaaatttattttaatttagagaaagacatggtgtgacttaacactgaagtcaggagcaaggaagaagaggaagaggcaaaaagaaaaataaagtcacagatctgtgggcaaggcaggataaatgtggtatactttgcttgtggatttctcctaatattaggctgtcactgaagaagtcagtaaacacacctgcaataccctttgt

SEQ ID NO: 2753 - DNA, 432 bp, Homo sapiens
  I.2753 (AI696558)
  misc_feature (251)..(251): n is a, c, g, or t
tttttttttttttttttttttttttttttttgcctctttttgtctcctttaattgatgggggtttttttctctttgtttttgttcattaatcattgggaaaaatacagaaaccaaaaccaatatggctggtttctttcccacacccctccaccctgttcaggatagtcatttgttctcacaaccggcagaggcagaagagggttggaatgaaaactccgaaggccaccaggatgggaaacatgaggctgcntgttgtccgaggcttagggtgtggggttgtgccggggggcctgactgccccccgttcttaatgggcctgttttttttgggaatagacccttcatcataattcttcttcttcttcttcccccttttttctttctccatcccgggtgaggctgaaagtttgggacattatccctcgccccacc

SEQ ID NO: 2754 - DNA, 492 bp, Homo sapiens
  I.2754 (AI696277)
  misc_feature (297)..(297): n is a, c, g, or t
  misc_feature (444)..(444): n is a, c, g, or t
aaatttataatttatgagcatttattactataccataagctgtagcatttatgtttttgactctttacagtgctatgcttagcatttttctgtagcattaaacatgaattttgcagaacagcatggatattgattttcaagagtaagagaacctaagatctgctttccaagattcgtttaaaaaataaagctgcatccagaaataaaagcattaagtatacttaccttgttaaaatacataaaagaaaaagatatttctgggggtaagaaatcacacctttttcttttaagaattcnaaatagctttcatgaacccttcaacggggggggggggttttgggagcatttgatttatttccctgttgggaaggggacttccccaaggtttgggcaactttgggtctatttttgggttgggacagcccaataaaataatccccgggnggccttgaaataaccgccttttccacttctttttgaaaccaataaacc

SEQ ID NO: 2755 - DNA, 386 bp, Homo sapiens
  I.2755 (AI696120)
ttgcagaaatcagctgccagatttattaatctacctgaaaacaaaaacataaaaactcaaccaaaaagtggaatcaaaacagaacttaaaaaattttagatacatttttcaaaagagtttataatgtaatattttcaacccttctgtattggaaatacacttaatgttggtcaattatgtatttagttcagtgagtcactacgttaaaacagcaaaacatatagtttgtccttaaatattatataactaataccatttctgccattgttctcttgtgataacgttagcatggcccaattcttcctcactgactgactaaaactagactattaaaaagaagaaaaaggagaaaagagaaaaagaaaaaaaaggaacaaaaatgaatc

SEQ ID NO: 2756 - DNA, 393 bp, Homo sapiens
  I.2756 (AI695929)
tttttccaggtgtttgttcttttattccttaccgaggtaaaacacacgtacagacaaacgcacaaattccagtgatttcccacaaattgaacacacacatgtaactagcacccagatgaggaaacagagcatgaccaggacttccccttccaaaatatacctccctttgtgccacctgtcaggcactaccgcagacctggggccactctgctgtcacccagcagcttggtgactttgcttttggtgaaaggtcccgtgcgtgtgtctgaatgagtgactcagtctgtatcgggcttgactcagtgcagctctcccataccaagtctaattagctactggctctaagttggtataatgcttgtgatctgttttagggaatgtcatacatgagtg

SEQ ID NO: 2757 - DNA, 518 bp, Homo sapiens
  I.2757 (AI695720)
gaagggtatacaaaaggcatttttaattttgatagagttcacaaatgacagcattgacatttctttaaacaaatacttctgtcaaggcacagcattaccatgtgtccccagatgcccaagaggcagtgatttcatgtccccctgaggtttagcagagccaccaatgtcaatagggtggctgacggggcctagatttgctaccagataagccaatgagacatgctgtcagatttatggttacataatcaagtatttaaaaagatgcacaataggtaactgcaatgagcttgttctgcatttagcaatagttcctttcaaacaaagaagatagttttcagtatcaagaaggatgcctatatgtatgtcttccatggagcctttcctacaaattgctttcattacacattaaaaggagttcagctttattgtgaccttcttgagtcattcagctgctcaggcttgaaggctccctgcggcgcctgccaaaggctttggaacccacatttggtgggcacaaa

SEQ ID NO: 2758 - DNA, 286 bp, Homo sapiens
  I.2758 (AI695609)
atataagagaagatgaaattttattaaaataaaatccaacttgagcccttgaaaataggggtttgcctcttcccatggtccctggaaccaaccacagcaagtagggccccctcactccccatggggagggtggcattccttcacagcagctctaatggacggagtaggggtggcaccagctgtgtcccctcctgcagctgtttcaatgccatggcccagtggaaatcactgcgaaagtcattctccacatctcccaaagctggaccaggtggcaactggctggagg

SEQ ID NO: 2759 - DNA, 463 bp, Homo sapiens
  I.2759 (AI695421)
  misc_feature (337)..(337): n is a, c, g, or t
  misc_feature (340)..(340): n is a, c, g, or t
  misc_feature (431)..(431): n is a, c, g, or t
aaatatagttgaaaaaaactactgcttagcagcaaccacactaaaagtatttcctttcatattagaggctataattttatttcttctatttcagctctccttgcctagatgatcatgtttgagtttcacaaatttcacgttatattgacataattttccttttcaagaattgcatatgaggtacttaatgttacagaaacactttgtggcaggccaggatggattttaagttgtcgtgactcagatgtcttcccttgaatctggatgttgtttcccaaggaatccttgccctgaatatctcctctactataataatgattctgagagtgggacacgntgngttttctaaactaatgaaaatgtgtcaacctggagttgcatcctatagtcgccgagtcttcaagtctatgtgaggaagagaggggaagtangtacacctctattctaaaaaaagcataaaatg

SEQ ID NO: 2760 - DNA, 196 bp, Homo sapiens
  I.2760 (AI695376)
gcaagacctataactttatttaactattccaataatttggactagagtttccaaatattaatatttgttaataaaaatctctcgtttctttttttaaattaactgatttacctcaagagtgccttctaggaatgtttggacatttgttcaaaaacatgactaccataatccaaatttctgatttctataccaattt

SEQ ID NO: 2761 - DNA, 421 bp, Homo sapiens
  I.2761 (AI695029)
  misc_feature (315)..(315): n is a, c, g, or t
acactcgtatatatatttttattgttaacacagttcacaattgcaaagatacagaatcaaccaaagtgcccatagaccaatgagtggataaagaaaatgtggtatatatgcaccatggaatactactcagccataaaaaataaaagatgaaataatgtcttttgcagcatcttggatggagctggaggccattattctaagtaaagtaactccggaatagaaaatcaaattctgtatgttctcaactgtaagtgggagctaagctatggatacacaagggtatacagagtgatataatggactatggagactcanaaggggaaggaataaaaaactatatattgggtacaatgcacactattctggtgacaggtgcactaaaatttcagacttcaccactatacaattcatccatgcaacc

SEQ ID NO: 2762 - DNA, 555 bp, Homo sapiens
  I.2762 (AI694720)
aatacagatttattaaaacaatattcccttaaaaaatcacggtcaaagtggggtacagggattttcaggcatggtcaggagctccaccaatctaaatcaccacagcctgccgttatataatgctgaatactttcacagatttatagtttatatattataaatttgttacacatatagtttatatatatttattcttaaagtacagttttatatatatatacacatacacacacacacatcacttatagttaataagtatggttatctagtgctgaatacatctgaacataaagggtgagcagtggtgggaaaagactgagaagtcaggagggttggtcagctgcatccactgaagattccatgttgctggtggaagtctccccctcctgccactggtgagaaaaatggctcaaactgttgcttcttcactttaaaaagtttggtggagctcttgtttgccaacagtagcctatggtggcacttgtcttaaattgtgtatcatgcttttcctgctccctccctgcagtggcatagcatgttaataaagatctaact

SEQ ID NO: 2763 - DNA, 542 bp, Homo sapiens
  I.2763 (AI694444)
  misc_feature (528)..(528): n is a, c, g, or t
aggaaatcaaatatttttattagcccttaacataagaaaaacccaaatggcaaataaatacatgaaaatgaacatactgtccaccagattggctaattggagaaggtatgcataaatgagctcccatatattgctggtaaaaaccactatggaaaactttggcattagttagtgcaactgacaatatacatattcctatatccagccattctaaatcttaaacataaatagacaagttgacagcagtatattcataaaaagaaatacaaggagaaaagatacctttatatggaaaaaacattggtaaaaacattaaagaatcagacaaaaggatatgtaacatacgtttctgtttatagttcccaaacaggcaagattattatattttgtttagggatgtatacataactgttaaagtataaagcaaagcaaagacatcattgcccacaaagttaaaataatggtcagctttgggaagggagggcgagggatatcagtgatttggtaagcagggaacttactaagttntacaaatgttctgt

SEQ ID NO: 2764 - DNA, 447 bp, Homo sapiens
  I.2764 (AI694407)
tctttttttaagttttttattttgaaggatttgattttgtttgttttgtctgccttggaattatcttttattttatgttttgacttggctcaaaactcaaaaagttaaaagtctctctcttatgctaccccatcttgacaggcagctatttatatcagtttcttgcttattctttcaaaggcattttatgcatatgcaagtcaatctaaatgtatatgtatataatctttctcccatttcacacaaattttagcaaactacatatgctttcctgcaccttgccttttcccttcacattgtatcacaaagaccatcacatgaagaaataccaagagcttagctacatctttgtttgaaattttcatgatacaccattgtatatatatgcaatattttaaaaaaaaatagagattgcttcttttgagtgcggtgctttttaatctgccc

SEQ ID NO: 2765 - DNA, 512 bp, Homo sapiens
  I.2765 (AI694281)
taaatgtcagtttgataggtgagctctttccatttttatagatttttagtacaattcttgggccctgattgcccattgattcttttttagctatggatcttgggatccttcaaatgtcttggttagctcaaaatatttttctatctatgatgcttatcctcctgcttgcagctccatcctttatgcaaaattgctctggctccttgaaattggtttgtttttgctgttgttggtagttatttgtcttatggttctgtcttatgcatgcattagatttttctgtcacttgctcctcttttattcagaaagtggcctgcttataggaaggtcgccagagaacatagataggcttctactctattctttcactactctattaacatgccagtattcaatgctcaccatcttgcgcacaacattctaggaaagtacagggtctgcccccacactcattcagtttattgttcaaggccctctgaataggaaaaatacaatatgattattttggtcaa

SEQ ID NO: 2766 - DNA, 385 bp, Homo sapiens
  I.2766 (AI693615)
caacttattcaatggaaatttaatttctatgttgtaaaagtccagaagctgatggcccagggtggccgtggtgactgcttcacagaacgctctggattgaggctcttttcatcttggcctatactcccagggtctcctggcccacaatgtcagcttccactccaaccatcacatccatgcagcctctgtagctctccttcccctccaagcttgtttctctcggcgctgccaccgtcggattcctgtgctggttcttgctggttttcttcacctcctgaccaccagaacactggcgccgggagggcagggtccgtgtgtttccacggttgatttcctagaggctgcagcagcgcctggcaccgaggaggtgctccatcaatatttg

SEQ ID NO: 2767 - DNA, 476 bp, Homo sapiens
  I.2767 (AI693571)
  misc_feature (83)..(83): n is a, c, g, or t
  misc_feature (119)..(119): n is a, c, g, or t
  misc_feature (125)..(125): n is a, c, g, or t
  misc_feature (130)..(130): n is a, c, g, or t
tttgtgttttgaaatcgtaatatttatttattgtaaaatatttttagcacggattttatactgatcatgtttcatgtgtgtgngaacacactttttgttggacgggcccagggaagttncttttnaagtnaaaggactttttttaaaacaaacaaaccctaaagacacaaaatgttaagtgacatttaaggtcccttaaatgtcagagttatggttaatgttaaggttcagggatcagaatatctctaaatgacttctaatgtatcttctcagttctaattttccatcattctagatcatgtaccatgatgcccaattaggagcatagaaaaggcttcatggggcaggtgcatctgcgctagaccaatccatctggactagacttgcaaagataaggaagacaagatttaaagaaaagtttaattgatttcattttcctttgaatgaatctgtagactacaagaaatcaatattgg

SEQ ID NO: 2768 - DNA, 431 bp, Homo sapiens
  I.2768 (AI693354)
aaagaaacacatatataattttattctccattcacagccctttgggttatagtcttttcccatatagcagatactatactaaaaaaaattggggtggaggaatcttcactgacatcacaaggtgatttttgaatccgacttttacagtctgaaattcagacttcctgccctactgcaatgggagtaaaaaccacctgaacctctttttggcagcttcttctcttactcccaaatggcaacaagtgttatctctttgattgagctcttggtccatgcagtctaattaccaattcagaacagtgggggaacttcttattttacacaactggcaactgagtacagatttccactactgcagtagttagaagagagtagttggggttgaaattaaaagtcttaaagttaacagaagttcatgttctggctttgtc

SEQ ID NO: 2769 - DNA, 559 bp, Homo sapiens
  I.2769 (AI693262)
acacacactcttaaatttatttaaaaacatacaagcacctctgtaacttgggatctggcattcagtgctgcctcagtggggtgcataaccctcaacatccattctcatgattgatgccatgcaggctccagggaacgcttcttctcatctttagctcagtgccctaaaaaaaaaaagttacagcctctcagtgccatgaaggatggtaacactgctgatgtttgagactaacattatgttaaatccaagaaaacctagattttcttttaaaggtcagcttgtcaaatccttcttctcagacagcatgaatgcagtgactcctgcattacaacgtactgtttcccaaggatgtgaatcgtccattttcttgcttctgtcagtgttccagtttgtggttccagatgtactcaagaattagcatggctttgcaacagttacacatgacacttaaggagtggcagtaattcttattactctaaaatttctatttataaaagttgaaaatcctgtatggatttagatattcttataagggatggtacaatttacaaaataagta

SEQ ID NO: 2770 - DNA, 402 bp, Homo sapiens
  I.2770 (AI693161)
gagcttttttcttcttttgtttttgtttgttttgttttgtttgcatgttaaaggtatttagttatgtcagtaactgagacttacttaaccattttacaactctttccccaaataaagtacttaaaactctccctgcattagtaggtagccagtttgtattgtgtttataggtttttataaagtcagctactaacctggtactatgtagattgtctaactgtatagatagatagcattaacatttgtgagaaatttcaacaaagaggttaaaccaatacgtttggaattgctggataaaagacccagagcagttaatcttacaattggtgttttccccaaagtatagacatgactgcccgtaaatactgctggggagtctaggactaattccagaaataaaaa

SEQ ID NO: 2771 - DNA, 497 bp, Homo sapiens
  I.2771 (AI692869)
ttttatattattccttaggcttcagttttaatctcatgttcaaaattaagataatgcattgtttacttctagtccacgatttgtttttgtatggcttgctacttaagaatgatttttacatttttaaagggttgcgagatgaaaatgaagaagagagagagggaaataaagaaaaagaggaagaagaatatgcgacaaaacttgtatgtgaccagcaaagttaaacattcattttggctaaggacagatggaataaattatgggaaaaatgtgatacacctgctggatagtaacccctcagtaaatagtagctcccataattatggatattgctattattttctaattactgtttttcttcatatgcgtggaatttgagaataacaatagctaacatgggataatttacaaaatggtgtgagataaacacaatgaaatgaggtaaatcagtgtgaaggagaaaggagatgtgaccctaataccaatgactacttatt

SEQ ID NO: 2772 - DNA, 251 bp, Homo sapiens
  I.2772 (AI692786)
  misc_feature (207)..(207): n is a, c, g, or t
tattccttgccagtattctcattgatttggtatgaattttttacgtaatatttatttggtggaaggaacttagaggaaaataaaaaccaccaacctaataggagaatggcaggcaggcaaaaacggagggatagaaggtcattacagagaaagtggacaaagaaaaggttctcataaataaaaacaccaggtgctgtactttctctnctaaagctagcctttgctgtttcctgtctcataagggtttacct

SEQ ID NO: 2773 - DNA, 526 bp, Homo sapiens
  I.2773 (AI692464)
ataattactcttactctatattcaaggacccagttcttcatcttctcaagaagaaaccagaaaggctaaacagtgttctctaaaactaaagaacagacactctccaacataattctttgtcacttcccagaatgtggaaaagtcattgttattaaaacatcaccccttttccgtcccactatgcaaaactcatatgctgagtggagacttaccctggaaaatgttacaaccaatgcaaagttggttgtctgcccatttgtcaccgcccccaaccctccacccaccaattcttccttgcactcagaactccagatttattcaggtacaagcagcaatgggaagcggaagggaaggaacatggacaacatccgtatcacttgtttaaaactgctcgttgatgaaaagttttggaaataggtagtagtgatggttgtacagcattgtagatgtaattactgccactgaattgtacacttaaaaatggttaaaatgacaaaatttgtgttacatatattttaccacagtt

SEQ ID NO: 2774 - DNA, 491 bp, Homo sapiens
  I.2774 (AI692422)
gatgcaaaaactgattttattttttcaatttacctctagtttttgtttacatgcatatctagtatatgttcacacagtagacatcactgtttatgtacaatttataccgtttattaacactaatcaataatgcttttccctgttatatggtctttataataataattattattgatagctgcacagtcaggtagataggccataattactccatttttgaaaatgacaatgtccaccttctacatactgcaggagaactctacatatgaatgatagcaaaaaaaacaaattgtaaaagaaaaggaaataaaaggcctaaatctccttatggcacaaggggagtatttgattgcctaggagctgtgaaattctatcatttgattttgcaatgaacttctgccccaaatgctttatttcacgtatctatttttaaatttaagcgaattaaaaagaagttgcatgtgatggatatgtagaggttcatgatactg

SEQ ID NO: 2775 - DNA, 522 bp, Homo sapiens
  I.2775 (AI692267)
  misc_feature (436)..(436): n is a, c, g, or t
ttttttatataaattcatgtttatatatgacaattgaggagagttaaagaacaagataattctggatggaaaaatcagtttgcctgggcatctgtaaacctttgggcaagtgaattccctcttctctctcagttcaccctttggtgacctccaccgtggctgcagacttcaggtggtcctcacgcattcacagaactgtctgcttaggttacagcactttgggaggccgaggtgggtagatcacgaggtcaggagatcgagaccatattgaccaacatggtaaaaccccatctctactaaaatacaaaaattagccgggcgtggtggcgggtgcctgtagtcccagctacttgggaggctgaggcaggggaatcacttgaacctgggaggcggaggttgcagtgaactgagattgcgccactgcactccagcctgngtgacagagacttcctctcaaaataaaaataaaaataataaaataataaatggttcttttctatgcgtctaatgaatttaagtgct

SEQ ID NO: 2776 - DNA, 230 bp, Homo sapiens
  I.2776 (AI691121)
  misc_feature (190)..(190): n is a, c, g, or t
tgtgagattagaagtgactgggtttttttttaattaattataaacttattacattgattttttacaacagacataactaaacataaaacaaaaaggagcaaaagactttgctgaaacatcttcataggagtccagaatataaactgaaacaacacatacagaaagaccttcccggaagattgtggaaccnaggtcccccagagcagaaagtacaggaagagactcataac

SEQ ID NO: 2777 - DNA, 309 bp, Homo sapiens
  I.2777 (AI690489)
gtaattttatataacactttaatgattttgtgcataaaacaaagttctgactatgctttgactgtgtagtcacctgaggtcaggtgcagaattttccacttgtggcatcatggtggtgctcaaaaattctcagatttgggagcattctggttttcagatttccagattggggatctgtggaagacactcaaatatgcctgctaacttgagctgctcacaggcaagaagtcttattttatggtgacgcaacatcagttgggtgatctcagacccagcagcctttctaccagcgcttgagaaaagccaagg

SEQ ID NO: 2778 - DNA, 460 bp, Homo sapiens
  I.2778 (AI689672)
ttaccatgtagtgctaccatttatttgaaagtcattttgacaacactgtgcatacttagagttttgggttaaagataattgtgtatagaaaactatagaaaacattgctttgaaagtgaagccagtatcaatgttatcctaatctctttgccaaaaaaaaagaaaactatctcttaattacactacaatcaaatcgagtcttcaactcttatatgctcattcagaattttaaaatctctctcacgggaggaaatgtaaaaggaaagttttcaagacctttttgtaccttaatatccttttcaacttctaatgtaaaacgtatttgtcctgatacaatgctgtgaaataaagaccacatcaggaatgtaatgaagtttaaaagtagctccttttttgcactgagaacaattttattgattcaaattagaaacttctaactgggggcaggagaaaaaggagg

SEQ ID NO: 2779 - DNA, 297 bp, Homo sapiens
  I.2779 (AI689623)
ttttaagggtaaacaagctttatcccaaatggcagtgcagatataagcaaatgatataataagcaaattgcaatgggaagggagaagggaaaagatatatatatgtatttacactcaccagactatggaggattcaccaccagactgggaagcaacagcctgggctccagagttggccactcgtccatgcagacaaggagaggtctcatgaagcttcggcgcagtctggaaccctagctctttttgtaacgagttgtttggcatgaggtccagtcacgagggccctttgtgaccagg

SEQ ID NO: 2780 - DNA, 445 bp, Homo sapiens
  I.2780 (AI689080)
  misc_feature (428)..(428): n is a, c, g, or t
ttatttcattatttttaaatatattaatgaaatgggaaatagataaaattcattttaaaaaacaagcctacaggtgaggccaggcagggtgcctcacccctgtagaccaagcacttttggagcctaggcaagtggatcgcctgagcccaggagttcgcgatcagactgggcaaaaaggtaaaaccctctctacagaaaatacaaaagttatccagttgtggtggtgcatacctgtatttccagctactctggaggctgaggtgggcagagtgcttgagcccaggaagcagaggttgcaatgagctgagattgtgccacggtactctagcctgggagacagagcgagactttgtctcaaaacaaaaaaaatgcaaaacataaaccactgactcaaaagttataaccacttattaaaataataaacaatntcaaatactaaccatac

SEQ ID NO: 2781 - DNA, 261 bp, Homo sapiens
  I.2781 (AI689020)
ttttttttttttttaattttttttttgagacagggtttcgctgttgttcccaggctggagtgcaacggcacgatctcggctcaccgcaacctccgcctcccgggctcaagcgaccctcctgcctcagcctcccgagtagatgggatcacaggcatgtgccaccacgcccggccaattctgtacctttagtagagacagggtctctccatgccggccaggctggtccgaactcccaactcaagtgagtcacccgcctcggcc

SEQ ID NO: 2782 - DNA, 360 bp, Homo sapiens
  I.2782 (AI688885)
ttttttttttttttttgaggaaaggtcttttcatattaagtaagaaaaaggaggtgacaagatacatcccatcccatctggaaggatttagacccaagggcaaacaatgtttttctcaaaaggggcaggatgacaaattcttgtagctgcaattgttccagaattaacatctacatcccgtccggggtaaaaggaagacagctaaagaagcctatgaagtgcaaatgtattgagcaaatgtattttggaaggtggggttggagggaaataggtggaaaggtcaggaatatctcattgtcttggggtaggccgaaaactccagacagaatgggaggaaacggtctccagggagtgtgaaag

SEQ ID NO: 2783 - DNA, 397 bp, Homo sapiens
  I.2783 (AI688148)
ttttttttttacatttcttttctttttttattctatagatcagggggttttgtatctgtaattctttcatatcagcaaagaggaaataaactctcatgtaaatcattttccccccatctgtagcatattaaaaccatgccttttttttcttttaagcagactcttttttccgtatttgcttatcagttcatccaccattacattttaaatgaaattgcaagacccttgtccctcccccaaatttcagcctgatgtaggaaagtggaaagcagacttttcttgccttagaatagtgacctagattcaattacagatagacccagaagagagaagtgacacctcacaattttcttagaggtcctgaaaaaattagaaatctcaaaacaatacttaatgg

SEQ ID NO: 2784 - DNA, 450 bp, Homo sapiens
  I.2784 (AI687918)
  misc_feature (420)..(420): n is a, c, g, or t
ttcaattcagaaagtgtttattggccggagttgtcggagagccaaaagaagcagtccaggagggcttccttcaggaggcagccagcacagttgcacagggcagcttccactgccatctgccagcactgagtcctcctcatccagacacaggactgtccatgggcctctcaggggtctttggggccaggatgggacccctcagacctggcccaggtgggttttcaaagcctgcagctctcggctgttgatgttgttgcctccacacacgattaccacaactgaagtcagggaagggggcaggcagccctcggcctggagcctccgcaggaggcctgagtagatggctgctaaggctgccccacaggcaggctccaccagcatacgctcatcatccaggagctgctgcacagcgctcacagnctcggtgtccttcaccacttcagagtgaat

SEQ ID NO: 2785 - DNA, 494 bp, Homo sapiens
  I.2785 (AI686832)
ttttttgagacacagtctcgctctgctgtcacccaggctacggtgcagtgatgccatcacgactcactgcaaaccccaccttcaggactcaagggatcctcctgcctccaggactcaagggatcctcctgtctcagtctcccaagcagctgggactacaggcatgtgccaccacacccggctaatttttgtagagatggggtttcaccatgttgcccaggctggtctcaaactcctgagctgaagcaatcctcccgccttggcctcccaaagtactgaaattacaggcatgagccactgtgcctggcctgttctcggtatcttcttatccacattaggaaggatattttaagaccccagagtgcaagtcgagtatcttttccctcaagggtcagaatggctgttccctaatacttatttattagatctaaaatctatgcaaggctcatgttagagtctcctgataatgctgagaaacagatgattctgcactga

SEQ ID NO: 2786 - DNA, 458 bp, Homo sapiens
  I.2786 (AI686704)
tttttttttttttttcacaactcatcaaaggtttaattataattagcagctaacgacactcggatgaatcactggcccgagcaggtgctcattcacacttcccagttcactggatgcgccgtgggagccgttgagacgtgggcacagaaggcacatctccctgggacccgagaaggcaacagagcccccgcatccccccagcacgatgcagaagggctgggcccatagcagctacctgtgtggtcactcagccctgagctcagaagtgccggggctcagaggacaccctgctgttgccaccgggcacccttcaccatctctgaacaaggcctgggatttctctgtgacctaggcccccacagggtacagtggtcctgaccctacatccacgtacagggaatgctgaccgcggcagctccgtgttcacagccctggacacacagaaatgactgtgatgt

SEQ ID NO: 2787 - DNA, 482 bp, Homo sapiens
  I.2787 (AI686579)
tttttttttttttaaatggaatttcactttattttagcttctagctggcagtatcttattacagaggcatgctgtaacagttagttcacaagctacttatctcaacgtgtttatttgaattctcttcaactctttcgcgatacgggtgtggggttcaggatttctaagggagtcagcgctgactatacagagaaaaatccccaagggagaaagtcaggagctgctaagaaggtcaaaaagaacacaggggaaaaaaagaaaaatgagttatgccggtgttctttaaaattgaagacagaaaaattcttggctgcactttcattctatttcaccttacaaaaacctcctgctattccactctgctcaaagtcttctttccaaagtactttgaattaaaacatgaagtaatccttactaagtgtccataggatctcttctttatccttcgctgtgaagtggggacaaaaagagctacccagtat

SEQ ID NO: 2788 - DNA, 154 bp, Homo sapiens
  I.2788 (AI686081)
tttttttttttttttttttttttttttttttttttttttttttttttttcccaggaatggacttttttaataaacccatcaccctttcatagcaaattttggaaaaaccaaattttttttcaaattttttttttcaggggggaagaaaaaagtt

SEQ ID NO: 2789 - DNA, 468 bp, Homo sapiens
  I.2789 (AI685923)
ttcagcagtaggtgcagctttatttaatctctttattcacatgcaagatggatgggagacgtggataacagaagtgaacatcactgtctcaggagagtgggtctgggagcctggacccgagagctctgaggcctccggagagcaagtgggaggagagggggcgctgggtgctgcatgcacacgagtagacaggagccagagaccagatgtgccatgagcaggggggttgtgggagagaagtgaggcatggcagggcctgggccagggcgtcacagccaggctggtttcccctgagagtgtcagggagagacattttggggtttggaaggaggggacccctaggaccaaaaggaaactggaagctcgccctgctcggcttcctgcctggagcctccatgctgtcccgagaacccgatgcccacatctgttagctgccaatgtcccaccctccagtctggacagagttgg

SEQ ID NO: 2790 - DNA, 465 bp, Homo sapiens
  I.2790 (AI685198)
tttttgagatggagtctcgctctgtcacccaggctggagtgcagtggcgctatcccagctcactgcaagcttggcctccagggttcacgccattctcctgcctcagcctcccgagtagctgggactacaggcatccgccaccacgcccggctaattttttgtatttttctttagtagagacggagtttcactgtgctagccaggatggtctcaatctcctgacctcgtgatctgcctgcctcggcctcccagagtgctgggattacaggtgtgagccaccgtgcccagccagcatagtatctttaatggttttttttgagacagggtctttcactgtcacccaggctggagtgcagtggcgtgatcttggctcactatagcctcaacttcccaggctcaagcaatcctcccacctcagcctcccgagtagctgggactataggtgtgcaccaccacacctggcta

SEQ ID NO: 2791 - DNA, 269 bp, Homo sapiens
  I.2791 (AI685048)
ctcctcctccgctgcagtgctgtctgtggcaactgaaaccaaaggtgataacgactggagctcaggacaggctgtttctccaagaggagtgtgaagaagtcccgggaatcaacattttgagagcatcccaggggcctctaagaatatattacgggcaaacacttgtagagcacttcatttcatcctcaatcaccgttacgaggcagacacaatcatctccgagtgaaactgaggctcacaggggcgggctccgttgccgaaactcacag

SEQ ID NO: 2792 - DNA, 438 bp, Homo sapiens
  I.2792 (AI684879)
tttttgattttcatgaccaaactttacttatcaggtttaatcagggtctttgtttttggaaggcttttaattatttggttccaaggtactagttttactctgaatcacttgagtcagtgctttgtagagaagctgcagtgacctcttcccccacgttctttctctctcttgccgtatgtttcacactttcagtgtgtgtaaacatcagagcaaagctgtaggctgaaaactgcggttccaaccctgcaagaatcctttggtgtctcgaaagaggcagagggcatccagccccatctccttccagaggccgtgctgcctcaagcatcagaggctttgtgttcttgacatctggtgtttactccaagctgaggttttagggaagggtagttggaggccagcggcggctcctagtgacagatgggcagagcgtctgctttg

SEQ ID NO: 2793 - DNA, 560 bp, Homo sapiens
  I.2793 (AI684682)
  misc_feature (464)..(464): n is a, c, g, or t
agaataaactttttatttctacaagattaatttctctatagtgacccagacttaggtgagggtagttaatttagtgtaaaatatatgtataaatgtaaacaaataaacgtatgtacatatatatctgtctataaatcatctcaactcttataacatagtactgtgatatcatccagtaattgtattgtatttcaaagaagtatggtcaccgagtgaaaagaaaaaggttaggagttgttgtcttaaatgtattactaattcccagatattcttttgaacctatgaatactgatgatttttctccatgcaagaatatttttcagttaccatcatatttttgaaaacaatgtaacatttataccagccaaatcaaatgtaataatcaacataacatatacaaactctagtaaaattattttatttagttgtaatatccatctctaattgtttgaaataaaaatttncatggtcttaattgaactgtatgtactttcttttagaatatcctttctttcattaaaataatctctaaaccactctatgtgttcaaccttctgttt

SEQ ID NO: 2794 - DNA, 258 bp, Homo sapiens
  I.2794 (AI684431)
tttattcctcaaagatttaatacgatgtactatgtgccacggactctactgggcactggactcacacacgaatatgtcccatcactttcacatgtgcacatacccacttcacagtcacccaggaaggcatcagctcagccacccacgcaaggtcatacagacaccgaagggtgaagagagtgggttaagaggctgttgtgattatttaaatgcatgtaacagaacaggcctgcagtggccacccaataaatgtccgcc

SEQ ID NO: 2795 - DNA, 427 bp, Homo sapiens
  I.2795 (AI684412)
aatctaggaacatttcataaaatatcttagagaagtacataattttagcacccaaaagactttaagacaataataaagtagatcaaaactaacataagacacagatcagaaggaacacctggggttttaaaaataatttttgccaagtatttgccatttactagttggctgcttcacttcatttaatcctcagaaaaatgttgtgagacgaactgactcacaaaattttattatctccctcaaattcacatgaaaaacagaactaagagacaaatgaagatttggttcaaagctcatgtttcaatgacaacaaacaaaccctaaatattttgcaaaacttctaaaataattttcttctcagaagatccacgtttgttattatataataattattgaaaagaaataggaactttatactaaattacag

SEQ ID NO: 2796 - DNA, 459 bp, Homo sapiens
  I.2796 (AI684353)
tttttttttttcctctgcgtactgaaactttaatggaagacaatatccaaaccaaaactattttagactggatctaaagcccattacacttctcttatagaataagcaagagtaggaaacagatacaccacacttaaatgaaaaaaaaaaaaaaggaaatcttttaaaatgtagatggttattatttatagccttattgttcaaagtgtggatcacacaccatcagcacggacatcacatggagctcgctggaactggaaaatctcaggtcacacccagagctcctgactcagaatctgcattttaacaaggtcccacatgatcatatatatgttaaggtttgaggttctttggtttatatagttgagtagttctgaaaacccatcaaattacccaggtagttggtacaaaatatataggagcttggacactaccactagaaattgcaatctgatagat

SEQ ID NO: 2797 - DNA, 465 bp, Homo sapiens
  I.2797 (AI684181)
tttttttttgataagagtttatgttttaataaccacttagcattgcctctctgtcctaaaattttaccactttgaatttgtgtatcactgtctacaaatcacatgtctctataagccttttataattcaacatcatattaaatgagagaaaacatggggataaagcagtttcttgagacaataaggatatatttaattttttaaaaagttttatagaaagatgagagcgtaagaatggcattgaacatatcaatcattattacagtctggaagatactgtattaagtatagttgtccctcagtatctgtgggggattggttccaggactccccttggataccaaaatccatgcatgcttaaatctcatataaaatggtgtagtgtttgcatataacctacacatatcctctagtatattttaaataatctagcttacctctaatatctaatgcagtgtaaatgct

SEQ ID NO: 2798 - DNA, 434 bp, Homo sapiens
  I.2798 (AI684153)
ttttttttttttttttttttgggtatcataattttgtttttacctgttttttggtctttaggtaacttttttattacaactttctttcattatttcattgccattgagaggtgcagaagatgaacctccttctaaaatacagtcatggcttttttcatccccaaatttttccttcttaggtactggtttaaaatgatataaatttacattagttttaatacctggggatgttttcatgagcaatgtaggtagttgtaatttgttactgtcatcatctatttgtgtggttagttgggttttatctgtttttttcttcttctgtgccactaattttaagatttttctcctccgggggcgtgatatgtgtccatttatccttataatgatgtttgaagcctctacatagtttagatttcttagaagtaggcatgact

SEQ ID NO: 2799 - DNA, 515 bp, Homo sapiens
  I.2799 (AI684088)
tttggtgcatactttaaccttctccagttatttattttattcatccaaatctcaagctaaggttgatggggagaaatgaggcacaatgcaaataacacagaactctttaagatcacaactccatggacttgtacaaagaataaacaaatgtcttacttagaaattaaatccactcgatggcttattaaatcacccaagaactcacattgccacccggctctatgcctctttcatcataggatagtgtagatgctataaaataatcagcatccttctccagaaaaattcactttacatttgccgttaccctccttgttttccctgcatggacctcagctcacagcttattagagaaccaaaaggccaagcgggaaaagaaatgaatcttcatgagcctattccttcatgtgccaagagcttgctcccctgcttcttagtgagattgccatgaggtaaccacaaaaatccaagagagctattatcaaacttcagggttgtaaaacccacggatttat

SEQ ID NO: 2800 - DNA, 492 bp, Homo sapiens
  I.2800 (AI684033)
tattaagcatatgtcaaaaatttattttaactcagcaggatggcacatctggttcaatgtaatacaggaaagactgaagtgtatacagtcaatgaaatacagaatactgaaataagattgctaatttagaaataaaactagttactatcctatagggcaataaaactataacctttggggttatcttctttatcagacagaagtcatttgcaggggatcaatctacaaattaacatctaacttcatagaatctggatcctaataaaaagttaaacaaaggaacactttcctagagaattacatgatccttggctggtgtcttaagtgctccaagaaaacgctaaaaagacatgcaatcatcctgtgccttattcccaaatgttggataattttcctaaacattttaatatgcaacaaaaccttggctatacaaagccctgctgaatgggttagtcttgatagtggcatgctctagagacctaaattagccct

SEQ ID NO: 2801 - DNA, 1197 bp, Homo sapiens
  I.2801 (AF143888)
cacttaataaaataaaataaaataaaataaaataaaataaaaatggatggtgtcccataaaaagcactagacatttccatctccatctttgaactatgctataccttccagaagggatgccaactagtacatgaaaactatctagaaacacagataggaccaagcttcccttctctgaattcttacagcatatgtttgaagactgctgtgtttgtaatctctctctgcaactcaaatgttttgaacacttgtgatgcaccacagattcttacagggggataaacatgaatgagatatagattacccttttggggcttatacttcagtagtattttaacttgtagacactcttatagtaagcgacacatgctgttctccatggtaatgtctttatattgtatataacatagctaatgtaatctagcttgagctcaaaggacaccagagctaaagcaagatatgtccctttatatttacttatttctttgtttattgagacagggtctcagcccaccacccaggctggagtgcagtggcaccaccacaacttactgtagattctgcctcttgggctcaggtgatcctcccacctcagcctcccaagcagctcagagtacaggcgcatgtcaccatacctggctaattttttgtattttttatttttttaagtagagacgggttttgccatgttgccaggctggtctcaaactcctgggctcaagtgatcagcctgccttggtttcccaaagtgctggacaagatacattcttacatgagacattttgagcctaatgaagataaggcgtggtttttctgtttaagaacttagtagatgatgtatcaaaatagttgcagctatttaaatgatttgaagcagattttatttagttcacggtgaaaattacagttggaaataatcaagtgaaaataagattggctttgactaaatccagagatagcaaaattttgtactgactgaatattaaaagaataatcaaatattttgaaaaaagttagacctaataaatttaatccaagaaaattgaacttggtagaaatgcccacaagaaaaatgcagaggcagaaggttaaatagtaaaactccatgaaaaaaaatgatgactgaactgaatctctgttgtaaaattgaaacatggaataaataattttatgaagataaaaaaaaaaaaaaaaaaa

SEQ ID NO: 2802 - DNA, 879 bp, Homo sapiens
  I.2802 (AF143873)
ttcggcacgagctgggagatattttagtggtggtggcaagggggtgctggaatgttttcttcattgctggtgaaatcttggaactactgccttgtagaggttgagtagactttcaaaggtctttcttctccttgctgttactcaaaggtcaagagatttgcttgggtggagcccaccagcttgacttctgggaagaagtgagtgatggttgtgcctgcaaagactatagcagtgcacctggctttgggctgactagcccctggtaataccacactgcctgtattaaacacaccatgaagcagatagaggagaaacaaattcatatttcccactggcagatgaaggcactttaccatcctgaaattatccctgttttcttttgttcgaaatatattacatttgatacagtttttcttcatggctgtgaaagatggacatacccattgcagggataggttgtcccaaggactggtgtggcattgataccttctgtggaggcaattgggcatgacctgtcactgtttctgaaaaaaattactccaattctgacatcctagagatggtatttcagagacaggatgtacttttttttgggtagtgttggctaaatgtaaggtttcaaatgtgttggattttaaaaaaatacaaacagcaacagcggaattgaccagattattttccttattattctcttttaaaagtaagatgagccctggcccttctgcccaccctctgagaatatgctccctccgcgtatatatttacatatatatatgtgtgtatatatatatatatatatatagagagagagagagagagagtgtgtccttattaaaccacatgcttattaaactacatagtaaaaaaacaaaaaaaaaa

SEQ ID NO: 2803 - DNA, 1138 bp, Homo sapiens
  I.2803 (AF143871)
ttcggcacgaggcattctaggccaaggggtcacagtccaccctgaactgtgcctcccagcctgaagccagaaagctcagggaggctagcggccctgcccaggcctcagcactgaccctgcacccctaggcccagctggatgacccctaagagcttcctggaatttggatgcagggttattctgtgtgtgctgcctctcagagcatgtcactttgacgtggacatctcgggtctggttctggtgctgtccctgtctcgccacgtgaccctggataagtcatctctccaggccttgatttccccatctgtaaacagaggaacccaaggaacgagtgggctctaactgctgcagcatatgggagatgccaggaggagctggctgtggcaggccatcccagtccatcagacaacttgtagtggatgaagatgcagtgtccatggccagaagaaactcccgtggatgctcaggccaaggctgccagaagcacgaggaggggcagcattgagtgtcatcgggaaaaggcaaagtgatggtcctgaagctgcccatgtggccagtccctttttgggaagcctgaataaatccatttcctgtgcactgtgtgggaagccaacccctcttcagagcacctctgaactcaacaggatcctacacttcttataggcctggcttgatgctgacatccttcagccccagggaagacctaaagatctccaggtcttgaggcacctggaacacctccacctgagaccactttaacatgatttctctgcttgagggattttggaccatgctgtgtgtattcagccctaaaacatgggcgagtgcccgcttgcagttcaaattctcagaggaagttccctgtactccacccagtgccaagtttagtttgtgcaaatttccttaatgtcccctcctgtacaacaggcttatttggtgttaaccctcatatcgggggtctaactctttggttttccagcttttgtgctggaatatcccattaaactgtccatgttgggtattttttctttgttagtaaacatttgttgcatattgttgatagcattttagatttgaagaaataactgacaaaatcaatatcatctgtttcatcattaaaaaaaaaaaaaaaaaaaaa

SEQ ID NO: 2804 - DNA, 390 bp, Homo sapiens
  I.2804 (AI683802)
ttttttttttttttttttttcatcttaacatttaggcgtttattcatagtaaccaaaaattgggttttatgctttttatttttcctaatgaagatgcaattaatttaagatggcaccttgaactactgttgatatatataataaatagcagggcattacaaaatattcaaatacagccattaatttttttctatttttccccaagctggggcaaccaacaaaaaacacaatgacgttctagggacctagatataattatgttcctttcagaagtaaagttttttaaacatagtaaaaacaatatgaccttattaaaataaaactctcttaactatacgggcctttaacaaatttttatatttatatataaatataagaatatacaaagct

SEQ ID NO: 2805 - DNA, 507 bp, Homo sapiens
  I.2805 (AI683782)
tttttttttttttttcatcctaactccattttatttttaaatataagatttataattatcacttaaaagatatatacatcctctacatttcatttttttatccagaaactttaattgcagagatggctggcatgtaaatggacgcaaggggccacagtggcccacagaaagcaaatggaagggactgacctactggtgactttcattctagaatcaggtatgtgttgagtgctttgccccgcaggttcctcatctcctcgagcagcttctctccggccttctctgctggttgggcttgatctttcacttctttctccttcctgatgtccttgtagttcaacatagggaattccactttgatcatttctggagtcaacataacttctacattctgctcacagagctcacgttctactgtttctagtctgtcctcttctggtaaggcatcaaggatggcagggacgtctatcggaagcataaatgaattgaaggaatcgcagctctttg

SEQ ID NO: 2806 - DNA, 398 bp, Homo sapiens
  I.2806 (AI683704)
  misc_feature (46)..(46): n is a, c, g, or t
gggttctatcctgactcatgttttatggggggctgggtgggagggnttctgtgctggctgaggagctctgctctgctctgctccttgggagacggcctagtggctgccggtccttggatgctggggcttggctggaggcacagcccccactttccaggggtcccctgcacctgccagcttcctcagcctcaggatttcgtgcttgtacctgcccaggtgctggtccacgtactcctgtagctcagaaagttgctcttcagccatcgtggcccggaccagcagctgtgcccgctcccgttccagctctgcctgggtgctgcgggagaagtcccggagcttctggtggatctgggcccaggatgcagcgtccaggccctgtggctctgatgttcccccct

SEQ ID NO: 2807 - DNA, 456 bp, Homo sapiens
  I.2807 (AI683670)
aacaacttaaataatttttattacaaaaggaagaaaagaccaaaacatccccaaaattctcccatgggcttccccctccactccaataaataaggtatgggagactgaccggcggagggggtggggatcatggttcagcagaagggggagcttagccgggggggtggcaagcacatccaacccacctcccccagtccccggcactacggtcacattggccagaacacagaactctgcccacagacagcaacagtctctggatgtgtcttgaggagtgtggccggggaggaatgtcatacctcagaatggccgggatggctgccccacccctgtggccttcccagttctggacagcatcgggtccagccagatccatgctggctcccagggaatttagcagcatcaactgaggcgcaagcccacccaaaggggcctaagatggatggaatgggccct

SEQ ID NO: 2808 - DNA, 501 bp, Homo sapiens
  I.2808 (AI683428)
ttgaaaggataataaagacgtttatttgcatttgtcaaccaacttaacatacagctgagaaagaaagactaaaaaccctctaataaagattgttaactgacagaagcattttgtttttgtttatttttttgagacagggtctcgttctgccacccaggctggagagcagtggcacgatctccactcactgcaactgccactttctggactcaagcaatcctcctgcctcagcctctcaagtagctggaactagatacacacagcactgcacccagctaacgacagaagcattcttatgatacgatctcctctcggctcacttcatcttagtcctggaggtctgactgtctagtttcttcttcttcagaattaatgtttccctcatccatgtcatagcggaactcctcctggtcatactcccggctctcttcccggaggacgtctgcatcttcatctccaggcctcatgtccatctcaccctcgaagccctccagcagagcc

SEQ ID NO: 2809 - DNA, 460 bp, Homo sapiens
  I.2809 (AI683342)
  misc_feature (286)..(286): n is a, c, g, or t
  misc_feature (460)..(460): n is a, c, g, or t
gaatttctgtaactcaggatgttctattttaatcatcagcaattttaaggcatggcaacatctgaaagaaaaaaaaaacgtaatgactctttcttacacacagaacatgcacttaaaattgtcaaaactccccatctccagcattaaaacaatcatctttcaagaacaaaatcctttctcagtgtctctcagcccacaagccatgagaatgtgtctccatttcaaaacccagtctgtaccgtcatgcttccgctgtttctcagcaagctgcctttctttgtaactnttttcttccaaatctgattgatagtgaagctggagcctgagatgtaaattaataaaccacaccaggaactccttgcatggcaaaagctgaacagtacaaatccattgttttcctggatgtgaaatgccagtctgttcttgcatgagcaaactggattaaagtcactttccttgn

SEQ ID NO: 2810 - DNA, 442 bp, Homo sapiens
  I.2810 (AI683004)
tttttttttattgatttggaggtactctttatatattatgcttccagattagtgtaagtgcctgtcctccaaaattcaccctgtggttccaattctcacaggctggaattaatagaacctgtggatggggctgctcctttaccacaccgtgaggtgcctgcacacagtgaccttatttgattttattccatgtcctctgctgcctagcacagggcctggccagcatagatctctgcaagtaagcctggactcagcagcggtccacctatgttctttcttccctcagcattcttctcataatttgtggagatttttcgatctgtgtggtgagtcatatctgactcctccactggactgactgctccctgagggaaggtaccatggctgctttgtttgctgctgtatatctggggtccatgacagtgtggcctagcacattatt

SEQ ID NO: 2811 - DNA, 392 bp, Homo sapiens
  I.2811 (AI682979)
tttttttaacatttattttaagttcagggttctttttcaaatcaaggtgtcaccacttccatgaaaatgaaaggagaatcaaatccagttgctacctgacaaagcattaagaataattttgattatggattattttgttgttttatgcatacaacctagaagaatgggtgctactgctaatataaagcactttttaatgaccatctactaaattcgtaagtgaggtttctcaacacttttcaatattaaagtaaaaaaggaacagaatcaagcagaaccccatcttttctaatatttagaaatggataaaataattgaaataaatcagccccatctatcccactgaaaacgcatttctgacaaaattttactttaatacttattaaaatttg

SEQ ID NO: 2812 - DNA, 525 bp, Homo sapiens
  I.2812 (AI681759)
aaagatttttaaatttacttttattttagtgataatctttaaaaatgcttaccagttacctctttttttggtgtcaaatggaagatggtcttagggtaaatatacaacattagctaaagtttctcaacatgaggactccgagtgtactacagaggcttttgatgtcttgtttccttcaaaaagggcaccactctattaagtttggaaacctgccttcgtgcccaaccattcagtggctgcaggccttttgcagagtacagacgtggggcttgagccaaggggtgagttgtgtgtgagtagcccatttctaactaagccaatttttataccaaaatacagaatgtagagctgccctgcagggaaagattcatttgttcattaagtcattcatatatttactgaggacttactaagtgctaggcacttccctaggcaatgaggatacagccaagaacaaaacagacccaaatccttgtcctcatggaacttacattctaatgtggagaccaaaaattaaacaaaata

SEQ ID NO: 2813 - DNA, 451 bp, Homo sapiens
  I.2813 (AI681712)
  misc_feature (423)..(423): n is a, c, g, or t
atcagcaaatttgtactttaaaaatttcacattaatagaatcagactatatatactcttctgtaccttgctttttttgctacctgtgttttatgagatctttctgtatcagtatatataaaaatacctcattatttttagcggctgtgtggtattctaatgtttgaatgtgttacaaatgttcaaacactgataggctctttaggttgtttccaatattaaatcacattgtggtgaatatacttgtacatataatgagtttttattctacagtgtacctagcaatacaattgctggatcagagggtattttttattttcagttcagtagttactgccaaattgtcctctagaaatctttgcccagtatgcttccacatataatgtatgagaatgattatttaccaaacccatgccaatactgngtactaaactttttgaagtctgatcatg

SEQ ID NO: 2814 - DNA, 459 bp, Homo sapiens
  I.2814 (AI681581)
tttaaacttttctataaaattttattcagtgagatcagacacgccttataaacattacacagagccaagaatgattccgtttttacagctataaaaagagatctacaagaccctattgtaatttggggtggcgtcacggttaatctttttcaaccctgtttagattggcccattaataaaaatggctgctagttacagcacatttaaaaatacaatcaccgcgtacaaatggtaacctgtccactccatacttccatgtcctgtgccgcttctattaacttgtctttggaagtagtaaattctcccagtctggacgtggctattttttctcacacacgggccaacacagttcttgctcaacttgggtgcgtttatgacttttcaacagtgtcatcagccgtacctaactcttccaggccttcagtatctcaggtgttagcttcagttgttcctaggtct

SEQ ID NO: 2815 - DNA, 433 bp, Homo sapiens
  I.2815 (AI681202)
  misc_feature (387)..(387): n is a, c, g, or t
  misc_feature (409)..(409): n is a, c, g, or t
gccaagtcatctttagaaattttgttttcacaatattttggtttggaggatgtttttgcacttcactgcatcagaacagatgaacgaaattatggaatatcacatgtaggccctgaagaagaagaattttggaagtttagcaattatttgctacaccttttcccacttaccactgaaaagtattcttcccgggtctgcttcatatgatcaggtttgagaaattagctgattatctcatttcgttgctgaggtagcattatgtttatgccattcataaactaatttctatgatctaaatatctgtataatttcctgattactatataatcactaacacatagcggggtttcttctcaaacagtaaattaacacgattacacatcacanattccaacatgcataatagctnttccccctggtctttatgtatccg

SEQ ID NO: 2816 - DNA, 512 bp, Homo sapiens
  I.2816 (AI681137)
tttttcaacatttatctttttatttttaagggtacagttaggtggcattaagtacattgacgttgttgtacagccataaccctatctccagaatattccgacttttttgttgttgttgtacatctataaacttcccatagaatattctttgtgaaaaggtagaatttcacagagttgatgaaatataaattaaggagttgaaggatcttacaaagtgggatttttgaaatagataacttattgctccattaacatgagcattcagggctcagtgttgttcatggttgtgcctgattctaatttcccttggtggtaaaggcctgcatgggacatagatataactggtcacctgctcataacaaaaggaagattgaagggagtgagaactgtgggtaggctagcatgcagtctatcctagtttccttcttctctatgcaccaggtatcatcttatctctagcttcttttttcctctcaccctccaattcacactaccctatccaagctatgtct

SEQ ID NO: 2817 - DNA, 434 bp, Homo sapiens
  I.2817 (AI679923)
gttttgtttttgagatggagtctcgctctgccacccaggttggagtagagtggtgcacgcaatctcggctcactgcaacctccgcctcccaggttcaagtgattcttctgcctcagcctcccgagtagctgggattacaggcgtgtagcaccacgcccagctaatttttgtatttttagtagagacggggtttcaccatgttggtcaggctggtctcgaactcctgacctcatgatctacccgctttggcctcccaaagtgctgggattataggtgtaagccacagcgcccagccagggcccatgtttttaaattttttaaggagcttgttgaggtctgcaaaagcttctgctaaacctttcactgtgaattttcttggaggttcttcctttttgtctcctgcagtttccttttctcttgcaccttcttcagct

SEQ ID NO: 2818 - DNA, 463 bp, Homo sapiens
  I.2818 (AI679794)
ttttttttttttaaaaaaagtgttttcccctttattacagaactgatacatatacattattgaacattaaaaaatacaaagaagacattttaagaatgcaattaccaaacattttcccatccaaagataatcacttagttttttggtgtatccttctccccgccacccaactcttagtttgcaaaatttcaaacccacagcaaagccacattgatagtacaatgaacatttgtcgaccagtcacctagagtcaccaagtgttgtcattttgctacatttgacttgtctctttctttctttatattcatatgttttatatttttccacttagtcactggaaattcagtggcagacactgtggtaattaatatctaaaaacttcagtatgtttgctaagaacaagaatgttctcctacatagccacagtacaaatgtctcactctgaaaatgaagccgggcacag

SEQ ID NO: 2819 - DNA, 364 bp, Homo sapiens
  I.2819 (AI679729)
ttttttttttttttttttttttgggctctggggtttttattagtgtttcctgggacccatcaaacaaataaacatattttgaaaaatataattctttgacaaaacaggaatagcaggaatagtttgaatttaacatagcttaaagggaaagatttctgattttttttaaatagtagcaatagagttgtttccacaaattgtcaacccaggagccagatggaaagaaaaaacaagaattatgcagataactacagaaagattaatcccaatttagttaaacttgtgaaggcttgtacgtttcagaggttcataagacacagtctcaacaggagttttttttaataaatgctctatctctagttcc

SEQ ID NO: 2820 - DNA, 406 bp, Homo sapiens
  I.2820 (AI679340)
atctatttgtctttgaatctaacatgtttcctttataggcagcatgattggatcttatttttatttatcttatccagaaatctctgcctttaaatggggtgttatataccatttatattttctgtgatcatcaatgtttataaaagctttaatcagtgtacttttcagtaacagtatatatatgaatcttccaatagtatatactttacttctttttcatagccttttcaggctgggattggcatgtattttcaatatatgttataaaccccacaatacatttgatgttatttttgtataaagtcaatatcctttttagagacttacataaagaaaaatatcttgtatacatatccaagtagtcaacatttcctgttcttcatccccctgagtagatccagatttc

SEQ ID NO: 2821 - DNA, 470 bp, Homo sapiens
  I.2821 (AI679294)
tgagatacagtctcgctctgtcgtccaggccggagtgcagtggcgtgatctcggctcactgcaacctccatctcccgggttcaagcgattctcctgcctcagcctcccgagtagctgggactacaggcgcccgccaccacacctggctaatttttgtgtttttagtagagatggggtttcaccatattggtcaggctggtctggaactcccgacctcagttgatctgcccacctcggcctcccaaagtgctgggattacaggtgcccgccaccacgcctggctaatttttgaatttttagtagagatggggtttaaccatattgttcaggctggtctggaactcctgacctcaggtgatctgcctgcctcggcctcccaaagtgctgggattacaggtgtgagccaccacgcccggccgaaactgcctttttctattgtgaccaccccagtcctgtgctgtcagggatgg

SEQ ID NO: 2822 - DNA, 438 bp, Homo sapiens
  I.2822 (AI679230)
gatcaggaaggaaatttattgcacaagaatgggaagaaattatcaagttaactgatgtgtaagggaggtgtacctggaagatactctttaataggcaatgcatgtgtggggatatttttaagttttatcggtacaaatgaaatatattgaacacaaatcgagcaaatatgacttggtcgttaacatccctctgattaaacaggagtgctgctatgagaacgggctgtgccattctgcaggcacacgagagtcgctgggttttagggtagtctctgtggagaatggtgactggaccacgtgggagaggggcttgaggcaggaaggtgagcagactccagagttcaagagatgtttgcatacagtgccctcttgtttccccttacagtgtggctgtggccagtattgagaaccaagtgttcaggaactcatgctggcctg

SEQ ID NO: 2823 - DNA, 146 bp, Homo sapiens
  I.2823 (AI678738)
cggggacctctctctagccccaccatgacgtagacacaggagcccttcttttgagatggagtctcgctctgtcacccaggctgcagtgcagtggtgctatcttggctcattgcaacctccgcctcccgggttcaacaattctcctg

SEQ ID NO: 2824 - DNA, 383 bp, Homo sapiens
  I.2824 (AI678198)
acaagcattaatgagagtttattgctattaatttcactcattacatgtaccatgtgtgccatctgcatgttagttcatgaatttccaccaggctcacattatcttcaaaattcatttaccattttaaataatataatacctcaagagcatgctgtattctgtctttgtgtcttccagcatgagaaaggctgctggcaatgctggaagtggtagtctcacaaatctgctcacccaaaagacagtcttctggtaataaagtttctgcccagagccggcacacaccatcatgacatgaagttaacaacacattacagacagaacccctaacaacaaagagaaataaataaaaggttaatgtgaatatcaatcccattaactaatta

SEQ ID NO: 2825 - DNA, 122 bp, Homo sapiens
  I.2825 (AI677797)
ttttttttttttttttttttttttttttttttttttttttttttttttttttttttttttttttttttttttttggggggggaaaaccctttttttccaaaaaaaaaaaccccccaaaaaac

SEQ ID NO: 2826 - DNA, 449 bp, Homo sapiens
  I.2826 (AI677645)
tagagatggggtttctccatgttggtcaggctggtctcaaactccatctctactaaaaatacaaaaaatagccgggtgtggtggcgggagcctgtagtcccagctactcgggaggctgaggcaggagaatggcgtgaacccaggaggcagagcttgcaggaaaccaagatagtgccactgcactccagtctgggagacagagtgggactccgtctcaaaaaaaaaaaaaaaaaaaaaaaaaaaaaaaaaaaaccctccttgttttaatatccaataagtggggcgtaaaaagaacatatagaaaaattggctgtgtgttaggaactaagctgttgctcaagaaatgatagatcttgttattatcaggacacataagaaagtaaatcaataatagaggaataaattagctagcctttaaaactgagggaatattttaatctcattttgtt

SEQ ID NO: 2827 - DNA, 475 bp, Homo sapiens
  I.2827 (AI675758)
tgattttccaagattattcatttcaatataagctattcattctatgactcttttatacaataacattaacaaatctgaaaataaaagttcctcaatacagtcaaatgtcctttaaccatgggaatacattgtgagaaatgcattgttaggtgattttgtcatgcaaacatcatagagtgtacttccacaaacctagatggtatagcctactacatacctaggctatatatagtatggcctattgcacctgggctacaaacttatacggcatggtattgtactgaatactgtaggcaactgtaccacaatggtaaatatttgtgtatctgaacatatctaaacatagaaaaggtacagtaaacatacagtatcataatcttataggaccaccatcatataggaagtccctcgttaaccaaaacgttatgtagcagatgactgtacttcacatgtctaattttgttttagaatgctg

SEQ ID NO: 2828 - DNA, 364 bp, Homo sapiens
  I.2828 (AI675718)
atatattaaacaaaaagcttttaatcacttaaacacctaagtacaaaaacataaattctactcccagtgtgaacccttcttttgttcacaaatcaaactaggacaaagtactgtgatttatccttaagcctcaatgtatatttgcaatttggatttctgcagctagtttttttcctactctggtattacctttgactaactactatattttcaagttttttatgaacaagtaaaattcacaaaatttgttcttccatttgtcccaaatagattattatgggtctagcatctatctcaaaaactcttcttcaaaggcctataaactaaacagtttagatttaaaaaattaacttttataaacatc

SEQ ID NO: 2829 - DNA, 450 bp, Homo sapiens
  I.2829 (AI675607)
catgatttctttttatttgatgaagcattgattttccagagaaggaaatttaaggctcagagagggtaagacacatgtccaaggccacacagccaggaagtggtggagctggcatttgaacccaggccgtgcgtctgcagagccagagaaaggcccggagcttccctccccaggtccccaggcggcctgcgggcccctccacagcccagtgatccttcaagcactcccaagcccagcctccgcctgcagcccctccacagcctgtccagggcagggaagggccacctcacaggccacggcctcttccgcgcagtgcctgggggccggtcttggggacagtggcgtggtgcccctgcctctcccgtcttccacacagacaactgcgaaggtgagaagggtgagcggcgtctagacggcgctgtccacccagcggcaataaaatcggatgtt

SEQ ID NO: 2830 - DNA, 469 bp, Homo sapiens
  I.2830 (AI675602)
ttttcattttcagtactgacaaggggttttattttatatggttgtcataataaggcaaattcattttgtacactttatattttcaaaccccagcaaactctaaaagggacataaaataacttaaaaattgggaaaagatgggcatgtgtatgatcatgatattcatcccctgccccagaacaaatgggaggaacacattgcccaaaactcacgtctggagctctttcaacatgtctccctgatgaccctggacagcatcatgaagtgtgccttcagccaccagggcagcatccagttggacaggtcagtggtaaaaggaaggtaattgtttgccaataactgtgtcacccactaacatgttgttccatcttccctattccagtaccctggactcatacctgaaagcagtgttcaaccttagcaaaatctccaaccagcgcatgaacaattttctacatcacaacgacct

SEQ ID NO: 2831 - DNA, 325 bp, Homo sapiens
  I.2831 (AI675585)
ttttatctttcaagattttgagatatttatttggagggatagctgagcaaaaatacagtttaaacggtccacttgaatatcagcagtgaattgaccattataaacagaatgacaagtgacatgattattaataagtaaaatctaattttacatcttggtaactttgcaaacagcttcttgacatttgccttttactgttccttgtgctttccattatttcactttatccttatccacctctgagatgggcagaagaggtactattttgtttgactgagaacttcatacagtcaggagcttcatacaatcatttgcttctgtgtct

SEQ ID NO: 2832 - DNA, 226 bp, Homo sapiens
  I.2832 (AI674968)
ttataaagtaaagacatttatttctcacatttctggaggctggaaagtccaatgtcaaggtgctggcatctggtgagggccttcttgccagtgctcggcaaggggaagcactctctaaacgttagcaaataccatggtaggacacaaggcccctgactctccgctttcagcttactgaagatcctcaaaaccaacagcacacagcttccagcgcatgctcctttcc

SEQ ID NO: 2833 - DNA, 386 bp, Homo sapiens
  I.2833 (AI674741)
ttttttctttctatttattcatcgaagaaaaatcatttggcgaatagttttccccttataataaaactcgataaattcatttttatcttattaaggacaaaaaaatgatagaccttatttgaaaatggaagaccagacctgtaacagatcatcggtgaggagatgacatgggaaggaggccatcaggcagtgctgcctttgcccataactcaaatgcgatgcattcaggctgcaggtaccacttcatgctagggctctgcatttacagttagaggagctttctgatgcacttgttaaccaggatttatttagttcctctcttctcagcatcagaaacagggcctgtgtctggtcatggtctgtctcctccaaagccttcacagcag

SEQ ID NO: 2834 - DNA, 483 bp, Homo sapiens
  I.2834 (AI674699)
tttttttttttgaagcgcttaaatctttaatgtttttggacaacacagtctatatgttttctgcataatgtatcatttctttaaactatagtattaaaaataatttcaaattgtaatgaaaagtcatttggctttaaaaccacccaggaagaggatataaaatgcgtataccaaaagactatgatgcggcttccagtgtttttctgatatagatcataataatttaaaaaggcttttgtcaggctgtctgaatacatcaaatactttctcatttctgtgtcggctgtgaagctctaactatagtggcttctctagcaggtattctccgcacaactgtgccaaatcgttctgaggacacccagattctcctccttctcaaaacagacattcctgactgggtcctagggcagggagaggggcgttggacccctactgccctctgggttctccgagcaccaggacttgttgctccggcgggaactc

SEQ ID NO: 2835 - DNA, 136 bp, Homo sapiens
  I.2835 (AI674514)
gcggccccgggggggccggcgggggtctcgggctcgggtcccaggaagggtcgcgggcgcgggtcggagcgagagccccggccgccccgcgctctgcccagctcccgccgcctcctagcctcgcggcccgcccggc

SEQ ID NO: 2836 - DNA, 421 bp, Homo sapiens
  I.2836 (AI674428)
  misc_feature (383)..(383): n is a, c, g, or t
gttgaatatctcatgtaatttattgaacattgtactgaaagtgaaaaacagaatggttgtatgggaactcgaagcactatttccacttctacaaaatgcgtatctctcttgcatcattgtaaagtggaagtgtcataaactacccatcatccattggagacctctgtattttacacaactgacactgacctgggaaatcccacataaccacagcataagggaagcttctcagagtcctcagcagctcaggttaattggtctctttcagccaggtatcattaggagccgcttgccgcagagccagaaaggtgaggaagcgagaccagtctgggctccgggatgcttggtgcagccccgggtccactcctggatgccacggtcancctctctggtatccagagaatgctctgcccttcagggg

SEQ ID NO: 2837 - DNA, 253 bp, Homo sapiens
  I.2837 (AI674379)
tttttaattgataaataatttattgggatttgtcgtgaatccatctcaagccacctcctagatgaaaacacaccccaaagactgacttcttcagcttttcccatgtcatgtcagaaattcttgccattttgaaaggaaaacacatagtggcctatacccacatcttcccaggtgtggaaaagaccagatatttgctgaacttctatgtaggctctatcctcaggaagatgtaactgggtgaggtggcacgcat

SEQ ID NO: 2838 - DNA, 486 bp, Homo sapiens
  I.2838 (AI674115)
tttattcttagaagacatttttattataagtggattaacttacttggttttgtctctatctcaaatacgtaggtgagaaaacacaggtaattatactttgacaattacagtagccacaaaaagttagtgttttcttcaatttatggtactgaagagtatctttgtaattaaaatgtgaagcaatccattttcatgtcagttacccttgattgccaggttggcctataaatctatattgcttggagtgctggcttttcattacttaatagtttgcattcagtggaggaggatatccaccctctaagtaacagagaatggaactcatctttcacttctgaatgagctcctcactgtaattgatggcatttcctgaaatggctgcgatcattagggctccagtgacatgaaataggatgtttctcttctttcagctagttgtacgaaagtttccagtggatggatgtgtcacagagaaaggggcactgg

SEQ ID NO: 2839 - DNA, 448 bp, Homo sapiens
  I.2839 (AI674083)
ttttttttgactttatttagatctttatttatgtctttgttatgataacagtaaagttgcagaaaacataaaacatccaaactattttaaacagaacaattattcaattgttaacaaattatgggaagagttggaggagcaatgtttaggctagatctccagaaatggctctttggacaaaatcacattactgacctggtgaacttctacccttaccataataagaaacttggtacagaggacatccacaatctcagcccctggctttatgttcactacacttttgccattttgcctggatcagcaaggtgataccataaatgttggcttcaggagaacaccagctttactgcgtgcgattcaggttcagaaagctgttttgagaattcttgactccagagccaaactggttcttccacatcttctagttgttcactctctttctgag

SEQ ID NO: 2840 - DNA, 393 bp, Homo sapiens
  I.2840 (AI673731)
ggagacggagtcttgctctgtcaccaaggctggagtgcagtggcacgatcttggcttactgcaacctctgcctcctgggttcaagcaattctcctgcctcagcctcccaagtagctgggactacaggcgcacgcccccacacccagctaatttttgtatttctagtagagacggggtttcaccatgttggccaggatggtctcaatcttttgacctcatgatccacccgcctcggcgtcccaaagcgttgggattacaggcatgagccaccgcacccggcctcacttcaagaattttttacaagcacagaaactatatctcagtgtatgataactgttactataatactatattgtattataaatatacaagctcatttgagtgtgtgatagc

SEQ ID NO: 2841 - DNA, 439 bp, Homo sapiens
  I.2841 (AI673382)
tttttttttttttttttttggcatatacatatatctgtttaataactttagctacattatatgctttactaagcattcaagtcctttcattttatactcaatttatactctcatttctcaatacaagcaataaagtttcattagcatcctggtatctcataattatcaataattactatttattaagtttatagtctatactaccttgttggtagacacaaactattgagacaatttatagtagggtggagaacacttagaaataatgttttgccaataaatctatggaggattcatcacaatggaggaaattaattggaaggttcagaggaacattcagttctttatctggatggagtatggtagcaaaggaaattgttcatgttaataatcgatacagagcctttgcttttaaatgttatgttattgtggattatgc

SEQ ID NO: 2842 - DNA, 780 bp, Homo sapiens
  I.2842 (AI673244)
  misc_feature (580)..(580): n is a, c, g, or t
  misc_feature (604)..(604): n is a, c, g, or t
  misc_feature (664)..(664): n is a, c, g, or t
  misc_feature (668)..(668): n is a, c, g, or t
  misc_feature (676)..(676): n is a, c, g, or t
gggggggcaagcaagatggaacaataacttttattaaataatgactttgtaccaaaaacattactgacgttattacttgatccatataacaaataattttgggagtttagttccgccactaaactgtaaaagcattattcccattttatgcctgaggagtcagagctacagatctaaaaagtaattcgcccagtgtccacaggatttcaactcagatctacacaagaaaagctcatgttcattcttgtatgggcaagtgtgcaaggaagtaaagtaatttaagagacaagaaagatgagaggaagagagcatcgaggaaaaattatgtagcaccataatatcctaagtctttcaaaaaaccactttttttcaaattatattagccaacaatgttttaatatactttatagacaataagtttttttacaatattttatttactcatctacccataaaacttttctaagaattcaacaataaaccaacattaaaagctttctagcataaatcaccaatttccaagataaccacaggccatctttaaaagaacattattattattattattattattatttgnaaaagggttgggggtatgtcttanaaaagctgttattatatatgatgacatttttataggtgaatgatattgtgcctagatttntcanaataaggngaggggcagagatcatgggttaggtcgagttgttactgtgagctgatgcaaataaacaaagatgttactcctattttaatagaaaaattataacctgtttgccc

SEQ ID NO: 2843 - DNA, 360 bp, Homo sapiens
  I.2843 (AI672934)
tttttttttttttttacctagagcatgtttctcgtgctccattcccctgcatccgtggaaatcacatcgcacaagtaacttccatcaaaaccagcacgtgtgagagacaaacatctgggttcccaggcacaccccacaccctgagtaaaccaggacggacaggccgaggctccgctgctgcctttctggcacacgcaggggagcagtgggcagcggcttactccctctccgaaaaaccgtccttctccccatgccctgcggcaccgtgagtgcattgctcatcccgctcgctgagctcccagcctgtgccatggaacctgctcaactgcggagcctgggatgaggctgagcctgttgctc

SEQ ID NO: 2844 - DNA, 273 bp, Homo sapiens
  I.2844 (AI672177)
  misc_feature (207)..(207): n is a, c, g, or t
aggctatttcatgaagtttcaatttattcacactttttaaagcgcactgtgttgcagcaggactcatacctgctgtgtagctcagagtttgtgagtttcctcctggacttggagacagctcacgtcagtccagccccggccaggcgatggacaaggccggctctcctaggtggccctaatatccgactctctagctcactccactcnaagcaccccgggacggcccctcttgtggcgggggagccccctgacgtgggcgctcctgggtctgtg

SEQ ID NO: 2845 - DNA, 470 bp, Homo sapiens
  I.2845 (AI671562)
tttccttgccttaggtatttattgccacttcttggttgaattccagtgttctttcttagatgatctattcgaagtgtaataatatacttgctattttggttcttctttgtggaggaggcaagtaccagatgcctctagtcagccatcttgaagactctctcttcctgattccttgttgagctatgttgacagatatttcatgccagtctttctgctcttcaatcacccaatgttgagactctggacatctcttgctgcagtcacctaagctaagtaaccagaggatgaccaagtcttttgcttttggagcagaagcaatgtcaaatctctccattctaccaaaatgttgagcttttcagaatcactttcttacaagcttaggaagctcttcagagtgcaattcaccatattcagtgctggatgctgaaggcaatgtgctcgtgatcgtgggaccttcctgttatgatgct

SEQ ID NO: 2846 - DNA, 539 bp, Homo sapiens
  I.2846 (AI671124)
aagtactgttgattgtttaagaaatgtaagcattccaattcacagtgatcttcgacactgagcagatggcacctagcatctaaatctattgctatttacacataataataaaataaattttgatgagttttagttctgtggtggagatggagtcacaatttctgaagagttctacaaattttgacaagcataaatcatgttttgtttattcgcgggttaaattggtattatacagatctaaggatgggtctaaatgtgtaaacatccactttttcagtgtggtttcagcttctaaagctgctagaattgaagagtgaccactgcaataatcgtctattatagaaattttggagataagattataaagaacagaatgatcttgaaatgtctcatcttctgtgtaatatctggctctatttagttcctttagcatttcaagtaactattaagaaaaaaacaaagcagactgtttaaacaatgggatgaatctagattccaaattcatatgaaactcaataataaatcccaagcattagtcc

SEQ ID NO: 2847 - DNA, 137 bp, Homo sapiens
  I.2847 (AI668996)
ttttttttttttttttttttttttaagcttggaaattttttaattcccccttcctttttaaaaaaccataccccggtttttttggggttaaggggggagctctttaaaagggaaacctaaaaaaaaaaaaaaaaaaa

SEQ ID NO: 2848 - DNA, 435 bp, Homo sapiens
  I.2848 (AI668994)
agtagagatggggtttcaccatgttggccaggctggtcttgaactcccaacctcccgtgatccacctgcctcggcctcccaaagtgctgggattacaagcgtaagccaccacgcccagccttccttgttttcttaagtgtttgcacttgctccacaacaaaattaagttcctttcaggcaaggcaaccatgacatttacttcctgcccctatttctaggagagtgctatgtatgaaacattcagtatatactttcagccaggcacagtgacacctgcctgtaatcccagctactagggaacctgaggtgggaggatcacttaagctcagaagttcgagtccagcctgggcaataaggccccatctcccaaaaacacacacacacacacttcttagctaatttattaaaaatccctggcaacatctaaagaacacg

SEQ ID NO: 2849 - DNA, 527 bp, Homo sapiens
  I.2849 (AI668709)
ttgcaatatgaaacttatgaattgtttatttctggaattttccatttaatattttcagaccatagggaaagcaaaaccacaaataaagggactactatatgttgacccacatgaaggaacttatttcataaaaataaaaggagcaaaatatttaaaaaatatgtataagggtgtttattacaatattatttgtcgtgacaaaaaactggaaacaaacttattatggactattctgcagttatttaaaatcactatcaaatgacaatatccatcagttactaagagaggggaaagcaagtattagagtaatatgtttgcatgattctgttttttaaaaaaagtacaccatcacaatcagtgtgaacatttattcattcaacaaatatttattgagtgcctactatatgccagacactattttatgttctagtaatagagacaaacaagataattaagtattttgaatgaatacaatatttagaatgttgaaaagtgaaaaataaagcagagaagagcagaaaagtgct

SEQ ID NO: 2850 - DNA, 564 bp, Homo sapiens
  I.2850 (AI668693)
  misc_feature (549)..(549): n is a, c, g, or t
  misc_feature (555)..(555): n is a, c, g, or t
taaaggcgagttcgggtattttattttgccttaagagtcaacacaatttctaacattctgccattagaagtaatacaatttctaatatcctgcaatgagcattgctaaaagagtcaggagaaccatgagaaatatgcatatgaaaataaaccatgtgacaggggacatagaatccaaagagattccagcagagaatcaaagtgcacgctcacctactctgacctctccccataaaagatgagagtcatatacaaatagatgcttgtattctgtacagtcctatttaaaaatgcaccacataaaataagaataagacaggaacacactcatgaccacataaaatacagagaatgtgagacgtgcttcttgctgagatacacaacaatcaaatttagtatcaaagtgagctggactgataagaggctaagacacaactgaggatcgatggctgaaagaaagctatagacaaagaaaaaaatgttcactcgctgttgaagttataccaagaaccatgaactgtcatcagtctcatatattagcctttcattntgactntcagcagat

SEQ ID NO: 2851 - DNA, 404 bp, Homo sapiens
  I.2851 (AI668672)
  misc_feature (172)..(172): n is a, c, g, or t
tttttttttttttccattatgctggactctgtaatgaaagtctaggaagggaatgtaacatgaaatcattccttccgccttagcagacagatggagagagacattccagtttgtttccagccttttgtctttggagcatttttggcatttccttcaggaaactggaggttgngacctaaggtttccttagtgaacacatttctgtttcccacagttaaccttacccagaaatgacatctactctattaggggaggtttatcttcatgtcccaactgtgtcctgtgcatatacaatgacacttgaaagcacaaattctgaaagtggcgaaaagattagagagcccaacatgccaaaacactttaatcccccaaaagatgacaataatcaaaaacaagaattaact

SEQ ID NO: 2852 - DNA, 622 bp, Homo sapiens
  I.2852 (AI668656)
atatttaacagactttaattgagcaaagaatgatagactcagagagactccagtgcagccacgtgatggatgaagagttacagacagaaaaaggaaagtgacatacagaaaacggaaatgagtaacagaaacagccagattggttacagcacagaatttaccttatttgaacagtttgaactgacccctttaattggccaaaacttggtgatcggcacaagagtagactcagtctgttgacaactccatttaggttatagttcactatgtacagagaaacctttaggctgaacttaaaatatttaaggaggcagctttaagttaaacttgatttaacagttgagattcagtaatgaataaatcagaaaacattgtacatattttaaaataaaatgttaatgtggaacatataaaacattcttcttaaaattcagaagtataactaaatgtttattgtgaataaaaaacgtgtcttagtccattcctgctgctatatcaaaatacctgagactgggtaatttataaaaaacagaaatttattcctcacagttctaggggcttggaagtacaatatcagtgtcaaccaattcaatgttttatgagcacctgtcccatatatggt

SEQ ID NO: 2853 - DNA, 498 bp, Homo sapiens
  I.2853 (AI668649)
aacttctcaatatttatttattcattcagctggatgtgcatatctttgaaaagggtggacttataaagaaatacatgaagtttacaatctgcagctcaatctatcaaagaaaatggtggcttttagtaattaaataaccattagttcctaccattttaatgtgttcagggtaggaaacagaatagacaattgtgactgtaatgaggtccatgaacgtttagaatatgattaatccattttccacactgacccatggaaacaataacagctaatgtggccccactctcacctgtgaatcgtcttattcccacaggaaacatcaaacctccccaaatatcatcctctaggcagaggtcacttaactattaaatttacaaggcaggtgcaaaaaaaaaaaaaaggtggggggaccgatgaaataaaggaaaaattctatttactaaaattcaagtagctaaactatcttttaggtgaagtcagtgaaaaccttcacacatt

SEQ ID NO: 2854 - DNA, 607 bp, Homo sapiens
  I.2854 (AI668648)
tttccaaaacataatggctcaaatacgacagaagtttatttcttgctttaagggtggatgttcctggttggctgacagtttttctccatacatttagggtcccagtgccttctaatttatggctccccaggttatacagcattgttcactgtatgctatttgtatttacaaatctctgcttccagcatgttagcttataagcgtagtgagggcatagaattgccagactcagcaaataaaaacataggaagcccagttaaatttggatttcaggttatcaacacatttagtgtacattttagtataagtatattccaaatatcacatggtatattcagtataagtatcacataaacatatttatactaaaaattatgtgttttttatctgaaattccaattcaattgagtcctgtgttttctctggcaaccctttgagggtagggattacatctatctcagttacgactgaatccccagaatctaaaacagtacctgtctactataagatcaagaagtatctcaataatatttaatgaacaactgattttctgtcagaacccttattggcaaagaatactgattaatactaattaatactaatactg

SEQ ID NO: 2855 - DNA, 561 bp, Homo sapiens
  I.2855 (AI668592)
tttggccctaaacacaaatttaccatttccagctgttgctggaacaaaaggaaacaatagtcagaggataaatgtaagaagaaacaatgcaaaaacatgtggaaagaagttgctggtaatgcatcacagaagtaggacatggccacagcagcggggccatctccgcttcccttctttgtctctcccttcagacagatcatgaacaagaacttttaactagcattaattggacatttatgtaaagcaatcggggtggggggaattccgtggagacacacaagcaactcttagttatggcacaaacagtaaggagatctgtggcccttaaagaaacagatgcctgttgccttttcacggagggagacaaggaggcagagaagggggttagtgctacaagagaattctggcactcttggttgttgtcgttaatgaagatgaagacatagtaagtaaaaacaagaaaagaagttataaaataagcttgctttatcttttctagaaacggatgacaaaactcaatgcaacaatgccaggcatatcaaaaggggtccacattcaagg

SEQ ID NO: 2856 - DNA, 608 bp, Homo sapiens
  I.2856 (AI660712)
  misc_feature (567)..(567): n is a, c, g, or t
gcggccgccgtgttggacagggcagctgtggagcatacagcagaaggatcaagaaacactacttggatttagccactgtgagcaaagactcggtgaggagaggtttagtgagaggtggagggaaacagccagattgctccagattgagaaatgttgaagaggtgaggaagcagagataataaacttcactctttcaagaaacttggcagtaaaggagggagaactttggcaatgaagggggtgatagccagactagggtggggttggctgaattgagcaagtcccaaacatgctttacattgagatgaatatgtgggtagggaacaggtgaggatatgcgaggttgggaaaacagtttccttcctcagttaccaagcaagcctgaactaaataacatgaaccgataaaaagatgtctaggaacatattaatgatttaactcttaacaatttattaacatattaattatttaactcttaacaactctaaagctaattacattgcccatcatcaatcatacatacattaatctcatgtttgctgaaatgcagcaagaatagaagatagntcttgagggtgtttataaatcagtacatcttccggttactt

SEQ ID NO: 2857 - DNA, 432 bp, Homo sapiens
  I.2857 (AI660151)
  misc_feature (325)..(325): n is a, c, g, or t
  misc_feature (418)..(418): n is a, c, g, or t
gcggccgcccgccaggcgtggtgcttaatgacactcggaatgctggcctctacttacgtgctcagctggaatcggacaaagtttttgatgttgtaaaaaatacccttgccttcctccactgcattcctgcaagagaagagagccatttactcacggagcgggcctgcgggagggctggaccagtgcatcggttgctgcaaggggcagtggtgactcgcccagattgatgttatacttgggcccctgctggttccccttgctggcattcttggggacacatttgtaggagacgttggtgttctaacaggtgcccctcggccactgngaactgatccttgagccatgttcgcccttctgtgccaagggtacacctgatgcctccaatcagaccatgaattactctccggccgagcccagngggccccatccctg

SEQ ID NO: 2858 - DNA, 501 bp, Homo sapiens
  I.2858 (AI660068)
  misc_feature (443)..(443): n is a, c, g, or t
  misc_feature (480)..(480): n is a, c, g, or t
gcggccgcacgcccaggctgcctttcaagccgcagagcagtcctgcgggcagctccctgtccacccagttccgtccagcatgagaaagaggcgggacctagaagcatgaggggccagtggctgtgcccgcccgtcactgccccagtgggcccagcagccctgtgaggcgacagacgccaacacgggggccaggcttcgctcagcccctgtggtaactccgactgccaatgcggacagcggcccggggcgaggggagggcctgacctgcagggccggcaggtacttgggcagctcctgcttgagctcgatgggcaacagggcaggggagtcgggcacatagtcgccctctgtcagggcgctgctctgcggcgttccctcacccacttcttcctctgcttcttcactctccccggaatctcggtcgaaccgtgactctggaactnggaaagttgaacctaattacgaagctaggagtaagtnaggatcatgaacctcctcctg

SEQ ID NO: 2859 - DNA, 378 bp, Homo sapiens
  I.2859 (AI659670)
ttttttttttagaaacacttgttctttaataaactgagggaagtaatattgtcacgtgatagtttgaatgtatgttcccacccaatgtcatgaggaactgcaatccccagtgttggaggtgagtcctgatgggagttgtttgggtcagggggacctatggcttgtttctctcatggcttgttgctgtctttgtgataatcagtgagttctagtgagctgcaccttcctacaccactctctctgtctcactcctgctttcgccatgtgactgcctgctccccgttcaccttccgctatgattgaaagcttcctgaggccttcaccagaagctgagcagatgctggtgccatgcttcctttacaggcagatgccaggcag

SEQ ID NO: 2860 - DNA, 222 bp, Homo sapiens
  I.2860 (AI659629)
gtcaagaatatatatgtttattttaccctacatggtccatttccaaaggtctttcccttaagaggagattaagaaggacatatgcctcatcatattaccaagattcaaccttagcatctggccaccagctttaggaataattttcagtagaggataaatgtaaacagtactttactgggggttaggggccctgtatttcaactgacactgtcactaactagt

SEQ ID NO: 2861 - DNA, 220 bp, Homo sapiens
  I.2861 (AI658519)
ttttgacaaggaagagagtgtttattcaccatgtcatgttcacaactgctgatgggctgcccaatcaggtttgtgtgggcatcctgatagtagtgccagggtaagtcccagagcaaattttagagatatccaatggatctgaaacagggtgctgtcaggctacacttgtacacagatggctggctcagaaatagccagagcacaaagacaggctgatgga

SEQ ID NO: 2862 - DNA, 243 bp, Homo sapiens
  I.2862 (AI657179)
ctaataaggccaactggagttggccagaacaggcttgctgaagtcataggccaaatttctaccatgtttcaaactaactcccccaaaatgtgcacatgcgatccatgaagtagcgttaaacaaaactgtgcatgcctgaggatgtcccagacctcctctttccttccacagatcacctactaatcccagaggccacctcctaaaccttttctaataaaaagattgcatgaaagccagcacacg

SEQ ID NO: 2863 - DNA, 450 bp, Homo sapiens
  I.2863 (AI657063)
  misc_feature (324)..(324): n is a, c, g, or t
  misc_feature (363)..(363): n is a, c, g, or t
tttttttttttttttttgtgttttaagctacatttattatagaagagtcaaaatgtttaaaaaaacaaaattataaagtaaaaagttacagtaagctaaggtaaatttattattaaagaaaaagaaatattttcaataattgtagggtattctaagtgtacagtatttataaagtctgcagtagtatacaatagtgttttaggccttcacgttcattcaccactaattgactcacccacagcaactttttggcctgaaaactccattcatggtaatttccctataagggaccattttttatcttttacactggatttttgcagnatcttctctatatttagagacacaaatacttaccattgngttacagttgcctacactattcagtacagtaacctgccatacaggtttgtagcctgaggacaaaaggctccaccatggagccttagg

SEQ ID NO: 2864 - DNA, 402 bp, Homo sapiens
  I.2864 (AI656741)
ttttttttttttttttttttttttttttttttttttttttttttttttttttttttaattttgggaaggaaaggggaaaaagccctttttttcaattccaggagtttccccccccccccgtccattaacccaaggggttttcccctcccccccaagggccccaatttccccttcttcaaaagccaaaatcccctccacctttgtttctagcccacccccaccttcccccccccgggcggaaccccccccttttaaagtccaaattccaaaagggcctttaccaaaaagcccaccggaatgggggccccacctattccccctaccagttccaccggggccattttttcctccaccgggtcccccgggaccaaaaaggccaggggaaaaaaaaaaaaacccccc

SEQ ID NO: 2865 - DNA, 566 bp, Homo sapiens
  I.2865 (AI656652)
ttttttaaaagggacttttattcctacttcgagaccaatattgaagcaccttcatttttggaaggactggggacgataatgaatgacaggcttactgaaatcctcttggaattaatgcagtaaaatgcttccatctttatccagaggtgagtcataatttgagacaaataatatatttatagagtgatcctctttatcagataaaaatagtaagcacaatctttttaagaaagggaggggacctttcacgtttattagttgtgtgtatccttatagttgagcagaatatcataagttcctctcttaaaatttaaagaccccagaaactgttctctcatgaactcaaagaatgaactttagtgtgtaaataatagccagggtaatagacaagccaaatggaaaagagagtcatgggagccaaaaaggttctaaatggggatgggcttttggctttggatacctcgtaggtgggcacgatgaccacgtgaagggacagtgagagtgatgagcttgaatagttatcttggacttacgttagtaaagtaagatttatttagtcacacagc

SEQ ID NO: 2866 - DNA, 374 bp, Homo sapiens
  I.2866 (AI656634)
ttttttttttttttttttttgttgttcacattttattaaaaaaaaaagttaggaaaagtgagactggggcattgtccgtgtagcaggggggaagcactccagcccatgctctggccaaacccacttcaagccttacatgcatgctgcctaccaaattcaggaacaggaccccaaattccctttaaggccaaccagattcccccgacaccccatcaagcttttcctgccctgttcatctgcaggtgaaccccgtatcctgcccaccccagaatatgccaatttttattatctaaaatggagcatacagactggtgccccgcagagaagcccgggaactccaggtcatagctgaagctgcagtcagacccgcaggc

SEQ ID NO: 2867 - DNA, 446 bp, Homo sapiens
  I.2867 (AI656617)
gtcttttttctcttgttctgattttcttagtttcatcttcgtaactgtctgaatttttgcaattgcatcttcaagacaaaatatcttattttgttctccattgttcttttgtacttttctagtcttatttttcgatgcaatatcctctcaaattttcaagctaattgcataactaggttcttttaacattctcctttttctgaattatctgtttcttctaaagtaaatgttcttgttttagttattttgtgctgctggttttatttatgttttttgttatctttggctgtcttcttatgaaaaagaatagtggactgggttgattttctaggatataaattatgagtcccctctgctgttatcttttatttcatggtgaggtctttcaaacaaatatgggtggaccttgtctactggcaggcttcatattggcgagggcaataaag

SEQ ID NO: 2868 - DNA, 444 bp, Homo sapiens
  I.2868 (AI656537)
ttttagcttataaacaacagaaatttatttctcacagttctgggggctgggaagtccaagagcaaggcactggctgattcagtgtctgatgagggctactttgtggttcatagatgaaggcttctcactgtatcctcaaatggtaggaggagtgaagagctcttttggtcataatttataagggcactaatctcattcatcagagctcagtcccacctcctattaccatcacactggtgattaggtttcagcataatttgggggggcaggcccagatattcggaccatagcaactaccttattcacaaatatccacagaatgtttaataactacatatttttagataggatctagattttaccaaattctggttctccacagtgaggtttcagcatgttttacaaagtagattatgataagctaaataagaacattccatactg

SEQ ID NO: 2869 - DNA, 392 bp, Homo sapiens
  I.2869 (AI656504)
ttttttttttttttaaatggcaatgattttatacaacttggtttgacactttaagcagtaagttttatttgaaaatataaaatatcatagttttcttaaatgtttgttttttaacacttctaaaacaatattccaaagtatattcagctttgagaaagaaacatatattttttgattccagacttaattatgacaaggtaataggaattatgactttcctattttgacatatctttcgatatcaaatacttgggcatttttaaatcagtgtaatgaaactttccagtctttcttggatttaagttcattcaaattcaaatatcataaattattttttcaaatatctagaaataacctaaatttctccgacacatatatatatacatgaagac

SEQ ID NO: 2870 - DNA, 468 bp, Homo sapiens
  I.2870 (AI656486)
ttttaattatttaaagaggtttattctgagccaatgtgagtgaccacagtctggggaacagagtcgaggaagttctgagaaagtgtgcctgagttggtcaggttacagcttggttttatatattttagggagacagaagctacaggcaaagacataaatcaatacacgtaaggtatacattggttcagcctgaaaatgcagggcattttgaagtgggggcttatgggtggattcaaagattttctgattggttgaaagagctaagctatctctaaagacttgaagtcagtagaaagtaatgcttgcgttcagataagggaagttgtggaaaccaaggttctttttatgtagatgaaatctcaaggtagcaggcttcagagagaatagatgataaatgtttctttttagacctaaaaggtgtcagactctcatttaatctctcctagatctgggaaagacctagaatgg

SEQ ID NO: 2871 - DNA, 550 bp, Homo sapiens
  I.2871 (AI656388)
ttgaatcgcagtagctgagtttatggatgtccattgtactacatacttttgcatagattttatttttcatcataaaaaaatttaaaaactgaaatgcttgtcaacccccccatctcgaaaaagccaaattgaaatacacctggttaattatgagaattaaccactatctgaggattaagtgtgatttgtttcccttccttcatcccactggcctcaggaatggaaaatactttaaagggagaaaacgtctggccatgggacaaagccccgcagggcccagctttggccttaatggaaggcggggttaggggtatgacactagccccccgcaagagctctgcttcacctcacacaaccaacctggtcctcactctgggtgaggcagaaatgtcactggctctacttcctgttgatatggggacattgatcctctctagggttgagaaccaggatttagaccgagaaattgactttatggcgtcaagggagaaacaagcaagagaagagcagaaaatgaacaaaatgaacaggaggggaccacaatggacag

SEQ ID NO: 2872 - DNA, 502 bp, Homo sapiens
  I.2872 (AI655909)
gtgttccaattaaactttatttgcaaaaacaggcagcagggcaggtttggcccaccagtcatagatctagcgctcaacactcccatcctacagatgctgaagtgtagcctcaggaagatggaactgacttgaccaaggctgcatggctcccaggaccagaccagaactcagaacatctgctcctcaatcttcaaatctctttttaaatgctattcaaccagctgcttcctcctggcaaagtggggtcccctcctgggcggctgcacaccagctcatggccgctctggggtctgtgagggcccggcgcccgttctccccagggagccgcgtgactctccttgatccggcctcccctcgagcgacaggcctcccagaggccccccagcagcccccgagcagtccccggagcgctgggggactctgcagcgcgcaggtgaccacgcagagacagccccagcgcgatgaataattgaggcgcagagtggaattacctctgtgggct

SEQ ID NO: 2873 - DNA, 444 bp, Homo sapiens
  I.2873 (AI655169)
aaatcaatcatcatgtttatttattgagcatctactctgtgccaagtatggaatctggcactgggactgcaatgacaagtaaaccagagttggtctctgcttcacctgtaggatgaccacatgttccagtctcctttttgtcctggaataattattaataacatctccttttactttcaaaagtgttcccatttacactttaagttatatgatcatgctacctcaaaatttcagaaagacaaacattaatcaaacaatcacccaatatataacttcaaattgtactggatgttatgaaagaaagatgcagagggctattacagcaagcattggaaagcagcttcattctccaaaggaatttatacttctctgcaggcaaaacagagacagaaggtttttaagttggagatcagatcttagttttagaagtcatggcatttttgt

SEQ ID NO: 2874 - DNA, 366 bp, Homo sapiens
  I.2874 (AI655054)
tttaggcataaaaatagattttattgttggcagtaagtatttaaagcaactgacagtacacgctgaataagaattttaaaagaaattccacataacatacatatttctggcataaacttagcatcttgggcgaatacatattgattctgagcagaaaaggaaggtgttcattaaatgagtaagacggcccaaatatcttttacattctggatcatgaatgaatctaaggggagggatgataggtgcaccactcctgtgttctattttaatattccatatttttcttttttacaaaagctagttacttcctattagcaaattaggccctcaggaggaaaaacttgtcaggataaaggtatgactact

SEQ ID NO: 2875 - DNA, 378 bp, Homo sapiens
  I.2875 (AI654930)
agcttgaacaagttgttttatgtaaatgacaagaatgttatctcaaactaatgggttaatgttttgaaggcatggatattctcaggcaggtttccatgactctccctagaatggagcgctgaagttcgctgtggggctcgttcccaacactgagcaactgcagggaaccactcacacagtgactacctaccatcagctctgccctactcgctccagacctcaggatccacttttgggtggcatcaccaaataaagcacgttaggccattacagcaagctctgtcagagactgccaggctgaagagaggctgccaagcccagcataatctggtccaagaaactccaaactcatcgaataggctggagggatgatgtgca

SEQ ID NO: 2876 - DNA, 565 bp, Homo sapiens
  I.2876 (AI654928)
attgggggaggggtccccttatttatttaatcatcgctccccaaggctaaactggtggcctggcaacagtgagtattttctctgagctcagaagccaactccaagtgttcagggtgaacaggttgggaaacttgagaaccacacagacatcaggaaaaattccgtgagtggttgtctgtggtgaaatgatgatatggccctgagtttgctctccccaggagaacttggaagctgcccccttttccacctcccacctcacttggaactaagtaaaccaagaaattctaggaagcagcccaacctgaaagagctggcttctccaggaaaagagaggggagggtgaagagacccagggtctgtccgtcccaaggggatggtcagtcacagaagtcactgaccagcactccaggccagatctcactggtccggccacagatttttctaatcctgtgagttgaaccgcacccaaatgactgcagatgggatcagagatggaggtctcaccagtcagaggaaaagcatccaagtatcaggagagatgcatagttccaagaggagccatcta

SEQ ID NO: 2877 - DNA, 428 bp, Homo sapiens
  I.2877 (AI654748)
aaatagttcttgggctccctctgctggcattttatttaagaaagagcaatttatgttaaatctgctctcattctgtggggttagctgttagcagttgctctttcataacgaatgaaaatcattttaatagtgatatgcaaataccaaaagacaggattatctgatatttaaaatggagaaagaattatatcagttacaataaaattatataatacatcctagatctattgcattttctattttgaatatcacacaatttgtttaaatcacttcaaagagctaaattctatcttagattcaccaaataatgtactctctctaaagcctagttagttccaactacccagattttaaaagcactaactttctcgtctcttgacagtgtaagttacacaataccattactaaactattactttctttttttt

SEQ ID NO: 2878 - DNA, 475 bp, Homo sapiens
  I.2878 (AI654623)
tttttgccattgatcatgttctatatctttatttcagtgctgattacaaagtgtgttcactttgtgaaaattagttgtacagtaatgacttatccacttttctctttccctatttttttctatttatacaaaggttaaaagtgaacacgcctaatttcttttaagaggtaggtcattaacttatgttcggagtaaaggttacacaaagaaaagccaatagctaccaatttctttggaggaaatgtggcgttacaagaacaatctctcccatgaccccttggtattgcagagctgatcactgaggtgagtaatttatatagaagagacacatcctgggagagtagaaattgaaatagcaagtgcttttcttttgaggtccaatattactgcacctctttaatggattgtgtagttctgatggaggacaaatgacagaatgtcctcaaagtcccccaaagagaaattaaacattagg

SEQ ID NO: 2879 - DNA, 453 bp, Homo sapiens
  I.2879 (AI654546)
atcttatcaatagtatttaatgttttgaagaaatagaccagtgtacaaagggatagggaattcatttctgttaatgtatttattagttcttactaggagaagaaatgtaactattctcttcaaaaccgttaaaaatcaagcactgaggcagccacaccatcgtttgctccctatgttccgatatccttaagatgagctcaaagaaaaattaaatcttgattcagggtaaaagtttctgctaatccagttcttttatcataaccatgaaaaaaatcactgaaaattactttatacaagttatgcagctcagaatttttcttgatatttgatcattttgaaatatgactaagcttctgctagagcctctaaaccaatctcttgacttcatcttctctttcattctgcaaccaaacctgattaatcttctcaaagtacaactccagtcatattgct

SEQ ID NO: 2880 - DNA, 487 bp, Homo sapiens
  I.2880 (AI654471)
tcctctcatttatttatttatttatttatttatttagagacagggtcttgatctgttgcccaggctggaaggcagtggtgctatctcagctcactgcaacctttgcctcctaggctcaggtgatcctcccacctgagcctccctccccagtagctgggactataggcatgcgccaccacacctggttaatttttgtattttttttttttttgtaaagacagggattcaccatgttggacaggctggtctcaaaatcctggggtcaagcaatccacccgtctcagcctcccaagtacctggtactataagggtgccatgatggacagcttaaactctgtgttcctaactacaaattatgcttatttaattatattcagtgacttaattaaccagggttttctttaatcctctgatgtttttttctctttctcttttttttttctttttttgagacagggtctccctctgtcacccacactggagtgca

SEQ ID NO: 2881 - DNA, 429 bp, Homo sapiens
  I.2881 (AI653988)
aaaattaactctttaatttatggaaaatgactcatttacagctaattcagtaagcagataagaggaaaaaatactccacaatgccaccattctaacagaaccacactaatttttacgtatgttttccttatgtattttttctaaccatatttttgcataactgtaattatgatgtacatatgctttttatataggtaaacttcttaatctggaataattttagatccacagtaaagttgcaaagatagtacaaattcgtcacatagccctcacccgatttcagctctccctaatgttaccatcttacattactgtagtactggacatttcccaaaactaaggaaccaacattggtatgttacttttaactaaactccaaattgtattcagattttgccagttttttcactaatatcctttctccatttc

SEQ ID NO: 2882 - DNA, 257 bp, Homo sapiens
  I.2882 (AI653901)
attaacacagcattttattaagatcaggtcagcaaaaactctcaaaagttattaaataaccacttcaatgatatttgaagtaaagttaatgagcatttataatatacacaggcctaaatagtaatcaagccaattatcactgtttcagaaatgttttacaaagcatctttaatcatggctcttgacggtattaggcccgtcctgctgcttaatgctaagtgactcaatggcccctgcctgggacatactgggacagg

SEQ ID NO: 2883 - DNA, 505 bp, Homo sapiens
  I.2883 (AI653489)
  misc_feature (465)..(465): n is a, c, g, or t
tgtgatatatttcaaagaatctttaatacagctccatcagatgacatgtgcatgagtgtttttgcagtatgatttttggtggtgggggcctagaggcaacataaatgttcagcattaggagaatgcataggtgaaacatgtattcatatcatggggcattaaacaacagaagcaacaaaattcatgtgcatacaacataagagtaccttttaaaaggtatgtagtgggagaagaaaaagcattttatagatacagaaaacatcattctgtaacttagaaacatacataggaaacagaaacagtttttaaaaacctacacaaaaagccacagtattactatattagaaaagttgcttttcagaggaatgggagtgagatggcgataagaggaaataaaaaacaaaaatatttttaaatagcaaaataacccctttttttttgagacagtttccctctgtcactcangctggagtgtagtggcgcgatcctggctcactgcaacctt

SEQ ID NO: 2884 - DNA, 443 bp, Homo sapiens
  I.2884 (AI653004)
gtcaatattcaaatttactaatgagaagaacaaaaaccttttttgaggggaaaggtgataatattttgtttagttgcggttcaaagtgagtgttctctcttgtcaacccagttttaacattcatctgtaaagacagactcatttgtgggccgtaaaaaaaaacacacgtgctggaccggattttgttcatgggctacatgtagttcgccgactgccgctctatttagtctgctcccatttagctggaatccagacttaggatttctcagctctctgttgtgaatcgccaggtttcttctcagtttgttgcagaatcaatacttctgacacttgtcaccagcaggagatgtggtctagccattcctcacagagcaggaaaccaggggctgttgcattcagacttttgcgggggtctcccgggtcctgcaggagcagcccacttc

SEQ ID NO: 2885 - DNA, 577 bp, Homo sapiens
  I.2885 (AI652770)
  misc_feature (569)..(569): n is a, c, g, or t
cttatggttcataacttaaaattacagagcttaaaatatataaacattttttgtataaccagaagcccattgctacaattcaaagactgtcaccatactgttcatcagtaacaaagaaaactctcctcttaggccttctgctagtcctggtaagaaaaatcctatttcagaccattaaagctaagttattttgacataatcatgattcttttcaataaaacattaaacatgacattgtggaatatcaaatctaaccaaaaatgcctgtacttaacaaaacgaagatttttgtccgaattatctctggctacactcaacacttccagcaggcagttgctcaactttccaatgtctgcataaaatacagttctgaagccaatttttttagattaaaataaaaagccactctttagcataaaccttcattcaacgaaattgggtaaataagatttaattaagaaaattaggagccgcgttcattgcaaaccgtagtttactttagcatttcacttgtaattaagttaggggcttagggatgcattgaaaacaccaaaggataagtatctcanagttctaa

SEQ ID NO: 2886 - DNA, 466 bp, Homo sapiens
  I.2886 (AI652609)
accatatacttgtataacctttaacttaaaatacacaattctttaggtactctattcccctaatagagtacttaaggcctgcaactctcacccctgcaatttgcccagcatcttgcccctgcaacttgcccctgcaactctcacccccacacccaacccaaagcatcccatatctgaaagctaactgaaactacctggtagaacttcagctactaaataatattttggagatatggagctttcctttaaaatatcttcaattacttccctaaaatcacctctgaggagaaagaatcctatcttacctaaggaaacacaaaatctcatttcttttcaggtccctaaccatcctcttctagagaaagacaatggtcttggttataagagcccctccttctccttatgggatctaatcttggctaatttcactctcccacataaaaagagcaacctcaactgccactga

SEQ ID NO: 2887 - DNA, 219 bp, Homo sapiens
  I.2887 (AI652492)
ggaatggtgtgatgtccgcggttgtttttgtccttatacctgaagacgccaagcttttcaaaaggtgcgcgcaactacggcgcggaggtgcggggaacctgggccgcaagcgccgaagccactcggtgaagaaggcctggagcactggccttcgacccgtcgtcgaagacctgggctgagcgatggtggcaccaggcccaagggatttgattttcaaaa

SEQ ID NO: 2888 - DNA, 503 bp, Homo sapiens
  I.2888 (AI651880)
gaaagaaaactgctttattcagttatttgtcatcaagcaaaatctaatgacaatagcactggctgtgttttttttattttctaaactctatcaacttgaagaaaaaaatagtcaaatccccccaaacttttaccctcactgaaataatatttagaaaaacatggagcaatagccaaataattgctctagagaacaggtttgagtacacattgatattaaaataaacagccacataaaaaattagatgtacaattgcatcaacattatacatttgtaattaagagcagccagagatttttagtgtgaatagtgcacaagtcagctacacaaaaatcctactagtatatcaattaaaataagaacaaaacaagtaacattcctgtgctttggcaatgcccttgtttcactcttcagaggatgaactgcctacttagtgtgacagctataactcttaccatcaaagaattctgctgctttgctggctgaagcccatttgttctttt

SEQ ID NO: 2889 - DNA, 563 bp, Homo sapiens
  I.2889 (AI651377)
  misc_feature (546)..(546): n is a, c, g, or t
cagatggaaacacttatttgtttattcatacaacaataagcgataagtgcctgccaaccatgagcaaggccctattctagattctgagtttacagtagtaaacagacaaaatcatcactctcaaatagcttacacattctggagggggaaacagaagctaatcaaatttcaaacagtaataaaatgacataaagaaaaatacatgtaccagagacagaaaggaaagttactcataggagaaatcatctgaacagaaaccagaaatacagacaccagctatatagagaaaaagagatcaacaaaaaaggcagagcacagcatctttagaaaagaacaggcagaatagacaccatattcttctgaactgaaaggtcagtgagtccacagcatggtgaagaaggagaagggagggacaaaataagatcagagaggcagatgagggtcaaatcactaaaagaataatagtaaaaagtttatctaagatcctaagaataataagaagttcttcgagtgttttaagcagggaagtaacactgatttacattnttaaaaacttcatgctg

SEQ ID NO: 2890 - DNA, 457 bp, Homo sapiens
  I.2890 (AI650448)
ttttttttaacattcctaagtttctttattcttcatagttttctaatgaacaaatagttagttttcctgagtaagattataaaaaagttaaccattcttccaaaagtataaagacaaataaaatgtcgactcataatacaaattttttacatagcattaaaggtgcagatattgactgcccctcttcattatgattggcccaccccttaaaaagactgcaacagaggattcaattgtctaaaatacttcgaagtacagaaattaaatgctttagcccataaacatatccctcatctattgtgttgctagggaacacatgagcaaaatctatcattcgcacttctacttcagcaatctcttggcaaccagtgggaagatggtagaaaactttttccagttgggaaagtacatttccatttaaatgttcctgtgacatgcttttccacccattgtcttg

SEQ ID NO: 2891 - DNA, 340 bp, Homo sapiens
  I.2891 (AI636095)
tagacgtggctgtgaaatttacccaggaggaatggaatctccttagtgaggctcagagatgcctgtaccgtgatgtgacgctggagaacctggcacttatgtcctccctgggttgttggtgtggagtggaagatgaggcggcaccttctaagcagagtatttatatacaaagagagactcaggtcaggactcctatggcaggtgtgtctcccaagaaggcccacccctgtgagatgtgtggcccgatcttgggagacattttgcatgtggcagatcatcagggaacacatcacaagcagaaactgcacaggtgtgaggcctgggggaataaattgtatga

SEQ ID NO: 2892 - DNA, 371 bp, Homo sapiens
  I.2892 (AI635914)
ttttttttttttttttttttttaagagaatttaaaatcatatttattggtttgcaaacaataacttagacatttcttaatattttaaaaaccccaacacaaagtaataaatttggcttcttttccccacaaaaatgggaaatacctttcagtaaaggaaattttaaattatttttacacaccagttggttgttggaatttatagctctttaacatatgacatcagcaaaaataattagcattaactgattaatacataaaacaatttacaatcatatggtaagcaggaaacaaaaaccgatcagaaaacaccgttttatagtaattttcaaacagataaattattacagtatactttatccccaacatctc

SEQ ID NO: 2893 - DNA, 412 bp, Homo sapiens
  I.2893 (AI635845)
tttttgaatgagacattcttcttttattaaaataaaacccatccaccaccccaaggttattccagaaggaaactctccaccaatagtggtggcactagacatatactgagagacccccaagagggaagtgaagccatgggggcatctggggctacatggtctatctcgctacacaaggaggccctttacaaggctagctgccattttctaccaagacagaaggacaggaaccttccaaacagggcagcctgcaggccctgcaccttcaggccccattctcagacacctgtacaaccccttaagccagacggactcacagctgtctctggaaagttcttcgttacctgactctttagacacagggttggctggaggggcctctccctcaccttgtacatcttatgaagcccct

SEQ ID NO: 2894 - DNA, 456 bp, Homo sapiens
  I.2894 (AI635825)
ttttttttttttttttttttttggagttttagatttaattaaagtaattgactggattgcattttgtagtcctgatcgtcattaacattcttgacctctctgtcacacagatgtgccggagaatttttccgatggatatttattatgaatattatcatcaataagcaccatcaacatattaaaattaattttaacttctttatggaagactgaaagcacaaccagcttttgaaaccatccgctctaaatcattttttatcgattcaacatgactaaacctcaactacaactaatagggaattttatgtgtgtgtaggcaagtttctatatatataaaatatttaatgttatttcatctctaactctggttacattaatcacgtaaccatattttccagagcctaaggattcacttgctattttaagcacttactgtgcactcctcacgctggctgg

SEQ ID NO: 2895 - DNA, 472 bp, Homo sapiens
  I.2895 (AI635742)
gtgtaaactgcaaacatttatttctcacagttgtggaggctgggaagtccgagatcaaggcctggcagattcggtgtctggtgagggcctgctttctggttcacagatgccatcttctcagtgtcctcccatggtgtgagtagtgagggagctctctgaaggctcttttttataagggcactaatcccattcactaatccctaatcacctctcaaaggcccccacctcctaatataatgaccttggggttcggatttcatatgaatttgcagggacacagcattcagaccacagcggcagccaactgccctgtggatatctccactagcttgctgcacagtccctcaagcttaccatgcccatattgaactcatcccctgccccacaacctgctcctggtcctgggttcaccacttagtgtgggctccattggcttagtcatccacccagaaatctgggtgccaaactcagc

SEQ ID NO: 2896 - DNA, 504 bp, Homo sapiens
  I.2896 (AI635702)
ttttttttttttttttttttttttttttttttttttttttttttttttttttttttccccaaaaaaggaatttattgctcccttggaaattttaaaggggggttccgggggaataaggtacccggggggctccccccagccttgtctgggtgggtaccttttgaaaaaaaaaaaaaaaaatcggggggccggggaaaaaatgtaaaggcttttgggacccctggggggatttacccccttaacccccaaaaaaagggggagaggaaaaattttggggggaaaaaggggatttgataaaccggcccaaaaaatagggctgggtcttttaccaagcccattcttttgcccctgaaaagggcgagcccccttcccttccaggaggggattcacaagggcccttggggtttggaagcaccaactgaacccaggccttggatgataaaaacagtgccccccacaatgcccatgaggcccacaacaaccccagggcacacaccaacatct

SEQ ID NO: 2897 - DNA, 458 bp, Homo sapiens
  I.2897 (AI635650)
ttctcagcaaggcaatttacttctgcagaagggtgctgcctgcatcaatcatgatcacaggagcacactgaacaaaggaaggaaaaggtttttatccctaacacagtccctacctctgtgtcactcccccaggggctggggttggaccgctcattctaagttgacccgattggctatttgtgaatacttttccaaataaggaagggaagggggatgtgagttacagtggtgggaagtgcagtttcagtgggaagaatgggtgcagagtgggtaaccaagggagcagatgtgagttattgattagaactggtgggaaggttgttcacagtaactagggacaaggaggcatggacaacaaggaagtcgagtttgagaacaaagaataaggaagtcaacaggctaaatctttgaagaggaatttactgtatcttataatttccccctttcaattgttatgg

SEQ ID NO: 2898 - DNA, 436 bp, Homo sapiens
  I.2898 (AI635278)
tttttttttaaaggatgagaaaaaattggtacacacgaacaatgctcacaaaacggctgggagaaaggcaaaatctaagcatattataagggtgggattcagaatacaggagggcagagggggctgccactgtgatgggtgggaatgaagaaagggaactgctactgctctgaaggagaagggaaagcccgctgtcgggcagtgtgtgtgcagagacaggaaactggctgaagcatccactgtgaagaatggaagactgggactacatttcccaaattctacttgtgtattataaactgctacccatgaagatggttctatttgaaagtaatatttaggccgggcgtaatctcagcactttgggattaaacgcgtgagccaccacacccggcccaagtcttaaaaagaaaaaacaaaacgacagggatatattatt

SEQ ID NO: 2899 - DNA, 411 bp, Homo sapiens
  I.2899 (AI635040)
agtttttgagacggagtctccctctgttgcccagtctggagtgcagtggcatgatcttggctcactgcaacctccatctcctgggctcaagcgattctcctgactcagcctcccaagtagctgggattacaggtgcctgccaccatgtccggctaattttgtatttttagtacagacagggtttcttcatgttggtcaggctggactcgaactcctggtctcaactgcctcagcctcccaaagtgctgggattataggcatgagataccgtgcctggcctccatcactgattctatgtatgcacatgactccttttttacttttacttaggaggcttaaaacacaattattcattcaatataattataaagcagagtctttgttaacttctgaacttggtaaaaacatttt

SEQ ID NO: 2900 - DNA, 521 bp, Homo sapiens
  I.2900 (AI633617)
  misc_feature (455)..(455): n is a, c, g, or t
tgtgatttaaaattttattgagccatattaaaaaagtaaaaagacacacactcttctcgtgcgacacagaaccgggacccccgtacagaacattttactgttttcccttaatacccaggaaacatgcactaacctggtaaatacctgcttcatggagagtagtctttcaggattcataccctcaggacattgttggggacctactggactgaacaaaggcgggcaacacgggaataaaagacaagagacaacagagtatatttggaagaaggggttaggggcaccttgcctttagtggacaagggccctgagctttacacagccctccgtatttattaggcaaaaagagatagcgagaaagctgggggagggggtgattgtcagtctgccgtttggttcacagtaatcttgcattttttggacaataggcactagattttttaggcagataactntaaggagcccggagctagggagtgatgtctgttagcaaaccttttggtggcagggcagtgtgagtt

SEQ ID NO: 2901 - DNA, 424 bp, Homo sapiens
  I.2901 (AI633168)
agatggtcagttttttattttttttgagacagagtcttgccctgtcgcccaggctggagtgcaatagtgtgatcttggctcactgcaacctctgcctcccaggttcaaacgattctcctgcctcagcctcccgagtagctgggactacaggtgtgtgccaccacacccggctaattttttgtatttttagtagagtcggggtttcaccgtgttggccaggctggtctcgaactcctgaccttgtgatccgcccgcctcgggctcccaaagtgttgggattacaggcgtgagccaccgcccccggcccgatggtcagttttatgtgtcaacttggacgggctacagtcccagttattcaaacactcatctagctgtcgccatggaagtgttttgtagatgtgattaaagtccataatcagttgac

SEQ ID NO: 2902 - DNA, 453 bp, Homo sapiens
  I.2902 (AI633021)
ttatttactttttttagagatggagtctcactctgttgccaggctggagtgcagcggtgtgatcttggctcactgcaacttccgccccctgggttcaagtgattctcctgcctcagccttccaagtagctgggattacaggcatgcaccaccacacctggctaatttttgtatctttagtagagacggggtttcaccatgttggccaggatggtcttgatctcttgacctggtgatctgcctgcctcagcctcccaaagtgctgggatacaggtgtgagccaccgtgcctggcctatgtattttttttttttaaacacacacataaatctaaagcaaagggtatgccaagattcagctggggccaggtctgacccccactctgagcatctcattagcttcccatcagtggaatacaatggagacatattccacttggtctggcaatgtcctcc

SEQ ID NO: 2903 - DNA, 581 bp, Homo sapiens
  I.2903 (AI632740)
ttattttaaattcctttaatgaaacctcaccctcaaacttgatacatcagaagatttgcttggactaaaagtggaatttccatcttaaccacatggctccgaggttctgctctcaggatgaattgggctccatgtcattttgtttgtcactttcttctcggaccagcgcagtggcttcaccacagtgggcactgtggttggattccgtaccttggaacctttgagcatgatggcccctgctcctgggattccctccgcttcttctctctccgatgaggttgtgtactaatgtcagctgtacacgttgtcttttcagcatgttacctcctctcagaagcctgcccccacgctgtgcaatggtcgctgtgcagatctctgttacggcgtcattgcctgcattctacttagctctcgtctgtctcccctccagactgtgcccccagggcttccaggtctagcctcatttctaatagtttgttgccacgatgtcacgaattagagccctgtctgttagcccacagggctccagcctcaccctctcccacagctcccgtggccctcctagcagccttcagagcttc

SEQ ID NO: 2904 - DNA, 411 bp, Homo sapiens
  I.2904 (AI632461)
ctcctttctttcttccttcctttcttctttccttggttgctccattcccccttccttctttcatccttgcctccattccctttccttcctttcttatgcaaaacagactatggcatatatcaaaggttaccttttgggacttattagaatgctctttttggcctgaaatatggagacagatgaggattcaaagttggttagtgaatcatcttattgttttgttcaatttgttgctgttatggatttttgataacttatccaatcatagagtgagagtgataccttaaaatctttcattgtaattgtccttttgctaaattctctttatatttttaaaagctttgccttacatgtgctgaagatatgtttgttttcactatagattatacatttagtaacagaaaatatatt

SEQ ID NO: 2905 - DNA, 524 bp, Homo sapiens
  I.2905 (AI632210)
gtccttatgaaaccatttcttttattgtaattgggaattatcaggaaattgaatcaaccagaaatatctatgccttcttgcattcccatttcatatcgaatctatataagttgaatgaaactcctctgaagttaggccaagctgggatgaagttccaatccagtcataactgttggacctgcagcaagtactcatccttgccaaacctttgttttctcacctttccaggccaggtagtcacccttgcatgtttcccttaacattctggggttactgctgtcattgcccctcttacactgcatcaagatggttatttacgtatctgtctcccctactttggtgtaagtttcttgtaaagagagcttgggtcttgatctgtgttatttttgtagctttatttctagcaccatatctagaccttttaaaatgcattcttctggatgtgagcatcttgaggacagggagcatccctacatcttcacagcataggcactcacatattcaattcattgcagagcttcatt

SEQ ID NO: 2906 - DNA, 338 bp, Homo sapiens
  I.2906 (AI632122)
ttcattaatttgcatttattttcgggaagtaatgtagataaagaggaggagggagactgccttacatttcaacaagtaatttgtgatcttcacatcagacaaatcaaatttacaaattactttcccacctactggacgaagcggccaaagccaaaattgatacacaggcgcgcgggctctccgcagatttcggagaacgaaggtgcactaaaaactcactagacaaaacaagggtgttgaaagagagaagccgacagaggagttggaactgggtttggggcctgggtttgtttgtttttccctaatgctgtacttttacggattttgttttgttttgt

SEQ ID NO: 2907 - DNA, 451 bp, Homo sapiens
  I.2907 (AI631299)
gagacagagtttcactcttgttgcccaggctggagtgcagtggcacaatctcggctcactgcaacctccgcctcctgggttcaaccaattctcctgccccagcctcctgagtagctgggattacaggcatgtgccaccacgcccagctaattttgtatttttagtagagatggggtttctccatgtttgtcaggctggtctttaactcctgacctcaggtgatccgcctgccttggcctcccaagtgctgggattacaggcgtgagccaccatgcccggctgcaatcacgtatgagtttttctaaaaaaaccgaaacactggaaacatggatgcatcttaaagactttatgctaagtgaaaccagtcacaaaaggacaaatactgtatgattccacttacatgagaaatatgagtagtgaagttgatgatagagacaaaaagtatggctgt

SEQ ID NO: 2908 - DNA, 518 bp, Homo sapiens
  I.2908 (AI630987)
aaaatattaatgacagatttatttggccttttaagtgcattgctaaattctcctccaatctacttctaaatctaaagcagagcctgctttagaaagagaagaggaaaatgtatttcaatttagaaaagggaagtcttttacaatattcttaattcacattatggtgaagcagtatacacaatagtaggctcccctcttcctgtgggttttaccttgaaaggggctgccagaacagaagtttcagggaaggggccagagccctggggactttcctcaggtgatggtgatggaagaagaggcaaggcaggacaggagggctcaggtaagggagactatgcaggtgcaggggcaggaggaaaaggagcagttggaggcgaaagagacaaagcctcctcaatatttctcaattcagaaaaagcatcagatatccccagtttaaatcctcaatggaggcaattttctcagtagttcttttagaaatttctaggtatcattggaagtaagtctcccatttaatt

SEQ ID NO: 2909 - DNA, 409 bp, Homo sapiens
  I.2909 (AI628936)
tttaatctatcccttcgcctttggtaacgcactgctttgaaatgttattgactacttagttttactaaacacagagcccttccaagttatacatcgaacacagttaggtttcatattgaatgaggccccttcatattgaatgaggcccctaaactgtgattatcagggcagtagctgtactgggccgtaggcgccctctgttggcgaggcaggatgcttgctgtctaattaaataaattaaaataaatctaactcagtttattccatctcagaaaattaccttcccttttatatgttttctctttccttaatctcaagttgtatggcatatgtatattttttaccttttctcaactctgttccttcctacttgcctcctgcactgaaaacccgagtttaaacaaggctg

SEQ ID NO: 2910 - DNA, 444 bp, Homo sapiens
  I.2910 (AI628882)
  misc_feature (413)..(413): n is a, c, g, or t
gtcattcatgtatttattcatcattcatgtatttatcattcatatattcatcagcacacaattgtggggcacctcctcaattctgggcctgcacaagataaaagggaagggatctctgtcccaaaggcaggccaagggtgtgcgcccagtggaccaacagtcagtgctgaatgaatgtcatttcagtgagggggtgttgtggagctggtggagccctgaggcagtctccatcgctgtggaccagtaaggaacctcatccctctacccagcctgtgaggtcatcctccttcctcagcccacctccctcaggagacactcaggcttggcttcatccacgtgtggctgcgcactcacctggatgccaggaaaatgctcctgggccagtggctaccagcaccaaagcagggctgganacgtgtgcacctaccccacgacctcatagct

SEQ ID NO: 2911 - DNA, 438 bp, Homo sapiens
  I.2911 (AI628689)
  misc_feature (330)..(330): n is a, c, g, or t
gtatttttagtagagacgggatttcaccatgttggccaggctggtcttgaacgcctgacctcaggtgatctgcctgcctcagcctcccaaagtgctggtttgattacaggtgtgagccaccacatctggccatttgccagatcttattctttgaaactatacaagcaatttttaaaaaattaaaataagatttcctaattacatatttctgagaggtttaaggcaatgattctctgacgaggattaactcttacatctgggttgcactcatagggtaggtaaagaaaagaaaaagtgtactgttgagagttgatccataaagcagatggngaaatatgaaaaggcagcagaggctgggtgtaatcccagcactttgggaggccgaggggggtcatcacgaggtcagaggtttgagaccagtctggccaacatggcaaa

SEQ ID NO: 2912 - DNA, 440 bp, Homo sapiens
  I.2912 (AI628549)
tttttgcaagaaataaaaggtttattttagcattagaacatcaattaatagaataaatggtaaaatgtatatatttatctcaatggatgcagaaaaatatttgacaaaatgcaacatccatgaatgatagaaactctcggcaaactagaaagagaggagaacttcctcaacgtgataaagatcacctatagataaactataggaaacttcaagctgggcaatggtaaaagaccaaactttctcactatactcagaaacaaacgaagtggctctcacatttctattaaaaacggtattggaggtcccagccagaggaaataaggcaagggaaaaaagcagatagaaaggaagaagtaaaattacctatggtcacatgtgacataatcatgcatgtagaaaattcagcttggcacagtagctcaggcctgtaatcccacatg

SEQ ID NO: 2913 - DNA, 326 bp, Homo sapiens
  I.2913 (AI628322)
tttttcactttgatttaggaagtttatttttttctatgacaggtactttttccagcattttctgcttatataatttaacaaaattaaatacctaagttttgatattgaccacacctgttaaactacatatacaatttttaaaaaattgtagtaaatacacataacataaaatttatcctaattcgttataagtgtacagttcagtggcattaaataccttcacattgatgtgctaccatcactaccatctatctacagaactgtttttacacttgagatttttaatttttttgagatttttatttatttacatttttagagatagg

SEQ ID NO: 2914 - DNA, 498 bp, Homo sapiens
  I.2914 (AI628178)
gttaagatagagtatcactgtcacctaggctggagtgctgtggtgggatcttggcttactgcaacctccaactctcaggttcaagcaattctcgtgcctcagccttaagtagctgggattacaggtgcgcaccaccatgaccagctaatttttttatttttagtagagatgggggtttcactatgttgaccagcctggtctcaaactcctggacttaagtgatctgcctgcctcagcctcccaaagtgctgggattacaggcgtgagccactgtgccaggccagagtactgccacttttactaagaaattgtttcaatgcttcaattgggatgtagagttggtgtgtgcccccaaatcagtcttgatcccttgatccttctatgtttacactgattatgtctttacttaaaattttaatattttgttcatcatagattctctgcattcattttgatttttaaaaacatcatattaatatgttacttatcatgattact

SEQ ID NO: 2915 - DNA, 480 bp, Homo sapiens
  I.2915 (AI627453)
cctttttagagacgacaaagctcgttgaaggggagcattccccgtggggtgctgctggacacggggtgtctgctggaggagagcgcttgacacactggagatgttcagtccaactgcacagatgcaaaattgctcatgggggacaaaagtaacagaaaagccagcaagttgtgttttccttagggagctgtcaaaatagggaatcttgagggaatgagaattaactcatctccaatggccatgagcttcagacctattaaaatttatgtgtctttcgatgaactctgtatgttttaaaattgggggaggaaaacaagtgagactagacattgaggacaggggaaagttaggcacaagaggcaagaggtgaagagaggttccaggaagactgagaacagagagaagcttcgagaagctgtccaggacagttctaacccatctaggggaagacactatcttgtccactcttaataaaagacc

SEQ ID NO: 2916 - DNA, 388 bp, Homo sapiens
  I.2916 (AI627286)
gttttattttttatttaattatatccatagaatccactggcttcggagtcataggcctgggttcaagtcctggcttcactggtaacttgctctgtgacctttgataggtcatgtccgcactctgggcctgagcttctttgtctgcaacgacactggctagctggctggtctctaagcatccttccagcgctggatccaggctagtctaaggtggattggccctttaagagccgaaaaagggggaggagccgaggttctttaaaaacaaaaggggatggggcgtttctgggaggggagagaccgggaggggagcctggagattcgggcagagtctccctggcctggaggaaaccctcaagggtcttaaggcgtgaccctgcagccggga

SEQ ID NO: 2917 - DNA, 266 bp, Homo sapiens
  I.2917 (AI625724)
tttttttttcagaagaaaaataattccatgtcacctttattgggtcagctccattaaaaaaaaaaattgtcaaagccagaccagaagtcattttcaaggggtcacaacaaatggggtgtctccctcgctgcagtgcagcaccctgatgctctgctccgccctctaaccagcgtcacaccctctccagggggcacagggagagacgtggcagcacaaccagacagactcattacacctaaaattatgagtggcacagctcttccaga

SEQ ID NO: 2918 - DNA, 475 bp, Homo sapiens
  I.2918 (AI625542)
tttatgcatataattttatttgctactgccacattgccattaagaatattgcctacacttcagtgcagggatgttctgagtctgtgcatcatgcagcgaaggcaccagtctccctctgtaaccttggtccttccctaaagtatgtagtcattggtgcagaatgtacagctgtgaaggtgactgtttctctaaaggctttggtgatgtaagcctgaagccaagcaggaggaaagcaattaaacatcaccttgattaagttataatgtaccaagagagttgcacgttgggcttggtgactgctttcttcaggaaggaggaatttgcactgagagtctgtggggacacagcctgccataaagggtagtgaggacatctttcccttttctttgcctatcagatgcctgacctttcaggaaggttcagctaaagtgccttttgctccatgaagccttttcctctcctcaccccaaccatg

SEQ ID NO: 2919 - DNA, 408 bp, Homo sapiens
  I.2919 (AI625523)
  misc_feature (264)..(264): n is a, c, g, or t
cactacaaagtcctttattaacaagtcaataaaaacagaagagagagagatgtcaaaatactttccttggaggccccaggagggagaggcactgtcaggactcacctggccagggaaggcaaccccaccaaaggcagaacggaggtcaaggggcagctggcccaggaagcctttggggaatggctcaggcctcaggcagggactgtgcaaacgccgaggctgcgcagggagtgatgggttgggggcttaagccccgagcaccgngttcccctgcatgggcagacacgcagtcaggctagcacctgcccactccacctgtgagtgtacacaggtgtccgcgtaaaagccggtgcctgcacgcagcttacatacagagagcggaacgagggtccccagcagaacaggggg

SEQ ID NO: 2920 - DNA, 227 bp, Homo sapiens
  I.2920 (AI624954)
tctctctcactgcagaccatgtttctccatgtggcagaaaacagccactcactgcacccacatttaaatatagcttgtgatgcaaaaattacacagacaaaaaagatagtcctagctttctagaagctttctagtgggaaagataaaacatgcaatgattatattatcacagtgagaaacacacgtacaggttcatatagattcaataggcattaacaaggaacaag

SEQ ID NO: 2921 - DNA, 317 bp, Homo sapiens
  I.2921 (AI624918)
ttggtttttccactggctttatttccactgaaagaagaattgacagacaggaggctgaattatgaaatgatggaacaactgaacagaaaataatttaacaagtccacaaattatgttttctgctggaatgtatactagccattatttcctatctgatcactgtacaaaattgttttctatgtttagcactataatcttgtctagcatcgcctttaccagacttcactctgctttattctacttctacagtgtaccaaggtgattttaaattctaaccctgtccaaccaaagttctatttacctttctatggacatct

SEQ ID NO: 2922 - DNA, 395 bp, Homo sapiens
  I.2922 (AI624749)
  misc_feature (379)..(379): n is a, c, g, or t
cgatgttttgacaacttggggccttactgatcctgcagggactgtctctccctcgctagctaattcctaaagatagtaaacaacttaacctagagcacgcctttcttatgcaaagtaacccatccagagcccataaccacaactatctatgctaaccaagcctctcctaagctgaggtcactatccgcctgccctaatgaccccaggccccggtaccagacacctaaggacagcttcttaggagcctgttgaagttattcgaacaagccagttctaggcctacttaccctaccttggctgttctttccaatgaaaatcacaataaaaactcttgcctacattttccccttgttccttctgcctcctgaccgaccccggngcttctctgtgcagaa

SEQ ID NO: 2923 - DNA, 207 bp, Homo sapiens
  I.2923 (AI624610)
tatttgatttattatttatttagtttattaatcaattctctcagggatcagaaggcatgcccttggggtcttctctgtccactttctaatggttgtgagcttgagcaagtcttgtaatctctggctccaccatcctcacctgtcaagtgaggtggccagattcaaggattatctgtctttaccttcccaagatctgaagatagggat

SEQ ID NO: 2924 - DNA, 450 bp, Homo sapiens
  I.2924 (AI624572)
tttttttttttggagttttccttgcttccaacaaggaaggtaggatttcctgtttccatgacaatggaaggcaggtaactgccttatagagtttgagctcactcccagcaaggaagatgagtttgagggtttttttcctgcttctaggatggtagaaagcagtcttcagcctgagacccattcctaggtaagtagctgaattggggttttgtcttggttaaagtttaactaccagctggtcttaatttctctttaccgttagagcgctcggtgatcatgttgggggttttttgttattgttgtttattccggtctttctcccatcagatttgaccaactctacctgacttggtccgatctgagtgagaattccaaattatgggtaacaaagcctctctaatttggcccaaattccttgcagctgcaaaagagggaaaaaagaaaacaaca

SEQ ID NO: 2925 - DNA, 419 bp, Homo sapiens
  I.2925 (AI624075)
aacctgaaaagtataattcatggcaggactctatttcttctgccacaatatgatcaatagggtttcagacagtgactctcataacaccctcggagcgctcactctctttttaaagagtttattcttttcaaagtcgtgtggattaattccagtatgtcaagtcaaactttggctataaaatgacatggttgaccaagaaaacacttatgtgctcacaatttttcatccagtggcttctgaacatttaagactacctgcccctgaccaagtcctgttttgaaaatagcttaaacaatctattcaagaaatcatactgagccttttctttactgggggatgggcagaaaagaattagaacacacaacaaagcaaggaagagaaactttgaactttcttatcatatcaaaagcagcaaattc

SEQ ID NO: 2926 - DNA, 342 bp, Homo sapiens
  I.2926 (AI623853)
  misc_feature (278)..(278): n is a, c, g, or t
ttttttttttttttttttttttcgaggcaaaaatacattttatttattattaaaaattccagtatatgtatgcttaattaatactgagtattccccattcttgtttcaagggatagtctttgcttatccacatacctaggaggctggggaggctccttcaagtcactgggtatgaggttataaatgcactcaaaaaagcacgttggatccatggccaccaaatgactccttaaaagctactctccacaacttttttctccctgtcccagaatctccgnccctttcttcactgcttcccctttctttcttcttcgccttctgaaggaccacaggttctctcct

SEQ ID NO: 2927 - DNA, 523 bp, Homo sapiens
  I.2927 (AI623739)
tttttttttttttttttaacacacgcttgcaggtcatttaatgaaaccaatccataactgttttttaaaaagaaaatgttatattgtagataatgtgtactaggtaggtagccgtatggtggttgtgtctgtactgaatatgtacagttgttttttcttgtcatacttccctaaatacaataaaacagttgtcttcatagcatttacaatgcattaggtattataagtaatctagagatgatttaaagtatacaggattgcctagttataggcaaatacacttttctataaagcacttgagcaaaattatatattctcaaggggtgctggaaccaatcccctgagaataccaggaaatgactttattcaagagaaactgaaactacacaggttttaccacattctttacattcatagagtttccttttgagtaaattctttcatgtatctaaaacacacaaggactaataaatacttatccacactccttacagttataaggtcaccagtgtgtcataccctg

SEQ ID NO: 2928 - DNA, 406 bp, Homo sapiens
  I.2928 (AI623567)
catgatgatttaatacaatattaatcatatagttactgagtgcctactatgtttcaagcattattctaggcaacgggaatacagtagtaaaaaaatttttgaattgaatgttttagccaaagcaataagacattaagcagataaagaagcatgagtattgggaaggaaataacaaaattattattctaagtgatataactataaaaagaaaagctgtcaccagtaaataaatacaagaaaaagtacagtcatatcttggagatactggaagtatagctgcagaccactccaataaagttattatcacaataaagcaagtcacatgaatttttgtttcccattgcatataaaagttatgtttacactatattatagcctataaggtgtgcaacagcattgtatctaa

SEQ ID NO: 2929 - DNA, 216 bp, Homo sapiens
  I.2929 (AI621365)
atttataaagaaaagacatttattttggctcacaattctgcaggctgtactggcatggcaccaacatttgctcagcttctggtgagggcctcaggaagcttacagtaaaggcggaaggtgaagggggagcaggcatatcacatggcgagaaagaggggagaggtctcagactcttttaaacaaccatatctatgtgaattgagtgagaactcactc

SEQ ID NO: 2930 - DNA, 369 bp, Homo sapiens
  I.2930 (AI621364)
  misc_feature (315)..(315): n is a, c, g, or t
  misc_feature (322)..(322): n is a, c, g, or t
ttctcacttccctggctccctgttccgagttatccctgagggctaagctctgatttttttttttttttttttatcttgcccaaattcttatctaagtggtctggggattcatgccctacaaaccataaattctcatcagattagttttatttaaccctctatgttgtgacttactttccaatccgactctggcataacattatgtgacaaagaagaaagtcaaaatattttaccccaatacatgtttcttggccgtattttgaaatggccctgcaaagctgtccttttgtgggggggggggggggggggagttcncatctgnaagatctccattaaatagctatatcttttcttccggcccctcaatcc

SEQ ID NO: 2931 - DNA, 488 bp, Homo sapiens
  I.2931 (AI621227)
gaggctccaaagacaggtttaatttaaaacaaaacaaaacaacaacaacaaaataactctcttgtttcatgtaagtcggaccaacagaggtttaataaacctgtctgcccagttagtttgctcagggaggatcagatggctacctggtgtcttaagagaacagcagcaacctcacagggctcctaggggataccatcgtctttggccatggagctaagtctcacggcactgtgcaacagggccatcactgaaaaccaatcagcagctccaaacgtgatctcacagtcttcagacacagctcaggactccagtcactgctatgtgattcgaatgcacataccttttctatgcccgtttggtttcatatttcagtttcatgctaggaatcgggatttttgtggagctgactctttagttctttggggaccccttagctttgtagtaatgccctgggattgccttggccttgtctgtcttcatttaaagga

SEQ ID NO: 2932 - DNA, 424 bp, Homo sapiens
  I.2932 (AI621170)
tttttttttttttttttgaactatgaaagttgttttattttattgagaaataattaatatgaacaaaatgttgccactccaagtgtatgcaaaaccacccctaataaattaacgtactggtgtatccacttgcacaactaacacgtagagtattcccatcacccctaaaagtgccttcctgcctcctctctggccatctaacgtcccaccccaaagcctccagcaacgagtgacctgcctcctgttatgacagtttcactttgcacattccagaattccttatgaacagaatcacacagtctgcattcttttgtgtcttgcttccacagacagtaacgtttctgagattcatctgtgtgttgggcataccggtagctcgtttctctccactgccacgtggtattgcactgcatgggtatgttaa

SEQ ID NO: 2933 - DNA, 525 bp, Homo sapiens
  I.2933 (AI621095)
ttttcctgaaatgctcgcatccatgagggagcacgcgacccctgggggagcagggccattctcttccatctgggctatctctgcatcattggctcctcttccaagccttttgtcaccctcatgacaatgcccctcattcatttttatatactatctagttcagggcctgggaaggtgtaggtgcttataaacaaccttttattgacacgtgtcccaagaggactttaagctaccttgtaaggggttaaagagtaactaaaacctgtaatggctcagctaataaaccccccagtttaggggagagtaatcacccgattgctttcctatgattactatgtattttcattgccaaaagatgcaatacaatttcatggttacttggccctgtaaaatagaaatacccccgattcttaagatatgaagaggtttataaccagggtactatcagttcaagaatgagtccctggtacaaatgagtcaattcatgacaaaatttaatttcaagaaaattaactcaataaagat

SEQ ID NO: 2934 - DNA, 387 bp, Homo sapiens
  I.2934 (AI620965)
taatggtaaaacacaaatatttgatttccttttattatgaagaatgctgaggaagcatgggaagtaattgcaataagcagtggtggtcactgtgaggggtgtggagggcagagagcggaacatacagactgggttctggtgaatcccaagaacacaggggggcagccccggttgctctaccttctaactctatttctaatctgaccgctcctgcctctccgtgacccctccatcccagcacccatcttctcctgctccaatgactgcactagcctctaactggtcttgcttcttccactcttgccctcttccaatctgttctccatacagcagcccagagagatctttgactaatgtaagtcaaaagcacttccttgcttagaacca

SEQ ID NO: 2935 - DNA, 429 bp, Homo sapiens
  I.2935 (AI620854)
aaaatccaaggcctttaatttagtttttggtaatgaccataaatgccttcgcaaaacctctttttcactgtaaatagaaggcactaggcattacataatacccttaaagcagtgattcctcctgatgctggtagagataaaacatttaatgtcagggtttacatagtaacaaattcttcttaaaaaaaaaaagacaaatctaaaaatcacgcaccaaaaattatcagtcactctttcccaggttcccagtgcaaatttacatcatttttacaagtacatagtttgaaattaagagataaactaggtatgatatggttttcaacatgtgttaggtttcagttaaatacagtaaaaatgaagacaccattatcatgctaattggcatcttttgctactgtttagctgtgcaaaatagacttgaaatgatac

SEQ ID NO: 2936 - DNA, 572 bp, Homo sapiens
  I.2936 (AI620731)
  misc_feature (495)..(495): n is a, c, g, or t
  misc_feature (515)..(515): n is a, c, g, or t
tccttgtagttcctggcttcttctgctgcgacacctgctgcttcattgaggtacttgttaccaactttgctttcaaaccattttaggtccacaaaaacttcactgaagtgctcccgatcaaaatctgatagtttcacaaggtatttctcaaatcgaggtaagttgaggtgcccactttcattaatataacccccaagttctggcaggatggtaacatatgttccataaagaagaggcagtgcatcatgattaatatgtaaatgaggtagatgagggataaaatcattaccaacaagaaaccccatcaaaatccaatcatctattatcctttcaatatcatatttaaatgtgatcttttcttttaatactgaaaactcatagtcaatatactctctcattaaagacaagtgtagaaggtgaaatgtagtttcttctggagcacatacccgttgtgtttttttgccaccaaatcgaacttcttctcttaagagaganaaatgtgcctcatgacttgntaaatccagcataatcaagtcagcatctaaaccataaagacagtgtctggtgttgga

SEQ ID NO: 2937 - DNA, 445 bp, Homo sapiens
  I.2937 (AI620673)
acagaattaaatagcccatttattaatttataaaccataataaaaccagacagtcatttcccgtcaccagcagatcttgcattggaaaaggaaaataatatacaaatttcagcaacttcagagatttcaggaagcctgaatggaggtcgaattcattttggagttcaataatatgttcaaagaatcaggtactatatataatcatatagacaactcccgtaatatctccgcagtgcaaaattatccctgtttcttgtcattcaccagtgagaaaaatccaactgcagacttgactgccttcggtgaaggcacacggcaagttcttctgacaaataacaccctttgggattgactcttcacgttttacacagcaattgtctcagcttgggaccaaagtatttacaaagcaagcgaacaagagacgaagcaagagggacacttctga

SEQ ID NO: 2938 - DNA, 715 bp, Homo sapiens
  I.2938 (AI620370)
  misc_feature (308)..(308): n is a, c, g, or t
  misc_feature (707)..(707): n is a, c, g, or t
tttttttcattctttaaaatgtttactaaaaagaaatatcactgagaaagggaataagaagaaatggagctcaattatgaaacctcgtctttggctttcgagaagacaccactgtgtggggctttagtttcaccccacatgtgattttcttgctgttaaaatgtccatatgtgacgtggaagccccatggttgaagaaaagtggacttcaggtaataataaaggtggttttgttaatctacaggtttccactcccgggccatctctttagtataatgtgaaaaaatgtccgcttttattttcatttgncttgctatcctttctagtttttgactgtttcttcacaacatggttcacattttgttctcatggtgtttgttgttttgttaccccttaatcatgtgtttctgagacggttgtgccaggcatggctacatgggcaactccggcgtctcaggtggctgctcttggcatgactgtcctgaggacggctgcgtgggggactccggcatctcaggtggctggttctcgggggtgtgtcctgaggacagctgggtggggacttcgcgtctcaggtggcgcttctggggtgctgtccaagcatggcttgctggggactcttgcactctaagtggtgctctaaatgtgctgtcccagcattgcttgtccaagaactttggtccccaagggttggccctctggtttaangagaaatt

SEQ ID NO: 2939 - DNA, 444 bp, Homo sapiens
  I.2939 (AI620249)
gagtacactgatcttatatccaaaacctctctgaaatctgaaatctctctttagttgttaagttccttaattttttttttccatgtagcccagtaattttcaaagtgtagtctggggattccagagagccccccagaccctttcaggaaaggtcaaaaacattttcataataatactcgacattatttgccttttctttcattctcacaaagataaagagttttccagaggcagcacaccatgaccccagtggaatatgtgcttgtatagttctgctttaaacatttcttagttttaacttctaagatggtaactatcaacagatagaatctctatcaagaaaagccctttgggggtttcaataacttttaagaatacaacaagtcgtaacacccaaatgtttgagaatctttatggagaccatcaaccctatgagctacacta

SEQ ID NO: 2940 - DNA, 331 bp, Homo sapiens
  I.2940 (AI619751)
tttttttttttttttttttttttttttttttttttttttttttttttttttttttttttttttttttttttttttttttttttttgggggggggccccaaaaaaaaaaaaaaaggggggggaaaaaaaacccccaaaaaaaaaacaaaaaaacaattcgggggggtaattttaaaaaaaaaaaggggcccccccggaacccccctaaccaaagggcccccccccccagaaaaaagggggccccccgtttttggggaccccaaaaaaaaaaaccccaaaacccccaagggggggggggggggggggggggggccccccttttcccccccttt

SEQ ID NO: 2941 - DNA, 358 bp, Homo sapiens
  I.2941 (AI619722)
ttttagccttttacccaatttcctttaatggtaactgttatgcaaaactatagtataatatcacaatcagcatattggtgttgctacaatcaagacagaacattccatcactgcaggatcatccctcctgctgcccttttaaagccacacccacctccctcctccctggcaaccactattccatcctttgcgtctataaatgttccctttcaagaatcctggcttgggacgcgtggctcatgcctatagtctcagcactttggggggccaaggtgggtagatcacctcagatcaggagttccagaccagcctgggcaacatggcgaaaccccgtctctatgaaaaatacaaaaactag

SEQ ID NO: 2942 - DNA, 304 bp, Homo sapiens
  I.2942 (AI619681)
ttaatttataaagaaaaagaggtttaatggactcacagttccacatggctggggtggcctcacaatcatggcggaaggtgaaggaggagcagaggcaggtcttacatggtggcaggcaagagagcctgtgcagggaaattcctgtttataaaaccatcagaatctcttgggacttattcactatcacaagaacagcatgggaaaacccacccccatgtctcaattacctcccactgggcccctcccagacacctggggattatgggaactacaattcaagatgagatttgggtgggacacagcc

SEQ ID NO: 2943 - DNA, 270 bp, Homo sapiens
  I.2943 (AI619664)
ttttttttttttttttttttaaatcatatcataccaaagtttatggattccatcaaacaaaaatttctgtaagggaaaaggcaggttgcagccataaaagagggctttcacattcattttaaaaagcaccaccgtaaatgtaaaaaactgcttaagggaaaaaggtaatattgcagccccatttggcaggctgaaaaaggattttgccaacacgcataaaatctgcccatttatatcctgcatgttattaaaaaatcccatcactaaatt

SEQ ID NO: 2944 - DNA, 386 bp, Homo sapiens
  I.2944 (AI619500)
ttttttttttttttttttttcctttctttctttacagcacttaaagacacaatttacaataagcagtctcttagggtcaatgaaatttggaattacagaagcagcaagcttttagcacagagaatagactttgctgtacaaaaatgttgatatgcaccctgtcctaatgtgctatgcaaccatggtaaattacctcacctcttctagtatcagttgcctaatctataaaaatagggacacacagtaggcattcaaattgagctcttctctttcagccaaacaaagctgcctattttccctatctcactttcttcttcttttaaatgtgggcaagatcagtggatggcatagactgagaataaaatgagggaaaaaaatgaaaatga

SEQ ID NO: 2945 - DNA, 429 bp, Homo sapiens
  I.2945 (AI613468)
aacaagaggccccttgttttcgttttgtgttgggccccacaaattctatagctggtcctgcacacagcactaggctccacatctgtagaggcagaatgtttgaatataataagatcacaaaaccagagcagcatctggattctcttcagtgaattaggccaggcttcattcttttctaaacctccccatttaaaggacacaaataaattcaaatttagggctcagattttgtatctaaacagttaaacagactcatatgattctaatctacacaaaagggaaaaaaccaaagcatttcaaaagtttctgcagattttcctcaaggtttggattgccaattcatgaccaccatgaccagatgttacaatccatcaagacaaccaccaaaatggctgctgaacttgaagatggcacacagaaaacaaatgt

SEQ ID NO: 2946 - DNA, 278 bp, Homo sapiens
  I.2946 (AI613060)
ttttcaatagcaaaggggaaatttatttatctttgtaaacacgttattctgaagaccctgaaaaacctgaagtttcttccaggtatgcccaggatcttggtggtctgacgtagccctcttagtgctgggacctttgtcaaacatttgaagtgtgtgatacactctcaacgtaggtatccaggcaggtttggaagctgagggtgtatttctccttcttaattgtctttcgcatttttttcttgctgcccctttgattccctgaaataagctttctgctc

SEQ ID NO: 2947 - DNA, 241 bp, Homo sapiens
  I.2947 (AI613038)
ttttttttttttttttttttttttttttttttttttttttttttttttttttttttttttttttttttttttttttttcaaaaaaaaaaaaattttttttttttttttaaaaaaatttgccccccccccgggggtttccccccgggggggggggggggcccccgggccccccctggttttttcggccccccccccaagggaacttaacccaaagggggggggggggggggccccccccccc

SEQ ID NO: 2948 - DNA, 300 bp, Homo sapiens
  I.2948 (AI613016)
  misc_feature (256)..(256): n is a, c, g, or t
ttactttttaacatatggtttattttgttttttcctcttttttgtctgtataaatgtaaggagtacaagtgcattaacatgctctgaattaataaggaatgcaaaataagaggcagaaacatcaatattccaagtcatgtaacccaacattcagaaacagtcctcctcagcataagcctcctctacacagagctgtcacatttgttttttcatcacaatcctcttctcatgcagctttatggccatcaaaacattntattttgtcttctcttgggtctatggttcaaggattttatgctt

SEQ ID NO: 2949 - DNA, 139 bp, Homo sapiens
  I.2949 (AI612947)
ttcatgttaaatctttaactcattttgagttgatttttccatatggaaatcatgtggtctgatatcagggtgctatttcattcttctgcatgtggataaccagctttccaaacataattcattaaagagactatccttt

SEQ ID NO: 2950 - DNA, 218 bp, Homo sapiens
  I.2950 (AI612925)
  misc_feature (182)..(182): n is a, c, g, or t
tcaccttttaactgtctttattttgatctagtttaaacagataaagaagccaaaattttgccaatgagactacttgccaggtggaaaacgattaatttatagactcctggtacaaaagccaaaacagtaggcactcagtaactacttcctgaatgaagaaaagttatatactttatgtacanaacatttaggtttctccaccaacttgaacttttcat

SEQ ID NO: 2951 - DNA, 300 bp, Homo sapiens
  I.2951 (AI612747)
  misc_feature (268)..(268): n is a, c, g, or t
tttttttttttttttttttttttttttttttttttttttttttttttttttttttttttaaaccagcaaaggttttaataaaccttcctcccttttcccatcaaaggggaaaaggggcttttgggggggtttttttttaaaaaaacggtttaaaaaaacccgggggcctttttttttttaacctttaaaccaaaaaaaaaattaaaaaccttggaaaggggaccttttttttttaaaaaagggggtttttaacccccccaaagggggntggtaaccggggcccgggcccccttggggggg

SEQ ID NO: 2952 - DNA, 262 bp, Homo sapiens
  I.2952 (AI612701)
gagaagacgacagaaggggtttttttctttgtaatgtttttctttggcgtaatcctaatccaagtgattacatctcattactggatactgcaaaagcctcctacatgttctttcttaccactgttcctcctaaatccttaatttttattttgttaatctcctgtgaactttcactagctcttcatactctacaaaataaaaccaaattcttcaccctggcattacatatacaaaaaaaaaaaaaaaaaaaaagtcgtatcga

SEQ ID NO: 2953 - DNA, 188 bp, Homo sapiens
  I.2953 (AI612053)
gagaagacgacagaaggggaacaagaaacaaaacagaaaaaaagctggccatggtagctcatgcctgtaatcccagcaattcaggaggccaaggtgggagaatcacttgaggtaagaaggttgagaccagcctgggcaacatagcaagatccttgtctctacaaaaaaaaaaaaaaaagtcgtatcga

SEQ ID NO: 2954 - DNA, 271 bp, Homo sapiens
  I.2954 (AI611830)
ttaagagataagttatttattgggaacatttgacagagcttttgtacatcatgggaagatttggctagaaaaaactaacaaattttaaaagtaacacagtttaactccaggaaaaataaaaagttacataatacaaaatgtaatcatcagatactatttggtgtatgagaaaacaatatttacatagtgcaaataataaggaaaatacaacattttgataaattgaaggatgagtaaaggtaaagtattgtgtctcctctggccagatgaa

SEQ ID NO: 2955 - DNA, 138 bp, Homo sapiens
  I.2955 (AI611369)
gagaagacgacagaaggggaatacaaatcaacaaatcatcaactgtaggaatacttctcacttcatttaataaggctagtattatcaaaagcagacaaagatggtcaaaaaagacacaaaaaaaaagtcgtatcgatg

SEQ ID NO: 2956 - DNA, 252 bp, Homo sapiens
  I.2956 (AI611220)
  misc_feature (198)..(198): n is a, c, g, or t
ttgatgttttaaaactttaattatgaaaaagggataaacaattcaagatgggggaaccagccccaaactggctggggcagagagagaccagtccccagccatacaatagcagcaaggggaagaccccaccccacagatgctctgccccagcccttcccagagaccttaaataatttaaatagcagggatggcggaggncaggttgcctttggtgtctgcccaatgctaagatgaggggcagcgccggcccag

SEQ ID NO: 2957 - DNA, 358 bp, Homo sapiens
  I.2957 (AI610861)
  misc_feature (314)..(314): n is a, c, g, or t
caagtggtaaatagccatttattgagtattcttgctttgattgtctacgtaagcatgtaagactacaacattacgacccatctcttcaagaggaagtctggtattatggaaaaacattttgtcattcagatttttttttcttacagtatgcccatcacaaaccaggcagcaagcaaggtattgggtgctactcaatccagtgaagtcttgagggtcccttccctctgtgaagcatataatctagtggggtagactgctagctactaactatgaaaacaacatagtctgacttgagagtggggaaagtggaacangggagtaatttttatatttttcttcacatttaaaaatattttct

SEQ ID NO: 2958 - DNA, 211 bp, Homo sapiens
  I.2958 (AI610575)
aaacttaaaacttaatttattttgagacattactaatctaattccataaacacttaggcttaaaggaaatcaccttaaacagttttctttttcatgaaacacatttgttttccccaattattttctcaataacttttttttccatcaagaaagaacagtctctttggggcaatggcttattttgtacccagctacaacagagggaatcatg

SEQ ID NO: 2959 - DNA, 153 bp, Homo sapiens
  I.2959 (AI610488)
tttttttcttttttttttttttttttgcgtttaacatttttatttttaaccccgctttggggggacaaaaggcctaaaaggacaaaccagacggttaaaaatacccttgaccctcgaaatggggaaaattttccttacaaatttttacatcaa

SEQ ID NO: 2960 - DNA, 406 bp, Homo sapiens
  I.2960 (AI610347)
  misc_feature (308)..(308): n is a, c, g, or t
  misc_feature (310)..(310): n is a, c, g, or t
  misc_feature (312)..(312): n is a, c, g, or t
  misc_feature (313)..(313): n is a, c, g, or t
  misc_feature (314)..(314): n is a, c, g, or t
  misc_feature (315)..(315): n is a, c, g, or t
  misc_feature (316)..(316): n is a, c, g, or t
  misc_feature (317)..(317): n is a, c, g, or t
  misc_feature (319)..(319): n is a, c, g, or t
  misc_feature (320)..(320): n is a, c, g, or t
  misc_feature (321)..(321): n is a, c, g, or t
  misc_feature (324)..(324): n is a, c, g, or t
  misc_feature (325)..(325): n is a, c, g, or t
  misc_feature (326)..(326): n is a, c, g, or t
  misc_feature (327)..(327): n is a, c, g, or t
  misc_feature (329)..(329): n is a, c, g, or t
  misc_feature (330)..(330): n is a, c, g, or t
  misc_feature (331)..(331): n is a, c, g, or t
  misc_feature (332)..(332): n is a, c, g, or t
  misc_feature (333)..(333): n is a, c, g, or t
  misc_feature (335)..(335): n is a, c, g, or t
  misc_feature (336)..(336): n is a, c, g, or t
  misc_feature (337)..(337): n is a, c, g, or t
  misc_feature (338)..(338): n is a, c, g, or t
  misc_feature (339)..(339): n is a, c, g, or t
  misc_feature (343)..(343): n is a, c, g, or t
  misc_feature (346)..(346): n is a, c, g, or t
  misc_feature (347)..(347): n is a, c, g, or t
  misc_feature (348)..(348): n is a, c, g, or t
  misc_feature (350)..(350): n is a, c, g, or t
  misc_feature (353)..(353): n is a, c, g, or t
  misc_feature (362)..(362): n is a, c, g, or t
  misc_feature (369)..(369): n is a, c, g, or t
  misc_feature (370)..(370): n is a, c, g, or t
  misc_feature (374)..(374): n is a, c, g, or t
  misc_feature (389)..(389): n is a, c, g, or t
agcggccgcccttttttttttttttttttagagtaaactattcttaaactcaaacaacccttccttcttttgtcactactatattccctgtgctttccagatgcaaggaaagtaaaatggcagggctgggcctgggacaaagggttctgggtgctagcagggtgtggcctggtctggcctgcggacagatggcttcctttttccctcccacacagacccaagcttctgtgtggaagcgtgaacctcagacacttagacgtctccagttccttcaggattgagcaagtcagggtggggagaggggggangngnnnnnnannntannnngnnnnngnnnnngtcnatnnngnttnaggagcatnttgggtnnttangccactacccatgtncaaggccacgtagaggc

SEQ ID NO: 2961 - DNA, 734 bp, Homo sapiens
  I.2961 (AI610260)
  misc_feature (508)..(508): n is a, c, g, or t
  misc_feature (552)..(552): n is a, c, g, or t
  misc_feature (594)..(594): n is a, c, g, or t
  misc_feature (636)..(636): n is a, c, g, or t
  misc_feature (639)..(639): n is a, c, g, or t
  misc_feature (702)..(702): n is a, c, g, or t
  misc_feature (706)..(706): n is a, c, g, or t
  misc_feature (715)..(715): n is a, c, g, or t
tggtattataaagacatttatttaatctatgaaaataatgtacaataaatactttccccttttcctattattaaagaattttaataaataatctacagtctaaaacataaaaaagaggaaaataggtccctctagttatttttaagaaagtccccctagagtttaattattcctgagatttcattggaaggagtctaccaaacggaatttttctgtgtgaattttaaaagataaccgagtgcccaatatttttagaagaagaagaaaagggaggtggattaaacgctaattcagtaatacctgaattttagcaaaacacataagtctatgcgactgagggtgggagaggctcgatttttccagtagacggccaaggagcggcggggtcgaaaggaccgggaggaggaaacaggttagggaaacttgaggtcgatggcacaaagcgttctggtgaaaaattcagctcttccttggaaaaagggaccccgctgtcgagagaaacctgtangcttagggagagggcctcgatagctggagaacagaagtcgccgnccaagaaaatgaggtcggaaaggaaaggtgatcttgcgcccncggggaagacgtttttggcatgggcccgggctctagaccgcnggncccccgcagcagcgcaaccggaaatcgacgcgctttcgccctcttaagcgaacggctaaaggngggngctgtccgncttaagcccccgggaccac

SEQ ID NO: 2962 - DNA, 387 bp, Homo sapiens
  I.2962 (AI610213)
gctttcttgattttatttcaaaagtacacaaggtcacaaaactagagcaagttgtttttcttaacaaattttgttcttacaaatttcaaaatctgcaccattggatatataagccagaaatcgtacatacaaaatctgaaactgacactgtcagttctatactttgcacacgtgaagtgtcagaatattttcttcagtagtacaggtgtatttatcactaaaattcacaattagggaaaagaataagtgaatcaatgaattgtggttctcttaaaacttgtgtcattaaataagttagcagaaaacacaaagttctgttttgatggagcttttagtctcgatgaccaaaaccaaacccaactgatatgtactatattcttaaattat

SEQ ID NO: 2963 - DNA, 335 bp, Homo sapiens
  I.2963 (AI610084)
gatggttaatactgtcaatttaattggattgaaggatacaaagtattgatgctgggtgtgtctgagagggtgttgccaaaagagattaacactagagtcagtgggctgcggaaggcagacccacccttcatctggtgggcaccatctaatcagctgccagcgaatgtcaaccagaaaaaagtgaaaaggagacgacaggcctcgcctcccagcctacatctttctcctgtgctggacgcttcctgccctcgaacatcggactccaagttcagctttgagactcgggctggctctccatgctcctcagcttgcagacggccggggccaggcccggg

SEQ ID NO: 2964 - DNA, 451 bp, Homo sapiens
  I.2964 (AI609342)
ttttttttttttttgtaaagcaaacattttttatttcatgctatgtgtcagctgcaaagatgaatcagaaatagtgtgcaccctgtgctcacagatgtggtgacataacatcatctcacagtgtaagataccataaaatagaggtccccatttacaatgtctggtggtcatcagcagaggcgagcactctgcctctctgccatcagggcgtgtgataggactgtgcatcctcatgccctcttccttggccactgaagtgagaacagaagacagggattccacttccaagtggtagctccaggagtcaagacatgcctctactctcctctctctatgtctggcatgttgagtagccaactttgaggctgtggctcctccagcagcctcatcccccactgacgagcaatgccttgccttctcccctcagaagagatgtgcttccaggctcctg

SEQ ID NO: 2965 - DNA, 388 bp, Homo sapiens
  I.2965 (AI609325)
agttgcaaatatgctcagttttttaatagttttatattagtaaaaacgctacaaccagaatgtctcactgcaggaagagagttacaaggagtatttaacggcatggtggaaaggctcctccgtgctaaatggccaaaacgaacgcaagtttgcatacggggtgatttccactatgtctttaaaatgcatggcgaaacacctacaggaaaataccaaaatgtaaacagcggctgcttcggacgcatgggatcgtggaggctgctgttctgcaaggacaacgtatcacttttatgaaagtcagcttctgaaaacggactatgggaagttccttacccgtgcacgcggcaaagaccttctttgccatagtcagaacacacgcgggagttca

SEQ ID NO: 2966 - DNA, 358 bp, Homo sapiens
  I.2966 (AI609076)
ttttttttttttttttttattttctgggtgtgtattttttcttttatttgtattaacaaacacatagggacagagatatttattgatttgccaacatgtcatatacactaaaagattgagttggtgtttatttcatatgtatatatggtcccaaaattcctgtgctatctactttagcatcatctcttcctacatgaaattgagtttatcacaagattttaaaatgtattaataatgcattagtaaaattttttatgagcttctgtcagagaataatgataatgggttgggcatctccacttaaaagatgaagtaattataataataaagaacatctataataataatcatcatcacc

SEQ ID NO: 2967 - DNA, 321 bp, Homo sapiens
  I.2967 (AI608665)
ttttttttttgttttggagactacacttttattaatgcagcctaaaattaagtttataagcagcaacattaaactattagctgtttgaatacatagctaaaatgtactccctcctcccctaacataaacatgtagccaactcttctcccctcagcctgtacttttccagttgatttttgtttagcctaattgtaggtttcacatttctgcttttttcttttactcatatgaaaacctctggccctttcatcgtggggcatgaaccggccaagacacctgataatagaaaaaaaaaatcatagacaaacatgtagcaaccat

SEQ ID NO: 2968 - DNA, 419 bp, Homo sapiens
  I.2968 (AI608639)
  misc_feature (272)..(272): n is a, c, g, or t
  misc_feature (289)..(289): n is a, c, g, or t
aaattctggcttttctcaaactccccttcacattctcttacagaaggggaattcatggtggccttgggtatctctgacctagctcttttcctgtggaagcccttggcttttaccaggcttgatacatctgtagggagagggaggcatgaaaaggtagctgagggccccattcaaggtgaacaataagaggaaatgagctggcaggggagggtatttcctataacttacacagcagagcttgaattatttggggggagaaattgggggggttncatttcctgaaatccanactgaggaagtggaaagattttctaactatgtttccacataacatattaccaaacagtattacaattctttaaatgatttctatcaactgttggaattattataatgagtcataataaaactcatcttga

SEQ ID NO: 2969 - DNA, 467 bp, Homo sapiens
  I.2969 (AI597810)
ttactatacaaaatttaaattttctttattggaagtgtttcaaaagttaagttataaatcaatgcaatatgaaaataaatatttgaaatgcataagagagacaaaggattaatttccttaatatttaaaaaagcacttacgtaagaagaacatattacataatattttaaaaagcacttacataagaagaatatattacataatattttaaaaagcacttacataagaagaatatattacataatattttaaaaagcacttacataagagaaatagggaaggagtctctcagggaaaaaatcattttaactacatggaaagttgttgtacatcttaaattttgaatatgcaaattaaaatggcaataagatactttcttgcacctattggtttggcaaataatacgctataatggcaagacactgtcaatggtagtatagactaatacagacctctaagtggcacac

SEQ ID NO: 2970 - DNA, 368 bp, Homo sapiens
  I.2970 (AI597793)
  misc_feature (164)..(164): n is a, c, g, or t
caaagcattaatattttaattataccacattcaaacggcacctaagttaacccacaaaacgccaagtggcaagttgcttcaaagggcccggaagagaggacagaagctggctcttcctgctttcctgccccctacccactgggtctgggttgctcaggacccanagactggagacagcctgaggctggaatgaaggttttcagacttccttcctgtgcaaccacgggcaaggacatcaagagagaactccctgcctgccacatcttcgttgaagtcaattgctatggccttctaagatctcctcaaaagccctttcctacagagagtggatgacccaccctccaggagcggggtgaacactcaagggg

SEQ ID NO: 2971 - DNA, 428 bp, Homo sapiens
  I.2971 (AI597729)
  misc_feature (352)..(352): n is a, c, g, or t
aggcaatgtttataaacttgtttttatttactaaatgccaactgatgcaccacttagtcctgaaagctctgaagacagaagcagttttttacctcctcaaatatacataggtgcattttatttgcaactggttacttttttatgtggcattctagttattaggtataaattacagtctgtgtagattatctcctttataagacttgaaatttctagaggaaatattgccatattcatatatgcaccatgcttccagccaggagcttatgaataataggtataataataagtaattcaatcagtatttatttaatggaacaaaaagcactttcttaccaaactcatatcaatntttaagttggtctcctttggtttcccccaatttctccaacttttcaatgcctcactaaattgaattgcataaaaca

SEQ ID NO: 2972 - DNA, 398 bp, Homo sapiens
  I.2972 (AI591136)
agtgggggaagggtgagaggagcttttattagcaaaaagagattacataagctgcttggaaacagagttcatcacttccagaggttcaaagccagagttgtcagttccttggtggagatgcaagtgttctttcaagaacatcttaaccgaattactgaaatcctaaagaatgtctagtgataaaccttatcaaagcaggagatttgtgaaggatatgaaaggatttttagaaagtccttggaaacagttcttatttcagatatgcaagcatgagcctcctctccttcagaccttcctggtcctactttgcctgggtctgagaaaagtgatttcttcctggtatctctaactttcacaagtctatgataaaattggttttgttaaaaaccaatttaact

SEQ ID NO: 2973 - DNA, 121 bp, Homo sapiens
  I.2973 (AI591129)
gtatttgaaatttttattttagccgcaaaaaaaaaaaaaaaaaaaaaaaaaacataaaaaaggcttaaaatcactaataacaagttacagttgtgggtctactgctgggggaaaggcaaga

SEQ ID NO: 2974 - DNA, 298 bp, Homo sapiens
  I.2974 (AI590227)
ttttttttttttttttttttttttttttttttttttttttttttttttttttttttttttttttttttttttttttttttttttttttttttttttttttttttttttaaaaaaaaaaacccccttttttgggggggggggggggggcttaaaattaaaaaaattttaaaaaaaaaaaaaaaaaaaaacccctttttttaaaaaaaaaaaaaaaaaattgaaaaaaaaaaaaaattttttttccccagggggcccccctcccccaagaggggaaaaaaaaaaaaaaaaattttttttt

SEQ ID NO: 2975 - DNA, 473 bp, Homo sapiens
  I.2975 (AI590126)
ggtgtaaagattcagttaaaaaatatcttccttcagacatctgctgactacaggaaattattgtcatagcccatgtgaaggtcataatgagactaagatgacgttttaaaactcctgaactctgtagggaaaagcaagtagaagctattattcttactcgctggtaacatactgtagatagctccaggactgagacccgaggcccggaggacacacttagtgttctccctatgtcacagtcctacaggccagccaaagtgagtacaactgtcccagcatgtcagttacacatactggccctaaatgttcagcataatttaaaagggaaagaaaaaagttggcttttcagacaaaattttgtgtgaactgaacaacgtcagactatgcttctttgggtccaaataatttaaactttacagctctcagatgttctggcagctcattctttgttcatttcacctattatacaagtg

SEQ ID NO: 2976 - DNA, 421 bp, Homo sapiens
  I.2976 (AI590111)
  misc_feature (371)..(371): n is a, c, g, or t
ttgagatggagtttagctcttgttgcccaggctggagtgcaatggtgtgatcttggctcaccacaacctccacttcccgggttcaagcgattctcctgcctcagcctccagagtagctgggattaccatgtgccaccatgcccagctaatttctgtatatttagtagagactgggtttctctatgttggtcaggctagtctcgaacttccaacctcaggtgatccgcccacctcagcctcccaaagtgctgggattacaggcatgaaccaccgtgcccagcctctaaagctaattttcaatcttattttgttaaaagttgttactgtatactttgtgtatttatttttttggggggtgggggtggagcagnctcactctgttgcccaggctagagtgctgtggtacgatcttggcttaccg

SEQ ID NO: 2977 - DNA, 405 bp, Homo sapiens
  I.2977 (AI590053)
ttttttttttttgagacagggtctcgctctgtcacccaggctggagtgcagtggtgagatcttggctcgctgcaacctcctcttgccaggttcaagcgattcttgtgcctcaacctcccaagtagccgggacaacaggcgcgcaccaccagccagctaatttttgtatttttagtagagacggggtctcatcatattgtccaggctggtctcgaattcctgacctcaggtaatccgcctgcctcagcctcccaaagtgctgggattataggcatgagccaccactcctggcctgaaacttggtgcttccttttaataagacatttcatggtttcagaaatgaatttgagtcaacacaaattaccacatttattaatgtttcaatttaatattgctagatatctta

SEQ ID NO: 2978 - DNA, 380 bp, Homo sapiens
  I.2978 (AI590025)
  misc_feature (333)..(333): n is a, c, g, or t
ctttttctcaaggcccatcaccaacatcaggaaaaacaatcagggctgtccaacaaaggattcgactcgccttctctggaagcattcaggcggatatgggggttggccgcctgttgaggaggctttagagagaattcctgcattgaggggaggttaaaatgggtgatttttaagatcccttctaaccctgagattccaagatccttgggatagtcaggactacattccaaattgggaatactgtcttcaaacccctgggaatctgtgaattttagggaatgtttggtgagtggctttttcttttctttttttcatttttaaattctgactttntattcttaattgcaaatgcacaaaaaatattctaaacataacaatgg

SEQ ID NO: 2979 - DNA, 451 bp, Homo sapiens
  I.2979 (AI589875)
aatgaactcttccctttttttgtcccagaacaagcttctcgcttacatgccctttacaaagaaaatttccctggctggctgccaacggtttctctgcccacttccattttaagcaatttttatgagtgtcccatctcttctcaaacaaaggcagatggcaaaacttgctggtttacttttaaagaaaacttgacccagactgttataagctaagaagaggctttgtgaagtcacatggcctgggtttacccatcaccccctgataagcactcacagctgattcccgtgcaaaccccagcatctcacactggtttcatatgggccataggaagcaccttccaaagtttgatgtgttcttcaacatctattcccatggcagatgacccattttgacccaaagggccccacagttctctttcggctcctgctagttctgcaaagcctcagcact

SEQ ID NO: 2980 - DNA, 249 bp, Homo sapiens
  I.2980 (AI588892)
  misc_feature (246)..(246): n is a, c, g, or t
ttttttttttttttttttttttttttttttttttttttttttttttttttttttttttttttttttttttaggggccccttaaataaaacattttttttttttttattcccagggggcccattttcaccaaaaaaaaaaaaacggggggcccccccccccccccccccccaaaaaaaaaaggggaaaacctttccccacaaaaaaaaagggaaggccggggggggggaagttttttttgccccccntta

SEQ ID NO: 2981 - DNA, 454 bp, Homo sapiens
  I.2981 (AI588838)
  misc_feature (382)..(382): n is a, c, g, or t
gtgaaataaagaagccaggtaattttaatgagccagctctcatttaaattaacagagggtaaagtttttgattaccaagagggtgatgccaagctattcatgagaaatttgcccccatgactagaacacctcccaccaggttctgcatccaacattgaggactgcgttgcagcatgatgtttggggaacgtgaacattcaggttgtaccatagataaactaggcttaacagacatgtaaactactttccagttaaaagcaagaaaacacacaatattcttatttgcacctggtgtattctgttaggatacacaacaagtcttattaaatttaggaataccaggtgggtgctgtggctcatgcctataatttcaacactttgngagaccaagatgtgaggatctcttggggccagaagtttgagacgagcctaggcaacacagtaagactccatc

SEQ ID NO: 2982 - DNA, 651 bp, Homo sapiens
  I.2982 (AI587389)
  misc_feature (448)..(448): n is a, c, g, or t
  misc_feature (590)..(590): n is a, c, g, or t
tccatttgaaagacactcatttatttgttaataacacaagccaaacaaaaacatatctggggatgaatctgcgaaacctactagggttaaaattttacttctcttaattgtttggcttccaaaacatatttggcttccaaaacagattcaaattcaaaaaatatttacggccagctgtggtggctcatgcctgtaatcccagcactttgggaggccaaggtgggcggatcacgaggtcaggagatggagaccattctagccaacatggtgaaaccccgtctctactaaaaatgcaaaaattatctgggtatggtggtacgtgcctggagtcccagctacttcggaggctgaggctggagaatcactttcacctggaagggcgaggttgcagtgagctgagatttgccactgcactccaacttggtgacagagtgagactctgtctcanaaaaatggaataattaaataaaaaataattgttcagagtgccactagggagaggtatattcattagaatggacaatgccttttaatggtatggttgccggtggctggctcacgcctgatcccacaactttggagggcgaggngggcgaacaagaggtcaggtcgaaccagcctgacccaaatgtgaaacctgcttactaaaaa

SEQ ID NO: 2983 - DNA, 596 bp, Homo sapiens
  I.2983 (AI587279)
  misc_feature (225)..(225): n is a, c, g, or t
  misc_feature (553)..(553): n is a, c, g, or t
tttttttttttttttttttttttttttttttttttttttttttttttttttttttttttttttttttttttttttttaaaaaaaagggggtttttattacatgggaacaggcaaggcattacgggggggggccccgggtccaacccccaaccccgggaaaaaaatagggaaaaccccccgttctcacattggccccaggggaaaaaaggatccccccgggggggnacgagaaaaccaaaattccttttccaaaaaaaaaaaaaaaaacccccctttttttttttaaaaaaagggccccccctggggggggaaaaattaaaaacccccaagggcgggcccccattggaaaaaggcccccacccacggggggcccccccgggccttaaaaggtgaacggaagcgccccaaaccctaattttgggaggtccttgtggtaaggaattcccctctctacggggggaagggggggagcatggaccctcaccacgagggacctttatgcgccctcgggggacggcaaaggtttccctttgaagggttaaatttggtgcgnaaagaaagaaaacccaaccccgaaccctaactcaatgatttgg

SEQ ID NO: 2984 - DNA, 414 bp, Homo sapiens
  I.2984 (AI587083)
  misc_feature (41)..(41): n is a, c, g, or t
ttttttttttggagacagagtctcactcttgtcacccaggnctggagtgcagtaactcgatcatggctcactccagcctccacttcccgggcccaagggattctcccacctcagccctccgagcagctgggatcacaagcatgcaccaccacacctggccaatttttttttgtagagacacggtttcaccatggtctggtcctgaactccttacctcaagtgatccacccgctgcagcctcccaaagcgctgggattacaggcgtgagccaccgcgcccagcccgtaattttttgtaaaaagttagatttcagtagcacagacattttcaccccaagcaatctgcaacccagaggcttctgggacctcacagctcctcaaggtgagatcgtatcaacctgaaaagattcccgac

SEQ ID NO: 2985 - DNA, 374 bp, Homo sapiens
  I.2985 (AI587036)
tgagagccagaacggaagtcttggttttatttatagttgataacttacatccggcctgctcctcaggaagcacagcagggaggagacagagcccaaaggagacggcgacaaaaatgcccaaacccctgagctaatgtggtgactgagagcaagcctaaagctcccttctgagctccccagcagccaaagcaaagagagaaacagggtcctgcagcatgatgtcacagaaaaccagggaccctggagcctgggttccaataagaaccttacattctgacgccttagatttctccctggaaaatggggagaaaaatactgaattggttgggagggccatgcaacacacccagcacagtgtctggatgcatttcaga

SEQ ID NO: 2986 - DNA, 677 bp, Homo sapiens
  I.2986 (AI583942)
  misc_feature (443)..(443): n is a, c, g, or t
  misc_feature (519)..(519): n is a, c, g, or t
  misc_feature (532)..(532): n is a, c, g, or t
  misc_feature (552)..(552): n is a, c, g, or t
  misc_feature (597)..(597): n is a, c, g, or t
ttgacggagtctcactttgtctcccaggctggagtgcagcggcatgatcttggctcactgcaagccctgcctcccgggttcatgccgttctcctgcctcagcctcctgagtagctgggactacaggcccccaccaccacgcccggctaactttttttgtatttttagtagagacggggtttcactgtgttagccaggatggtctggatctcctgacctcgtgatccgcccgcctcggcggatcaaagtgctgggattacaggcgtgagccaccgcgcccggcccacacagacttttttaaagttgctttgctggaagtttttataaggaatctcaaattaaacttttagaagtttaattgacactaggaagccaaaccaaggctgacttcagactttgtttgtagtacctgtggggttattacctatgggtttatatcctcanatacgacattctagtcaaagtcttggtaatataaccaatgttttcaaatgtattctggtatacaaagagcagattntattgaacttgtngcataactatataaccatancatataaatattcatgaataagttccaagtcttgagcgacacatnaggagaaaatgtaatggctcaatttttgttcacaaagatattttatcaattgtggtagctgggttgctttacagaaaaaa

SEQ ID NO: 2987 - DNA, 490 bp, Homo sapiens
  I.2987 (AI583530)
ttttttttttttttttaaggcactttcctttacttttagttatttttaaacacgtatctttatgctcagatctttcttttataactgggttataactggggagaataaaaggatccgggcatgagagaaagtgaaatcaagggaggaagagggcatgcaatgggggaagggaggagcaggaatgtccactttactgaatacaaaatactgtaaaagatggatcctgccatattcttcccccaatcaacttggatgaaaaacagaaatactacattcttaaacacagttcatttttagtttgtcgtggcaatacatggaaaaaaatcaggccactactaagcatctatagagtgtatctttggcaaaaatgtggacctgcaacaattcagatggttttctttcaattaggttcaaaaatcatggctctgtaaatttccaaaacttttaaagtcttctcatgtcttcttataatcgggcattcagaggtacg

SEQ ID NO: 2988 - DNA, 329 bp, Homo sapiens
  I.2988 (AI583425)
tttttttttttttttttttttgtagagatgggattttgccatgttgcccaggctggtctcgaactcctgagctcatgcgatctgactgcctcagctttccaaagtgctgggattacaggtgcgaaccactgcactcggcctcgtggctttaattcacatttctctgatgataagtgatactcacacttacatttctgtgtataaactttacattcagcaggtgcagaataatggaacgcttaagaaaaccgaaatttccttctttgaagactaagaagcaagaaagcaccttgcaagactgattttttaaacacgagagaaaaaaatac

SEQ ID NO: 2989 - DNA, 357 bp, Homo sapiens
  I.2989 (AI583413)
tcagaaagaaaactgttttattacacaattacatgtgaatgtgacatgcattacagtcaatttgctcaagagattgcaaagacagaaagacagtcaccataattcatctacaagtagaatttacagcaccatgtcatacatagttcatcctgaattcatctggtagctgggaaggccatccctgtatgctaactggttataatcaatgacaaagtaaagctttcacatcttcatgactagaggtagttttgcaacttgaaccccagggcctgctgaaggtaggctttgactcttctacaaaaagtgttgattcgggtgctatctttttggctatttacattttaaagcaatagctct

SEQ ID NO: 2990 - DNA, 322 bp, Homo sapiens
  I.2990 (AI583168)
ttttttttttttttttttttttttttccgtaaccctcatcactttaatcatccctttgaggactcagcaatgaccaaagggtgctgggaagggcgagcactacttcgcaggcacgggatcctcagcaccaggggaacacagtagttccaggaagttctgggtgttcctggccccgagggcccgcagccgctccgtcctttcccgatgcatttgctccagctgctcccgcagggcgcgccgccgcccagccgcgtcctcctgtggcgggagttgagccggactgggcgggagccccacggggtgaacccggcagtggcggttc

SEQ ID NO: 2991 - DNA, 418 bp, Homo sapiens
  I.2991 (AI583064)
tttttttttttttttttttttgcaaaccccattttattcatagtttggggttttttaaattagttcacaaatctggtacataccggcagttaaaactggttatcactttgataatcagaagcctctggtgtaacatagtcttcatgaaaacatattgtaaaacagggagaatacacagtaataatctttttgaaagcaatggctgtaaacatccatgtttctaagaaaatataactttacatatatatgtattttaagcaagctataccttttacataaattcagacagtagaaggagtgtgcaatcataatgcttattttatggaaacagtgaaaataattttaattatgacctaaatgcttctaagtaattaaagtccttttgaattggatgtatagtataaagatattttcccta

SEQ ID NO: 2992 - DNA, 433 bp, Homo sapiens
  I.2992 (AI582697)
actattttatttctttctcacttcttcacaaaatacaacttggataaagtgctcaattcttaatgttaacgaacgtatggaaagagttcatttcatttaaccttataatttatataggtaagttaccaaccacaagaactaaacctctgaggtaggcagtatcattctccatttagggatgagaaaattgaggatctgaatgtgaaatttgcccaaggtcacacaactagtaagttataagagcaacggcttcaatactaatccttcttcaagttcacagcttttttgaacttgaaggagtctgaagttcttcaatggaaataaactgatgaatactgaagagtggcccaataagttactgtctgctgcaaaagaccaaagaagtatggaagagagatttcaagaaaccatcttctttccaattcctcctggc

SEQ ID NO: 2993 - DNA, 285 bp, Homo sapiens
  I.2993 (AI580988)
tttcgttaaactcaaactgggtctatgtgacaaaaagtgaaaaatagagttaattgtctgaatgttttcaaatatacagatgctctagcactgtgtagacacagtgaccctgtacctgccccaggcacttttttcctgcagatgttctggcatgtgcagagaaggcctcaggttgggggaaatctgatgatgtttcttgagctaaagttgcgtacatattgtccattatttatccaatacaggaaatcagtttccatcaaaatacaattctagagggaaatttct

SEQ ID NO: 2994 - DNA, 239 bp, Homo sapiens
  I.2994 (AI580971)
tttttttttttttttcatttccacaattttattcatttcgaggaaagcccagaggattggaacatggatataaaggaggacaacctaagactgcaagtttcatcttccgaaaggctgcatttataagcaggctgccagaggctgcgctttctttctcactctttgcatccaggagcctggaggatcttgctgcctaccccccgccccacgccaaccccatgagacagggacaccgccgc

SEQ ID NO: 2995 - DNA, 535 bp, Homo sapiens
  I.2995 (AI580141)
tttttttttttttgtgtcacaaacaagaagtcttttattaaatacttgttcattatatttatagaaaggagagataaagaaaatagtttcaagattatacgtttgacaaatgcttatctgaaaattactaaagtcatttttgctcatataaaattagtcctttcagtaaatcaaactatttaatttacggatgttctctaggtgttactgtatagtaatgatattctgcaggcaattatgtagtaaaagattccaagcatgtttgtgatatgtttaattcctgacccttggctttatttagttaatattcttttgttctttcattcatttaatttaattcattcattcatgcaaaagctacttattgagagatttctacatgctaagcattattttaggtgttaagggacatgatagtgaacaaaaccagcaaaactctctgcccttatggatttcacattcatgtggctgcaaatgcaagagatcaatacaggcaagtgttaacacaaattggaaaaatcaaaaaagaagaggg

SEQ ID NO: 2996 - DNA, 397 bp, Homo sapiens
  I.2996 (AI579959)
ccaatcttttaataaggaaaatgtttttttcaaaataatggcttatatggagtgtcaacataaaaacaatataatttcaaattgataagtaaaatatagtcagcaatctcacatacgtcaaaatttggtatataacacacattctggagaggtgttgcttttggtcttactttttttccatttttaaaattgtaaaacacatacaaaatttagcattttaatgacttttaagtgtacacttcagtgtcattaaattcacattgctgtgcaaccatcacgaccatccatcttcaggccactttgcatcctgtgtaacagaaactctacacccattaataactcccctttctcccctccctccagcgtctagcaaccaccattctactttgtctctatg

SEQ ID NO: 2997 - DNA, 341 bp, Homo sapiens
  I.2997 (AI579907)
ttttttttttttttttttttttttttttttttttttttttttttttagagccaattgatttaagggaataagacacagtcattgaaaggctaaaaaaaacaatagcaacacaaaaaccacttgggagggaacattaaggggagcagcgggctaggccttttgggataatatcccgccctgaattctttaacactactggtaatttagggtcaaacggggttctggtctgaccataaaggtttctacattggatgaaaaagggtggctcaaacccaaagggaatttcttaatagcaaatctcatttattactaatcatttctttaatttagcatacccattt

SEQ ID NO: 2998 - DNA, 487 bp, Homo sapiens
  I.2998 (AI572592)
ttttcacattttaagtgtttattacagtagcaccccacttccaggtatcaaaatctgtgttagttggagttcagccagagaaacaggcagcagatgtgtagtaatcaatttattgcaaggaagtgacttactcagttttgaaacgtggctggacaagtccaaaatctgtacagcaggcagttaggaggggcaggctggaattctggggcataagctgaagctgctgtccttaaacaaaatttattttcatctcacggaagactcaactctgcttttatggcctttccactgattgaaatagacccacccagattatctaggagagtctccctattttaagtttagctgattggcaaccttaattctgtttgaaccttaatttctttgcaatataacatattcataggttctggggattagggcaggaacatcttggcggtcattattttgcatgcaataccattctagagtatctgcaaagttgaga

SEQ ID NO: 2999 - DNA, 436 bp, Homo sapiens
  I.2999 (AI572545)
  misc_feature (316)..(316): n is a, c, g, or t
tatttttgagacagagtctcactctgttgctcaggctggagtgcaggggtgcgatctcggcctgggaaaccgagcaaaactccatctcaaaattaaagcagtgtgtagagggaaatttatagcactaaatgcccacaagagaaagcaggaaagatctaaaatcaacaccctaacatcacaattaaaagacctagagaagcaagagcaaacaaattcaaaagctagcagaagacaagaaataactaagattagagcaggactgaaggagatagagaccacgaaaaaaacaatgaatccagagcctggttttttgaanaagatcaacaaaatagattagactgctaggccagactaataaagaagaaaagaggagaaagaatccaattaaatggcaataaaaaatgaatacaggggggatatttaccacccggatccc

SEQ ID NO: 3000 - DNA, 335 bp, Homo sapiens
  I.3000 (AI572216)
  misc_feature (269)..(269): n is a, c, g, or t
  misc_feature (271)..(271): n is a, c, g, or t
acaaacaatttttattatgaaaacaaaagctccccaaaatgagtaggcagttttacccccatcagtatgaatatcacttctcccaacagctatcacttcaggccctgtgaataagtggcttctgataaaacagcacactcatttcatgttgctcctcctccctctccccgactaccttcaagacatatttggctctccaaaaaaatacagaaccattaagtggacccagggagaagagtaaaggtaacacacacacaaaaaaacaaatntntggtagcaaatgctttagagcatcaatttttcatataaactattatcttgaactatgtctaatc

SEQ ID NO: 3001 - DNA, 425 bp, Homo sapiens
  I.3001 (AI571998)
gctatatcatgtggctttattttctgggatacaggtctggcatttctttctttgatgtcctcttccataaggttctctgggagcaagccacgcccacaggctcagtctcccagcacccccatagtttctcctctgcctcagccggcacctctgtcgtctgcgttcacaagtcttccatttttccattatgtgacgcattctttgttttgttttctgttactgagttttgctcttccttcagtttcttcttaatatttttgcttctttttgatataataactgagtggatgaacttttccagctcattttcgttctctggaagtaggtgcgtggactcaccctcgtcctctgagccctcttcttcatctcctaataacggtatcctgaggttcttataaagtgactcgagctgttgtctttcctca

SEQ ID NO: 3002 - DNA, 407 bp, Homo sapiens
  I.3002 (AI571569)
  misc_feature (355)..(355): n is a, c, g, or t
ttttagatttcttttttttttattttacaatttataaaacatcagccgcctgcccccgctcgcccccagctcagccccgagtggcccggcgcccgctcgttccctcctctcgcccctttgccgagtctttgtctggccccagccccgcggggccccgggtccctgtgccctcgggggtccctagaaggcgacaatggctcgagtccaggcgccgaggctggcgagcgcctgcttggcgcacagctgcccgttgagcggcggcggctgctccgaggagtccggctgtcggctcaccagccccgagaagccggagccaaagatggagatcaagtttgagatgttggacgcgtccggngacgagtccgggcagaagtcctcgaagcgggcgcgcttgcagggggcgaacg

SEQ ID NO: 3003 - DNA, 441 bp, Homo sapiens
  I.3003 (AI570779)
tgagacagagtctcactctgacacccaggctggagtgtagtgcagtggtgcaatcttggctcactccaacctctgcctcctgggttcaagcaatcctcctgcctcagcctcccgagcagctggaactacaggcatgcaccaccacgcctggctacttttttgtattttagtagagatgggttttcgccatgttggccaggctggtcattaattcctggcctcaaatgatccacccacctcagcctcccaaagtgctaggattacaggcttgagccaccgtgaccagcccaaagattctgaaatagaattagggccaaccattcgctatagtaatagatactatgtcaaatgtggctgcatgctaggaagtgctacacaatcaacagggtaacttactagagctgcacactgcagaagaaatacaccttaataaaagcattg

SEQ ID NO: 3004 - DNA, 188 bp, Homo sapiens
  I.3004 (AI570756)
ctgcattaaatactacacacaatgggaaaacagtattttctattatatcaggttatatattcccaagttataaaaataaatctttctgcaaataaaaaacaaaaacagaatagtctgcattataagttttaaaaaatatggcaaactaacctgatatcatgacttttttttggccatgattatactga

SEQ ID NO: 3005 - DNA, 145 bp, Homo sapiens
  I.3005 (AI570749)
cccccaaagtgctgggattacaggcatgagtcactgtgcttggcctctgccctaatttttaaaaaaattttttgtaaagacagggtctggctatgttgcccaggctggtcttgaacttctgggctcaagcaatccacctgcctcg

SEQ ID NO: 3006 - DNA, 450 bp, Homo sapiens
  I.3006 (AI570503)
tttgatggttccgaggattaattataacagtcaccatttattgagtttattgccagtctacatgttcgctaaaggactctccatgtcttacacctgaaaccctcccaccagcctgggagcccgttttacaggtgagaaaatggaggcacagagaaggtgggtcattttcccagaacacacagctgctaagtggtgaagttgtgatttgaatccaaacagtgtggatccagatcccgtgctcttaatgcgggctctaaatgaggctagaggagtgaacggtgagcccctgggaggtaggtgcctggactctggagtcccttctcagcagtcgccatgtataactaggaagcactcgcatttaactggatcagtatgtccccagactgagcttcttggggacaggatgttggatgaattaattaacgaatgaatgaatcgggcaaggaagac

SEQ ID NO: 3007 - DNA, 517 bp, Homo sapiens
  I.3007 (AI570096)
ttttttttttaaatatacacaatttttaataaagaaaaacacaaatcaaaagcccagaaattatcaagaaatattcggctccgccgtcaggatttcaggtccagcgaggctgagttaatggccagagtagcagagtccccaattttagttctacttcctcatttaccgcgctgcataaacaggtctgtggaaatttaacctctctgagctgcagctgcctgatttgtaaaactgtgattccatttttgatatattacaacagagtactgcatcagataattcctcaagctatttctagcttaaagaattaagttttatgtctccctactacttaacgcctttataacacttcattctggttctggtacttgggattaatatatactcttaattttcaaatttaaaaatatctgaggggccggcgccgtgttcacgcctgtgattcccacactttgggagcagaggcgggggcgtcacttgaggggagagttaagacagccgggcacagggggaaacc

SEQ ID NO: 3008 - DNA, 516 bp, Homo sapiens
  I.3008 (AI569653)
atagtgactatgttccccgaggaatgggagctccatgagggcaggggcctcccagtctggccacctctgaatgcagcccacagaacagtgctttgtatgtggggcactgagatgatctctgtggaagaagtgaggagtgatgctctgggccctgagagggaagcagagagaccccacacgcagacccagccccgaccaaacactcaggccaagcaggaggatatagcaagtgctggggaagctgtagcacaggtcagaaatgttaaaagaaagtggcaagaagttgtaagaaaggagtggggactctgaagaaaaatgaagaggaagggacagatgtgaggacactacagggaggacccaggaagaccaggccagcagcagtgctatgtgtgctggggatgaaagagggcacagaggcttcaagctgggagctggcccaagttcatgtcaaaggcactaggcccacctgccccagaaaccagcttcctcagctcccaggagagttgtctgcatgac

SEQ ID NO: 3009 - DNA, 319 bp, Homo sapiens
  I.3009 (AI569613)
tggcttaaaaaacaaatttattttcacagttccaaaggctagaagttcagggtcaaggtgccagcatgatcacatttctgtcttggagatggccatcttctttgtgtgtcccaacatggaagagatagccaatgagctctggtttgtctctccctgttttcataagggcacaaatcctattggattagggtcctcatgaccttgtttaaccttgtttacctcccaaaggccccttttcaaatactatcactgtattagtccgttttcatgctgctgataaagacatacccaagactgggcaatttacaaaagaaagagg

SEQ ID NO: 3010 - DNA, 117 bp, Homo sapiens
  I.3010 (AI569384)
tttcgttttgttttgttttttaccaattggaataattcacgtttaatgtttccaaacccttctgcctgcaaccgccgtcctggggatgagaaatctctggggagaggagttttgggg

SEQ ID NO: 3011 - DNA, 320 bp, Homo sapiens
  I.3011 (AI569083)
taatttttacaattcacatttattttgggaaaaaaacggttctgctaaaaatactcctacaaaggcattggagtaacagggtcagggttgatcttggacacagctggtgagatttccttggtcacagcagtggggtccggaggagccaggtctgacccacggcggttggaaccccagctgtatcagtccctgacctcccaacattgtcaggaaaacccatatttatgaccacaggaaacagggttctgggaaaccctgccagacagccccataccctggttgagagctccggtctgcatagctcaggctggggcagacac

SEQ ID NO: 3012 - DNA, 536 bp, Homo sapiens
  I.3012 (AI568793)
tcaagagaaattatttatttatattacttatatcatacatattaatgtatagcattatctatatttattttttacttattattgggagtaaggggaagaacttgaactagtaacatttctaccagaacttcacagtaccggtgttttcgctttattttaaactagccatcatgaaaaatctgatttaatactttcaagcactttcagttatgactattcaatcatgatatgaatcagcaaattggttgctccattaaactgcttttaagactaccaaaaacttgcccagctcttctgtcatacctttagcagaggaaatggaagaagctattacaaggacgcctgaaaacttgaaaagtttcaaaacctggacaattactcaacagcattttcctctgaaagacattttgtagacgtttcccatgattatctcctattccggatggcccatcaaatcacattctaaacaggcattcaacacttattaagcagccactgtgtgcagagacagcactatactaagcaaaggagcatag

SEQ ID NO: 3013 - DNA, 506 bp, Homo sapiens
  I.3013 (AI568609)
tcacagtgaaagaggcacgtttattagaaatgactctgttacagagcagaaagcaagcagaggacacaccaacttctttttccatttttcttacacagaagtcttgtctgcaaagcgaagtgaagctgtgcatatgtgcagctgagcagagagcatgacaaggtttatcattctattggtttaaagaaaaccatccttgacattttagtgtgtcagtcatcatagcatgactcttactatcttgaaagcatagacctaattatgggtattggacgtctggactttctgttcttggagtttgctttgcaggcatcaccaagctgcttccttagctgtaaacatcttaggaccatggcttgtgtgtggcaaggagtgtgccttgctagtttaagacggtgctgattttaaaatggtgtcaccctggctcctctggactcctgcctcgctaacagtccagtgactgtccatggggctgctaatcaagtccacagcaggaagcagcctct

SEQ ID NO: 3014 - DNA, 398 bp, Homo sapiens
  I.3014 (AI567916)
agcggccgccctttttttttttttttacatgtgatacctttttttaatggcttataattttagtttaaaaaaattttaatacacaataactgtacatatttatgggggtacatagtgatgttgcaatacatataacatatagtgattagggtaattagcatatctatcatctcaaaaacttatgtctttgttttgggaacatgcaatatccttcttctagctatttgaaactatacaatattgttaactatagtcattctacagtgctacagaacactagaacttatacctcctatctagttgtaattgtgtattttacaactttgaagtaggtgtaattatccctatttagactatacctgtatgaaacagaaattattttcattttacagatgagg

SEQ ID NO: 3015 - DNA, 452 bp, Homo sapiens
  I.3015 (AI567795)
gatggtccacttccatttaatgaattagtaaatatattttctcatgattttaattacatttttttctctagcttactttattataatacagcacataatacacataacatgcaaaatatgtgttaattggctgtttatgttattggtaagacttccagtcaacagtaggctattagaagttaagttgtgggaaaatcaaaggttataggagattttcaactgcatgcagggccggtgcccctccccactgtgttgttcaagggtcagctgtactctctaagggctttgctaacttcaaaacatggagtatttgaatacagaaaccagagcatttacatactcagctcaaggcagagctattaaaaaaactcctcttctccatatgtaggaaaggaaatacaaatgcatcctttgagtcatttgtgatgttgtaaataaaatgagattaactc

SEQ ID NO: 3016 - DNA, 214 bp, Homo sapiens
  I.3016 (AI567719)
ttacaatgcaaaaatgcaaagtttattttcttaaataaaatactatattcatatctatacaaataattattacaaccattaaaatgttacatttaacaataaaaatttccaaactttaaacaagaggatggttcagaatattcacaccctaatacaatgcatttgtaaaaagatgtcaaaataaacaggacctattcttatttacaactgtagg

SEQ ID NO: 3017 - DNA, 114 bp, Homo sapiens
  I.3017 (AI567625)
tttttttttttttttttttttttttttttttttttttttttttttttggcaggggggaaacaaattttaattcaaaataaaccctctgaaaacaatggggaaaaaaaaaaaagg

SEQ ID NO: 3018 - DNA, 221 bp, Homo sapiens
  I.3018 (AI567338)
ggaaaaggattcagtttattctctggctccaaggaacaaacttgatattactgaggaagttatagacatggattttagcttaatgcagatgctcctttacttacaacgggcttcatcccaataaactcatcgtaagttgaaaatattgtaagttgaaaatgcacttaacatatctaagctcccaaagattcacagtttagcctagccttcctcaaatattc

SEQ ID NO: 3019 - DNA, 423 bp, Homo sapiens
  I.3019 (AI566716)
  misc_feature (270)..(270): n is a, c, g, or t
acatctatggtattttattatagctgcccaaacgaactaagacagaacttaaaaaaggaattacacttcttattttgtacctgttttcagaaataaaaacatgacctagagtcttacatcccgtggaaatccatgctaagaagatagatacagaatcctcccttgattttatgagctgttatgcaactgcagtttatttagaaacaaactggcccaacaagagcactcaggcacataagctgaaagtaacaactcatggttcgagagttntctttaattcatggagagttcatgtttaattcatggttattcaagcccaaggtaactgcattctcactgcttgttgaaagaacagcctcgggagatttttttccaaggacattgctttggaaagaaaataggatgctttttcttgattctcaa

SEQ ID NO: 3020 - DNA, 469 bp, Homo sapiens
  I.3020 (AI566684)
gtattttttgtagagacagggtttcaccgtgttaaccaggatggtctctatctcctgacctcgtgatctgcccgtcttggcctcccaaagtgctgggattaaaggcatgagccaccgcgcccggcccaagctgggttttattgttgaaatgaggcctctcactgttacccaggctggagtgcagtggcacaatcatagctcacagcagccttaaattcctgcgctcaagtgatcctctcgcctcagcctcccaaatagctgggattgcaagtgggaaccaccaagtctggctaatttttaaattttgttgcagagacaaggtctcactatgttacccaggctggtctgcaactcctggcctcaagagatcctcctgccttggtcacccaaagtgctgggattacaggcataagccactacacccagaccttgtccttattttctgtatcccaggcaatttgccaaacaa

SEQ ID NO: 3021 - DNA, 137 bp, Homo sapiens
  I.3021 (AI566505)
ttaaaaataaaaagaataattgatttatttaagaaatatttgtagtatacctataatatgatagggattggagataacttaatagatttgatcattgctgtcatggggctttccagtctagtagagggaaaacagaa

SEQ ID NO: 3022 - DNA, 294 bp, Homo sapiens
  I.3022 (AI565884)
tttttttctctcttggatgtatcaaaatctcattgaggcattctaaaccaaagaaacctctgaatttgaaacagggttagtagggacttttatacccagctgggcatcccagaagcctggactctcaggactgtggctagattttgcccatgatctgtagattatgctcttgcaccggagacttgaaagttatgagtttgcattcaaacaaagaaccaccagataaacagatgttctctaaaactgaggaaaaaaagtttagagatatacactgtatagagaaagaaagctttt

SEQ ID NO: 3023 - DNA, 827 bp, Homo sapiens
  I.3023 (AI565672)
  misc_feature (30)..(30): n is a, c, g, or t
  misc_feature (271)..(271): n is a, c, g, or t
  misc_feature (283)..(283): n is a, c, g, or t
  misc_feature (644)..(644): n is a, c, g, or t
  misc_feature (675)..(675): n is a, c, g, or t
  misc_feature (690)..(690): n is a, c, g, or t
  misc_feature (696)..(696): n is a, c, g, or t
gtttatttacaaggttgtttattgcattgntcctaacagaagaagttggtaataacctaaaagtccaacaatgggaaatttattaaatagcatgtatccaccaaaaattatattatagaaccatattttatgtgattacatttgtgtttgcataatctatatatgttaagaaaaaaaggactggaaggatatatgttcaccaaaatattaagaatagtaatatgagggctttaagaacacagtagaatgatttctgcttccctttcttggntattttcacagntttcagccataatcctgtaataatcttattgagggggagttattttttgatgcttgtgttttaaacgttatgggcagagcataacagcccaggagggtggcttcctgcatagccctggctggctcctctcagccctcatctgtggagtcaggttggcctgtctagtggggcatggaaacacaggcttcagtggtctcttcccgtccactgaagtcacctccaccctcttattcctggcatttgggtaatttttctgtggacgtttaatttgcagcaacatcagaagcagagccaggtacctctctggctgctgctgagcttcccaaagcctgataacacattgggctgcttactccatagnctggcaaccagatgcttcttggctgtccttnccttttttccacccnaccctncccttcaactctgctcctggagctccccagaaccacatactttaaggagaagtcggaagactgggtggaagtgctggccatgaactccgcgacttgcgcagggccaaatgtttggagagtgttcccttctt

SEQ ID NO: 3024 - DNA, 369 bp, Homo sapiens
  I.3024 (AI565479)
ttttttttttttgtgaggcagagtcttgctctgccacccatcaccgaggctggagtgcagtgacaccatcacagctcactgcaccttcaacctcctgggctcaagtgattctcctgtctcagcttcctgagtggctgggaccacaggcatgcaccaccacgcccagctaatgtatttctattttttgtagagacagtgtctcactatgttacccaggctggtgttaaactcctgggctcaagcgaccctcctgccttggcctcccaaaatgctgggattataggcgtgagccaccgtgcatggcgcccagaggatttcttcaggacaataagttcaaatgtaaatggagtattcttttgtaatctcctg

SEQ ID NO: 3025 - DNA, 222 bp, Homo sapiens
  I.3025 (AI565469)
  misc_feature (46)..(46): n is a, c, g, or t
ttttttttttttttttgcaggaaattgcaattttatttatgtttgnattgatacatatttgtacatatttatggggtgtggtagtttgatatatgcatacaatgtgtaatgatcaaatcagggtgtttaggatatctatcacctcaaacatttatcatttttgtgtttggaacatttctaatctcctagttattttgaaatatataacatattgttaactat

SEQ ID NO: 3026 - DNA, 281 bp, Homo sapiens
  I.3026 (AI565418)
gcatgtttgtatcatgtttatttaaatgtgaattcatgttctaatatttctatgaccttccattgctgcaaagcagattaaagtgtaacaaaaatatcagctctttaaataaactggaaattaatctaattttgtggaagaactttaagacaagtctatgaggatggcgaaaacaatggtccacatatatagtttcttgatcctaaataaaatggtacctttgggccctttgtttagtctggcaattttctgactactatgggctttttaaacagactcac

SEQ ID NO: 3027 - DNA, 305 bp, Homo sapiens
  I.3027 (AI565391)
  misc_feature (241)..(241): n is a, c, g, or t
  misc_feature (264)..(264): n is a, c, g, or t
agaagagaaatccatttatttgagatttgagggaagaaatgcctggtgattaaaggaataagcttacaaagaaccttgaggatatataaggaaaactggcaacaagactacatggtagcatggaagggaaattgggcttgtgatcactggccaaaagggacaatgcccaggatccaaagcaacttgacttttatggattaagctgagccaattttcatacttctgggtcttaaagtttttntcagtattgtcccatgaaaccgnaatgtgaaaggaactcgctaaagcatgagagaaaaacagaa

SEQ ID NO: 3028 - DNA, 457 bp, Homo sapiens
  I.3028 (AI565083)
atgataaagtgaaaaaactttattggaaaaataagggtttactcaatattctccacaaattaaaatccattttgaggacagcgaataatacagtggcatactgatagtcctgagattgtaaggactggagtaacccactagggaatggcttacttatttttgtctcatttcctgaggtgtaaagggaaagaaggtgggaatttaatcatgacaacctcggttttaaacacccattcatgcaaccacagtaacctgatctatgatttaaggtaaaatgacttctgttaataataaagtctaagactatttaagataaaaggacaacaaaaaaagaactcgttcaacatacctttaaattggccacgggtacataaataaaaagtccttttaaattcaacaatagaaaatcagtagatctggatggaaggcagctcagaggaacagaaccaaacaagtt

SEQ ID NO: 3029 - DNA, 374 bp, Homo sapiens
  I.3029 (AI565071)
tttttttaatgtccaagaccaagtgatgattttcctgtataggttctagaagcctaatttgtgtgtgcaactcaaacattcgacaaacataagataccaatctgctcagcacttactatgaattcaatgtgattgtgcataccaccttactttccaaatcaaggtatacagcagtggggataagtgatgttaattttaaaaatttaaatatttttatactaaaataaacattatggagtagcagatgcaaaatctgcatgaattcttaagataaaaatgaagactgcaaagaatcatagatttctcaaagggtcacattgaactatgccttcaggactcctggagtacaagcacatttgcccaaattgttctgt

SEQ ID NO: 3030 - DNA, 438 bp, Homo sapiens
  I.3030 (AI565002)
ttcttttctccttttttttttttctttttttgagtcagagtctgtcgcccagcctggagggcagtggtgggatcttggctcactgcaatctctgccttccaggctcaagcaattctcctgcctcagcctcctgagtagctgggactacaggcctgcactaccacacctggctaacttttgtatttttaggagacagggtttcaccatgttggccaggctggtctcgaactcctggcttcaagtgattcgcctgcctcccaaagtgatgggattacaggcgtgagccactgtgcccggccagggtttttttttcctgaagggctgatcatggctttgttccactcactgtgcccttcttcctctgcttggaactggacagaagttccaataagctactgtcttctattaagtaaggaccagacatgaaaaactttatgg

SEQ ID NO: 3031 - DNA, 412 bp, Homo sapiens
  I.3031 (AI564923)
atcaggaacgaatgtatgtttcctttattgactgctgactatgtagagcataccaacaaaattgccattcatctatccattcaacaatatttattagctattccgcactgggcagtgctctaggcttggggatagaacagtgaacaaacaaaatccttagcctaatggatattacctggaagtgtgccaggaagaataaactcacttgtgaattacaacaataagtggtttattcaggtcaaaatcttgttttgtctcctgggaatttcactgaattgcatcatgtaggaggcaaactataccccaagaattaagagcaattgtgaataaatgataaaccacagagtttacatttacctcctaatacatttaactcctaatatatatatatacatatattacgaggtaaatg

SEQ ID NO: 3032 - DNA, 220 bp, Homo sapiens
  I.3032 (AI564765)
tttttttttttttttttttttttttttttttttttttttttttttttttttttttttttttttttttttttttttttttccccaaaaaaccttttaaagggggccaaaaaattggggaaaaaatttggggcaagggggtccccaaaaaaagccccggttttaaaaaaaaaaaatttaaaaccgcccccccccaaaaaaaaaacccaggggggccccaaaa

SEQ ID NO: 3033 - DNA, 332 bp, Homo sapiens
  I.3033 (AI564682)
tttttttttttttttcattcataaatacaaaattttatttgcacttcattagggtagaaagaccacaatgcttttcataccacaacactcaagacacaccaagttattcaaatacataattacttaattaccttgactaaacaaaacagggcagtttaataaaagatataccaaagacagagttcacaaattcatcatcagaccaaaaaaaaaaaaaaaaaaaaaaggaacccagtctaggcttaatcagaataagcttcaccgtaaagaagggggaagttttatcatatcaaagaacatacgtgtttttgcctaaacactctgtccctttg

SEQ ID NO: 3034 - DNA, 477 bp, Homo sapiens
  I.3034 (AI564482)
attagtttacttgtttattgggttatctgtgcccctcacccccaaaatgtaacctccagcagggaggatgactcggtcagtcctgattgtgctgtagtccaggacctagaacagagctccatggacattcatgggctctgtacacacaaacacacacattaacatacaccccgacacacagcctcatccacacacacacagcctcacacctgctctttgcagccacctgcacagtttctcacacactcacttgatctagtgatctgcgtccacaggcccctcccccagcccactcatactgccctcaccccactcactctgccctcaccccactcgggggaactctgctgccaggccaggcctgtgacactcaccgtgagtgaagtgaacgttaggcagatgccaccaaagccattcagggacagcgccaggaatatcaacggagacagagctggaaaggggaaagcagcagatgag

SEQ ID NO: 3035 - DNA, 470 bp, Homo sapiens
  I.3035 (AI564440)
ggaaaataaagttttttattttaaaccatattttaaattatcattttgactaaatccataacatacagtgatctgtaataattctattttataatatcaagtgttttgaagaactccaggaacagccatgagagaacactgtggtttagtaacactttatttcctcagtttgaaaatagttgtctttcttggggaggccggtttcagcagatgaaaacaagagtcatgatgaaaattacccagcagtggttagtgtgaccataggaacattgtcatcaggtcagcagaaaacatatcagcaaatttttctcatactggcagtgtgtaggggtggatgtttacagttcctgaagccccagtggtcgtgtggtcttttagttttgccatttataggcaacttgtggtaactagctcaattagacacattccttatcacaaggacagagggctttctgtatcctagggttctt

SEQ ID NO: 3036 - DNA, 441 bp, Homo sapiens
  I.3036 (AI564241)
  misc_feature (379)..(379): n is a, c, g, or t
tttttccatagacaaatctcaacactttattcatcctgtggcagcaagaaggggacatggccccaagatagccaatcaggtgaggtggctggagtatgtgttatctttccagatagtacatacagactgatcatgcagaaacaggaagggaagcaataagttaaaagccacataagttatgaaaaaataatatatactttatatgtcttgtatccccactgaggatttgctcccttggaaaccaatgaagagcctgaggaaaagcaccaatcagcaccctcttttgggactttggggatgagaatctctgagttcccatggccagagagtcagtaaccctccagtgctccccacaggcctggagggccttgaggcctgngatgggcccagacctctggccaacatgtcctggaaaatgagatgaatgaatctaatgcagtc

SEQ ID NO: 3037 - DNA, 229 bp, Homo sapiens
  I.3037 (AI561302)
  misc_feature (208)..(208): n is a, c, g, or t
ttttaaaccaaccaaacatatgtcttattttggatgttctatatgttcttacattctctcaggtcttttgtgtcattatgaacacaattctaacaagcttgattattttatttccattcacatattacaggcaacaagctgaaaaagtagaacggggtgtagagagacaggaccaaagtacagataagggcttggaagtgcccctganccagtcgacagcaaccacatg

SEQ ID NO: 3038 - DNA, 169 bp, Homo sapiens
  I.3038 (AI561278)
tttaaatatatatgtcatttttaaagtactgtagagcatccatccatccatccatccagcaatgtgactttttcatgtctttcctaacacaaaaggtctatgtgtgtggttagtccatgaactcatggcattttgaatacatccagtactttaaaaatgacatatatat

SEQ ID NO: 3039 - DNA, 452 bp, Homo sapiens
  I.3039 (AI561253)
accagtctttaaatctttttgctaacacagtattttccagggcattttttgttctatttttttttaaagcagctgaaacaggcacttgtttatttccccagaaggaggcagaatggggtccttggggagtctctgtcccagcctggtgccccggacaggcagatctcacttccagaagagcacattccagaaaagtagtcagcaagggcagaggcccagggacagcagtgggaagagcagggcaccttaggtgtggtgctccagcgcaccctgggccagtgctgccaggaagagctgccagcccttggccagtgacagtggtgcctcctgcagctcccgccacaggaatgggctgccaaggagcatggctgccgggcttgtcaacaccagcagggcagcacagagggtccagggcccaaaggctcggcgagcacagcggcagcaccatagtg

SEQ ID NO: 3040 - DNA, 500 bp, Homo sapiens
  I.3040 (AI561153)
agcggccgccctttttttttttttttttttttgacaaaattaaacaatattttatttaaggatatatgaacataagcttaaaaagaaaaccaaaatgtaattaataaaatttaggataatagttggagagggtaatacatcatttaagattagcatataggggactatgcagagatacattatttgtgtattattctttaaatggtgcctatagtttgtatattctatttctaaatatgtttctaaaagccacaagcaaattcaaagacaaaagacacgtgaaagaaatgtttggatcatattacaatggatgaattttccttatctataaagagtttatatgaatcaataagaaaattaccaacaatctaatgaaatgaatatgaaaagttcacagaaaagaatatactgtacatatgttaattaaacataggaaaagatgtccagcttcacttaaaataagaaaagtgctaattacaatttctgagagatataatatt

SEQ ID NO: 3041 - DNA, 429 bp, Homo sapiens
  I.3041 (AI561115)
ttgattgtacactttatttctattattattacactgtaatatgtaatgaaagaatcatacactgaaccataattcagaatcagtgggagccctgagcttgttttcctgcaactagacggtcccatctgggggtgatgggagacggtaacagatcatcaggaattagattctcataaggagcgtgaaacctagatccctcacgtgcacagttcacgatagggctcatgctcctctgagaatctactgctgtgctgagctgacaggaggtggagctgaggccgtaatgctcactcgcccaccacgcccctcctgctgtgtgacccgggtcctgatggaccatggaccagtaccagtatgtggcccaggggttggggaaccctgctcttaaggttcccaattatcagctctgaggtagttcaagcaacagag

SEQ ID NO: 3042 - DNA, 260 bp, Homo sapiens
  I.3042 (AI561032)
ttttttttttttctgtttaatgttttattaaacataggggtgggttaaaccactgggttttaaatgaagcacttagagcttttcaacttgccccatagctttgtctcagaaccgatcattctattatcattagttttgagaatgccgtgtaaagagcaaagtaaccactggtggttacactccggagcgggcgaggacggctagttcctgcagtgcccaggcctgctcggaagcgccctggcacaactcagctgaggata

SEQ ID NO: 3043 - DNA, 354 bp, Homo sapiens
  I.3043 (AI561026)
  misc_feature (285)..(285): n is a, c, g, or t
  misc_feature (330)..(330): n is a, c, g, or t
ttacagttttaattttttattcatcaaacatctcaggagttgtgctgcgagtttgtttgtatcagttttgtgggatacacagacagttttacaaacatgaagtctcaggagagctgacttacaaaatcctatttaacctctacatagaatattgaatttccgaatgaaaaatcagaagaaatcacaccattctaatgttaacaaatgaaaaaattataaagaacatttaaagtttatcctgaaaattaattcttaagaaaagaagatttaactaaagagtagcanagggaaattaaattattattaattagggaaactaaatgtattaanttttcccattttacaataaaaagc

SEQ ID NO: 3044 - DNA, 457 bp, Homo sapiens
  I.3044 (AI560854)
ttttttttttttaagggcatctagttgtattgtatcagaacaagcaaggaaatcccataatgttctttcaactgtttttacctataagattttgcaaccaaagactttcggctaagatggccacaggacatttaacttgtaagggctagtatgaaggtactacaggtataatgcacatcatctagcccaccaggaaggaaatatgcttaataacttgccccaggctgtcccaggacaaggatctctagagaaaagacaacctacagactagttgcttgctgttttccaaaacatttgttggaagaaatcacatgacacatgtatcaggaacattttctaattatgtatataaatgggtatgtgatatgtgtgctatttgtgtgctaatgtcctaagtgaagttctgcagaccatctgggtcaaaatgcatttcgcatgatcaaaaatgaagaaccac

SEQ ID NO: 3045 - DNA, 492 bp, Homo sapiens
  I.3045 (AI560847)
tttcaatggcatgaaagtggtttaataaagtcagtcatgatggaataccaggcagccattacaagtcaagctacagacaaataatgacctcaaaaaatgttcacaaaatagtagtacaccaagacaaaagtgcattttcaatatgatcatctgaaaaatacagtattctctttgcaaaaatgtagatgtacttacaaatgcattgtaaaagtctggaaggatttataccagaatattaatcaatattttcatcttattttaaaatttcctaaatatctgaaatattcttcagagaacctcaattcctttgtaatcagaaaaattagttaaaatattaaaagcaggcaagtaatatcaacaagatgatacactaggagatcccagctcttgtctccccaacaaaagcaagaatttaacagctacttgccaacaaaaatagctctgagaatactccagagtacagtgaagaagctgcaggaacccattaaagca

SEQ ID NO: 3046 - DNA, 284 bp, Homo sapiens
  I.3046 (AI560533)
ttcagctattttttttttattaaaattgagtgcctatacctatagagaatcaaggtggtagatacaaaggtgttcactatacaatttcttcaatgtttcagtatttttgaaatttttcacaacaaaatgttaggggagaagcaagtcctgcactccaaccctcctcccccacagtcccagctgcacacactccttcaccacagtggctgtttcagaactccacctccacctgggcttcctcggtaactgccagctctgctcacattagaaggctctttgtagcc

SEQ ID NO: 3047 - DNA, 634 bp, Homo sapiens
  I.3047 (AI560242)
  misc_feature (271)..(271): n is a, c, g, or t
  misc_feature (459)..(459): n is a, c, g, or t
  misc_feature (487)..(487): n is a, c, g, or t
  misc_feature (488)..(488): n is a, c, g, or t
  misc_feature (499)..(499): n is a, c, g, or t
  misc_feature (539)..(539): n is a, c, g, or t
  misc_feature (582)..(582): n is a, c, g, or t
  misc_feature (601)..(601): n is a, c, g, or t
ttttttttttttttttggtttaaacaaagaagtttattttctcacagttctggaggttagaagtctgagatgaggatatcaccagcatggttaggttctggtgaggactctctggcttacagctggctgctttctcaccatgtcttcacatggcccaaagagacagaacaagctctctggtgtcttttcttgtaaggacaataatcccatcacgaagtccccaacctcttcacctcattcaaacacacttaccttccaaaaggcccatctnccaataccaccacgttggaggttagggcttcaacatacgagttttaaggtggcacagtcagtctattaacttcctgtccatatattagttatgtattaggcattatgtattacctaatacatagctaatctgtattagtcagggttttccagagaaacaaacacatacacacatcctgagagagatangagagagagactcatatagaaggagctnncaaatattttnttttgtgtgtgtgtgagacggtttcactcttgttgcccangcttgggagtgcatggcacgatgtcggctcacttgcacctctngtctgcggttcaaacaatntcctacctagcctccaagtagctggattacagg

SEQ ID NO: 3048 - DNA, 417 bp, Homo sapiens
  I.3048 (AI560210)
tttgttatatccaaatcagacttttaattttcacagatatgccaaattgtctgttccaaagatgggcatcacaatacatcccattccatgtgcttctcttgctatgtaacactgacactccttccaacaggtggtagaagtctgtcttctccccgtgctcctaggaagaccttcatgtcctccttgaccaacaggggatggtggaagtgactctgtgtgacttgtgagacaagattctaaaagtcatgcacttctgccttgttctcttgggataactgctcttggaacccagccattgcagtgaggaagtcaaatagctccatggacatgccatgtgtaggtgttctggcaaacagccccaggtgaggttccaactgacagccaacgtcaaccacctgacgagaatgagtcttccag

SEQ ID NO: 3049 - DNA, 477 bp, Homo sapiens
  I.3049 (AI560196)
tgatatatgtttacttttattaaggaaaaagaatctatgaacacaggaacagaaatcaggagatcttggctctcgccctttcagtgccacaaagctgttttgtgaacctgtaaataatccatttggagtctccatgtttctcaattgtaaaatgaggatgtgctgcttctacacatttcacagggtcattgcaagaataaaatgagacaatgagaatgttggatttacatgcttgtataagaacagaagatcttttatgcctgtacacagaagaaatggaaatcatgacccacaaggcaccaaataactgactgcacacatcactaaaaaagccccaggaaaggctagccggtttgtttatcctcttacaaggacctatatgatgtgtaaggttttaagaaaacaaggtttgaacgttagacatttcatatacttatctatgacttatgacatttaataagcttgatttcacaaaga

SEQ ID NO: 3050 - DNA, 219 bp, Homo sapiens
  I.3050 (AI559820)
ttttttttatacaccagaagaatcagaaaacatgaagatgaggtcaggcagataaaattattaatcctaaaagaatagtggactgttttgtaaatggaactggaagaaaatgatattgaaagagaggttacagaagtgtaagacagacaattcaaaaactgggtcaaataaaattcataaagatgcttaaactatagcagaataaaacagaagccaggg

SEQ ID NO: 3051 - DNA, 404 bp, Homo sapiens
  I.3051 (AI559718)
  misc_feature (396)..(396): n is a, c, g, or t
ttttttttttttttttttgcctccttccttcaacacagtatttgaagttctaggtacagcaattaggcaagaacaagaaataaaagacatccaaatttggaagaagtaaaatctgttagcaaatgacatgattgtatctagaaaatcctagatcccacacaccccccaaaaaactgttagaataaacaaattcagcaaaggatacaaaaccaatgcacaaaaatcagtattatgtgttttttacgaaatgaggtcttgttatgttgcccaggctggagtgcagtggctattcacaggagcaatcatagcatgctgaaatctcaaactcctgggcccaagcaatcctcctgtctcagaaaaaaaaaattaccagaaataaagatcagaggcgaagtnaatgaagt

SEQ ID NO: 3052 - DNA, 401 bp, Homo sapiens
  I.3052 (AI559717)
ttttgataagttgaactttattattaaaaatttaaacattcttctctgtaaatatcaatgtaaagagaatgaaaagacaagccatagactgggataaaattatggtaaaatgcatatttgataggggccttattttcaaaatatacaaagaacggtgaattttccacaataataaaacaaacaacccaatttaaaaacaggcaaaatatctgaacagacacttcaccaaaggagatgtacagataaggatattaaaaaaatgtttaaaaccttttgtattttaaaattgcaaattagtacaacaatgagatagcacaaacctattaaaatggctaaaatccaaacatctgacatcaaatgctgatatttgaggatgcagcacaacagaaactcttagtcat

SEQ ID NO: 3053 - DNA, 404 bp, Homo sapiens
  I.3053 (AI559696)
tagagtatttaggatatttactgcaacattgtttataatagcaaaaaagaaatactagaaaaagcttcactgtacagcaacaaatggttaaatatataatgtataatctatacaatagcatgcagtaggtctcttaactccacttaacacattcacaaaactccccagggcgcatccctccccattagccacctcccatcatgtcataggtagatatgcaaaatgctatattgaagggccaggtaaatctcagtcaggatggcattacggcatggagagacaagttattatagtacagcacatgcttgattccatgagtcaaactgcatgcttccaagagatagttgtgttcgctcctgtgactatttcatgccagagttgcttgttgacactgtgatttcaat

SEQ ID NO: 3054 - DNA, 230 bp, Homo sapiens
  I.3054 (AI559531)
ttttttttttttttttttttttttttttttttttttttttttttttttttttttttttttttttttttttttttccccccccgccccccaattaattttaaaaaagggggggggccccggggggggggggaaaaaacctgaaaggggaaaaccaaaaaccgggtttgggccgggggaacccccccccaaaacccaaccccggggggggggggggggggggggaatttttt

SEQ ID NO: 3055 - DNA, 371 bp, Homo sapiens
  I.3055 (AI559317)
tttttttttttttttttttttttttttttttttttttttttttttttttttttttttttttcaccccccaaaaaaaattaaaaattaaaaaaaaaaagaaacacaccggcctcccttttggggaaaaaaaggggcccccaaaacccccaaaggggggggacctttgggaaaggcccccaaagggtttggaaaaaagttttgggtttgggcccaatttgggtttaaaaaaaaaaccccctttcaaaaaccaataaaattttaacccaggaaaacgggggggggggcccccgggaaaaaacccttttttggggggcccttttttttttttttacccaggggcccccccaaaaagggggggggggggggggggg

SEQ ID NO: 3056 - DNA, 413 bp, Homo sapiens
  I.3056 (AI559304)
tggtgagacagagatttactcttgttgcccaggctggagtgcaatggcatgatctcagctcaccgcatcctccacatcctccgcctcccaggttcaagtgattctcctgcctcagcctcctgagtatctgggattacaggcatgtgccaccacgcccggctaattttgtacttttttagtagagacggggtttcatagtgttgcctaggctgatctcaaactcctgacctcaggtgatctgcccgcctctgcctcccaaagtactgggattacaggcgtgagccactgcgcccggcctaccagaactaatttttaatcaaatttcataaataaatctagccaatcttagctggttcattaaggaccagcaaaatcatctgttgggacttgttagtggagctctcctagatagt

SEQ ID NO: 3057 - DNA, 516 bp, Homo sapiens
  I.3057 (AI559252)
gccctttttttttttttttcccctaaatgtaagttccattcttataaggattttgatgttttgttcattgccatatccctagtgcctagaacagtcctgtcatatagtagacattcagtatatactggttgaatgagtaaatgaatacctttcaaaaaatattttctaagcatccattcccagctccttcagcaaatagtcatgggccatggtctctgacactctgacatggaaaaactgaacaccgtaatctactagagcctaccaaagcaaaggttaatgtgcttctcgctttgggcacctgccctctcgttagaatttcaaattagttggctcttttaaatgttgctcaccaatccaatcttttgcacacatctactatgaaacccattctctatgcagccgctattttattcttggattttaaaaagttaattttcttttattaaagcaaatctttttattttcatgtaaatgtagactttcttttatcccattgatttccaagtgaatgta

SEQ ID NO: 3058 - DNA, 245 bp, Homo sapiens
  I.3058 (AI559214)
ttttttaaaaatttaagaaggcttttttaatggatatcaacaaactaactctaaaatgcacatggagagacaaaagacctagaatagtcaacacactgttgaagaagtggaatattgtttgaggaatgacaatatcccacttcaagacttactgtaaagttacagtaatcaagatgttgtggtattagtaaaagacaaataggtcaatggaccagaatacaaatcccagaaaatagacccacgtt

SEQ ID NO: 3059 - DNA, 424 bp, Homo sapiens
  I.3059 (AI559187)
tttttggttaactgaccaaaaagctgatagggaaatcatctttggaacacataagaaacaggctgtactctcatctggggagcaataaaggcagatgtccctgaaaatgttttacttggaaaattattaattgctctttactgtcagccatttatgccttccagtcaagaacgaacgtgaaggaaatgtcataaaccttaaatgtcagcaaggattcacttgaggcctactaataaagatcagatttgaacactttaatgctaatatactttatcacagagtatcttattttactcaatggcaataaaaaaaataacagaacccttaaagggcatccacattgatttctcagtgtgtgattcattttgattactgatataactatacttaaaattaagcggacgcgtgggcggacgcgtgggcg

SEQ ID NO: 3060 - DNA, 442 bp, Homo sapiens
  I.3060 (AI559153)
tgaactaatcaaatttggtttttatgtgctgtgctctttcgtaaccactgaatagtttttcagattattccaagtcatatgaaaccacactttgtgaaacttcaagttttagatgaccttgcaagttaaggactaaacatgttgcatcacaaaaagcagccctgggaagacacggagagcaagtatatcaaaatagattttacacttgatggcattgagccgactcttccaaattatttgaaaatacgaacatattttacttttatgcatgttttggagaattctgtcaggcaggtaaagtgtacacacagttaggccttcagagctccaacaaaggaagagagttaggagaaaagaactggtgagaaagtgaaatggtaggtttgtagagaccgccaaagtaaactttttaaaactataaaacggtgaacattccatgagt

SEQ ID NO: 3061 - DNA, 360 bp, Homo sapiens
  I.3061 (AI559096)
tttttttttttttttcaaacctctggtggcctctgtttcctttgctggtttttatgctgccatgatctacgtttatggaaagcaagctgccataaaggtatagtcgagaagattctgccctcagctctcttttcctcttaatgttctcttccttgaagatctgattcttcttgtggataacttccaaacctacacctttctgcctcatttttttccaaagcctgggacccacattttcaactgtttggagcacttttatcacaggcgccttaaaattatcattcccaaagcaagctcatcttcccttatcgtacttgtatgcttctttcttcctggcttctttgacttccctcccatttt

SEQ ID NO: 3062 - DNA, 457 bp, Homo sapiens
  I.3062 (AI554965)
tctggaatgagaactattttattggagaactgttagatctggacttgacagaaagcttaccaaaaggaccacttttctttgttttaacataaagtaggacctcctccattataacagcagtactttcccaaacaggaaaagtggaagacatggaaagctacaaggggaaagaatcactaaaaataccactccctaaaacattaatgttaaagaaataacatgttttggtccacaaaacagttttcctccactaaatgcctacaaccaaacagaaatttctcatacttggtaagtgctttttgtatcaaagaaaatagttatggaatttgttttggttttatgtatagatataaaaacatgaacaacttagatacatacatgaaaacagatttgcttttacatgacagacatacgctaagatgaatacaatattacctaaaaggcccaataatatcac

SEQ ID NO: 3063 - DNA, 428 bp, Homo sapiens
  I.3063 (AI554942)
agtttaaaacatcagatatttattctcacagttctggaggccagaagtctgaaatcaaggtgtcagctgcattggatccttctggaggctcgaacagagaatctgttatctcctggcttctggtggctgctggcaattcttggcattccttggcctgtagatgcatcactccaatatctgcctctgtcttcacattgtcttctccttggtgtgtttctgtctatttttccctctcttctcttctaaagacttgtcattgggttagagcctgcagtgaatgttgagagcttgcagaaacaaagacgaaggcatttggcactgagtggaggaaaacaaatggatttcccagggcaggcagttcttgatcacagagaacccacagatgtgaacaggtaaggcaaaccctgggcagctgtgccagataggac

SEQ ID NO: 3064 - DNA, 438 bp, Homo sapiens
  I.3064 (AI554922)
tttattaactgcattgatttattagtatattgctactgcattattatacttttacagtaaatcctgtattagttcaccacaaataatagcaaaatgaagatatacatgtcagtcatgtgcatctgatatgtgtggcagtctatagtccagaacaacacaggagtaagtaaatcctaatatactatatattatcattctcactgtattacaacttcacctcagagagagtttaaagtcttatttcagacttagtgagttctaagttttgtacaagactgaggtacatcaactgtgtccgaggtaaaattttcttttaactttcctgagtatttgtgtggaagatgtgacatagctgataagttcttcaataacagtgtgtttttccctttcatattacatggctgtcgttaggaagatggcttctcagcttaggacggc

SEQ ID NO: 3065 - DNA, 475 bp, Homo sapiens
  I.3065 (AI554668)
atctttatttccaaattctctactaatttcattcaactccacttttcagtatctcttccaacacttttttatccttcttgattcccaaatatcgttatgtcctttttgtaaccctctacaattggaaaccttaaaaaatatgtccacatagctgagaatatgcaattttgtatctaataacccatttctctcatttctttatgctccttaaaactcaatggaaatctaagtcatttcgggattcctacattaaccaaaatagtactgcactaaatatacattgatataaatcctttaattcctcattcaaaattaaagctaaaagacaaaataaaaaaccaaaagcttagagactaatttatccaattatcttaggtctctgctagaatgtttttgaatcaaatattagaaatgtcatcagtcatagcagtgatattattactagatatgcagaatatgcagaatatggtgaact

SEQ ID NO: 3066 - DNA, 406 bp, Homo sapiens
  I.3066 (AI554459)
ttttttttttttttttttttttttttacagacttcaataccccacttttaattatttatagaatgaataggcagaagatccacacagaaataaaaacttaaataaacttagatttaaccagcatctacagaacacttcaccaaaaacagcagaatacatattctcaagtacacataaaacattctccacgactgacaatatggggcatacaccataaaataaactcgaatacctttaaataggattgaaatcataaagtatattgtctgagcacaatagacttaaattaaaaatcagtaataggaagaaacttgggaaattcacaaatatgtgaaaattaaacaatacactcctaaataactaatggatgaaagaagaaattcaggggaaattagaaaaaaacttg

SEQ ID NO: 3067 - DNA, 418 bp, Homo sapiens
  I.3067 (AI554375)
tttttttttttttggtatttagaatagatgaaaattcatgatccagataaaaactaagaatataagcatgaaaagtaaaatctacatgaggaaaaatatgcctgacatccacatggcaacactgactcacagtgaccaccggataacatggtaacattatcaacttgatctaatacatgatgttaatgggaggttgtaatgtagcttcttcattaaaaaataataattgttagtatgcagttgttataaacagttaataagcttatttctaaaatacatgaacagaagtatttgttgccaagaaaccgcattagtgtttttagtcaggtatactcatacaaagttaaaaacgaagtgagacattacattcagttgtgaataacagcaaatgcttgaaatttcctgataagagcaaggt

SEQ ID NO: 3068 - DNA, 459 bp, Homo sapiens
  I.3068 (AI554111)
tttttgttcataatttttattcaaaaatctgttcagtggaattcagagtcttgtcaaaatggttgataaacccacactgttaggtttcctctagaaaagccatggagaagaaaaaaagaatttaagaaataatacaataattcctgtgagaagaaaggctgtctcggactggcatgtggagggtgaaaggagaagaaaaggctagcctagggcaaaatacactgggctgtaaaaggatacattagagaaaagcagtttaattctgctctttcttgctgctttcacaccttaataatgcctaagggcagcctcctatgcagagatctgggagaatgctcaggcccctagtgcaggcatccacaggagtgagattaaggtgagctggagccctgctcagctgtcagcctagccttcagcactgagacctccatctttccctctaaaccccagagctggtgg

SEQ ID NO: 3069 - DNA, 500 bp, Homo sapiens
  I.3069 (AI554103)
  misc_feature (452)..(452): n is a, c, g, or t
tttaggaaatctttaataagggcaattatttctttatttgcatagactacaggaattattcacatcatctttcagatgtactttaggcatctgcattttgtctgagatgtacattcctactgttatcaaagtccagcgggcgacagaatgagaccccaacttaaggaaaacaaaaactgtaggaaaagcaatccaaagaagaacagaaggccaggcgcggtggctcacgcccgtaatccactatctcttctttgggtttctttgacatcaccactcctgtgagaattgcaagtgacacaaatgacctaaaaattgggaaacaaagttacaataaaatagggcatgagaatggagaaggaggtaaaggtgaatggagatcgctactttttgagccgagacttggggaaacaggaggagtcactctgggccatacaacaaagtgactgtgactntctctcccgcatccctttcactctgtctttccccatcctttgagggcc

SEQ ID NO: 3070 - DNA, 232 bp, Homo sapiens
  I.3070 (AI553654)
  misc_feature (215)..(215): n is a, c, g, or t
ggggaatacaggaggatgtttatttaaggaactcaccagctcagtggattcacatccaaaaagcttcaggctgataccaggtgtgatttacagaagagaaagcaggagaatggatttggatgaggtgatttggaacgatttttacctcgccacaaagtttttttaggttttcattataatattgctgtcctaagcatgttaattctcttactcgnctgtaaaagcttttccc

SEQ ID NO: 3071 - DNA, 286 bp, Homo sapiens
  I.3071 (AI553630)
ttttacaaagtagtatcttgtatttaaaagaacatgtgttaacaaagcatttaaccatcattatctacagtatatattaaacacaatttattacactctaagttatttaaacatgtgtatttaaaagttgacattactccaaaagaaggcacatgaaaaaaactcatagtttaaacattttcacataagtaaagatagaacagggtagaatgactccttaaaaaaaaaaaatgaaataacaccaagttaatatctcatcatacacaaaagaaaaatacttgactat

SEQ ID NO: 3072 - DNA, 328 bp, Homo sapiens
  I.3072 (AI540850)
tttttttttttttttttttttttttttttttttttttttttttttttttttttttttttttttttttttttttttttttttttttttttgggggggggggtttccctttggggccccaagcaaaagggaaagggggcaacccgggccaacggaaccccccccccccaagggaaaagaaaatccccgccccaacccccaaaagaggggggaaaaaaaggcggccccccccccccccggccactttttttttggattttaaaaaaaaaagggggttttccaaggggggccaggggggtccaaaaccccccccccccccccccaaaagggg

SEQ ID NO: 3073 - DNA, 310 bp, Homo sapiens
  I.3073 (AI540832)
ttttttttttttttttttttttttttttttttttttttttttttttttttttttttttttttttttttttttttttttttttttttttttttttttttttttttttttttttttttttttttggggggggaaaaaaaatttttaaaaacccccccccccccccccaaaaaaaaaaagggggggggggaaacccccccaaaaaggggggccgggcccccccccggggggggggggggggggggggggaaaaaaaaaaaaccaaaaaaaaacccccgggggggccaaaaaaaaaaaaaagggggggtccccc

SEQ ID NO: 3074 - DNA, 312 bp, Homo sapiens
  I.3074 (AI540644)
gtatttttagtagagacagggtttcaccatgttggccaggctggtctccaactcctggcctcaagtgatcctcctgcatcaccctcccaaagtggtgggattacaggcatgagccaccatgcctggccaagattcatggaatttttgaactccttgtcttaactactctgccagctcttgttgaacaaagaccaatccgctcttcatgatttgctcctcatgtcttcttataatctaaatgtgtctacatccttggataccatataataggaaaaattcttttaaacaactaaaacagacataatcacaatt

SEQ ID NO: 3075 - DNA, 442 bp, Homo sapiens
  I.3075 (AI540570)
  misc_feature (398)..(398): n is a, c, g, or t
aattaacaatgttattgaatacatctaaatatattaggaacatatgtatttgttttcttgaaaccaaattaaatggttgattatagggagaagacaaccattcgtgtttaaagaattttgctatgtgtgtgtctcattttatttttgtcaagaaaatcaagagcaatcagatcttcgtaaacatcctgtcaataaccaaaaatataaagctactacagaacacgttattttctatttccaccaaataatgtcaaagccctttcaaataaatcccgtgccctccaaagctgccttttttgggggaaatgctccctgcagatgaagagctctgctcccttgaagaaggagaacaagggagctcagaaatcatactacggatttgttactttaatctctgntcttactcaattctttgtttaaaaacagagaaactgatgtttat

SEQ ID NO: 3076 - DNA, 284 bp, Homo sapiens
  I.3076 (AI540406)
tctagtctaatattaatatttattgtgattaaaaataaatttagtccacaattcctttcagccaagacaaaagatcactgagttttacttttctctctcaaatgatacttcaaactctatgatgtcagttaagtattgctccttctttttataatgttgtcttcctcttgatccaccttccagaaaaatctttgctatcgggaaatttttcttttataggacagcaattcaagatagagttgaaaagttagaagaacccttgtgacaacacatacagaattagc

SEQ ID NO: 3077 - DNA, 449 bp, Homo sapiens
  I.3077 (AI539706)
ttttttaaaataatagaggcatagtctctctatgtcaggctggtctcaaaactcctggcctcaagcaatcctcccacctcagcctcccaaagtgctgggattacaggcatgagccactgtgcctagccaacatgggacatttctaactcgagggtattgtcaggccatgtaggaaagggagcagagattgcccttgaggagatgctcccaggtggcagatttgtcctacttgatagattccaaaatggaaaacggatttttctgctgcctctggggacactgaaaaaagaacctccacatgagttcagaggcagcaccggcagcttaggggaagtcatggcttccactgcgtgtctaggaagcgctctttcaggatgctctgaggctgccactggcacaggggaatactgtgcttctcatcagactgggctgcgggctgatgtgctctt

SEQ ID NO: 3078 - DNA, 468 bp, Homo sapiens
  I.3078 (AI539457)
tccattttcaacttttattttaggtttggaggtacatgtgcaggtttgttacttgggtagattgcatgtcattggggtctggagtacaaatgattccttcacccaggtcgtgagcacagtactcaataggtagtttttcagcccttgccttcctcctaaggtactactaaactaaaacaaaataacaagaaataaaatttttaaaaatcgaagtcttagtgaagaagatatcttgtgggctttctagaggaatgtagtcgggaatgagtgtgcagttagcatgatacagccacttcaacattcctatttgtctgtcttcagattccctcctcctcctcatgccttggaagctgtggcatctcaacctcattaaatacgggcagtagtgtgctcatgccagctcactccagctcacaagagcatggtgttaaatttgcagaagtttcatgagccatttgttgaatacag

SEQ ID NO: 3079 - DNA, 552 bp, Homo sapiens
  I.3079 (AI539445)
ttttttttatcttcaaacctagtttaattttgaacaaaattcttgcaagtttggcaagatggcttttcagctcacagaaacttacatgtagtaaataagagagacagattgggaagaacttgggaactgctggtggcagatatagagatcaagaacatgtccttgagtagatgagtggagacgtatgatgacaatgagacagttctgctctttagaatctcacctagacaggcatagcctgcctgactgtgaatgaaaacaaaatataaaaaaatcaaattatacaaaaaagatcatttggtgggaaggcaaaaaggttaatatttttaaacatatttcaaagagtttacttgcccttgaaatctttgttctattgctgttcattattaacaattttttttaagtatatccgacttcattaagagaagactaacttatattcatccacttatttaagtatatgtaaaggacatagtatgcttgggaaatctctaaatgtcatttgaaaatataaagataagctcttaaaaactgagcataactcagctggaa

SEQ ID NO: 3080 - DNA, 942 bp, Homo sapiens
  I.3080 (AI539443)
  misc_feature (499)..(499): n is a, c, g, or t
  misc_feature (848)..(848): n is a, c, g, or t
  misc_feature (851)..(851): n is a, c, g, or t
  misc_feature (874)..(874): n is a, c, g, or t
  misc_feature (881)..(881): n is a, c, g, or t
tttatattatagcctcttttagctctttaagtcttctatgggtttaatgggaggctttagtggtgtatagagggtgtgtgtgtgtgtgtgtgtgtgtgtgtgtgtgtgtgaaatggatttattttattctacaaatgaaatgaataaaatcacctgaaatggaacggaatggctacagcgagtgtccaaagaccacaaaactgtttcctgacatgtgcttagcatatttaaattgttctcacagtatcatcctgagagcagagagagcagtccaactgctccacaggactgcagagagggaaccaatccatctattttctcaataatggtgatgacagagatggaatgctgattgccaaatcccaaacacatacgggcctctcacccaaaggccatgatgcctttgtcttaataacagaataaacccaatcctgtacaaacagcttcttcagggtgcatgttttgaatggggcaaagattagctttttgtgggaggctntccaggataccggacaaaagcatgcactagagactcactaggtagattcaaatatctttctaccatttactaactgcttgatcttagtcaagttacataaaaggggctgtgtggggaggaggggctcttgtccacatctgtcaaagtatgaataacaattacaccctaactcgaaagtggctgtgaagactgaatgaagtactacctgtgaagtacatggtatacctgtaggtgctttaatgtcacctattaaatgctgggggtgatgaggatcaaatttcgccagggacccccacccgagggtataactcatccccccttttcacacgtgcctcgatgctaaattatntcntcgaaatgggcttactttttcantccattntcgacccaggcctcttgcagcttggggaatcgaaatcttaccggaatcctttttcatcgaa

SEQ ID NO: 3081 - DNA, 485 bp, Homo sapiens
  I.3081 (AI539438)
atgcctctcaggactcagaagtatattctgaaaattttttcttacagtaatacgtattgattctgtaacagttatttttattttgagaaaagttttctaaaaatgtgttaaaaaaatagaagctttcttttacttagttccttgaaagaactctcattagtttagtcagattgatttcttttgaaaaacaactatattgcctgacagtttaccactgaatctcagcagcctgccaggcacacaaataggttttactaggctgaatttcttaaggtttcctgaagaaccccacataaagatggtcatttatctttatggatagattttccataatggatttatggatgaatttatggatgaaaggcagtttgccagtcctctaccaagttgctatttgcagacaggtgacatattcaacaatttcaccctttaaaactttcaggtcaacataatgttgaattaaagaagccagacacaaatgagac

SEQ ID NO: 3082 - DNA, 453 bp, Homo sapiens
  I.3082 (AI539271)
gccattttaaggtttttatttaaaatatttggtatatacagtttcttagttcttgcctaaatgattaatagaaagtaaaatacttaaatgtattacgtatgccacaaatgaccactcttgtaaataagtttgttataaattcattataatctgaatcatttaatgagcagattcaaaataaattgtttgcatgtagcatttctaagcttttattctcaatgctttcagtgaaagaaaaatcctaagcgctcttatttttataattaccctgcataaatgttggagatttatgaaggaaaagaaaagaaattaagtatggcaaattgacagtcattctgtattccatgcaaatttattgcaggatacttttaagtgaaagggatttgtttcataaatttaaattttatgatatacaataataactatttaaaaataaatgatgatttaaaatat

SEQ ID NO: 3083 - DNA, 437 bp, Homo sapiens
  I.3083 (AI539099)
ttttttatttgcaatttatataattgtgcacttgaaaactccaaagaacaaccagaaaactattaaaattcataaaataattagataaggcactggttacaatatttgtaattcaaatcaggatgtttcctatgtacaatcagaaaacataatggaggtaaacatttcattcacaaaagcattaacagatgacatgctttggaataaacactaagagacctacctgaagaaaatttgaaaatgccactgaaatacaaaacactcgcatatacatggataggaagattcaaaattataaagatgtcacttctccctaaattaatctagagactcagtatgatttcaatccaaatgccaactctctggggggctgatatgaaattgtcatacaacttgaataataaacatgagaatacagttggccctttggtaaaaga

SEQ ID NO: 3084 - DNA, 314 bp, Homo sapiens
  I.3084 (AI539081)
agagttgtcagaaatttttatttaaagaagtaacattggttattgattggacatatatcattatggtttagggtatgagatacagtgtccaatgtggtattatcagtttaatatacatctacttgtggcaatagtgaacagtttcaagagatgaatacatatttcaaaggaggagaaaggcgtaactgcactttcatttcaatgtctgagtttgataaccaaaaggacttgcatttttagataaaaattttctatttcccaaatctcaagacctagatacaaaatgtagagctgcagatttagggcccgaatgg

SEQ ID NO: 3085 - DNA, 550 bp, Homo sapiens
  I.3085 (AI539042)
  misc_feature (275)..(275): n is a, c, g, or t
tttttttttttttttttttttttttttttttttttttttttttttttttttttttttttttttttttaaaaaaaagaaacttaaacgggggggggggaaggggggggggggaaattggggcaccaaaaaaaaaccatgctcttggggaaggggccgggggccgggaaatgttttggggtttttttttttgggaattcgccccccaaaggccagggccccacccaaggggccttcccgagaaagaaagggggggggggcttctctccccaaaaaangggggaaaaaccccaaaagagggaggggtttttttcccccacactaagggcttttttgcacttgaggggggggaaaaaagggccgctgtggcaaacctgaacctaaaccaagcctgacaggaggggtcgtcaaagggccaagaggaactcctaaaagacatgggacaggtgaaccttgaccaggcgggtcttggacaaaaagacaatccggttcacaaggctgggcagccgttcttcagggggacttggaaccacatttggaagaagcaatctcc

SEQ ID NO: 3086 - DNA, 469 bp, Homo sapiens
  I.3086 (AI538438)
tcttttttcccccttgaactgctactgtttggggcatcgggggagggtggctgcagcgttccaactcctacaattccaagatttctaacacagaaaacccgttaaatctgaagtttagtttgagcctggatggctgtgaagagctctaacagctaaaaccatcaccaaagaggcctcaaagtgcaatctacgcaagggtgtgggtttggtggcgggaggaaggcagcagaacgattcatttgcaaataaaagggtaaacaattctgaggggaaaggggcaaattcattttcaccaccactcacctctcggcggcaaacggaacctgatacttttttttttcttaaggctcatcttctcgggttaccaactctgggaactaagcggctaaccaggtccacacaggggtagtggcgacgcctacgtctccctcccccacctgtgcacccataccagaaagccaggctctac

SEQ ID NO: 3087 - DNA, 400 bp, Homo sapiens
  I.3087 (AI538035)
ttttttctaagtgcaatgggaagccactcaaagggctttaagcagggaagtcacattatctgattttcgttttataaagatccctgcggctgccgtcagtgattgtaggagggcaggagtggatgcaaggacagcagacattagtgcaggagttcaggtgaaagatgataatagcttgggcagagtggtagcagtggacatggagggaggtagacagatttaagatgtctcggagacagctgatggaatttgctgataactggaatgggagtgacaatgacaaataaaggaacctagaataagccccagaattttgcttaagcaacttggagttcagcccatggcagatctgttaagcaccaaagttaaacacaaatacaaattcatactgcattggact

SEQ ID NO: 3088 - DNA, 406 bp, Homo sapiens
  I.3088 (AI537892)
tttttttttttttttttaatttttgtcactatagaccagttttttatttaaattgaagattagtatacattttaaatgattagtcaaaataaaaaatctaaaatgtgctctaaatacctcttaggtcagaaaaaaaaagtcaaaagctagagtatagagaaattaagaaacgccctaaatttctaatctgacaaaaattcatacaagatttaaatattttaatggaaaatagaacagaactaattattgaagaaattatagaaaggaaacaaaataaacagattatatggaggatttttagaagataagtaaataaattaatatactaggaaaaaacaagggaaatatacttgataaataaatacaggtaagagttcttttgaaataatgataaaatagaaaatct

SEQ ID NO: 3089 - DNA, 528 bp, Homo sapiens
  I.3089 (AI537885)
  misc_feature (351)..(351): n is a, c, g, or t
  misc_feature (456)..(456): n is a, c, g, or t
tttttttttggtggcgagaaaatagtactgttaaggcaaatcttaccccgtagcagttaccagcaggacaggcaattttcagtgggcttttcagaagctggttgccatgacaaagagcacaatttattcctcagtcccttatcacagctacgatcacagaccataaaaattaacaccgctcttttccatctgatttcagagttcctcatccttacctgaggccttttgttcccccaattaaatggaatgaatgtcagtcatttagcaattcaattaatgctgattcaaaattccggccaaaaccagaatctataatcacaacttcctaatcacagttcagtcatgagaatngaaagtaagcaggaaattgcactaattactcaattagactaaatactgatttctaagcaagggctttaacgaggtgcagccctgacaaaggacctttcgagtctnttttacaccctgtggtccacagtgccaaccaaaaactggatttcaactgccataattctgcatctaccctgg

SEQ ID NO: 3090 - DNA, 533 bp, Homo sapiens
  I.3090 (AI537182)
  misc_feature (437)..(437): n is a, c, g, or t
  misc_feature (473)..(473): n is a, c, g, or t
  misc_feature (487)..(487): n is a, c, g, or t
agcggccgcccttttttttttttttttttttttttgtagacgagttcacattttaatcaaaacaggactgcacagaaacatacgtccacgtgaaaaccagtacccagtgtttatggtggctttctttttaattgctaaaaactggtaacaacctaaatgtccatcgtcagaggaagcgatgaacaaactgcggtgcattcacacaacagcggtgctacacagcagcgaagaggagcagccgactgacacgcacaacaactcggatctcaggagcatcgtgccgagctggagaagccagacacgagccgctgcacaccgtatgattccatggcattctgggaaaggcaaaactccaagcacagagaacgcatgagttgtgcccaggtttgggttccaggaagaggatggattactaagaagcacaggggggatgtttntggggtgatggaaaaatgttgatgtcttggcttttncttttctttttgtngaaacagagtttcacttcttgtcgcccagcctgaagagcacaatgg

SEQ ID NO: 3091 - DNA, 146 bp, Homo sapiens
  I.3091 (AI536824)
gcgtgcccagcatttgcacaatctcaatacctttaatactataattttcaagacacacaaaataaaattttaaggcaaaaacagcactttgcaacaatttaataatttattacattacagtagcatcacaggagcattcaataatg

SEQ ID NO: 3092 - DNA, 344 bp, Homo sapiens
  I.3092 (AI536790)
ggagggggagaaatctgtcttttgtatttctgctatttatttgtttgttctggtctctcatcctctctcttctgctttgtttgcttccttttatttttcccctcagatagggtcttgctgtgtcatccaggctggagtgcagtggcacagccacagctcactgcagccttgacttcccaagcccaagcaatgctcccacctcagcctcccaagtaactggaaccacaggcgtgtgtgtcaccatgcctatttttttttttttttttttgtagcgacaggatctccctgtgtgcccaagctggtctcaaattcctgggctcaagcaatcctcctgcctgggcctc

SEQ ID NO: 3093 - DNA, 347 bp, Homo sapiens
  I.3093 (AI536672)
ttttttttttttttttttttgtaaaccaaatatactgctttatgaacaagagggatttaagaattcaatttagggctgggcacgggggctcacgcctgtaatcccagtactttaggaggcagagatgggcggatcacgaggtcaggaaatctgagaccatcctggctaacacggggaaaccccatctctactaaaaaatacaaaaaattggccgggcatggtggcgggtgcctgtagtcccagctacttgggaggctgaggcaggagaatggcaggaacctgggaggtggagcttgcagtgagccgagatcgcgccagtacactccaacctgggcgacagagtgaga

SEQ ID NO: 3094 - DNA, 338 bp, Homo sapiens
  I.3094 (AI536602)
tttttttatattcacagttgtttttattgggctacaccactgtgaagcatacatgatggatatgtcttctaaatgactatatgaataatacctaatagttacgtagcacctgatagcttacaaaccacatttgcatccattttcgacctaactcttgcaatcattctcaagtaggcattaaattttaaaacatatatctatgaggaaacagatttcaaaggatgaaggtgacttgtcccaaatctcagttattttcattctttattttgttgattctctatgatatcatatgtcatatggcaaattaaagtgaacagatagccacatgtacataatat

SEQ ID NO: 3095 - DNA, 219 bp, Homo sapiens
  I.3095 (AI524694)
  misc_feature (211)..(211): n is a, c, g, or t
tctcatgcctttttgcctagtgtatatgctgtctccctttagttgtcaaacctgtatctttgtgttgaaagttttgtagatagcatattgttagcttgaaaaaaaaatccaggctgggtgcagtggctcacgcctgtaatcccaacactttgggaagctgaagtgggcggatcgcctgaagtctggcgttcgagaccagcctgaacatggngaaaccct

SEQ ID NO: 3096 - DNA, 766 bp, Homo sapiens
  I.3096 (AI524250)
  misc_feature (507)..(507): n is a, c, g, or t
  misc_feature (555)..(555): n is a, c, g, or t
  misc_feature (567)..(567): n is a, c, g, or t
  misc_feature (594)..(594): n is a, c, g, or t
  misc_feature (618)..(618): n is a, c, g, or t
  misc_feature (701)..(701): n is a, c, g, or t
  misc_feature (703)..(703): n is a, c, g, or t
aaaattaatttactatgtgtttttcaccagtactctttaaaagctccccaggagatacaaatgaaaaaccatactatggtgaccaccagtccggggttacctggggctttcccagttttagcactggaagtcccatggcccaggagccccctccccgcaaggcaaactgagacacttggttgtcccctttctagaaaggaatggacccatattttctaatcccagatcgggacacgtggcctgggcgcagatggctgaatcaattctctgaaagcaccacttggggcagtgggtcactgaggccacagggtcagtctgtggcaggagctgggttcagggtggggagaggtgggcaggagagcggctggcagtggctcagtcggacaggtccccatcgttgggccagctggggctccagccactggccgcccgctccatggccttcacccagcggcccttcagctcctccgtctcggccttgaacaagaaaaggtagcgctccatggngtcgttgcggcggaaggagatcttgaggaccgggccctcacggagcanggtgttagaggngtctactatgtcgtcctcgaggcccangcgctggtacacctcccacaggtnctgcagccgcttcatctcagtgatggctgcattggagtgctgggccagctgagaagatcatgtccagggctttcttggcatcngncctgtctggggccctggcttgcagctttctgatgtactcttgagcagcagcttcgtaacggga

SEQ ID NO: 3097 - DNA, 474 bp, Homo sapiens
  I.3097 (AI524099)
ggccgagcggggccgcgggcggatggaggtctggggggggtcggccgggaacgccggcgccgggagcctccgaggccgacggctcttctggggccgcccctgcccccgcggagtgattcagccccggctcgctgcctctgcccggcgggtcggtgcatccccgaaccgaggcccggggcgttccgctccagcagaccgaagccagaaacgccgcccccgccacccaggccgagtgtgtcgagaaggggccggcgcccttttcagggtgtcaggggactgtgtgcccggtaggagggggcgcctcccggagcccgaagggagggcgcggtaggcagccgagggtggcggggggccacccctccacctccaggggcgggcggctccttcaggcaggtgacagcagcgggacaggagtgctttgccctccaggacctgcgcaccctcctgtctacctggaggccctcttcgccatcg

SEQ ID NO: 3098 - DNA, 418 bp, Homo sapiens
  I.3098 (AI523450)
actattttggaatgtgtttttattcacccattggaaaagcctttgctacatattaatacaaacttgtcactaataaatccttctttaactaagaaaataatataacatgagcataactttgtgtgagttttaatgtcctggagccttgttgcttcatgtataaagtgcaggtcagtaaaaattaaatgaggtaatatggtataataggcttaacccaataagtgtacaataaaggacggctgtaattttaacatgaattcaactgaaatcctgatagggcaacaccaataacaatgtttcctatatagctcacaaattgttctttgtcatcccctcatctacccaatgggaattagagctagcctgttaggctgcttgacaggaccactgaatgctggaaatcaaccatattctatcc

SEQ ID NO: 3099 - DNA, 503 bp, Homo sapiens
  I.3099 (AI522155)
tcagggaataacaaaatttttattgggcaaagtaaagaatggctttacattctaaagatctattttgcttttctttggaccacaaaattaattttagattttataattcaactaccatatttctcttacaaaagggactagatcacagggaagggtgacaggaatagagatgtgacattaactagttggaactaaatgcatacatgattttggttactcttctacaaaaggttttgttgctacaattccatgaccaaaaatctctgaaaagttaaagattttcctagcattttggcaacaaaactcacctggtagctgagcctgacttccccggcaaggttttatgtacatatgtagtctttctttatcctactttaatactcattttgctacagaaatgttaatatacttgattataggtgttgccccaaaccatattggtgtctgagtcataatattttataaaatctggaaactccaaattctatgacatctggccctac

SEQ ID NO: 3100 - DNA, 413 bp, Homo sapiens
  I.3100 (AI521577)
  misc_feature (357)..(357): n is a, c, g, or t
gtttttttttgttttgagagctggagtctcgctctgtcacccaggctggagtgcagtggtgcgatcttggctcactgcaacctccacctttgtgttcaagcaattctccttcctcagcctcctgagtagctgggattacaggcatgtgccaccatgcccggctaatgtttgtattttagtagagatggggttggttggccaggctggtcttgaactcctgatctcaagtgatacgcccatctcggtctcccaaagtgctgggattataagcgtgagccatggcacccagcctcacataggaaacttcttagagcaacttaaagttgttcaactatgttatacgtctttcttatgttntactaagtctagtacagtaaaacatatacaattaattattattaaaatcaccttaa

SEQ ID NO: 3101 - DNA, 428 bp, Homo sapiens
  I.3101 (AI521116)
  misc_feature (358)..(358): n is a, c, g, or t
  misc_feature (374)..(374): n is a, c, g, or t
tttttttttttttttggagcctcgggtggcaggatgatttaattagctttgtctttaagcaagagggaacgtaattggagaagggtagttccagatgttttgagttttcagccacagtggggcagccaggtcttccttgctcttggcctgaccactgcaggcccctgctctacccaacctgagaggcctcctgggaggaagtcgcaattatagatggagaaggggcatttgtttttcccgtggatggaaagtgacacgtggggacaagctatgagaaacactgaggtgcgacggcacagagaaagcgggctgaggccaattacaccacgcagggactctcccaggcttcagctgccangggcaaggtggcgcancccgtgggctccccgagttccctgcaaatcccacccctgaccctgagaccacct

SEQ ID NO: 3102 - DNA, 270 bp, Homo sapiens
  I.3102 (AI520967)
tttttttttttttttgctcacagaatgtatacgtttattttttaacggagttaattcatggccgggtgttgtggctcccacctgtaatcccagcactttgggaggctgaggcgggtggatcacctgaggtcaggagttcaagatcagcctggccaaaatggtgaaacctcatctctactaaaaatacaaaaattagccaggtgtgatggcatgtacctataatcccagctactcaggaggctgagacaggagaatcgcttgaatctggga

SEQ ID NO: 3103 - DNA, 471 bp, Homo sapiens
  I.3103 (AI494573)
tcagaaaacattcattaatatgcatatgtatacactttgtatgcttacgtagaaaatgagtggttttaaaaggacattcattagcatacttttatatgcattttgtagacttgtacagtcagaaatgcagcaaatgtaaaactttaaatctagaagtctgtttccctctaggaacatatatttcaattccttaactatttattgactgatagcgtttgagccacaaggcaaggcatttgcaatatttaggttttggaacccagctctgccactcactagctgggaaatctacaagtcaccttagttgtctgaatgacacttctctcaacaataaaatggccagcaatgcttacttacttcacagagcagtaaggttaaattaacctagcacatgcttgatacagactaggtgtgaaatttcactttgattcctttggctttaaagaatgcataaattagtgtgtgtggagg

SEQ ID NO: 3104 - DNA, 435 bp, Homo sapiens
  I.3104 (AI494242)
ataattgtgttttttattaggtgacatagatgcctaaatcacagcagaaaaaaccaagtaaaatacattgttcttcaaaaaaaattcatagatttgtatctccttataaaatttgaataattcaggaaaatataataaaggaaataaagttcaatatgctactaattagaaaaaaaacttgttttaactctatgatgtataggaaataaattgaaggaatatacgtatatacatttaggtattttttagataataggacagagcatatagaatgtcttataacctgctcttcagttattaatatattgtaagcagtttttcttgccttaaaatagtcaagaacatgctttaaattactgcaaaagctgcacagtccctttattagtgtcctaggattgcctagtactgttaatacaaactgggtagcttaaaacc

SEQ ID NO: 3105 - DNA, 421 bp, Homo sapiens
  I.3105 (AI493975)
gctcaatgatttttattttagcaaattgtagtcatttccatacattattttttacagtaaacattgccggatacatttccatacgtttttaaagaatagaggaggaggaagaggagggaaaaaaaggaaaataaataaataaacgtgtggagcaatcaactccagaatcacaccaatatttctaggtctaatggccacacagcaaaatcagcctcagttatcccattgtcttcatatcttaagaccccgcgatcctggcctcctcgtaagctccccggacccgggcgtcctcggtctcccctcatctactcttctgtcgggcaggtccgcgaccttccgcctcccgggccgtctcccgccgcacccggccctggtacatccccactacccagtccgggcccgtcctcgctctgggcctacc

SEQ ID NO: 3106 - DNA, 452 bp, Homo sapiens
  I.3106 (AI493915)
tcagtaatatgggtatattttatttagcccaatatatctaaaatattatttcaacatgcaataatgtttttaaagtattgagatattttacattattttcttggtaccaagtattgaaaatccagtgtgtattttacatgttagagcacatgtccattaggactagcccatagccacacagggccagtgactaccatgttggccagcacagcttcagatgcgatggaaaatacaactcaaagcttacctacaggctttctttagccatatttgggttttgtccccaaacttccagtctttcttctgagcttgacatttgctctccaagtcttagatccctgctcctcctgctgcaggccaaggacaacagcactggacattcaccttggaccttggtcaaaatgcagaatttcaagttcccgccaggacctactgcaccagagtctgcattt

SEQ ID NO: 3107 - DNA, 460 bp, Homo sapiens
  I.3107 (AI493122)
tttttttattgctcacattattcatactttattaatttattttttaattgacaagtagtaattgtgaacatctatggggtacagtgtcatgttttgatctatgtatacatcgtataaagattaaatcaagtaatgttttgatctatgcatacattgtagaaagattaaatcaagctaattaacatatctatcacctcaccaacttaccttttgtgtgtgtgtgatgagaacattaaaaatccttttttaaagcagttttgaaatatgtaacacattattattaactctggtcactgtgcagtgcgataggtcactaaagcgtattcctcccgcctgagactttgtggcctttgaccaacaccttctccctctccccacagcccctgctataaccacctttctactctgtttctatgagatccacttttttagattctatatataagtgagataatttatt

SEQ ID NO: 3108 - DNA, 390 bp, Homo sapiens
  I.3108 (AI492851)
  misc_feature (326)..(326): n is a, c, g, or t
catggcgagcctaacgcggcatgctgatgcaccgtcaaactcacactttcaaccccaaaacccgactctttgaacaacccgagcttgattagacctttctccttttctttcccctcttacaaaccatttcctcgcctttagaaactcgccatcaaacccaaacgcgccctctgatcaccgcagaaagcagaaacaaagggggctgagcggcgattcaagcggctcttttcttccttcacattattatccatttttattatgatcgggtacaagtgtccattcgcgtgggttttgtttaccggaaattaaatgaaaatgatttagtncgcgtcaaacaaaaatatatacttgtatacacaagaaaaaaggtctgttagacgtaaatattat

SEQ ID NO: 3109 - DNA, 499 bp, Homo sapiens
  I.3109 (AI492528)
  misc_feature (378)..(378): n is a, c, g, or t
tttttttttttttttttttttttttttttttttttttttttttttttttttttttttttttttttttttttttttttttttttttttttttttttttttttttttttttttttttgggggaaaaaaaaaaaaaaaccgaaatttcccaaaaaggggggggggggggggaaaaaaacccccccccaaaaaaaacaaaaaaaaaaattttttccccccccccctcccctttttaaaaaaaaccccccccccccccccggggggggggggggggcccccccgggggcccggggtttttcccaaaaaagggggccccccccccccaaacccggggggggggggggttttttctgggaaaaataccccccgggggggaaaaancccccccggccccccttgggggaccccccacgggggaaaaaccccccccggcccccccggggggaagggagaaaacgggcgggtctcttccccagggggggggggcccccaagggcccaaa

SEQ ID NO: 3110 - DNA, 218 bp, Homo sapiens
  I.3110 (AI492484)
tgaattctgtttttattgcactgtggtctgagagagtggttggtatgattttggttctttcacatttgctgaggattgttttatgtccaaatgtgtggccgattttagagtaaatgccacatggtgatgagaagaatatatattctgttgtttctgggtggtgcattctgtagatgtctaacaggtacatttggtctaacaggttgagttgaggtcct

SEQ ID NO: 3111 - DNA, 288 bp, Homo sapiens
  I.3111 (AI499425)
  misc_feature (263)..(263): n is a, c, g, or t
atagcagacaaaagggatttccctcctttattaagttcttattttaggacataccaattcgtattcctcgtaagaggcatagcattaaaaaaacaaagatgagtttccaggctcccatttccaaaattcttatcagtctccctagatgattatagcaaaggaaaaagtaacatgtacaatacgtcatcacatttcccaattgagttcttttccaaatggtaattttataaattaaagtaactaagtaaatccatgatcagcanacagttgctaggtgatgaagaattt

SEQ ID NO: 3112 - DNA, 463 bp, Homo sapiens
  I.3112 (AI499407)
aacgtttcacctgataatttaattgctttattatttgctataagagtcctgttacattaaaagaatgtttaagaaataacacgtaataacaattagctttgggaaattactctgttacagacacaatttactaatttggtgattaataaaatcaagacaaataagcatgttcacaagctatcatttaaaaattcaacaggttgttttttggccttcaaatatgctctatcttgcttatcagccattaagcagcaatggagaagtgagactgtcattttataattacatttaatctctagtttctaaatttcatggcaaagtactcaatcaagaaaaaaatgttgatcaaaatatcataaagctacagtaactaaaacaatgtgatggtggcacagaaaaaggcaaatgaatcaatgaaaacaaatagtccagaaagtcacagatatctgagaattagtatctg

SEQ ID NO: 3113 - DNA, 437 bp, Homo sapiens
  I.3113 (AI499386)
ttcatctttgaagtcctttattcccagcagttcacatcagttactcattgagctggggttcgtcatattaaccaagaattcattcatctttcttttgatattgtaatcttgccctcatctccacaactgagttggggcctgaggggtttaagagttctcactccatcacaggaggcaaggggtacccttgtgaaccagacttcaactcctggaagtcttgttcagttcataggcaaatatctttgcaagtttagtatgagacagcccaacggttaaataaataagacacagtgccatggttctaggcatttggagagggaaaaggcacattacacagattcccctggagaaaatacaggccattctcatcttctcaacatgcattttcccactcttcagtgacttttaatcttatcccctggtctatgagaaaccat

SEQ ID NO: 3114 - DNA, 455 bp, Homo sapiens
  I.3114 (AI499173)
ggcagtgaggttgtgaccatttccttgtagaagtctttacgtttgttgactccagcttctcttttgtaactgagaggcagttttgcctaatgcttaggagcttgagctctggagtcactcagaattcattggcacccctgctttgtcactgtctggctttgtgacctgcagcgagttatgtagcttccctttgcctcagtttcttcatctataaaatggggttagcaatctctatctcagtagattatttgaagataaataagatggcacaatgaatagcatgtagcacaggccctgacctaaaggaagtactcaaaaaattgaaacttgttattagcaactgtattgactgatgtcagtggtgggttccaacccagatgtgccatccacagtggctgccttgcaaggtctttagggcctgaggctattcaagtgtcaggttctcactggcaatt

SEQ ID NO: 3115 - DNA, 422 bp, Homo sapiens
  I.3115 (AI498471)
ttttaacatgtcgcatgtacctttattcttattttagatacagttcttataattttgattatgtatttaaacaacacaatcaaaacagaagaatcattatgattgaattagaaatttgtgatttatccattcaagtgatgaaaaataggaaacctaatttttcaaatactgtcaagttttagttttcaaatgtttgtcattataggaaaacagagatccaggcagttgtttctccagctggtgtctttacacagaattggagctgtccagtggggctgagtatgctattccaaactagagtaggtgtgatagagataattgggcaaatttcaaggagtaaatactgattcatgctttttattctgcttggacaaatctctggtttaaacaaggtgtttttcttagcctcaaagcaatgttgg

SEQ ID NO: 3116 - DNA, 164 bp, Homo sapiens
  I.3116 (AI498327)
tggaaaaaaaaggactaaatttaataccccaggggcttagttcccttatttggaaaattttaatgggacattgggggctggcacatttcttttacctttccttttaaaaccaaatcctttaagccacttttttaaggataccccccagggttttggttggttta

SEQ ID NO: 3117 - DNA, 495 bp, Homo sapiens
  I.3117 (AI498185)
aatatttaatgctttccctttatttaccagctgcctagcatccccctaaggtgaaaaactagttatttttaaatatgtgtgaatcactggatttaaacatgtctgattggtgtcaatccattgcagttattaatcttactggtgctcaaaaaatctcgcctttggctggtggaagtgtattcacgttggctcctgtctccttttgacatgacccggggagtgtttcatagcatcctattttatatgacaggatatttatgactcattccttatatctcctgtccccaaaatgcccagaggcatttttcatctggattgcttgaaggtcagtgatggcaggaggtaagctgactcccagtttgaagacttacagagctacatggacagtgatgtcacttgcagatgtggggtcgacattgaggttgggggaccagagtggtcaaagaagactgagagggtagcggagtgagggcagacatctctggccatcctgca

SEQ ID NO: 3118 - DNA, 417 bp, Homo sapiens
  I.3118 (AI498011)
ttttttttttttttttttttttttttttaaaaaaaaaaacagctgggcctgggggaccactgccaccaaaacatggaaactggtagtggtcctgaatgcctggctgcgctgttatttattggatacaaggggaaaggggcagggtaaagagtgtgagtcatttccaatgattgataaggtcatgtgagtcacatgttcaccggacagggggtccttccctgtttgacagccgaggcggaaagagagacaggacagcttaccccattattttttctatgcattttaatgacttttagtactttcactaattctgttactgctgtctaaaaggcaaagccaggtgtacagggtggaacatgaaagtgaaacaggagcatgaccactgaaacacagcatcacagggagacggtcaggcct

SEQ ID NO: 3119 - DNA, 137 bp, Homo sapiens
  I.3119 (AI497898)
tttttgtttttcaagacatttattttcctctaaaatatattagtaagattggtaagtccttatagagaatattgacctagattgaatgagcagtgcttttgaggtgaaaaggttaatgattatgtaattataaacac

SEQ ID NO: 3120 - DNA, 796 bp, Homo sapiens
  I.3120 (AI480132)
tttttttcctggttgcaatcatttttatggggaattattcaatacagcaaagtaatctggcccttatctctgcccagtcattctataatgaagaggcacggggtggagcccggggacaccctcggtggcattgtcgggccacatacctttcccctcacatcctgcgacagctgaatccgagcccgaggaccacgtgcggggcggtctccagtgtggatggcagcccggctggaacgcactggcaggtggtccctgtgccccagaggccccgtttccttccggaagcgaggctgcaactgctccagatacccagcaggaaggccacgtgacaacgggaggggcactcctgtgtgtgtaggggcgagggggtggcggtgccagggtcctgcagttcaccaggtgcccacgtgcctgccacccgagcgccattcactcccgaccgcggggacctggggcacagccgggcccactgcggcgaggcgaggagatgtggggagaggaagagcggcgtccacgatgtgctcatttaggcttgattttcctcctgccctcctgtctccctccctggcttcacccacaaggctttcttctcgggctgatttctgtggagctctctaggcagaccctcagtctctgaaagtcgggtcgtcgtccgtctgcgcaggcatgatctgagcgcttggatggacttactgagaacgctacttattttatagttactctaaaaccgtcatgatccattattgaaacacttcttaagggtcgagactcgatattgaactttaaccgaaatttt

SEQ ID NO: 3121 - DNA, 512 bp, Homo sapiens
  I.3121 (AI479659)
tgtaagaagcattttttatttggatatataacctatgcaagagttagggcaagaaagtgccagggactgcctatgaaaggaagtgcatctataaaccagtgaaaaaaattaaatccatctgcgaacttcaggcactgttttaaaagggacacttaaaaaagcatccacagggcatctcaggaaatgtgctctgtgtacaagcccatcttggcatgaatacagttttactgagtatgacacaacacagttgctctagggaagaagaaagaatatacaccccccacgcaaatatttgataattgcaacaggatgttaaaatggaagttttgctaaaacatcaaaatatactagatgctcgatccaaaagaggtcctggactaaaagcagactctacgatagaggctaacagctggtgaactactctcaacttgtaaccacagtcccactcaactttgcccacatggagcacaaaagggttggattttaggagatggggaaagaagctgtagaga

SEQ ID NO: 3122 - DNA, 530 bp, Homo sapiens
  I.3122 (AI478847)
tttctcaggtatgtttttattagcagcatgagaacagactaatacaacatgtgtccatcaataaatgaaagtataaaaaaaagtattatacatatgtaatggaatactattcagccattaaaaaactatgaaattatgtattttacaacaagatggatgaaactagagatcattatcttaagtgaaacaagccaggcacagaaagacaaatattgcatgttctcactcataaatgggtgaagattatgggagtcaggcagcaggtcgggatagccgctgagctgaccagtgactcatgtggctgtaatcactaggacaacagccttgtatctggctgaaaggctggtgaagccactgaggatggatgacagacgtattgcctgctacaactgcagcagaggtggggggctcaaagatggcaaatgtgatctacttttgaatttttaacacacactaaattataaatttttctaatgcaatctacaattattcagcattttcacctttctagtcaagtcaagagctttacc

SEQ ID NO: 3123 - DNA, 461 bp, Homo sapiens
  I.3123 (AI478776)
aatgtggttagcacattttgttgacttttttttttttttacaaagaccaagtcagcatgtcctcttaaaaatatcttaagagattatgttttgttcctacttgctttgaggaatgacttcgtcctggttgagtggggtgaaaacagtgaaatgcgaacaaggataataagaccatctttcctgtactgtttcttaaaaaaggaggggagtgaggaattaaaaattcagatgctggattttaaagactgtcatgctaagtattttcttatcaacttccttttttttttttttggcctcatataaacataacagtagttgagtttttcctttcttcttgactcaaaaaaaaaaaaaaactgacacataaacttctccaaaccaatacagctgaactttctacaaagatttgtaactgatatattccttaaagaaaataagaatgctctgaacagaaataaaca

SEQ ID NO: 3124 - DNA, 508 bp, Homo sapiens
  I.3124 (AI478746)
  misc_feature (466)..(466): n is a, c, g, or t
tttcaggatggttcttttatttcttcttttaacaactatttattggccgtggctgttccagacacacacaagtgaggaactcgccccagtgggtgagcaggcagggacggtgcctaagtccccacatgactgcagcggagtgcagtggatgctaaacgtgggagctggcaggagtgcctgcctccgtgcctcggagctgttggagtgagcatctgggatgcatgttataccttgcctcttcactcagatggaaagttgagcttcaaataaagaggccaactctatgcctcttaagattcttgggaactcatagcgcccattggatcttcagcacgatcccatgggggtatttccgagttgaacttttcactttctgtccattcgggctcagctacctggtgaagctacttgagatctttgttagctgtgtttggtctgtgttttctggacaattactttttagttnttaaatgggtagactacttagaaaccaccaagagctgttact

SEQ ID NO: 3125 - DNA, 442 bp, Homo sapiens
  I.3125 (AI478490)
  misc_feature (381)..(381): n is a, c, g, or t
ttccagtttttctggattttatttaaataagacattaaacaatgccacccttgatctgtgcctagaggagagtgatcggcagtgccttcttgaggatctctgaatgaagcaaatgatgtcctacccattgttcacaatctgctgaaaagttaaaggcctttgataagcttcagcagcagcagagttggccctgttctcatcctgagagagaaggagagagggagggagagagagaggaaggactgtatcattttagcatttgtcataggtactggaatgtccattgactatgagctagctgaacagtttgggaattgttagggaactttaattttcaaacattaatctggtctctttggactgagcttataaactatcacncctaggggaaagtcatcatggtgattctgatgattctttttttaagccaaaccatcaggca

SEQ ID NO: 3126 - DNA, 444 bp, Homo sapiens
  I.3126 (AI478126)
atactcccaagtgtttgatttaattgaaaatacaggccaggctcaatggttcactcctgtaatcccaccactttggaaggccagggcaggaggactgcttgagccccgtagtttgagaccagccttggcaacatagtgagaccccatctctacgaaacatttttacaaaattagccaggtgtgtagtaggcgcctgtagtcccagctactcaggaggctgagtgggagggtcacttgagggtgcagtaagccatgatcagccactccactgcagcctgggggatagagtgagatcttgtctcgagcttgtctgtcagctccttatgcatctgctcgtactgccggctcatgtcctggttcctctcgagcagcgccttacccagccgggccgccaacaccagatccttctccttctgtcggatcaccgacagcagcttcgggtcc

SEQ ID NO: 3127 - DNA, 574 bp, Homo sapiens
  I.3127 (AI472331)
tttttttttttttcaatgggctaatttaatttttaatctatatttgcaggatttgccatgtacgcaacatagtataacttatagtcaaggattaaaggaaactgcatttttttcaattactttaggtaccaaatcatattaagaacattcagtgtaaggtaaaatagacctgaggtatgttatatgagtgggtaggcattttcatttagtcagtcaattaaatcaactttcaaagcaagtgaaattatattcttatactatatgggatccttgaacttatgaataatatattttaaaattactgtcataaataatattagataaacaatgtaaaaagtctaacatacaaaatcaatgctaagagtaacattttcttggaaataacattacttttataaataagctgatgcagatcaatttcacatttaataacttataaaaacaaagtcagtgttttctagtttcatatgcaaaagcaaagtaatagttggagtgtatgtaacctacattaaatatgtcttagaaaggaagataaatgaacttatcttccatatgcaatatgtaaatacgttaa

SEQ ID NO: 3128 - DNA, 545 bp, Homo sapiens
  I.3128 (AI472145)
tttttttttttttttttatattacacactttagatttatttaattttgtttgtcaattatatttcaataaagctggagggaaataaaatgtgatttattcttcaaaaagagagaacatctgtttcaaaaacaaataaaacatgtatataatgattccttttattcaaaactttacattgaaatctgaagtaatgtattaaaaagcagtgacaaaaatgaagaacatgttgcagtcactctgttttactcactgttgatgctgcttcactttttcatattagcttaccccattagacaccactgttgtggatgaccttagtatccttgtttcaggcacagatacactcttatttgcttgctggatgtgatgtttgtatctctgccttgcagtgtgtgcacttggactaccttgcaacatacttccttgtagttaattgtagagccattatatttttagtgaccgtagaggagaacaaattgggtcccaacaacgtaaagagccttggtatttgaaacgtcagagtcttccactgaaactcaaaaac

SEQ ID NO: 3129 - DNA, 490 bp, Homo sapiens
  I.3129 (AI472069)
tttttttttgaatgaggacaaattttatttagctattttgaaaatgttcaagagagcaaaacagagaagtacatgtacattccaaacatgagaaggtttttatgtctccaagcaggtagtcaataacattttatttcaatggaggatactacactctcgaaagactatctaccctcaattgtgaagggaagagcaaattttcagtctgtcctcctgttatcccatctttaacctgttcagatcagagcagctttcacagaatgaagaagaaagaagtgtcatgccttatttcatttctttagcaacaatgctattattctcaccctggaaaggtgaataattaatacccatctgactccacctaattaagtctacatttgcctgttctgttcatttgaaaatactttcctttagagaaaatagccattgcttatcttcacagtttatatttcttaaatggacacttttggaattaaagtgattttatctt

SEQ ID NO: 3130 - DNA, 365 bp, Homo sapiens
  I.3130 (AI471760)
ttttttttttttggtttttttttttatttccttgggggctttatctaacaagctaactaaaaaaaacgacatttcaattcaagtaacattttttaaatgactagaaatatacatctttatggtacaccaaccgtacttgaatttaggatattattattggtactcagttgaaagtattgtatgtcaacatgcagaagttatcttccttaattttcagtctcagtcaaaacacctcaagtgactcaacttaagctttcctaggatttattccataaatacctttaacatatacatatgtaaaccctaggagtgcatatcactttttaatatacatatatgcttaattcattgtccccatttctgaa

SEQ ID NO: 3131 - DNA, 344 bp, Homo sapiens
  I.3131 (AI471635)
ttggattttcaacaatcactttaatgcctttctggaagagtttgagaaaggaagaaggaaaacaagaaggaaggggacccagaaaggaagggagggagaaaggaaagaggactcaggaaagaattttaagaagtcaagcagggtcctcctacagctaagctaagtgaccaataggaacagcccctggagcagggccctgggctccttgtccagctaggaggctggaaccagttcgagagcacttcaatatcttaacaaatcctatattaaaaagggactcactggccaaatatcaatcagatctggttacagccatgagacaatgatgccagctcagtgatgcg

SEQ ID NO: 3132 - DNA, 300 bp, Homo sapiens
  I.3132 (AI470552)
catttcaacaaagtttattttgccacagtttttttatatctataaatttgcacaatccttattgtaagccctatgctctttacacaactaagtattcatcttagaattaaagtccatttgataggtattgagtaggatttcccaacaattatgctacttttcacagcatagtaagttaggccccttgggaattttttcttaactgtttcaggtattaagatatgactttataatttgttcatcagtatacaacaaaggctgacagttattgccagaaccagaaagactatcttttctagt

SEQ ID NO: 3133 - DNA, 549 bp, Homo sapiens
  I.3133 (AI469904)
tgaaaaaataattataaagtttatttaaatgttgattgtcccaaggtctacagtttcttttctgttgtgtcatcagtgacaaagagtaaaaaaaggaaactcccatatttagcactttagagtaaaacacatggatcatcgttattaacagtcctctgggcgtgctggagctcactgagaaggcttctattttgagcttggaatgttgtgctgagctgtgcagcctgttcctgcatctgttgttcctgcattttctgttgctctgccagccaattttgtttggctatctccatttgtctcacttgttcctgatggagtctctccctctcctgcatcatttgctcgttctgcctttgaatcgccgccaacctttgcgcttcagccttttcagcttctgctttcacttgtgcctctttcttctttttttccgtctctgtgagagcctggtcagtctgtaatattgcatgactcacagactccttggactttaaatatttctgcagaacttcttcagcctgtattcctttccgaggctcccgatagtacttt

SEQ ID NO: 3134 - DNA, 312 bp, Homo sapiens
  I.3134 (AI468595)
ttaaggcttagttggtttaatattttccaccccctcaatgagttaagacactttagcctcacagtattcaattcagacctagaagaaagttgatcctttgttattggtttataaaagcatgtgtctgagatgatggaaggctccaatgttgcagcagcagaagaacaattttgagcattctggacctctatacacatggggtgggcattgctgagtggtggcaagtaacaggaaacaggcttcttgcttccgtggtctgtggtgggcagtgatgtttgcagttttgcaggctgcatgtgggcctcaggcatt

SEQ ID NO: 3135 - DNA, 330 bp, Homo sapiens
  I.3135 (AI468260)
ttttacatataaaacttcattttatttttcatagctttctgaaactgttcaaataattaacttcacaaattataaaaaacaggtcatatattctgagatctgatttggaaaaacacagctgtcaaagtcatcctcctcaaacatcatttttctcatttctctcatcagttagaagtctcctgtgttcttgacagtgaattgaggtattcgaaaaaaaagtccacgtgtccatccacagatgaatggataaatacaatgtagttacatgtacgatggaatattattcacccttaaggagggatgatattctaatacatgctatccatggat

SEQ ID NO: 3136 - DNA, 563 bp, Homo sapiens
  I.3136 (AI467941)
tttttttttttttttttttaagggactcttaccaatttattttgaaaatttaagcatatgaaaatattaaaattatgaaaagtaaaaggaaaataaattacctataattacatagtaataatacaataactattaatgtcttagtgtagtcctctttttctagatggatgttttttactttgttgtaatcacagtcaacatgactgaatcctaatttttcactttactcaacatctctaggttgaggagctattttaagaaatcctattatggttccttttgtataatcatttatttttatttaaatctaaatatattcaaattttcaggtttgtttaaaacagcattgctgtaacaatgtagatctcaattagctatacaggattataaaaagctagtcaggaaaaatttcctattgctgtaacaggttgtggatgaccttgtacttgtattttcaccagagggcacagtggttttagacagttgccatctctactaaaaggtgactcaagccttttccactgaagacacagaactgtttgtaatcccatagactctcatgt

SEQ ID NO: 3137 - DNA, 386 bp, Homo sapiens
  I.3137 (AI475817)
tttttttttttttttttttttttttttttttttttttttttttttttttttttttttttttttttttttttttttttttttttttttttttttttttttttttttttttttttggggaaaaccccctttttaacccccaaaaaaaaaatttgggccccccggaaaaaaaaaaaaaacaaaaaaaaaacccccccccccattttgggccccggggggggggggggggggggggaaaaaaaggggggccccccccgttgggggggggttttaaaaaaccctgggggcccccccaaaaaaaggggggggcggggccccccccccccccaaaaaggggggggcgggggcccccccaaaaaaaaaagggggggggggggggcccccccccc

SEQ ID NO: 3138 - DNA, 460 bp, Homo sapiens
  I.3138 (AI475748)
tacacaattccaaaaagaaatatatccactgcttttagaagtaggtgtaaatgtgtagataaaacatgagattatcaggactaacagaaccataattattattaaagcaaatacttacatgtgccatgcactgtcctggtactttacatgtaatcctctcaacaatcctatgaagtaggaactattattatcacctctgtttcatatacgaggaacttaggtataaagtgagtaaatatcttgcccaagatcacatagttaagtggcagagccaggatttaaattcaggaagtatttgctcttaaccactaaactatgctgcatataggatgctccaaggaaaaatgtaatctatggaactgtggaactactacaggagattgactgtagtatcttttatcaagggatgtaagattacaaagccctctgttgcttatgcactttctatactggaactatc

SEQ ID NO: 3139 - DNA, 330 bp, Homo sapiens
  I.3139 (AI475085)
cagctctcaagcgtgtgtttaattatcttcactgcttactaaggcatgagcataaacttgtaaatatttacaaagactttaaacaagagattgcacttaatattcccgtgagaaagcgtgtccttgagggttttgctggtgaaggcacccacctgtgtgcgtgcacaccgctccgctccacctgtgtaaccaggcgtctctctgcaggcctccccaccgtctgcatcggtgcatggactgcggccaggctctacttagaagacaccgggtgagtccatgaccagactgcaacctcgaaaacgggcccggcaacatctggcacatgaagtc

SEQ ID NO: 3140 - DNA, 317 bp, Homo sapiens
  I.3140 (AI459174)
tttttttttttttttttttttaggattcttgggctatttattggtacatacattggctaatagaaacacagaggaaatacaaaaattgtaggaagacatatagtatgtatgcacaaattcagtaaacatttatcaaaccaccaccatattttaggcataaatccagtaatattttgaaattttaaaagatcatttattaaaggggccttgcatgaaagtacagcattgacagaccaccctggtaaatgccaacccaaatatttaaccagagatataaagactaagtttgaaacagagctgaaagcataatacttaaa

SEQ ID NO: 3141 - DNA, 581 bp, Homo sapiens
  I.3141 (AI458998)
tttgtggtttagatttttatttaaaataacaacaataaaatatgtccctaaaattgcaatgctcaaaattggtttttatgacaaaagtttgaaacctagaaatgcctgatttatggcaaattattgtttttataatgcaaaccatcatacattttctccctaagtgtaatcttttatcagttcaactgaagagctttttctatctcctttcacatttgttatttgactagaagcagcttagactgagcaacctgtaaaaccaaccacctttgtgcagaaatatcatccaactggctctagattgttgaaagagcaaagtcaagtccaagttgcccagtctaacaggcttgcttaccttctagttcagctccttttctctgaattgagtctgccatctgaatttgacctccagatgaccatgactttttcaaatcaaatgtgcagtttgctataaataagaccacatagctgcacaggctataaataactagaaattatatgtttttttccttgtctgtttgtactagcactgcaaaacccttcacttgctgtgattgaatagtctctgtaggcagacaaga

SEQ ID NO: 3142 - DNA, 571 bp, Homo sapiens
  I.3142 (AI458766)
  misc_feature (430)..(430): n is a, c, g, or t
  misc_feature (481)..(481): n is a, c, g, or t
cactaattatgttaccactaggagttactcagtaagtcacattttgtttatacttatatacacacactctctcatacacacagtggtcaaatatcaataactgtaacaactttatcaactttaagctgaagcttcataacagaaaaagttctcatcataaaaagggatgtttattatgctctgtttaagaaaccaagggcctaaagaacacaacaaattaaagatacagactttgaatttttggaaaatacggttatgtggagcatttcattgccacagtggtgcctggaatgtgaattgttaactctgcatgtgtctttcacattgatatttgcacaggagcacacacacgtccatgctcccaaacagctatgggaagatggcatctctaccaccaacttggggagtctggaaacctaggaggacaggncctcgtggggcagcacatggaatccagagtctagatcactaattggtgatntacctttgaagcctatgtcactgaaaacaacatttccattcaacaatgctaaaacacaccactgcctcttctgatattgatgatgaagta

SEQ ID NO: 3143 - DNA, 440 bp, Homo sapiens
  I.3143 (AI458691)
ttttttttatataatataaaatttacaagtttattcttaagtgtacaattcagtggcattaagtacattcaccgtgttttacaaccatcaccactgtccagttccacaattttttcatcatccccaacagaaactttgtatccattagcaataactgcccattctcttctcccccacccctcattagcctttattctatcctctgtctatgaatttgcctattcagtggaattgtatattagtctttggaagtttagctgcctggcctctttcacttagtacaatgttttcaaggttcatctatgctgtagtatgtatcagaacttaattccttttatggctgaatgatattctattttatggatataccacattttgttttatccattcatctatcgatggactcttgagttgcttctgctttttgtctattatgaata

SEQ ID NO: 3144 - DNA, 504 bp, Homo sapiens
  I.3144 (AI457824)
  misc_feature (390)..(390): n is a, c, g, or t
ctaggaatttgctttgtttttatttttgatagatgttggttgtaacctatacatattctttgctaagaaataacccttgagccatgtagagtcaggagttgggccccttcagaggctgaggtttgctgcttctgtgtactttccttccaaacaaatgaggttggagaaacaggttgatctccagaatgagaaactcttcagatgcttcctgcctttttatatctgcatttcagaatcaaaagagctaaattagagaatttattaatagttaaatttcaggtatcaattctgatataagtaatatcttgtggaaatgtctcttatatttgaagtattctaactggccaaatcaagtggatcctttccccttaattactgattggtaagctntatcttagtttaaacttgaacaagaccagtggtttggcaattttaaataaattatattcatgcagctattcaaaagttgtcaacatgcaatgaaaagtgttcaatgaaattagt

SEQ ID NO: 3145 - DNA, 491 bp, Homo sapiens
  I.3145 (AI457597)
gaagtaatgttaattttactaagaataaaacatccaaattttaagtattatgaaatactaaaactacatgttttaaaacagaggtccagtttattctaacatcttgctgacttctgtagaatttctgattgcatgactattatttatcttcttttagtgtagaaaataattttttacaaaaagtcacttttgggctgggcgcagtggctcacgcctgtaatcccagcactttgggaggctgaggcaggtggatcacaatgtcaggagtttgagactagcctggccaatatggtgaaaccctgtctctactaaaaatacaaaaattagccgggtgtggtggtgggcacctgtagtcccagctactcgggaggctgaggcaggagaattgcttgaacctaggaggctgagattgcagtgagccgaaatcacgccactacactccagcctgtgcaacagagggagactccatctcaaaaaaaaaaaaaagtcac

SEQ ID NO: 3146 - DNA, 424 bp, Homo sapiens
  I.3146 (AI457209)
ttagttttaaacaacacacatttatcatctcacagtttctatggtcaggaatccagaaacaactgagttgtttgagctcaggttttctcatgacatcacagctattcacatggttatcaggcctcaattactcaaccacatgggattctccataggcagaatgtccctacaatgtggcattcggcttccccagactcaatgatacaagagaaaaaaggacatacaagatggaagtctcagtataacctaaagtcaggagtgaccgtcatcacttctgccaggttctgttagctacacagaccaaccctggtacagcgtgggaggagttaacataagggtgtgaataccaggaagcgggtatcactggagactatctagaaggctaattaccataatacgctttttaaagtaggaaattatagac

SEQ ID NO: 3147 - DNA, 372 bp, Homo sapiens
  I.3147 (AI432307)
ttttcacagaatagtcagatctttatttgaaagggatgctatagaccaagacgaccctggccagtccatctgtaagcacttagggaccttctgtcagtctcccttttatgagaactgaggtccggagtgaggaggtgatacattcaaagacacacagcaagttagtgaagagctggagctagaacctggcctgccagccctgtgttctccccatgcaccctggctcaggagctcctggtggccaccctccttgaccttgaaaactgctcactgccatgttggaggtaaactcttcagagctccggctctggtggccagagctgggctggtgctgggctgcagggaatcgagttacctagttggagaggatcc

SEQ ID NO: 3148 - DNA, 149 bp, Homo sapiens
  I.3148 (AI439814)
ttttttttttttttttttttttttttttttttttttttataagaacaaaagggaacattgtattttgtatttgtattacacaatggatacaattaacattgcatttggactacattttggtgaaaactttttattaggaaaccatactg

SEQ ID NO: 3149 - DNA, 514 bp, Homo sapiens
  I.3149 (AI439643)
taaccagcacaccactgagaacaggtcagcagaagggaaggagaggggaaaaggggagaatttccacagggaggaccaaggaaggccatggcaggcccatttaagagacatcaccacttacggaaagaatggaggtcttgctataagacaaaaccctagtcaagtacaaaccatcacaggttataggtaacagtgtcatcatagttctcctcacagcagttcagtattatcaccactttaagttaacttgttagtttataacttgttagtgtatcaccgtgattaagaagatgatctctgacaccaacctgcctgtgtctttatcacagtatggtatatcactttacatctgtttaacttggggtatgttgtttaacttccttatgccataatggaggacaagaatcatcaaccttatctcataaggtcgttttgaagaattaagtgattgataaaaggaaagcacctatatcaagtgcctggcacataatattcaataaatgactactattat

SEQ ID NO: 3150 - DNA, 522 bp, Homo sapiens
  I.3150 (AI431748)
tctttttatatcagactgtttcatttagtcctatagagatatttaggttctcagtcgtatcagaaaaatattttacatatgtaataatatcttgatccataagaaatatcctgcagtgaatctttgctggtcatagaaagaagtgagatgccttttcacataaagttattactagtatcggttaccactgcttcacgaaaaaaagtgacgtgaacacacaagctaacttatataaagcataagttgacgtggacatttgtcaggttttcatgaacttctcaaagatatcatacattaatccatcttagcaaatgcaagctcatgaaatgcaacaattttgaacacaattaaagccatattctcattcttgttcagaaaaaaagtaattttggaatgcatactttttctagtttaatacttacctatgacagatcatgaattcctcccagaaaacaactcttaaaagctgagggtacactataaaagcccttaataaaatctcataaacgtgttaagtcagtg

SEQ ID NO: 3151 - DNA, 422 bp, Homo sapiens
  I.3151 (AI439531)
tgcctttataatcaatttattttagagtcaggggagcacacctgcaggtttgttacatggatatcttgtgtgatgctgggatttggacttcaaatgttcctgtcacccaagcagtgagcatagtacctgctcggtagtttttcaaccctcgtcctcatccctcactcctcccttctgaaaacgccactgtttattattcccttctttgtgtcatatgtacccaatatttagctgccacttacaagtgagaacatgtaatatttggttttctgtttctgtgtgaattcgattaggataataaccaccaggtccatccatgttgctgcaaggaacatgatctcattgtttttatgactgtgtggtattccacagtgtttatgtaccacattttctttattcaatccaccactgatgggcatcta

SEQ ID NO: 3152 - DNA, 446 bp, Homo sapiens
  I.3152 (AI439205)
tttttttttacataaccctttaaaaaagggtaaaaaatccatttgtccaacccctggcatattgtaataccatgagtacctgatttttttttaaatggacagtctatgctttcatgaggcatgcatattgagcaccccgtgtgggatggtcccagctaggggagaaagtatgtgtgtctgtgctcacccggcagcataactacacaactgcccctctgaaggatggagcaaaggacatctcctgagcactgagcatcaagcactgaggctctgggaaaaggaagatcagacagagaggaggtaagtggaaggaactgagcagcttcggttcaatcccaaggcaaaagcctgagcaaggacacactccacaaagtgctcagggtggttccccgggccccaggacggcatgacacagcacagcacagcaaagccctgagagctctgag

SEQ ID NO: 3153 - DNA, 400 bp, Homo sapiens
  I.3153 (AI431327)
ttttttttttttttttttttttttttttttttttttttttttttttttttttttttttttttttttttttttttttttttttttttttttttttttttttttttttttttaaaaaaaaaaaaaccccccaaaggggggggcccccaaccccccaaaccccccccccccgggggaaaaaacccccccccccccccggggggggggggagggggggggggaaacccccccccccccccccccaaaaaaaaaaggggggggccccgggggccccccccccccaaaaaaagggggaaaaaaaacccccccccccaaaaagggggggccccccccggaaaaaagggggaaaagggggggttttgaaaaaaccccccccccccccgaaaaaccaaaaaggggcccg

SEQ ID NO: 3154 - DNA, 331 bp, Homo sapiens
  I.3154 (AI431324)
ttttttttggtccgggcttttattttactaaaaatctaatggcaaaggtaaaaaaaactaaataaaatacaaaaaaaaaacaaacaaactaaaaaaaaaaaaaaacaaatacaaccaaaaaaaaaacctacaacctaccaccaccacaaaaaacaaaaaaaacaaaaaaaaagacaatcgaaaagaaaaaaccaacaaaacaaaaaaggcccaatggccaaaaaaccactggaaaaaaaaccgacccatcaattaaagcaaaaaactgacaaaaaccccaaaagaataccccgggagaaaacaaaataaaataaaataataaaaaaaaaca

SEQ ID NO: 3155 - DNA, 396 bp, Homo sapiens
  I.3155 (AI435321)
  misc_feature (337)..(337): n is a, c, g, or t
tgctatgttttagcttcgtccctctaggggagaaaggtcttttagtccatgaattatcccttttcctaaatgttccttcttcaactgaggaacactggagctgtgttaatttcttaaaatcttctttcgtctttgcattgtttgaaaaaggcacacagcaaaagcccacgtgggaatggtttctctttgtgccttgggcatttgcactgtgcccacacccttccctataggcaagaaaactacagggctccaggcccgtctccatcttgagatggctccagaacctttgtgcttactcctctcttcacggagctaagcgggctgtggcgcttcaggntttgtagcagcctctgcagcagcctgtacacaccccttcccttgcaacgcagagcaagg

SEQ ID NO: 3156 - DNA, 427 bp, Homo sapiens
  I.3156 (AI431293)
tttggaatatttgcatgatacttagtgttgagcatccctaacctgaaaatccaaagaaatgttccaaggaacctttcctttgagtatcatgttggcactcaaaaagtttcaaattttggagtattttggattttggatttttggattagcaatactcagccaatataatcttatgggaccaccattgtatatgcggtctgttattgaccaaaactttgtcatgtagtgcatgactatatgtcatttaggagttttgtgcatatctctgagctaaactctcaattatcacttatctttaaatgtctctatttcactcttcttaaaaggtagtctgggcaagtacataattctagttgaccattatcttttggcacttgaaaggtattattccattaacttctggtttccattgatgctgataataaat

SEQ ID NO: 3157 - DNA, 436 bp, Homo sapiens
  I.3157 (AI435179)
ttttttttttccagctataaccttttgtttattaaagaattgatgaaaataaaaacaacgtatctcacagcatgtgtgataatatttccatacgtatgtgataatggatcaacgtttcctagagatgaaataaaaagttctaatttggacaaaagcaaacaaggaaaattataccgtagaaaagcccggctgacggaagtgaggccctgtctcagggagaaacatcggagacgtttaaaagcagggagtgaaacagaggatagcgtgccatttttaatactggcccttgtttcagtgggaaaaggccaaaataagccgtgcatatcctggattctcgcatcgatcgttcaggatcggagatgtgttctccatttccagttacgcattgtatggtggaattgcagttagcacatttggtgccaaaattgtaatgctg

SEQ ID NO: 3158 - DNA, 466 bp, Homo sapiens
  I.3158 (AI440508)
ggagcgctgcacctggtgatgaccctcgtagtggctgcggcgcgggccgagaaggaaggtgggtgtcccccggcggcgtccctgcggcggggctgtcaccccgctctcgcggaggccgggagggctgggccgggaggaagggccgcggccggggctccggcgcgaagttgggcggtcgggtaccgtcccgagccgggacctcgcggcgcccgccgcacggagtggccttcgctctccgtgattccttcccgtgccttcccccgtctcctgtcactgccatttcaaaacttcctgagttctcgtacgttcttgccacttggcccgctaggtaggaggggcatattttttggctttattgcggcgaataggtacattttaggacacttctgttttcttggttgcggttggttgcatgcagacagagcttactttaaaatgtggtaaaaatagcgagacacagcttaaa

SEQ ID NO: 3159 - DNA, 372 bp, Homo sapiens
  I.3159 (AI433952)
agcggccgccctttttttttttttttttttgagacggagtttcactcttgttgcccaggctggagtgcaatggcgtgatcttggctcactgcaacctccacctcccaggttcaagtgattctcctgcctcagcttcccaagtagctgggattacaggcatgtgccaccacaccaggctacttttgtatttttagtggagatggagtttttccatgttggccaggctggtctcaacctcctgacctcaagtgatccacctgccccagcctcccaaagtgctgggattacaggcatgagtcactgcgcccagctcccaaagccaattttcaattatttgtgagccatagattcagtgactacatcaatatctct

SEQ ID NO: 3160 - DNA, 441 bp, Homo sapiens
  I.3160 (AI452995)
tttttgaactttcacaaatgtttattataataataattttaaataaaactacactgtaggatatatttataagtacaggaatgaaatagtctagctgatgctctgaatgaacattgttctgtttatgaaaatacatactgtctgtatgtttgtatatatatatgtgtgtgtacacatctgtgtatgtatagtcacacatcaaaaaatatagcaaatctccaggtgaaactgtctattaatttgtaatatattacacagctttactttgttacaccttgacaaagaaacgactcaaattgtttaaaaacaatcacagaaataataaataatgtctcgagagtgcatcctttaatggtgtcagaattcaggtcatttgttcttttaaaaagtgactaaatgaaagttaaagcataagttgtcatatccaatgattggaggact

SEQ ID NO: 3161 - DNA, 402 bp, Homo sapiens
  I.3161 (AI452845)
  misc_feature (341)..(341): n is a, c, g, or t
taacctctgcatttttgaacgtcctttttttagggtcttaattgaccattcttctttgattcacatcatctttatgttgcccacactccaattctctgcctacttactcagttgtaatcacaatccagtcctgccttcctcaagtttcactggctcaccatggtagcaattcgtgtgtggtcccaaattcttccaagcgtccactacatcctgccccacctgggagctgacctcactcttcctgtatgggcttgactagttaatccacagaaacagccatgtttccctaatggtcaagttcttgggcagccttcatagacactatctatctatctatctgnctatttatttatttatttattttttaagacggagtcttgctctgtcacccaggctggagtg

SEQ ID NO: 3162 - DNA, 305 bp, Homo sapiens
  I.3162 (AI432805)
aagaaaaagagacagagatcagagaaagacacagaaagagattggggagagaaatagtgtaaaagagagagagagagaccgtaagagaagggagacaaagagataaaaggtgagttaatagtattatgtcagtgttaatttcctcatttcagtaactgtactatggttatgtaaatgatgatgtcattaggggaaactagtttaagggtttacaggaattgtgtactacatttacacatttttaatcctataaatattatacaataaaaagtaaaaatgagaaaaatgtgggctttgacttcttt

SEQ ID NO: 3163 - DNA, 565 bp, Homo sapiens
  I.3163 (AI436603)
aaaagtttttattatggggaatttcagatataccctaaagtagaagagtataatgaaccccagtgtccattcctcatcttcccctcacagccagtcttcttccatcttttccctcatttactccaccagggttattttgaagcaaattccagatgttatattattctgtaaatatttcagtctgtatctatataagatgattttttaaaaatgaccacagtaatgttcacattaaaaaaatttaataattacttaatattaaataaccagtgttcaaatttctaataaatgtaaaaagcttagttttgttttataacttatagaggataatttttattaacttgttagagaaaagttggatgtcatactaaatatttatacaatgtattttaatatctacttcaaatgaatttatgtcactgaagtaaaatcccacggattcctatatatatatacacacatatatatacgtatatatgtgtatatatatatacacatatatacgtatatgtgtgtatatatatacacatatacgtatatatatgtgtatatatacgtatatatg

SEQ ID NO: 3164 - DNA, 450 bp, Homo sapiens
  I.3164 (AI453563)
ttttggtggagggggggggtgcctcaagcctcgcaaagtgctgggattataggcgtgagccaccacacctggccattactttcaacttttaaaggataagttcctccctcaactttttaaaatgttatttcataattatatatcacatttaatagttccaaagtaagccacaaagcaaggtacattcaggaaagtctagcttctatcgttctctcctccatctgttctcttcaatcagtttttaagtttgctttctattcgttattcttttaatataagcaaatgaatgcacattttcatttttttctacccttactaaagggagcattattgtacatgttgtcctataccttactttaaagaataatatctcttagagattatgcaacagtagaaaatagtccatttccttttacaggtatattaatactctagtgtgttgaaatccca

SEQ ID NO: 3165 - DNA, 367 bp, Homo sapiens
  I.3165 (AI453476)
tttgagatggggtttcgctcttgctgcccaggctggagtgcaatggcatgatcttggctcactgcaacctccgcctcccgggttcaagcaattctcctgcctcagcctcctgagtagctgggattacaggtgtgtgccaccacgtctggctaatttttgtatttttagtagagagagggtttccccatttttgccagtgcagtctcgaactactgacctcaggtgatccgcctgcctcggcctcccaaagtgctgggattataggcacgagccacaccacacctagccctgacctgctagatttaagacttgcttgggacccattaccctttcttctcttggatttctctattttggaatgagaatg

SEQ ID NO: 3166 - DNA, 196 bp, Homo sapiens
  I.3166 (AI424938)
tcaggtgctaccgtctctcacctccctctacttttaggaaacacgttgtatccccggagggggtgcaccgttcctggaggtactgcaacaccaggtcgatgcgtggagtggacggagcaagctcctattccatctccctgctccaaaaatccatttaatatattgtcctcggatagaggacgtatcagatattaaa

SEQ ID NO: 3167 - DNA, 411 bp, Homo sapiens
  I.3167 (AI424887)
tttctttcttccttttttattattgtattttctaaacttggcctaaaatttcttaaatgcctctctagcaacttactaatttctgctttttaaaatggttatgtatgaacatatcacattgccccaagaatacaaattccttgaacacagattctaagtctgatttatcttcataaactccccatgatattagcttagtgccttgaataattacaattaccatttattgaatgtttgccgtgtggcaggcattgtgctaaattgtatctcttagtatagtaaaattgaataaatgtggaaagggggagggaagaagaataagtagaaagaagtgaatgaataaattctcagcaatctgaaataagttggcagctatctcacttggaagcgaccagctcatttttagagtct

SEQ ID NO: 3168 - DNA, 320 bp, Homo sapiens
  I.3168 (AI424775)
  misc_feature (270)..(270): n is a, c, g, or t
caatcaataaaccatttttattcccaacatctgatacacacagtgtgtgtccgtctgtttgtatttggaattggcagccttgccttataccaaaacaaacctttcaagacgtgtcaatgaaattaaaatttttaaaaggagaattcaatgtgaccctccttccctttcgagctactccattctcccctttttaagccgcacaccccaagtcagtaggagagctttgcaactctgcaaaggatgaaattgctttgagaatttcagagaaanggggtggccgggtgctattagggaagagaaaccgaaagcggcgacaggca

SEQ ID NO: 3169 - DNA, 261 bp, Homo sapiens
  I.3169 (AI424466)
aaagaaacaaactcatttatatttattttggtacaggggacaggttctgaacaatgtgtaggcccacctaggggaatgtcaagggtgccctaggaggggataggttttgtgacacaaaggaggccctgaaggggcgatggagtgtctgttcttctctttatgtccattttcaaacaagttgtgagtagaggaagtctgcctccaaatctcaccagactctcccaccaggtgtcctgggaactgagtgatgtgggtctcctg

SEQ ID NO: 3170 - DNA, 426 bp, Homo sapiens
  I.3170 (AI424447)
tatggggccaagtggtgtatttattttatgaccaagctcaaagtcaagtatatatttccacctacattccattggccagaactcagtcatgtggtcacacgtagatgcaagaggaactggaaaatagagtctccctgagtacccagttgataaataaattgttcgtcgaaacagattctaaaaacatctttcactttttggatagcagaagagtatagggtgcctattattgatctgatgcccctgattctgatcaagtgttctacacccttcatctcctgtgacagtggccagcacgtgtccagtagtgctcacaacataaagacaaataaacagaacaagcaccagtcttgtgagatggagttgtttgtcctgcaatggaggagaaatgctattcaatttacccacctttagagttctctttgg

SEQ ID NO: 3171 - DNA, 266 bp, Homo sapiens
  I.3171 (AI423879)
atcacataatctatgtaagtttaatagatacatgtatatacatacactcttatacatacataggaaaaatgtttgaaaaaacacaaactaaagtattagcagtggttactttcacagaaaggagtggatatagaaatacagttgtaatatttgggatttgaatgtactatttttataatttcatggaaagttattttaaaaataaaacagccatatgataaaggtcaataaagcctgcacaaggcagagattttgtaatataccta

SEQ ID NO: 3172 - DNA, 303 bp, Homo sapiens
  I.3172 (AI423829)
  misc_feature (219)..(219): n is a, c, g, or t
gcttatatatcctctctgtgcttcactgtaatatatttatttctattaattgccacatccagagagtaactcagcttattactatgttagcagaacattgccataggtaaagaaagaagataaatgcatcacttattttaacaaagataaacttttttttgtttttgttttggtttgtttaaaaagcaatgggcattcttcatccatttagaggctcanagtgtaaaatgttttggttatcctaatacaatatgacttcccctcactttgcaatgaaataatttaagggatatttaataaaca

SEQ ID NO: 3173 - DNA, 390 bp, Homo sapiens
  I.3173 (AI423518)
  misc_feature (341)..(341): n is a, c, g, or t
ttttttttttttttttttttttttttttttttttttttttttttttttttaaaccccccccgtttaaagagggggcccaaactggaggggctaaaaaaaggacactggggaaagcccccatgggcccccccacactggttgaaaactgctcaaccgatctgctccggccggagaaatccgggaaaaggcccccagggttgaacaggtaaatggcaatggaggggcccacgaagtaatcctggccctaatccttggggccggcattgtaaaacacccggaaactgggactagcctgggcaacctgtttgggggagccggtcaaacccaacagggatcaaaanccgggttcaaaacccagggccctggggctggccctgcccacctgttttt

SEQ ID NO: 3174 - DNA, 494 bp, Homo sapiens
  I.3174 (AI423156)
atcaagtatttatcatcaactatataaagtattaggcactgtacatggttgtgtgcgctatacttttataaaacttgcagcacagtatcaccacaaacatgagtactgtgttgcactacaatgttatgactgccactatgttactaggcaatagtaatttttcagcttccttataatcttacaggaccgccatcattatatgcagtcagtcattgaccaaaacatcattatgcagtgcgtgactatatttatttgacatttagtctgggtcattgactcaaatgcctataaacacacatacacacatacatacccctcacactctagcttctgcaggtaggggaaccctcagcctttgttctcagaaaaaaagccccagaggttaccattgggcatactgatttgcacacagacccatctggaagaaagtttgagattggaagtgagtcactgatagggtgagtagatgagcagactttccaaagagatgtctt

SEQ ID NO: 3175 - DNA, 453 bp, Homo sapiens
  I.3175 (AI422913)
tatagaaatgaaatttattcaaaaaaaggacacaaattagtttgcaaaattcagaaatataactggaaaagcaagcataaagtcttacattaagtggttagttgcttatcccttgttgatgcctattttatttgagagatatcccagttgtgctatgctaagttttgaaggtctgtgtagtctttaacttgatctttaaaaacaacagaatttgagtgaatgtcaataaaaccagtgaattataaatattctgtcttctagcatgtttgactagggctgccaataaacaaaattatatttcctaggacttcaggcatgaatactaatctattgaattttaatttaatattctatgaggaacctaggagagtatcaacaatttagacatctgttgagttattctcagaataaaactggacatgtgaacatttcaggaaatgaaataaaattctt

SEQ ID NO: 3176 - DNA, 467 bp, Homo sapiens
  I.3176 (AI422857)
tttaaattaaaatatcggctcatttaatcaatttctgcttcagtttaaccgtcttcaaaatggagataataataacactaattacccaagtggggtactgtgagaatgagctatacagcacatatctcaatgcttggctcacagtaggtgcttaatacaatcaatgaaagctatgatgtgcattataaggaatcaacagacagcactgtccagggaagactagactcactcatgaagtgttaagttccccatcaatagagcgtgtgcaagcacttcttggtgcccaaaggattccagcacccacaacaggttggcctaactcttaaggtctctccagcttccagagatcatgctcctcagggtctgacttctagtccccacgcttcaagtaacaccgaccaggcacgtgtgcccagcgtgcaccccgcctgtcggtcaccgcctactgtcaataaagttgatttgag

SEQ ID NO: 3177 - DNA, 352 bp, Homo sapiens
  I.3177 (AI422534)
  misc_feature (328)..(328): n is a, c, g, or t
gaaggaacaagcattaagctaattttattaaatggccacagctggcagtgggggaagtagggaagagaagggaggataaagaaagtcattcaagtctgccagccatgacaagggtctatacatgaggcctggccaggagggaggccacccctccttcctgtctctccagctgagctagactggggaggggaagccagatgggacctttcctcaatgtagagccttgggattctccaagaggctcactccatggctgccgcccagggcagatgcttgtaaatacatcaggcgtctgcagggttggggtgggaagtgggaaggggctggngctcaggctgcccccggtgccatc

SEQ ID NO: 3178 - DNA, 501 bp, Homo sapiens
  I.3178 (AI421397)
tcttcgcttggaagaaagcgtgagatcacgctttgttttcttttgttgtttgttttgttttttttttctgagggaagccttagcttaatgtatgccggtccttcaaaagacatgatagcaatttgagagtctgaactgtaagtttttgttactttattcgttcaccaaatgtttttatggaagccttgccacgtggaacatgtgtcccgggttttaaaaaatgaatttgactcaccagctaacactgaaaaaataatgtacagcctagaaggaaagatcaaagtgtaaaagtggttagtcctgtcgcctcctgagcatttttgtattatatcacttggtttttcgtctgaagtggctgtaaataatcgtattaaaaatcttctggtccagacgcaggaaaaccttttccggtataaagcccaccttcctctaatgttgcgcatgcccactgtgcccagctgctccgctttcgtgcatcccagacttctgtcaccaggtaag

SEQ ID NO: 3179 - DNA, 435 bp, Homo sapiens
  I.3179 (AI421220)
aactgagtgtgctttattttattttattttattttattttattttattttattttattttattttattttattatttttgggatacagtctcactctttcgcccaggctagagcgagactctgtctcaaaaaataaaaataaaaaacaaaacagggatggattctagtgacgtcatccttcattcattcacaaaggtttggagagaatctgttccctgctgggtgccacgctgggagtgtgaggctccagagggaagttcttggacccctggctgatgctttcacatgatcacaggggcacattcttttctcttgtcagccgcaagtcagggggcttcaaagtcaggcggtggctcccgtgaccctttgtggggagggcaggggtgggcccagcttctgtgtgttctgctcagtgggccaggaggccccaggcct

SEQ ID NO: 3180 - DNA, 473 bp, Homo sapiens
  I.3180 (AI420865)
  misc_feature (441)..(441): n is a, c, g, or t
taaaagccagagaaatcggtaatttatttttctctgtggctatttctttctctctgccaactgccgagtgccaccccatccccgggtaaccagtattaccgtgctgctctctaaacaaaactcctttcaaaagacaatgttcaattagctgggccacagtttctgaacactaaattcaaagagtggcagccttttcccaatatataatgggaacgtcaaagtcagttttttaggactacttctaataactgtggactgggtaatttggaccaaattcccagttcaggacaacttaaaaagctgctcaaaatttgtgtgtgtgtgtggggcgggggaggacattttgaacagcttttaaagttatatatatatatatttaataaatatatgtacgtatatatatatatttaagtctaattgagagtattgggcaggaaacanagcagtgaagaatacaaggccaagatctggga

SEQ ID NO: 3181 - DNA, 485 bp, Homo sapiens
  I.3181 (AI420863)
  misc_feature (434)..(434): n is a, c, g, or t
ttttttagatttatatctcattttattggcatccaaataatatacccttcccaaccagaattcaagtttagtatctaagtatatacaaaaagatttacattttaattacaatttgtgaaaaacttcatgttttccttacaactgtactccccttcttcaacatggattatcaagagtagactataattattatgaatttcaagaccacttgttttcacagaaagccatttttaggagttcttgctactagtaagcctaaattgtacttccttgtctggtaatatggagagtgattgctctagtattcttgcctttatctccaggaaagtcatattcctgcttcaaaatgtcagctgttctgaggagtctttaccaacttcacagaacattttggccatgttgtccttgctgctcccgttgtatctcataccctnttttgtctcttaaacccataatttggtcacatgaagttcacactaatggag

SEQ ID NO: 3182 - DNA, 388 bp, Homo sapiens
  I.3182 (AI420037)
ttttttttttccattttgcacaattgctttattttttttagaacaaaatgatacataaataacctagaaaatattctcagtaaaaacttgattctttaatgtcagctttgttggaaaatttctcttactaagatgggaattatatttaacaaaactaataaccctttgatcctatttgtttttgactagtttcctattactactattactgcacctaattaatctggtgacagctatggcatactaaattccctaaggcaattaactaagagattcagaaatctcttcagtgattgctgatttaatggaatgcccttgaactctggagggatgctgcccctgtgagttcacacccacactgtggccaagaggaagcagcagggcctga

SEQ ID NO: 3183 - DNA, 434 bp, Homo sapiens
  I.3183 (AI420023)
gcattccattaaattttgcactcagggacagtcactgatcccagccctggcaaaagacttgggaacatttactgaaacccagagtttgaagttgacaggatttaatgcctaaaaggagactcatatttgaaggcaatcatcacatcttgttacctggcagattagcagtcacttaaggatggaaggggcctgccagagagacatatgaagaacaaagtgggaaaaatcagtcgtttcatctataggattgacaagaatgacaaagagcaactaaaaatcagccagatctagtaaagaagatctatagttgaggttcattaagtgactgagagaacaaaaagcaaataaatgaaggcagtatgcatttttagaaaaatctggcatttaaatcgtaatctttcaatgattccacataaataaaacattacaatgct

SEQ ID NO: 3184 - DNA, 476 bp, Homo sapiens
  I.3184 (AI419968)
aatttaaaaaagtcattgctttatttttaaaaaagtaatagtttcaaaatgtatacatgtaaaatctaactgggaatactttgtacctacttgtagcccaagattaagtttattctcaattactaggaggtttgcacaatagagtacatatttaatctgtatgactaaaagcctcattgtcaatgtgactgtgtcatcattatcacatttgtgaatctcctgattataactttcacagatggtctatctacagggttctgggataagaaacttgctgtctgtctacagaggaagctgttttcacttccagatagttctgaatatttgaaagtacttgctgattcagagtcaaattatgtcttgctgtaacatccacaatttctgaacttacatttgagataaaccaagattagactaaaccatgccttcaagtgacagactctcaaaaatgtgatgcattttttttcaaaaaaaac

SEQ ID NO: 3185 - DNA, 550 bp, Homo sapiens
  I.3185 (AI419964)
ttttttaagaatgctgacagcaactttattcgtgacagtcaaaacccctctaacattccaaagatctattcaaatgttaacaagtaagtgacctgaaacggtgataattcattcatcccatgggctcttgctcagtgataaaaaggaatgagccactgaaatacacaacagcataaattaatctcaaaaacaccatgtgaagcaaaaaaccggcagatacaaaggaacataagctataggattctgcttaaaggaagttcaagaaaaggcagaagtaacgcaggctatagagattcaaagagtggctgcctctgggagatgttggtggaactgactggaaaagagatgagagaaatttctggggtgaaaaacgttctatgtcttcatatgagtgttgattataggctatacatttgtcaaaactcatcaaatcacacacttaacatatgtgcttattactgtaagttatgcttcagtaatacacgcatacacatgtgtgtatatatacttcattcaaatgaagtcatagtctctatagatatcaacatac

SEQ ID NO: 3186 - DNA, 370 bp, Homo sapiens
  I.3186 (AI419775)
tttgtgtttaaagctatttgcagatttattagagaaacaaatacaaatatgcatttctacagaactgttttaattttccaaaatgagcttaaaacgtgttccacagtttttgtttgtttatatatctatggtaacccaagtattggtttctgtaccactttgtaatgagacaattgcctttccattgcaattataaaaaactatttaaaaaaaattcggcacatacacgttaaatatttttccttaaaaaaataatctaatcaaaatattgaatactttagaattaaacaatattttatttacaaatctgatttgatgtactttattatacaaggtaatgcttcaattttcaagaccagttttttttgtt

SEQ ID NO: 3187 - DNA, 567 bp, Homo sapiens
  I.3187 (AI419478)
  misc_feature (252)..(252): n is a, c, g, or t
  misc_feature (508)..(508): n is a, c, g, or t
  misc_feature (513)..(513): n is a, c, g, or t
  misc_feature (548)..(548): n is a, c, g, or t
gaataatacactggatttattaactattctttgagttctaacagtccttccaccacacagtatcactctgaaagggtgtgcatgtctcacagctcacacacacaccacttctgatcttagggtaccaagcgccagcatcctgggtgactcttcacaatgacaaaagcaacaagaactggaaaagcaaaatatttagaaaagtctcttctgaaggtagagattgctagagaggacccagcctcaacaccctgnggctgacaaagggagttcaggagagaaaaatgtggtaaaacattgaagttctgcacagagcccggcctgggaaggagctgtatgtatggacagcaaggcagtcagacacacgatgcagttcagacaggaaagagccgctgcagtgtttagaaacatcgctttctaccaccaagctctcggcagcttcacagagaagagcccttcatggtgttatccagtcaagagggcccagggtgcattcaaccaaaaagccgtnttcanagatactggaaagatacaccccctttgtacaatgngcaccccaacttaatctgt

SEQ ID NO: 3188 - DNA, 450 bp, Homo sapiens
  I.3188 (AI419431)
cttttcttaatgtattttttctgaaacacacacacatacagcaaaaacaatccaccaataggattacattcatgtaagattcaaacataatcaaatctaccgtgtggagaaattcatagtttgttaataagcatacacgtgtatagaaaaggcagagtttatcacaaaacaggatgttatttatccctggggcagggagggatttgagatggccagagcacatgaggggcttctgggaggacgatgatttctagatcagatgacagtaacataggacttgctatgtaattatttgccaaattatatatttgtgtttagggcacgtttctggaggcatgttacatattctacaattgtaaaaaaatgtttttttaaaaaacacagctacacattcagggttatagcggtgaaataaatgttatcactatttttttctagaatattctatgg

SEQ ID NO: 3189 - DNA, 499 bp, Homo sapiens
  I.3189 (AI418437)
gaattggagccttctaattgccatcttaccttttctatcacattctcctggtctcaagaaagctggtggagtgggggttgtggggctcaagagccactagggcagtataaaaaaatccacaattgcctactaagtgtgtagcacagagccccgtgatgttttctcagaagaaatcaatgcccaacattcacatccaggttgactgggcatacactgatcctgactaagaccatttctgcccatatctgactgtcagccttctccaaaagaggcggtgcttccacaaaagccttgatgagataggtgtatcacttctcttctcccattgttgggccctcagatttacagtactgtacttgacttcttagtcttcaagaacctcaatagaacaactggaaatggaaaggtgggcaaggggtattcactctccctacctggctacatacagctaccccaaacacaagtggggctgtttgcttgatgccttggcagggaacag

SEQ ID NO: 3190 - DNA, 396 bp, Homo sapiens
  I.3190 (AI418064)
gtttaagttttttgtagattctggatactagccctttgtcagatggatagattgccaacaatcttctcccattctgtaggttgtctattcatgctgttggtagtttctcttactgtgcagaagcgctttagtttagatctgatttgtctattctggcttttgttgccattgcttttggtattttagtcatgaaatctttgcccatgcctatgacctgaatgatgtagcctaggatttcttctagggtttttatggttttaggcctaacatttaagtctttaatccctgttgaattaatttgtgtataaggtgtaaggaaggggatccagtttcagctttctacctatgactagctagttttccagcaccatttattaaatagggaatcctttctca

SEQ ID NO: 3191 - DNA, 350 bp, Homo sapiens
  I.3191 (AI418053)
agattaatggactatttattttgattaacattgagttttgaagcttatgtacattgtcattggggataaaaattggcctggctatactagaaagcctgtttatttataatttattttaacttttgttttgaaataacttcagacttacaaaaatttgtataaacagtacagagaattcctgtatacccttctcataactttctcaagttttaacatcttacatagccatagcacaattaacaaaatcgtgaaattaaccttgacaagaatattagtaactaatttataattcttattcaaattttaccagttgtgccactaatgttctttttcaggtccaggatcgaaat

SEQ ID NO: 3192 - DNA, 497 bp, Homo sapiens
  I.3192 (AI376045)
ttttttaattttccagtatgtttatttgaaaataatcttcatgtaagtggacctgtgcagttcaaacccatgttgttcaagggtcaactgtaatagtctggagaaacttgctatgggttggaggagggcagcaaaataatgtacatacaaattaaaaaatacataaatgatacataacatacacacatacatatagagttatgtgtcacttaactatggacatacattctgagaaatgcatcatgaggtgatctcattgttgtgcaaacatcgtaggtgtgcttatacaaacctccattgtataacctaccacacacctagtgtatagcctattgctcctagtctacaaacctgtacagcatattactgtactgaacactgtaggcaattgtaacatattgtaagtatttgtttatctaaacatatctaaacataaaaaagcacagtaaaatacggtattataatcttacaggaccatcattgtatgtggtcatttg

SEQ ID NO: 3193 - DNA, 478 bp, Homo sapiens
  I.3193 (AI376012)
ttttttcttataacttaaaatctttatttgatacttgttgaaaaatttagacatatatgaatataacacttttcaaatatcactctcaggcaatcgtaaaatgaaaatagaaataaaaataaactggtaaataaattcacaaacttctttgcagaatcttactcttttggataatttccaacaaaaagtcattgataactctgtttttccataagtcatcctcggtgccatacagagtattgatgatgctcttaaaatatgcccaaatattgtctttgaggtcttctttcaagcttccaacatcctttgagttttggtgttagtgttttcttgatcttaattaattctcgtcatcttcctccttaaatatccttatctcagcaatggcatcatgaaccatcaattgttcaaaccaaccactgtatagctgtccttggttcctttttgatccttcttcacataacctatcatgaagtct

SEQ ID NO: 3194 - DNA, 466 bp, Homo sapiens
  I.3194 (AI374990)
gcacccgggccctcgggcaggactcgtcgccgcccggacgcgcccgccccggaccccgagcgcatccagcgcctccgccgtctcatggtggccaaagaggaaggggacggggccgcaggagcgggccggaggggtcctggtcggagcaggaaggcgccacgcaacgtgctcacgcgaatgcccttgcacgaaggcagccctctgggtgaactccatcgctgtatccgtgagggggtgaaggtgaatgttcacatccgcactttcaagggacttcggggcgtctgtacaggcttccttgttgcattcgacaagttctggaatatggcacttactgatgtggatgagacctaccgaaaacctgtcctaggcaaagcatatgaacgggattcttcactgactctcactaggctatttgatcggctgaaacttcaagattcctccaagaaggaagcagattctaagtctg

SEQ ID NO: 3195 - DNA, 376 bp, Homo sapiens
  I.3195 (AI374599)
ttttttttcaggcccgatggtttttatttctttcagttatgcttgcggctggagtggggacgggggaagagcccatggcctgggctccctggagaccagggctgatgataccagctgccataggtgaggtaccaggcaaaggtgcccactgcggcgcccaccaccttgtgagtgtactggtggaaatagatgacggtacagagcagcaagaagttccagaggcccagcagcagcacgttcagcaggaagacaaggcgcagtggggcgccggcaggaagcccatgggccaggtacttggcgaacacagctgcttcctctgccatgagcaggcagcaaaaggtgagcaggaaggtgtgggaggagacggtgtagcctc

SEQ ID NO: 3196 - DNA, 270 bp, Homo sapiens
  I.3196 (AI373350)
attcctattatggttttaatttccaagagctctttgttctctgaatttttaaaaattactgttttatggctgtgatatcttctcttttggaaaatattaacatttttttctggaaattttcttccccatcagtgtttcattcaataggtttttcttctctgttttacttctgatattcatattcaaatcttcccttacatatctggtgacccttgtctgtccactcatccaagagggaaactccatggaaatggattgaaagctctctgc

SEQ ID NO: 3197 - DNA, 478 bp, Homo sapiens
  I.3197 (AI373295)
  misc_feature (450)..(450): n is a, c, g, or t
taattcaaaaaggtattttattaataaagtctgttgaaaagcatggtttatattttcaacaaagtttctctccaaattaaaatcacaaccattagctgacaccccttccccacctccaaatgggactgaacatgctcctgataccttaatcccaagcagatagaaatgcatgcaggtgaaacagagaacagagaaaggtcaccctcagtttctctttcctgtttcacaaatcatataaattaggggaaagagagaggcaggtatactctaaaacaattttatccaggggcatagaggtttccttccctaaatagaaatgtgaggtgtggaagagaagcacatcaccttaatattacttctttataatctgcctccctttcagaatgtgtttacatcatccacagctgggcctctaaagcttagaacagtggctgaaacagatcatgcacntcaggatcattcgttaagggatatacaa

SEQ ID NO: 3198 - DNA, 332 bp, Homo sapiens
  I.3198 (AI373274)
ttttttcattctacaagtatttattaagtgcctactctgtgcacaccgtcagcagaaaagctccaacctgggccgctctcgctgccccgccccagcctgtggctgcccacactccctcctccacacagctctgaccatctcagggtccccagctaggtctgagccagaccccttagtgggttgtggccagcatcctctggggtgggagggtcggggcagctggcagccaaggcaggggtctccatctctgaacccttcctagtccgggcccaggccaaggtctgccactaccgggtctccatggcagctgatggcagcctctacctgcagaa

SEQ ID NO: 3199 - DNA, 455 bp, Homo sapiens
  I.3199 (AI373264)
atagcactgatctctctttattgggaaaaatattgccaagtataatcatgcactgtataacaatgtttaggtcaacaatgagctgcatatacaatggtagtcccatagattatcatgaagctgaaaattcttattgcctagtgacattgtagctagtaacatcatagtgcaatgcattaccttttctatgttttgatatatgaatatttactattgtgttacaattgcttacagtattcagtacagtaacatgctgtgcaggcttgtagcctaggaggaataggctataccatatagcctaggagtatagtaggttatatcatctaggtttgtgtaagtaaactgtgatgttagcataacagtgaaatcacctaaggatgcatctttcagaacattaaccgaggcatcattataatcaatcaatcttgctttacaggcccacagggcaaatgact

SEQ ID NO: 3200 - DNA, 484 bp, Homo sapiens
  I.3200 (AI371149)
gcggccgcctgcccggcgtggggagcgggcgccccgggccgccgccgagagggggagccggaagtcggcgcgggcgcccctcggccccgacgacgccgtgaccttggccggcccgctcacctctcggaatctcgcctgccgggaccgcgaaatgggggcgaccgcggcgtccctctccgtcggcgcagccctcgacggcgcttgggtttgaccccggcgcgcttgctcgccccttctcccgagaaggggtttcggaggtagacatgggatggatactggacatgttcctgtcgcggcccgggtttggtccccttcctgggattcagccgaaagggccgaggaagggaagcaaacatgttgacgaggcgattgggaggtggggttggttagtgggcagtgacagaattcgggccgctctctagtcccttgtaaaagacctgaaaaaatcggacacccagggtcttcagtccttactacccagctg

SEQ ID NO: 3201 - DNA, 316 bp, Homo sapiens
  I.3201 (AI370842)
aagaaaaacaaattcaatatcctcccccttcaagaacaataaaaccccaaactgtgctatcattaaatactaccaaaaaccattaactagaaaaacacaatgcaaaatcattattcaagaacccattagaaaccacagtattctaaagtcttatagaaaagatgtgtttttactagttaagcattgatagaagtcccatcaaaaaaatgttcaatccaaatctgcatttttggctatggagttctagccaaactggacaggattaggcatccttacctgggctccttctacaaaatgacagtatgttttgaagctc

SEQ ID NO: 3202 - DNA, 221 bp, Homo sapiens
  I.3202 (AI370462)
gtttttaaaaaatgtatttatttacttatttttcaatatctttatggggtacaagtggttgttggttacatggatgcattatattgcggtaaagtctgggattttagtgcaccatcacctgagtatgcattgtacccagcaggtagtttttcatccctcgcccccctcccaccctcttcccttctgaatctccagtgtccattataccactctgtatgcct

SEQ ID NO: 3203 - DNA, 372 bp, Homo sapiens
  I.3203 (AI370460)
cctgtaagatgttttattttttaaatagttggcaggctatacaaagagtgatgttccaaaactacacacatgctttttccctgttcacaaaggcaaacaggctggccaaagtgtttccagcatcttcgtcatatttaccctttattatccaagtggtttcctgctcttcaaaccttcctttcaaaattttgtctcctacttaaaacaagttaggattatttatccttttattggactgattattctaaggataagctcttacttcactttcggagtaaaaggctttgtgccctttttaaagttgggtgtcagcaagcagctggaattttcctgcctggtaaaattaaaaccagccccacaaactggggttgg

SEQ ID NO: 3204 - DNA, 489 bp, Homo sapiens
  I.3204 (AI368670)
  misc_feature (297)..(297): n is a, c, g, or t
caactttggtgaatctgacaaatatgtgtcttggagttgctcttctcgaggagtatctttgtggtgttctctgtatttcctgaatctgagtgttggcctgccttgctagattggggaagttctcctggataatatcctgcagagtgttttccaacttggttccattctccccatcactttcaggtacaccaatgagacgtagatttggtcttttcacatagtcccatatttcttggaggctttgctcatttctttttattcttttttctctaaacttcctttcttgcttcatttatntcatttcatcttccatcactgatacctttttcccagtttgattgcatcggctcctgaggcttctgcatctcaacggtattctcagccttgggttttcagctccatcagctcctttagactccttggaatttgggtattctaagtatacttcctctaaaattttttcaaaggtttcaactcttgcctttggtt

SEQ ID NO: 3205 - DNA, 361 bp, Homo sapiens
  I.3205 (AI368218)
tggttattaaagtccagtatatttgaagagatttccaaaaagtaagtattaaaagttgactggaaacattgctccttgcctctgctttgaggtgagacaagtgtaagaattttatggctaagtacaccatgcctttagattacctctacttaaaatggcaaagcagtatcaagaatccttagaaggaagtcttttaacagatttatgcaaagagatcaacaagaacagtttgctcatagtgctttgtactttaaaatgggaggatagctactcagtgccaaaaacctaaaacactggccaggcccagtggctcatgcctgtaatcccagcactatgggaggccgaggcgggaggatcactt

SEQ ID NO: 3206 - DNA, 293 bp, Homo sapiens
  I.3206 (AI365460)
ttgcggtcacaacggatgctgtattttattaaaaccacacaggcagaccaagaaagtcgcaagagttgaaggaaaaatgcaaagtcggctccacagacctctggttttcagacccgctgctcggggtgaaaggcagagcgcggcccgcaccttctctcgttaaatagccattcgaaacgccacagagaacgaaagggctgaggaaagtgtccgcgcctccgggaccgccatcgagttaccaccactcgcttgctgggcgcggcgcgtggagggggcgctggtgcgactcggct

SEQ ID NO: 3207 - DNA, 474 bp, Homo sapiens
  I.3207 (AI365398)
  misc_feature (347)..(347): n is a, c, g, or t
  misc_feature (355)..(355): n is a, c, g, or t
  misc_feature (467)..(467): n is a, c, g, or t
  misc_feature (468)..(468): n is a, c, g, or t
ggggagggggtcccctccggcagaaagttccagcaaggtgcacctggccgtaaaggcctcttcctccttggagtagttcttacatggccttcgccagaagttctgggttcgaattccgatctggagcggttgcgccagttccgtctagggctctgctggacactcactccctgttgccatcccgtgtgttcttggtcccttattattaaaggtgtgactttactgtggttacctcataggcactcggtttaaagcctttgtctttgactttaataccacagcacaattaaattgtattggaatgtataattttgagatttttgtgtgacttgatgttgtgcgaccanaagtatgntggtccatgttgggtgtcatgaagctgttcgagaggcttaagtctgcattagctgcttagaaatggtggtgaagtccgtggttaacgaaacagtcctgcctcaagcgtacgnntcgttc

SEQ ID NO: 3208 - DNA, 443 bp, Homo sapiens
  I.3208 (AI365233)
tttttttttttttttttttttaatgttaccagaagttttcaggggtttattttaaaattacatttttacatttatgcaaaaataggcacatgtattcaaacaaaaagttcaataaataatacactctttctttgtaggagatataatcagaatccagaatgacaatttaaatagtttatcataagcctctggaatattaacaggctttctgacatctatgctaaaaattaaccaccgtataatgattcagttcttctttcttgctcaattgctaatacaataaaatttcttagcaaaatataacttagaggcactatccgacctgagatctcagattctaacatgttatggcttttaatatgaacgccagtataaccagaatgtaaacaaattatggcatataaattaaaacatttaaaaaatttttacaacttttagacttt

SEQ ID NO: 3209 - DNA, 368 bp, Homo sapiens
  I.3209 (AI364529)
caggccgggcgagcgggagtctgacgcgatttgctgagctctgtcctccgacggctgcctcgcggccttgagggcctccgccgcctgttcgctgctgctccctcgagcggagcctgcgtcaggttccctctgcatccccctgcggggggacccctgctccggaggagggggccggagagccgcggcggcggcggcggcaggcgcctgggcccagggggccgggcgccgggcccgaggagcggcggaggccggggcggcgccgccgccacggtcgcggacgagtgcggcgccggtgagcggtgcccagaggcagcggcggcagatctatccatactaatggaaatgtaactggaactgactctgatgat

SEQ ID NO: 3210 - DNA, 413 bp, Homo sapiens
  I.3210 (AI364481)
gctcaaaaaaccgggtgatttatttaaaacaaccctgtcagaggcagcgactctcactccactcagcagagggagcccacgcctgagaccacccaggcgtgcgtgcttgtgacaccgtttccagtgaattcggggaaacacacccctggagaaccccgtcctgctcctggcagactttggcccagctggcctgggctacgccatggaggctcacgtggggccaccgtggagataagagtcctttggacacagagccacgttctgtggcctggagagccagcagagccacgtgctgccagcctgaccctactgctcagaatgtgggaacaggctgggcgctttttacacacgcagcgtctgaggcctactccagaccctccgaggcagaggggatctccatagaacccctgggt

SEQ ID NO: 3211 - DNA, 210 bp, Homo sapiens
  I.3211 (AI363164)
tttttttttttttttttttttttttaaggtttcggccttttcctttccctctctcaaaaaaaaaaaaaaaaaaaatggcaaaggggggcagcattcccagcctccccgggcccccggccccccgccccccgcccccggcccccccccctccctcccgcattcccccctcaggcaacccggcaaaaaaaaagggggggggcggggggaagg

SEQ ID NO: 3212 - DNA, 439 bp, Homo sapiens
  I.3212 (AI361290)
  misc_feature (436)..(436): n is a, c, g, or t
ccatttttttttactgtgataaaatatgattaccattttagccatggttaagtgtacagttcagtggcatgaaacacattaatgtttagttttaataaaatatttgttagcttcattttttttttacatttcacatacatgaaataagccaatcacaaaaagataaatactacacaattccacttaaatgaggttatctacagtgatcaaattcttagaaacaaaaagtagaatggtggttactccggactggaggaagcaggaaatgagaaattgttcagtggatacagattgagtatcctctctgaagatttgtatatttaaaatttttttctttatctgattgagttgatttgaagaatcagtttttgagctctgagattccacagcttgatctattcctctgttaatgcttccaacactattatgaaaattntgg

SEQ ID NO: 3213 - DNA, 402 bp, Homo sapiens
  I.3213 (AI361150)
gctcagccctgccacttttattattgatgtcaaaagcgccaggctttgcagggacaccagtgggaggtacataggtgcgtgtctgggacccgagaatctcagttctgtaacttcgtcctcagtccaaggtgcgctgctgctgttgggagctaaggctggtcaagcacaggttgtagaaggagttggggtcaaaggctgcactcacctcttgccagcccacccacccagcagcctgtagttcactggggctttttggagtgccccagtagtgagggtccaataccaggacataggcttccgtgcctgacccgacgcagactcccagcaaggccttggacctggcatctgcgtcccccccaaccatgactgggcccccaccccctgcgaagtgcgagtaaagcc

SEQ ID NO: 3214 - DNA, 443 bp, Homo sapiens
  I.3214 (AI359719)
  misc_feature (442)..(442): n is a, c, g, or t
tttctcatccaaagcagaatttttactcagcaaggcaaggttagagtcaaccagttttggttgattcatttttcagaagcccaagggatagtatctctaatttggggtccttttatgtgctcaagaagtaaacaaaccaacaaaatgtaaatcagttctcaagagccattattagggaattcagaacatagtgctaacatgagatctgagaaataaaagaaggtaaagcataaaacagagaagagcaccaggccctcccctaaataaacaaacaacacaaggccttgcactcagaagacccttggaatgtaggtctgtctctctttctttgaatacttaaatctgaagggatggaaagaccacctaaaaatcctagttttttggcatgatgggggtctaattccttgttcactccaaagagctgatggcacatgttccctgna

SEQ ID NO: 3215 - DNA, 464 bp, Homo sapiens
  I.3215 (AI359456)
gtatccagcaggctttattggctttttaggggagctgtgccgaggctggggggctgggggcaggggattaactctttccctggggcagcgctcctggctctgaacccatcaggggattttcttgggcaggggattaatgatcccactctcgatgtattcgaagactgtgtatgggtcctggtccccattgagggtgatggccgacccatacaactgctccaagtcagctgagttcctgtagaacaggtccattttcagcttgacctgctcttcagcatcctttgggttctgcaggaggcgagcctggatctccatggtgggaggtggcttgtacatgaggtggtacctttccccagtgactggatcaattcttctcagagtcagccgctccatgatggaatcaaatggcacattcaggaaaaacaccctgccatctccttttcaaagaagggctggatgagctc

SEQ ID NO: 3216 - DNA, 359 bp, Homo sapiens
  I.3216 (AI357229)
tttttttttttttttttttttttttttttttttttttttccaaaaaggaaattttttatttttccaaaaaaaaaaaaataacctttgggaggccccccccggggggagggggggctggccaaagggaccaaaccgggcccctaggcggggggcaggccgggcccaaccgggggaccatccggggcggggattttaccccccagctttttaaagggaaaaaatcccctccccccttcttgggcccggtttgggttgggggggttttttttttttttggtttttaaaaaaagggggggggggaaaaaaaaaaaatccaaaaaaaaggccccaaaaccttttcccccattttttaaaaccgg

SEQ ID NO: 3217 - DNA, 460 bp, Homo sapiens
  I.3217 (AI355843)
ctatttttatagtttattatttggcaacttttaaacatgcagtattcctggtaatgactaacaaatgtcaatatttagagaaaaaccagagattcataaatattgaatacttattaaaaacaatcatcataacaaaaagcacatttttcaacatgtagaacatttgtcagcagttatttttagtacaatttaaaatatttacagaattctcaaaaaattataaatcatgtgttgtcttcctcagtaacttctattgttctttccctggaaaaaaaagtctgatttttgtctccatgatcaaaacaaacaatagcaaaatgatgtgaagaaaagggcccatcaactggtaattttggcagaaaaaaaagttcactagcaatagttgataatggaaataaatgtattcagataaccaagaaaaaagtaatttttttagcctcaattatataagcatttgggg

SEQ ID NO: 3218 - DNA, 302 bp, Homo sapiens
  I.3218 (AI355230)
aaagacacaagcacgtaaatgtttattgcagcattattcacaatagtaaagacatggaatcaacctaaatgcccaatgactgatgaatggacaaactaaacatggctagtctatacaatagaatattattcaacgataaaaaggaatgaagcactgatactcataagtgtaccttgaaaacattatgcacagtgaaagaagccagaaacaaaaggccacatattttatgattccatttttataaaatgttcataataggcaaatcagtaggggagaaagcaatttcatggtgtcaagggctt

SEQ ID NO: 3219 - DNA, 296 bp, Homo sapiens
  I.3219 (AI354869)
ttttttttttttttttcctgcctcatgctttattttccatagagcttgtttccatccatacctcctctggtctcatccatgctgattccagggtccaggttctcaggtctgaggtccataatgtcaggtgaagccctgcccataccattgcctagtggccaacacccccgcccaccacagcctgatgaaccctttgtcaaccagggttttttattccaacaaagaatctcgtatccctgagggcacacagtgaggctgcctcactcctcttccatgctaaggatttgcagcaggat

SEQ ID NO: 3220 - DNA, 418 bp, Homo sapiens
  I.3220 (AI354243)
gtatttatttatttatttatttatttagagacagagtctcgctctgtcgcctaggggggtgcagtggcgcaatctcagctcactgcaacctccacctcccgggttcaagcgattctcctgcctcagcctcctgagtagctgggattacaggcgtgtgccaccatgcccagctaattttttgtatttttagtagagacagggtttcaccgtgttagccagggtggtcttgatctcctgacctcatgatccgtccgcctcagcctcccagagtgctgggattacaggcatgagccactgcgcctggcccaatttatttttttttgtagtttcattctcctcacatccaaacagctacagcttccctccttttgtggggtccccaaaccaagtctcttttcaggagagcagacatgtgcct

SEQ ID NO: 3221 - DNA, 559 bp, Homo sapiens
  I.3221 (AI336844)
tttttttactttcataagatatttattacatgcataatcttacttccttttcaaaataaccttggaaggtaggtaaagcaggtatcggttttacagagcacggaactgaccgggatcctgaggctggtaactgaccctgaacctaaaacccaggattgatggtctttctctgcatggcatcccccttgatctactacaaattcaataatcaggcaaagaaagacttaagggagcagagggctgtctgttgctaccatttcttcaaattctactgcctaattccaatgttactcacaggccgactttcaccaactccttccttagggacaaaaggtagggcttatgtacaagccttatgggaaagaatggtgattctaagtgttatataactgcatgtagaaaaaagacatagattccctttcaccaagggggagtgcattccaatcaaaaggcgtagacaattccatgctgctcacatagccacaaagacgttcacctcccaagagccacctaggctataagttgcaactcctggtggcatgctccatggaattggctg

SEQ ID NO: 3222 - DNA, 430 bp, Homo sapiens
  I.3222 (AI308247)
tttttgtctttcattacagcattgattttgagaatatttatcatgttgataattaaagcaaaaaagtccatctacattttactttcattatcaaagtagttttcaaagaagcgtctaggtttaaaatacataagacagttattaagattaaaatttaaaagcatgtaatgaaaatcttaacatggaaagtgaaaggctaatagaagagtgctgacttattccagaaatcataatctactcatgaaattctttgtggtggcataattttaaaattgcattagacaatgacagtcttatcaggcagggtgttttcaactgcaaataacagaatagccaactaaaatttgcttaagcaatttggacatttgatttatctctcttaacaaaatctctagaggtaggtggtcctaggctcagtaggtcagtgacc

SEQ ID NO: 3223 - DNA, 436 bp, Homo sapiens
  I.3223 (AI367866)
tttatcttcatgtttagcactaggttctggatagggaaaattcttcccaggcttttggagttcttcaattccaacttcataagttggatcagcaatttcttttgcagtgcacaggttaatggagttgccagagtgtctcagatatgaaattgttgcctcgtaattatgtggttcttcaaattctgcattgaaaagcctctctggagacagggagccctcttccacagtcacttccccctgagtcttgggaacagcagctggctgcctctgaaaggcctggaggttcacgatgggaggtcttgaaggctttgggggaggaggacccagggagtcgatggagggcaatggctttgttttgggaaaggggtgatgcctgacatctggctgttattctggggcctgactggcaagctcacactcatagatgggctggcag

SEQ ID NO: 3224 - DNA, 364 bp, Homo sapiens
  I.3224 (AI366796)
ttttttttttttttttttttttttttttttttttttttttttttttttttttttttttttttccttagggggctttttttccccggccaaaaaaaaaacggggacgggcccctttgcctggcccgggaaaacccaacacaaaaaccgggggggggggggggggggcccagaaaacggttttaaaaaagggggcccctgggccccttgtttgtcccgggcggggaaaggaaaggccccccgggggggggggccctaaaaccctggggaaacaggccccagcccaggggcccagggccggcccggccgggggcaaaaaatactgagggccaggggggcttcctggctggccccaaggggggggggg

SEQ ID NO: 3225 - DNA, 243 bp, Homo sapiens
  I.3225 (AI352296)
tttttttttttgggatgtttccatatttattggtttacttttatgtatgtagatttaactccagctaacaacaaacttaaatgtcacagcagataaaaactgttttgtttgtttcaccaaactatatagaacaagctgcaagttcctgacatgagaaaaaaaactttagcaacacgagcaccaactttaattatgattttctacaggagaacatagtaaattaccaatacaacttaaacattt

SEQ ID NO: 3226 - DNA, 330 bp, Homo sapiens
  I.3226 (AI351933)
tttttttagaaagaagtggggtctcacatgctgtccaggctagtctcaaactcctgggctcaagccatcctctcacctcggcctcccaaagtgctgggattcaggcatgagccaccactcccggccctcaattaataacttgacttaagataatctagttcatattaacttaatttcatagcatacaaaaactatgcttcatttcttccttccattattctatcatgaatatggcacctttttgtgttataagcccattgacacagtttataattattgcttatgcaggtgggtgtcttttaaatcagagataagagaataaaatatcta

SEQ ID NO: 3227 - DNA, 400 bp, Homo sapiens
  I.3227 (AI351653)
tcacttattgagggcctaataatatatattttgactacatttcttatatttcgcgtggagacgttttcagcctctcaaactgcatcgcctacgcacagaagcttcccgaatcttagacgagacacaacaaagctgcgcgctgccctcgccccgcccgcgggcgcggcggcgacaggccctcggccccgcccacaccgcggtgccacgcctccaacccgcctccagccgtgcctccccaggcccttggccccgcccacaccgtctcgccccgccccaagccgcgctgtgctccaggggcgggggcccacggcggccactcactgagccccacgggccgcagcggcagtgacgtagggttggcgcacggatccgttgcggctgcagctctgcagtcgggccg

SEQ ID NO: 3228 - DNA, 261 bp, Homo sapiens
  I.3228 (AI351317)
tcattacccaaaggcatttattcgtaagtaatactgcttgattacaaaattatttctcaaggaaaagttcaaaaggtggttatgtggatattcaaacaataccagaaaactcgctacttccttattcctgtaattaatgagtctggcttgcccagatgttaaattatgaaaccatgctgtgtaaaatgcacctattacaattaaaaccagggtaaacccgtatttatttactagcactgttaaaacattacacaaaacaca

SEQ ID NO: 3229 - DNA, 341 bp, Homo sapiens
  I.3229 (AI350836)
ttatggttcttaccaatgtgccattgtttaatttgttttctatagacttcgtaactttaattttgtgacatttcaaaaatatctattgtttgcagtctggttagtaaagatctgccattaattggtacactacttatttcaagtctattctcctcatctctgaacactttaattccttgagctcttttcttcttcctagacccttggggatcacaaaattctttgaggctaaaattggtcacgtccagaacaggggcaggcaagaaacagtctcagtaattcatttattgtttgaacttttccttttagtcatttagacaggaaaaactaattgtaattat

SEQ ID NO: 3230 - DNA, 386 bp, Homo sapiens
  I.3230 (AI350752)
caagataataaataatggtgctagaaatcaaacctctttacaatgaatggcagaagactgcccaatttctttggccagttgaaattttgttgtatcgaagttcacatacaaaagatgaccaatggcttggaaatcttttttgaaaaagaaagccattgcaaatatgcttattataatggacgctgactgtagcgttaggccttattgttcccattttacagaatagaaagctaaagaaagttacttgcccagagcttatttttaatcagtaactgaaatgacggcaccatatacattgtctctaatatttaatattaaattaccaaaaaaattgcctcagctgttcactggtgatctgaaacaatgtgttgccagggctctttttc

SEQ ID NO: 3231 - DNA, 411 bp, Homo sapiens
  I.3231 (AI348538)
ggccaggaatcccattacagggtatttattcaaagtaattgaaattaggatctggagagatagctgcactcccatgttcactgcaacactattcacaatagccaagatgtggaatcaacctaagtgtccatcaacagataaacagataaagaaaatgtggtatatatacacaatggaatactatttggccttaaaatagaagaaaattctgtcatttgtgacaacatggattaacctagatgacatgttaaatgaaataagccaggtgaaaataccacatgatttcacttatatatggcatctaaaaaagttaaacacatagaaacagagagtaaaataatggttactaggggttgggggtagggaacagtaattgagaagatattgatcgaagaatataaaacttcagtt

SEQ ID NO: 3232 - DNA, 455 bp, Homo sapiens
  I.3232 (AI342197)
caatgaaggtgccatcattcttgaggaggaagtagcgtggccgccaggtcttgatgtactcccctacagacgtgcgggtggtgagagccacgcacactctacccgtcagaccctcgccaggcagccaggcaggaactgggtgtgccaggacagatgtgcctgggatgcctgagtcccagggggcaggcgcggtacgggagctgtttcttagggccagcgacagaaacggccctgggtcaacgggaaggcagactcgccccaccacagcgcccctctcagaagagccaccccgagctgtgtctgaaaacgggctgggccagctggacgcaggggatggagtaccatggacaggaggctgggaagaggtctgggccagtctgcacagccttcctggaggaggcagccctaaaccagccagtccccagcaggcaccagcagcagctcgggccccagct

SEQ ID NO: 3233 - DNA, 282 bp, Homo sapiens
  I.3233 (AI340982)
tttttttttttttttttttttgttttttttttttttttttttttttttttttttttttttttttttttttttttttttttttttttttttttttcccaaaaaaaaaaaaaaaaaggggaacccccgggggggggaagggggggaccccccaaaccccccggggggaaaacccgggggggggggccccccccccaagggacccccccccccatttttgggggggccccccccgttttttagggggggggggggaccccccccccccccccttttaaaaaaaaa

SEQ ID NO: 3234 - DNA, 435 bp, Homo sapiens
  I.3234 (AI336792)
gttgtgttctattaaaaaaccaagttaacttctaattaccaatccttgaactagaactacaggttggcagaaatttcatttttctatgtattaaaacttaatatcctaacaaatttggggtttttagctttatttctgcattatgcttttatatggactctaaaatttaatatatgacataaaatttaatatatgacattgagctggtaatgcaagattgtatgttaaaagttttctcaaattctaccgttaacagctgtcaatgccagaaattagtcatactttcacaagacttgaacaattccaataatgctttaatctgttaactcttagttacagagagaaaagaaagcttttaataaaatattagaatatcttaaacatcataagctaaaatattcatccagcatcaaccaacctattctcagggtgaca

SEQ ID NO: 3235 - DNA, 309 bp, Homo sapiens
  I.3235 (AI335178)
ttttacttagtagatatttattgaatgtttggatgggtgaatgcattttggcacaaaaccttcacttctggactggaagatagattggatggagcagagacgggaggcagtgagaccaagtggagcgtcatacctcgccttggtaagggtctcccctgctgttggatttagcttccagttgtgtcatttcaaatgcccgtgatcctctgtaacacacagatccgtcgtacaaattatgctttgtttgctgaaaagcctcctgaagctgaatgggtttactttggcatcagcggaggccatgtttgaggg

SEQ ID NO: 3236 - DNA, 496 bp, Homo sapiens
  I.3236 (AI334229)
taaaaaactttaaactttattacttaaaacatgagaagtatgtacattctaaatcaaagagttacaaattacggtgccagcagttaaatgtgaatcctactcaagaatatgctatactggtagttttcattaaatgctctattctgatataactgttctctctttatagattatttatatatgttattaactttacatttgtagggtttcctttcagtgtggatcaagagatgagtgatgcggcttcaatgcaaactaaattctttgccacatttatgatatttgtaaggtttttctcctgagtcctccaatgttgtgctaggtgtgaattctaactaaagattttgccacattcattccatctgtaaggtacgcagtgaattctctccagcatgaattttccgatgtcgtgaaaggtgtggattttgattgaagaccttgccacatgcattacacttgtaaggtctctctccagtatgaattctctgatggttgg

SEQ ID NO: 3237 - DNA, 373 bp, Homo sapiens
  I.3237 (AI333550)
tttttttaaactgaaagcaagtttaataggaaagtaaaggaataagagaagggctgccccataggctgagcagcggcctgggctactccgacgagaacacttattgttgtttcttgatatgtactaaacatggtgtggattattccggacttttccgggaaaggggcaggcaattcccggaagtgagggttcttcccccttttagaccatctagggtaacttcccggcattgccatggcaactgtaaatggtcctggtgctggtgggcgtgtctcatgctaatgtattataatcagcacataatgagcagtgaggactggctgtcttggttttggtggtttggggccggcttcttcacggcatcctgttttat

SEQ ID NO: 3238 - DNA, 467 bp, Homo sapiens
  I.3238 (AI332919)
tttttatgtcattgacccagttttagaagtctttatttattgagagggtaaccaaattaaaatcaattaacaacagaggtgaaaaacaatagctggatgaattcatcctttgatgttaacttccttcaactcttcatgaaacgagctatctcagctaaagtgttcagcaaaattgcagtaaatcaagtccttttgccaggtgaactttcaaaggttccctccccctctgaccttaggtaattttcagttatcctttccctacgtgtggaagggagatatcattatttatgatacaaggagacttgacctttaaatgtcagtggaagtgtagagtctggccattctgtctgtatcttccaccagcttataggagaattaagggaaatagttcaataacgtgcaaatgggaaagagggaggggtagaaggaacacatcatctatgccaccattttttgttatataacca

SEQ ID NO: 3239 - DNA, 470 bp, Homo sapiens
  I.3239 (AI332711)
tttttttttagaagattaaaatggtttatgatcagttttaattgacaaatatgaacaaaaaagtctaagtttttcattgtttctgttttgactattgttatatttaagaactcttcactcattagattgctaagtactaacttacagtcatatgcctggtttccttctcatttgaattattttagaataaaattttattttttaaataagtacattataaccattctgtgagtcctcagctttagcaatgtgactgaatttaattagaatgtacatgttggtgatcagtttcacacccgcttccttctggatgctcatgaaaccagacattccaggtgcaggaatgtagctgtgtcccattgctctgtggaggtttccgtagttatgaattgtactggtgtttcctttgtgttccaaccaattccatctttaaatgaaaggactggctttatgttggaggtcaggactaa

SEQ ID NO: 3240 - DNA, 478 bp, Homo sapiens
  I.3240 (AI332536)
gagagggtcccagcaaaggctatatgctgtagtagcaaaacgtcaatgtgtgtatgtgctgtgtcgggaggggcagggttctgggcctttccagtcacagtgaagagcttacactaaagcaaagaggggtgataaacagatgcttctccagcatactccagcccaatgctgccccacgcaaatacaatgtgagcttcaaatgtgagccccgtatgtaaagttaaattttccaacagtacatttaaaaagtaaaaagaaatgggtaaaattcattttaataatatatttgattcaacccaatatacccaaactactatttcagtatgtaaccattaaaaaaaaaagattttacctttttctgtactaactcttcaacatcagtattttacactcaacagcacagctcaatttgaacaaatcccattcagtgctcaacagccctaggtgactaatggctatgatgtgggacaacacaatc

SEQ ID NO: 3241 - DNA, 359 bp, Homo sapiens
  I.3241 (AI332525)
cccgcggggcactctaggacatggagtcccgccgcccggccgcccgcggggcactctaggacatggagtcccgccgcccggccgcccgcggggcactctaggacatggagtcccgccgcccggccgcccgcggggcactctagggcatggagtcccgccgctcggccgctcgcggggcgctctgggagatgcagtccccgtgcgggtgcggcctctcttctcggccggccctggaggcggcaccgcacctgtgcattgagcacaggtggggaaacttaggcctgagcgaggccctggccatgaagccccgcccagtagcgtcagttgcggaactcgaaattcatggggcgactgcgagc

SEQ ID NO: 3242 - DNA, 625 bp, Homo sapiens
  I.3242 (AI242831)
  misc_feature (396)..(396): n is a, c, g, or t
  misc_feature (460)..(460): n is a, c, g, or t
tttgcgaggaatataaaattgttgttatcttgtgtcactaaacttaggggtggtttgatgtacatcaatagtaactaggacagaattcagttacatacggcccttgttttacagatgaggaaacatgcaaagtacagtacagggaaagcaagaaatcaacccgagtcatgattctaaagacacctggagccacgaaactgtgttgcgccatccacagcccatcatttgcttgctgtttgtttaatagggccaaggccaggacactaatcccaattctgttttagaagtgccttcatctgccctggtttgaggcatacaggccagtggttctcaagcccgagtgtcctctggagcatctgaagggctcgttataaacacaggtgtcaggtcccatcnccaggtttctgattccagatgtccacgatgggctccagaatttgatttctcaaagttctcagtnatgctgatgctgcagtctgagaccatgcgtgagaccactgtattctgtaggggggaggaagcttctttagagtgaatccttttgacagccattgctttacaccacatctgcaatagaccaaggtctctcatccacatttttaagctccaagagctgcctggctgg

SEQ ID NO: 3243 - DNA, 441 bp, Homo sapiens
  I.3243 (AI123190)
  misc_feature (389)..(389): n is a, c, g, or t
ttttttttaaatctgtaagcttccttgtttctcacacctactcatgattcttggagctgtctctggaaacagaatattttccctctccttcctaagtgctcagctcccccattgtgtagccccgggacatcagaagttgttttctaaggtgtgttttttccaccctcccttatttcttttcccatgatttttttattaccaatccctccatgagagagacctatcctaggagtcttccatcttgcctgatagaagttttctctggcatattccaaattcagattgctccaaaaccaggtgaagtctgttgctagttggacagtcggtatggcctggaggagaagggctgtttgtatttccatgcatcctcctttgtcctcttgccctgngtgaagcaatgacgtctctgtctcctctagtgcgttataaaatagaaccgca

SEQ ID NO: 3244 - DNA, 480 bp, Homo sapiens
  I.3244 (AI091302)
tttaagtggcccacttatttaatgagtattggataaaaacaaaattctagtacaactgaaggctgtaaatcctgagagttggttataataggatctggcctggatttttaaatggcacaccattcaaaaagtggttgggaacataaaaggttctccacaaaagccttttgctgcagaaggtggcttggatggctaaagtagtatttactcttagcaattaaccaccaaagcatttagttatttgcatcccagcaaaacaacaatcccacactttactccatcacacctggaatccaagaggtctacaagtccaaagacaactgtgttatcagctttgcatgggaaagacaggaggtagctaaactgacctgtaggtgccctttcagtgtggctagggtcatctgagcagtcagggagtctctcattcatcaacagtttagcctcctttagtgttgattatttgacttatctgcaaaatgg

SEQ ID NO: 3245 - DNA, 497 bp, Homo sapiens
  I.3245 (AI073378)
ttttttgcacaggcaggctttattctttctctctgcgtgtctgcaggatgccagtctatgaggaccaaaagctcattccctgggaaagggagtcagctctaaatgggttttcttcacctctgattattctctcctgtaacggaacccttggagagcctctattttcaagttatttagaaaatgagacctcttacttaaaaaaagtcatgtggtattaaatgtcttcttgtcctcagaatattaggttagtgcaaaagaaattgcagtttttgtcattacttttaatggcaaaaactgcaattagttttgcaccaacctaatacttcttagtcatacttcccctcagttctccaagccaagaagctcttatttgaacctatccttaaaaaagtgtttacaatagcagcccgtgacctgttgcagcatctcagccccttcctattgtttcctctcaactctgaacctcagtcccaccttgcggcgcactggaaccaccg

SEQ ID NO: 3246 - DNA, 1083 bp, Homo sapiens
  I.3246 (AI417699)
  misc_feature (863)..(863): n is a, c, g, or t
  misc_feature (920)..(920): n is a, c, g, or t
  misc_feature (933)..(933): n is a, c, g, or t
  misc_feature (955)..(955): n is a, c, g, or t
  misc_feature (958)..(958): n is a, c, g, or t
  misc_feature (985)..(985): n is a, c, g, or t
  misc_feature (987)..(987): n is a, c, g, or t
  misc_feature (991)..(991): n is a, c, g, or t
  misc_feature (1003)..(1003): n is a, c, g, or t
  misc_feature (1005)..(1005): n is a, c, g, or t
  misc_feature (1006)..(1006): n is a, c, g, or t
  misc_feature (1014)..(1014): n is a, c, g, or t
  misc_feature (1015)..(1015): n is a, c, g, or t
  misc_feature (1016)..(1016): n is a, c, g, or t
  misc_feature (1017)..(1017): n is a, c, g, or t
  misc_feature (1018)..(1018): n is a, c, g, or t
  misc_feature (1019)..(1019): n is a, c, g, or t
  misc_feature (1021)..(1021): n is a, c, g, or t
  misc_feature (1045)..(1045): n is a, c, g, or t
  misc_feature (1046)..(1046): n is a, c, g, or t
  misc_feature (1047)..(1047): n is a, c, g, or t
  misc_feature (1050)..(1050): n is a, c, g, or t
  misc_feature (1055)..(1055): n is a, c, g, or t
  misc_feature (1056)..(1056): n is a, c, g, or t
  misc_feature (1057)..(1057): n is a, c, g, or t
  misc_feature (1058)..(1058): n is a, c, g, or t
  misc_feature (1059)..(1059): n is a, c, g, or t
  misc_feature (1060)..(1060): n is a, c, g, or t
  misc_feature (1061)..(1061): n is a, c, g, or t
  misc_feature (1062)..(1062): n is a, c, g, or t
  misc_feature (1063)..(1063): n is a, c, g, or t
  misc_feature (1064)..(1064): n is a, c, g, or t
  misc_feature (1065)..(1065): n is a, c, g, or t
  misc_feature (1066)..(1066): n is a, c, g, or t
  misc_feature (1067)..(1067): n is a, c, g, or t
  misc_feature (1068)..(1068): n is a, c, g, or t
  misc_feature (1073)..(1073): n is a, c, g, or t
tttgacaacataagagaagttatttatttttaaaccagctttggaatcacctgcccctgaaataactggaagaaagaaaaaatatcagaaatagaagatggaacaggcagggtgaaagaagtaaatggactactggaccattccaagtcaaatgcgataattctttgaagcccgcaaatttcaagtgacaagacaactaaaatagctctcgaagtacagaggaaaattcattagggcaaacagtctagtgtgttagtgtgtgtgtaagagtgtgtgtgtgtgtgtgtatgagagagagagagagagaagtggtcctattgcaattaaaatacaagagtataggagtgcttataggcatacaactatagtgtataggttattcatagacataggatgtgacacagaatatcatgaagggaaaaattcctaaacagtgctagatagctggtgctgaggggtaaatttataaagttgaatgaatatcccttgactaaggttcacaaacattactagaaaatgagttattcacagaatgaactagatatggtaatttcaaaaagcatcatcattgtaatttgtcatcattttaaatatttacacaatctagcaactttcattgctcattaaagataacagtaatcatgcaactttcaaagtggggctgggaacagggaaagaactcttaatgatagccacatttaaaatgcccttagtatttatattagacatacttcacaagggaaagaacgtccagtcgggtgaatcgaatgcaaaatggaaacgggataatggcactaaagaaataggaaagaagtgatgccctggctacaagttttttaatcatggatactgccagtataaantaaagcccagccaaggtagcggtcgcagagaaaataaagtaaattttaagtaaagcnaactgtccccgcnccattttaaaaagggaaaggcncantatttccctcggggggttaaagttttngntaangttacaccggcncnnaccccggnnnnnntnattgggaaaaaaaagggcgccaannnccnccttnnnnnnnnnnnnnncaccncccccccata

SEQ ID NO: 3247 - DNA, 484 bp, Homo sapiens
  I.3247 (AI401101)
ttttttgcagctttgtgactgtttattaattggtttaatatatattcattaacaaaattaatattcattaacaattataaacaaaaattaataaacatataaaactttcatgctgtacatgctaaaacatattccagacaaaagatgccttaaaatgttcctaccattggtttagaaatggtataccaaaaaactagcctaaggaaaaaagaaaggcaactaaaactgatgtggcgtggtatttagtacaggaggtcaaagatatttaaatctttgacgtaagatagacaaaatactagaaaaagtaaatatttcataatatatgaaggaaaacagggagatgttttctctcactaagttacatctgtaatgtgggttgatatatggtcatgaaaaatggcagtagtcacagactggtcattctgtccaacagactccttttctctgagaccttccaactgtacacacattcttctattttctg

SEQ ID NO: 3248 - DNA, 412 bp, Homo sapiens
  I.3248 (AI400294)
aagtttatttttctttagtgttacaattgaaaacattcaaattgatttccttaccttttctacaagaaggaactgtaatttttaagaaactctctggatgattgtctaagacttcagatcctaccagacaataagcttcaggagaccaatttaagtaaatgccttgtcgccaatacattctgtttgggcgaagtgctcgttctaaaaaatggagccattaattattaactgcttcctaagttaaagggaaaaaatctactgcacacaacacaagtgattgtaatacagatctattcattttgaaataaagtattgggttgttactgatatgagtcctcatccatatctattaaatattttatccacaactttacaataaaaagagttaaatcccctgcacatttagatccat

SEQ ID NO: 3249 - DNA, 448 bp, Homo sapiens
  I.3249 (AI400204)
ttttttaccagaaaatggctttaattaggggatctcaatcgtataaataatttttttctaagtcaaaaaatggagaattttttaaaagggaaaagaaaagggaaagcaggaggcaacaggcttcaaacacccaaaggaacaagggaaagaggcagtctcagaggagctcccgagcggtcccctgcactcctcgaatcaggggaaaaggggcacaaacacgtctcaggtctctagcaggtctgctttatgaagatgtgtcccttgtgatttcacctgattagagctgggtccagggctgtgctcgttactggcaggtaggagaaaaagagtctgaaaactgcgatagtggctacggagccatgctgcaaaaggtgtggaacaggactgaccatacgcagcatgcgtgtggccctgcagacacagcggggcatatggtcaggagccatgc

SEQ ID NO: 3250 - DNA, 301 bp, Homo sapiens
  I.3250 (AI400066)
ggctttcaattatagcgacttgttttcttgtttatttaatctttgtgttgtgctcgttgcctgattttgattgttggggctcacactagggactgggaaagctcctgaggagagaattgctcctgtcctttcctatatcacagggcattgctggcctcgagggtccctctccatgtggggtgctgggttcaccttttcactctgctgctagccaagctcacagcagccctcaggagccctgtctctcccagctgctcatgagcttgtttctttggcctgacaccacctccttgctccagcc

SEQ ID NO: 3251 - DNA, 447 bp, Homo sapiens
  I.3251 (AI394580)
tttgacagtttatccactttttaatcaagcagtcgacaaggattgcatggatagcatatcttcttcaacattcagggaagtgtagatgatccaagcacaaatctgcagaggggaataaggaggctgcttattaagcatgcacatttgattggcgttctttttccactcatcagttgttatcaaaccggtagagaagattcaatctgataattttcaagatgagtcaccagtagccacagagttctagggtcaaactcagggctttgtggcttaagctgttgtcctcccagtaagacagcatactgaactattttggcctgtctttcctctctggacaactttgctagtctgagatggcacactgactgcgcacagtaggggagctgctgactacaggagtgggtgaactttttttgcaaaggatcggttaggaaatattttaagctt

SEQ ID NO: 3252 - DNA, 460 bp, Homo sapiens
  I.3252 (AI394264)
ctctattttattttctaaattaagaaagatttgctcagaggtttagatattcaactttccccaacttttagtacaaatacatccatttagtttttgatgggccttggatacagcattataaagtgagcattttttcagattacactgagatggcctctctttgtataagtggctagaagtaagaactttttcccccagtagctcatattcccacctatcacaccatgccatgtacagtataccactttaactccatacactccgatggaagaaaccagactcttgattatgtagaagaatgcacaggtctcatgcatttggattttcccttaaagcagagaaaactggtaggtctgtagaggaaagcaggagatatcattatctcccaggagtcaagatgcagataatggtattgttccagtcttgaaccatttcatttcatcttcctgatgttcacgag

SEQ ID NO: 3253 - DNA, 401 bp, Homo sapiens
  I.3253 (AI394181)
aatgtagaatttttttatttttgtacaggttgagagaaaaatgttaaaaaggtaaacttctatgtttgggggatatagaagttttaggttgatgaaagatagacttttaattttttcccccagaaagtaacatttcttttgcataaaaaaaaaacagtctgagagtatgcaaacagtacacgtcaacacggattacattctgaaaccatggatgcaaacctcacattcctggagtcatctaacactagcatcagcaggtggtcttgacatggtcctggacccattctgtgtcactgaatctaagcagacaaatgggcctgcctggaaaataaatagaaggaagaaaggatgggaaaagaggagggagggagggaaggaagacatttctgaatatgttccca

SEQ ID NO: 3254 - DNA, 387 bp, Homo sapiens
  I.3254 (AI393173)
ttttcttctccatagctttaataaaatgaccttttaaaagaccctttcatatgaggttgatacctccgagaactttatctttccgtagaggtctttgaaacttctgttccacattcgttcctttgttttgtccaaaccttgggaatagatggctgcgtttggaatttatttgatgtgcatatgcagtctgtcatctttccagccaatcccatattgctgtcttgcctcttcattatctccccaacttttgtctttaatgtgggtgctcaaatgtggcagaacagctgtagagtgacgtgatcagccaaatggtccactgcggatagaagcgaaagactgtaagacaggtcaggaacacagaactattggtcgtcccttccaagtgcg

SEQ ID NO: 3255 - DNA, 402 bp, Homo sapiens
  I.3255 (AI393160)
  misc_feature (84)..(84): n is a, c, g, or t
tttttgattctattcaggagaagtttatgaagaaggtagaacttgaatagagactaaaagctatactgaatttacatagagcanacattttcctactggagagaacatcaggggggaaggactgtcaatggtccattggggaacacaaagaaatcattttaggtatataaaagaaattcaattatgaaaagccttgaaaacgaacctgaggagtttggactaaaagcaaaaagaaaccattataagaatttatgaagtagagtgacatcatgaaagttgtcttttaggaaaagtcacctggcaacagtatgaaaggtgagttaggagagaatgagaggatgtagattagtcaagagactatcagttattggatgtgaattaaagagatgacctttgtaatag

SEQ ID NO: 3256 - DNA, 418 bp, Homo sapiens
  I.3256 (AI391488)
tttttttttttttaagaaagacaaggcagatggttttattcccatttcaagagattgatgatttacccaaggtatatagtttgcaggtacacgtggctgataaatgttggaaactggctttcccaactcttcttttccttgcctgaagctctgtcctggacttaggaatcccagtggtgatttggagtggacaagacttgagtcttgaaggacaggactgcagggagggctggtcctacgtacatcctggagtgaaactccttctcctttctgcttccaccattactctaatcctcaaagggttaaccagctttcacacgattttcccatctcccaggtaacttgggcagctgctccgtgctggaaataacccgctgctaggaaggggagtgggcaactcggcccccacttctgggga

SEQ ID NO: 3257 - DNA, 361 bp, Homo sapiens
  I.3257 (AI282040)
ttttgaaacagggtctcactctgtcccccaggctgaagggcagtggcgccatctcagctcattgcaacttttgcctccggggctaaagtgatcctcctgcctcagcccccccaagtagctgggcctacaggcacgcacttaccatgcctagctaatttttgtattttttttttttttttttttttttttgcagagacggggttttaccatgttgcccaggctgattttgaactcctgaactcaggcaatccaccttggctagcctcccccaagggctaggactacggatgagccaccatgcccggcccatgcccagctttcaataaaaaattacaaggtgtactagaaaaaaaaaaaatac

SEQ ID NO: 3258 - DNA, 329 bp, Homo sapiens
  I.3258 (AI266741)
cctttataagttacccagtcttgggtatgtctttattagcagcataagaacaagactaatacaagcctcctggatcagttcaaatcaccttgatatttcttaattccaatgcattggcataaagtaaatttccttcctcccttggccctcacctctctcttgactccaataagggagagttgtggagagatggtacctgggtttgatataatttgttgccagataagttataataatttgttaaggaattcaagccgtagaggatgaggatgctcttttagcatattaggtttgaggtaacaggccaaaaggaatagcatttggttatt

SEQ ID NO: 3259 - DNA, 276 bp, Homo sapiens
  I.3259 (AI264774)
tttttttttttttttagcacgagcccatttttataattaaaaaaaagggtgtacacttataaaagcagcagaaatatttggaaggaaaccatgcccctgctctgaaagaacaggacggtagagcaagaagaaaatgaagcaggctgggactccctgagcagcgcagtgagtagccagcctgccgcccatcagtgggaggtggcaggagagggacgggtgagcagggcccactgcctatgagcagggcactggccccagccggggctggggaggagc

SEQ ID NO: 3260 - DNA, 396 bp, Homo sapiens
  I.3260 (AI263376)
attgatttatttattttttcgagacagggtgtcactctattgcccaggctggagggtgagactcagtctcaaaaaaaaaaaaaaaaaagaatgacaaatgacatcaatcatggggtggtaaactgcacatgggtcaattccagcctgcctcctgtctttgtaaataaagttttattggaacacagccaggcctgtttgtttctgtattgtctatggctgcttctgcactacagcagcagggtcgggcagttgcaacagaatctccatggccttcattcacaagtcctacgggtttaaaaaaaaaaaaaatatttgaaagagagagaatcctatggctttcaaagcctgagatatttactatctggcccttgacagaaaaatctcaatggctctcct

SEQ ID NO: 3261 - DNA, 413 bp, Homo sapiens
  I.3261 (AI263236)
  misc_feature (306)..(306): n is a, c, g, or t
  misc_feature (315)..(315): n is a, c, g, or t
  misc_feature (352)..(352): n is a, c, g, or t
  misc_feature (355)..(355): n is a, c, g, or t
  misc_feature (356)..(356): n is a, c, g, or t
  misc_feature (357)..(357): n is a, c, g, or t
  misc_feature (369)..(369): n is a, c, g, or t
  misc_feature (379)..(379): n is a, c, g, or t
  misc_feature (383)..(383): n is a, c, g, or t
  misc_feature (384)..(384): n is a, c, g, or t
  misc_feature (385)..(385): n is a, c, g, or t
  misc_feature (386)..(386): n is a, c, g, or t
tcacatctgaatcatctacatcagtttattggttgaatctgattcacatcacaatcatagctctaagcatcctcaaattcctgggctcaagcgatcctcccatatcatttaattcttagagtactattaaacccatttcacagatgaaaatattgacacctagagagggactatcaatttcccaaagccaggcttaataactcactcaagctcatacaactagtaagtgacagagctggggcttgaaccaggcagtgctttgactctgtcccccactggccagggcataaccatcatttatgacanaagtctagnaatttttttttttgggaaacaaccctcctttgggggnggnnnccctttttcccnccccccaaangggnnnnaaaaaaaaaaaaaattttttttttttt

SEQ ID NO: 3262 - DNA, 304 bp, Homo sapiens
  I.3262 (AI253200)
ttttttttttttttttttttttttttttttgatgaaaaaatatatttattaatttattatttaaaataccaaatagtacatgaatacatacttattgggaaagatgaaaccataaaaattacaacaaataaagtatccctttactttctgcttcatttccctccccagaaataacttggcttaacagattaatatatattcttccattgttttttgtaaaatacgtttactgacacatacacaaatgcacacatgcttttctccctaaaatatgttaaaataataatttaaataattttaaaag

SEQ ID NO: 3263 - DNA, 289 bp, Homo sapiens
  I.3263 (AI253108)
tttttttttttttttttttttttcaggagaagacataccatgtttattaaatttgagatcccacacataatggacttgttcatttcatgataacagttatcttctacagaattttatctgaatgttttatctctgtaattcatcaattctgatttattcattattaccttcactgataccctctcttgatcatactgtttcacatatcatgaatatgaatctagggatgactttttttaacagatttaaaagttaattacaaagtaaaaatataggaccttagagactt

SEQ ID NO: 3264 - DNA, 429 bp, Homo sapiens
  I.3264 (AI203201)
catatgataatggaactttaattttttgaagaactctgccattttacatttccaccagcagtgtgcgacggttccaatttctccacgtctttgcccatacttgttattttctattgctttttttaaaaataatggtgtccttaaaatgagtttttaaagaaagaaaatgaaaacttataaacctatgaggacagaaagaatgaggagagacaacagcaaatgagagatgtcaacaaactcgtggatgatggcatgtgaatagatggttggctgagttgggtttcagtcttctgacgcgctatgcctgtggttaggagagtaggcaatgatgaagcaattggaagatgacatacttccagagcctgggttgcgaagtgaagctgaaaacttcccaccctgcgatggtcttccctcactcagtgtactaaa

SEQ ID NO: 3265 - DNA, 272 bp, Homo sapiens
  I.3265 (AI203091)
  misc_feature (245)..(245): n is a, c, g, or t
atgccacaaaaaacgcactttaattatagttaggcacatcagaggcggggggtgggggcgaggcggcggcgacctcggaaaattcacaacccaacttttgtgttgaaagaaaagaaaaacagaggaaaagaaggagaggaaagacggagagtgagacggagcgagggagacgggtatagcagacggagggagggaaaccctcgcctcaccaccccttctgtcgcaccccacctccgcctagattnttcttaaaggggtagacgccgtctaga

SEQ ID NO: 3266 - DNA, 289 bp, Homo sapiens
  I.3266 (AI203056)
atattgcctatttttattgaacatatatttgcctcctcttggcttcttcattgctctcatttggaaaatgaggacactagaagagagactgtttctcgagaatcctctgattgtaaagctgtctaattctgaggttttattaatgttttctaactggtcctggaggtgtggtatctccccgcagtctggggactatcaccccacccttcagaacagcctctgcttctttcgagatgttctgggatggagacacagctttgggttccagaatagaggcagagcctcgtgc

SEQ ID NO: 3267 - DNA, 718 bp, Homo sapiens
  I.3267 (AI346102)
ttcaaaatgttttcataaccatctcatttgatcctcacaatttccctggaacttgggcaaaaggagatactcttttccccactttacagatgaagaaacaaaggcatggagaggttaagtgatttgcctcactcagctcattaaaagcagagacactgcttttccaaataaaatcttaatcggtgggcctactaagttcaagaagaataaacaggtcaaaatagccaaggaaaaatgtaaaactacaatatttaaaatggtatggcatagttcaatggaatggaaagagcccagaaacagatcttagaatatataagattttgttgtctaataaactcagcattacaaaatcagaggtaaaaggaagtattattccataaacaattacgtgacaattggctatttggtgcaaaataaggatcgatttttttgtcttcatactacttgtcatagtaaattccagatgaattaaagaactaaatgtaaaaacaaagtgaatccataaaataactataaagaataaatgtttatttgtcctctatatgcagaaggactttctaagcataaaagtacctggaagaaaacagatgacaaggaaaaatagatttgactccataaactttaaaaaagtactttgtggtttgatttgcatttcccttgtgatccatgatgtgatattacacattgcatgcctgatcaaaacttctatgtacaccat

SEQ ID NO: 3268 - DNA, 382 bp, Homo sapiens
  I.3268 (AI343613)
ttttttaaagattttcctagcattttattaatagcatccgccagaaaaggtagaaataaacaaggagtcagggagcatagggagtccacacatgattcactttaaatgttctcattcagcacagttcctcttcagctcccacagggatcggcgctggtctggtgggacgctgggggccggtacgtggagcacatgctttctgctgcagagacctctggaagaggccccggtgagcacaggtgaagacaggcctgtccctgtgcacacagtgtggctggaccagctgctcttgtcctgacctctgcatgctcatagttctgcaggctgtacagaagcctcaggaaacttacaatcctggcaaagggtgaaggggaagcaagcc

SEQ ID NO: 3269 - DNA, 430 bp, Homo sapiens
  I.3269 (AI222872)
  misc_feature (396)..(396): n is a, c, g, or t
tactgtcacatagcctttaatcatttacaaactactttcacactatctcattgaagagatgaaagaaagaaggaaaaaggggggaaccctaggaggacattctttttacaaattaagaaattgaggctcaggcaggttgagtaatttaccaaatgtcacaaagccaacaagtagtagagctggttcagaagaatcagtcttttgattccaaattccaaattctttctattgtattattctgatgttcttgaagtcattagtagcctgaaacaaattctcaaaacaggatacttgttatttgttagaaatggcatctattgacaatgtgtcacgttacagcccagctttatcagagacagaaaaatacaagaaaccaaatttcattacaaatagcgnctaatttttttttttttttttttttttggaggca

SEQ ID NO: 3270 - DNA, 394 bp, Homo sapiens
  I.3270 (AI348271)
tttctattttgaattatttattctttcaggttccaactgctaataaaggagtacatcttctctttggggtataacaggagggactcagtaaagtagtttggaaaggacatggtttagctaagccatcctgtggttttgaaaaggaagcttcgagtgaccgtagcagtcaaagtacgtacagaagtcacaagaattcatccacaactttagatttgaaaaacaatctaaatgttaggatttggaaaaagcagtatgaattttaggatcttcgaataaaactgggaagacacaaacttcaatccatgttacagaaaattggagattttgtcatcaaattgttccttgggtacatttttttcccttaaaaatgcaaccttcatctcctgaagttgag

SEQ ID NO: 3271 - DNA, 338 bp, Homo sapiens
  I.3271 (AI342710)
tttttttttttttttttttttttttttttttttttttttttttttttaacaactttttaaaaaaatattttaaaaaacgggccccgggaaaaaaaaccccaaaaaacccttcccaaaaaaaggggtatatctcccgcaaaacccggaaaaggggggcgttaggcccaaaaaaaaaaggattttaggggggggggggtttggtttccccctcccccctaaattttcccccccacaggcgggggaaaaaacacagcttcaggggcattaaaacttggggcaaagggccagcggcccccccccactaggggggggggggggggggggctggaaaaactggc

SEQ ID NO: 3272 - DNA, 426 bp, Homo sapiens
  I.3272 (AI318089)
ttttttttttttttttttttttttttttttttttttaaaaaatttttttttttttaaaattttttaacccaggggggtaaaaaaagaatttgggccccgggaaaaaaaattttttttaaaggtaaccctttcccttaaaaaccgggcccccaaaaagggattttcacccttccttaaaaaagggaaaaaacctcaagccaacaaggttttttgggggaaaatttttttataacggggaaaaggggaaggtaacctaaccccccaaaaaaaaaaaagggaaattttccccggaaaaaaaaaaagcaaaaacccccccccccaaaaaaaaaaaagggggcggaacaaggggcaaaacggaaaaaccaggggccaacccctttgttttcctgagataaaatccaaggccctaaaaaggtttttaaaaaa

SEQ ID NO: 3273 - DNA, 451 bp, Homo sapiens
  I.3273 (AI310464)
tttttgagacacagtcttgctctgtcacccgggctggaatacagtggtacaatcttggcctccacctcccaagttcaagcaattctcctgcctcagcctcccaagtagctaggattacaggcacccaccaccacgcccggttaacttttggttttaagacggtgtcttgctctgttgcccaggctagggtgcaatggtgccatcttggctcaccgcaacctccacctcatgggttcaagcaattctcctgcctcagcctcccgagtagctgggattacaagcgcaccccaccacacccggctaatttttgtatttttagtagagacggagtttcaccatgttggccaggctggtctggaactcctgacctcaagtgatccgcccgcctcggcctcccaaggtgctaggattacaggcgtgagccaccgctcccagccgcaccgtttttttc

SEQ ID NO: 3274 - DNA, 436 bp, Homo sapiens
  I.3274 (AI308790)
  misc_feature (411)..(411): n is a, c, g, or t
  misc_feature (412)..(412): n is a, c, g, or t
  misc_feature (414)..(414): n is a, c, g, or t
ttttttttttttttttttttttttttttttttttttttttttttttttttttttcccagggaagttaaccctaaagggggaagggggggggggcccaaaaaaaaagcccccccccaccccccccccccccgggggcccgaagccccccccggccccccaaccctggaaaaaaaggtcccccgcccccggggccggcacccttggaccaaggaaaacagggccccccaaccccccccccccctcccaaaaggggggccaaaagtggtccccggaacccccaagggaaaaaaaaaggccccgggccccggccccccgtggccccccccccccctgggaacggcccagggacctaaccaaaaggccaccccccccctctgggggggcctgccggcccccctgcccaacctccannanaggacccccccgaaaaaaaaac

SEQ ID NO: 3275 - DNA, 446 bp, Homo sapiens
  I.3275 (AI306567)
ttgagacagggtctctgttgcccaggctggagtgcagtggcacgatctcggctcactgctacaacctccacctcctgggttcgagtgattctcctgcctcagcctcccgagtagctgggattacaggtggctgccactacgtctggctaatttttgtatttttagtagagatggggtttctccatgttggccaggatggtctcgaactcctgacctcgggtgatccaccatgcccagcctagattacattttaagcttagaaattaggtaagttatagaaggtagttctgagggttctgtatctcttaattgcttatacctttaaatgggagcagagaccaccttcgaaagattaaaataggcaggaatggcagcctgccctccaaaacaacaagtagactaggaatgttagatagaattttatagcatcattaattgtcccttat

SEQ ID NO: 3276 - DNA, 431 bp, Homo sapiens
  I.3276 (AI304728)
ataaagtatttataaagagggatccagagtccctcacctggttcagaatcttgggtgacccttggcaggtcactaaccctgtgagccacagccacatttgtaaaagtgggataatagtcacacattgtgaggttgttcacagtgttggcacatggtaagggctaagacacttgattagcataatattcaaaattagaaattgtacactattgtactctctttcaaaaggcaaacagcctaaaactgtttggaaaaaacagcttgtacagtatattgtacacttcctgtgatagactagtggactgatacacccactaatgcacagcagtaatagtccacctctttacacattatgcatgttaagtgacaaaaaaactcactttaaaaggccaaatgataaaaacatcagccttgaggctcttcgatataga

SEQ ID NO: 3277 - DNA, 423 bp, Homo sapiens
  I.3277 (AI304605)
tttttttttttttttaagttttaacagatacgtatttaatttaattcatattttaaaaactagaactagcacacaaaacctatggtttcatggataatgcttgttgtgttcactgaggtaaatgatccaaagccacaggggcagatctgccatctatctctcaagatgtggctcctgtctttgggtcccaggtgccatcatattcacattccacccggcaggaaggacagaacccggaagttgcacacatcatttccactcatattccattgaccagactcagttatctgaccaagtcttatcacaaggggagcttgaagtttcagcctttcctcagagaggaaagtattgggttctattcctgtgttctcttcactctcctggctggggtcctttcgaacctccttctggccaaagagactt

SEQ ID NO: 3278 - DNA, 207 bp, Homo sapiens
  I.3278 (AI302949)
tttgtagagacagggtcttgctgtgttgctcaggctggtctcctggcctcaagagatcctccagcctcagccccacaaagcactgggattacaggcgttgagacatcgtgcctggcctggatgatattatttcagtgagctctctatgccagtcttcaatgtggggctcatcccacaaatatgtcatttctgattggtgttggaaag

SEQ ID NO: 3279 - DNA, 393 bp, Homo sapiens
  I.3279 (AI302780)
tttcccatttggccaggggaagattagtttattctgcttagctcaaaccagaactaatggcctaaagtgtttctccatatttgggcaaagccacctggtcgttggcaggggaaccgctttctgtgcgtgggccgcaaaggcagacaaagccttcaacctccccccgctctgcgcatctgttgctgtttgtcattcatcaagtggagcaggtgcaggagctcagtttcctctggatgcaacttctgagccaggcccaccttcctaaagggaccacaggacaagccgagggggctccctgcagggcttcagaactgcagggtatggtgcggctgcagtcctctgacatattagattagaggatgcagcagtaacaaatatccatcccaatctcag

SEQ ID NO: 3280 - DNA, 358 bp, Homo sapiens
  I.3280 (AI299236)
ttttttttttttttttacttgataatagattaagatttatttattcagtaagcgataacaattttgaatttttatgcctaatggtattaacttaaaataataatacaagcaatattgagaaatctataagaaataacagacaaatctataatcatagaaggaaatttcagccactgctagataaggtagacacaaaagtcagtaaggttgcaaaaggtgagcagaatgattaaaaatttaacaagttggcagggcacagtggctcatgcatgtaatcccagcactttaggaggccgaggcaggctgatcacgaggtcaggagttcaagaccagcctggccaacatggtaaaaccccat

SEQ ID NO: 3281 - DNA, 396 bp, Homo sapiens
  I.3281 (AI289206)
ttttttggcttaaacaatagaaatttattttctcctagttctggaggctggaggtcaaagatgaagtgctggcagtctggggttcttctgaggcctctcctccttggcttgcagatggtcgtccctttatgcacttgtgctcctgttgtctttcttatgacaccagacatattgaagtagggccccaccctaatgacatcattttaatgtaatcacctctttcgaaaccttatcttcaattatggttacatttggaggtactgggagttatggcttgaatatatgaatttgagcgtggggaccaggggtgcacaatttagtccatagcagaatcctaactgtaaaacaaacatggatccaataaaaagctaattttaaaaaatcacagttgctgct

SEQ ID NO: 3282 - DNA, 380 bp, Homo sapiens
  I.3282 (AI289172)
tttttggtttgcggtgcttttatttccgttggtgggaaaagcggtctcctcagaagaggggtggtgggggtcccttgccactgggctggtctggatgtttttgctgtgggatggtcacaccaggggctctgacagcaaggtccaggttggtgtggggaggagagaggggccggggtccgtcctgagtttctgtgaccttcccttcttggccccatcggtgtagcccccacccacagagccctagtgagaagagctggaagccattttcatctacagtggggagagcttccttctagctgggggcctcctgatggcccccccaggccctcccaggaagcatcttccagctgggctcatctccgatactcctcccctcagct

SEQ ID NO: 3283 - DNA, 427 bp, Homo sapiens
  I.3283 (AI288838)
  misc_feature (427)..(427): n is a, c, g, or t
ttttttttttttttgggcatcagtatttttttattttaatttttgcatttacaaaattttagtaaaatatgtaacataaaacttaccattttaaccattttaagtgtacaatttagtggcattaagtacattcacaatgctatgcaacaattaccaccatccagctccagaaccttttcatcttcccaaatggaaactcttacccattaaacactaacaccctatttccactccttgccgctcctggtaaccaccatgtaccttctggctctacaaagttgacagttacctcctatgagtgcaatcatgcaatgtttgtcctagagtcagtattttgaaagatctcctggtgattctctgtgctgtcagaactaagggctggtgccaagcataagttgtttattggttcatctttggaaagagagan

SEQ ID NO: 3284 - DNA, 351 bp, Homo sapiens
  I.3284 (AI301257)
tttggtctctctttttatatttattaacttttgtagtaaataagtataattttataaattgtctgaacagaatgggcatggtggctcatgcctgtaatgccaacacatccagccttgtatgtgttcttgaccggcatatattgttagtgtgcatgtattttaactgatataaatgataagttccctattgctatgtgaacatataatccattactttgaatcactacacattttcacattttacttaccttccccatacagacttccaattcctgcccccaacaattaatattgtgaccagcatccatactgtgcctcttgcggtcctctgtgagagcttcctgagagacg

SEQ ID NO: 3285 - DNA, 453 bp, Homo sapiens
  I.3285 (AI298447)
ttttttttgagatggagtctcactctgttgcccaggctggagtgcagtggcgcaatctcagctcactgcaagctctgcctcccgggttcaggccattctcctgcctcagcctcccaaatagttgagactacaggtgcccgccgccacggctagctaatttttttttgtattttttagtagagacagtgtttcaccgtctctactaaagatcaaggatggtcttgatctcctgacctggtgatccacccacctcagcctcccacagtgctgttgttaggtatcttctaaggaggagacaatgtctgagacagggactgtgcagagcctctgtcttctgaagcacagattgctttggatttggcaactgctgtcatttgggggttgccttgcttgctgccttggtgcttgttagttttgttctccatactctagctccaccttctcaggacactg

SEQ ID NO: 3286 - DNA, 441 bp, Homo sapiens
  I.3286 (AI298171)
  misc_feature (419)..(419): n is a, c, g, or t
agatggagtctgctctgtcacccaggctggagtgcagtggtgcgacctcagctcaccgcaacctccacctcccaggtccaagcaactctcccgcctcagcctcccgagcagctgggaccacaggcatgtgccaccacacccagctaatttttgtactctcagaagagacgaggttcgccatgttggacaggctggtcccgaactcccaatcccaggtgatccgcctgcctcggcctcccaaagtgcagggaccagaggcgtgaaccaccatgcctggctggaaaatactgttaagtaacagcagtaagagccgtgaaaatctaaagacaactggaaccagggagaaggcagcaaaggagtcccaaggctctggccactcctttagccacaccataaaggctttcctgattctgcccttntgctgagccttaggtccccact

SEQ ID NO: 3287 - DNA, 442 bp, Homo sapiens
  I.3287 (AI299876)
ctgaacaaaaatattagagttacaatattactatattccaggccttgctagaaactggggataaatctatgaatatggtcgcttccctggaagacctcacagtccagggaagccaaaccctgcagacatgcagtagacttagtggtctctcttaaggttgcttgttgagttttgacattggagattatgtacagacttgaatgactagttagcctcaggcacagcattctgttgctgggggaatcagctgccctcctcaggcctgggccaagtacacttagagatcgccctcgtcacctctcccatcctttgctgatgcctctgttctagtaacctctgactcagcttcgcctttagagatactcatgctttctggcaacagaggtccttcaaacccaattcctattaaactccatcacttaccagcctctttcagggacag

SEQ ID NO: 3288 - DNA, 470 bp, Homo sapiens
  I.3288 (AI299694)
gagacggagtcttgctgtgtcgcccaggctggagtgcgctggcgtgatctcggctcactgcatcctctgcctcccgggttcacaccattctcctgcctcagcctcccaagtagctgggactacaggcgcctgccaccatgcctggctaatttttttttttttttttagtagagatggggtttcaccgtgttagccaggatggtctcgatatcctgacctcgtgatctgcccgcctcggcctcccaagaggtcacttttgactgcaacatgcaatttcctggagagatgaattagctgctcacaccgagatgattagcgtcacagggtgtctgaagcagattgaagcagacactccccacgctggaggcggctgtgaaattattccagcagtacagtctgtttgttccacaattaatgttacgcagttgggatttcatgctcatcttcacgtttgtttacatttctctcaa

SEQ ID NO: 3289 - DNA, 459 bp, Homo sapiens
  I.3289 (AI292123)
tctcacctttttgatggccggattcccgtgctgcttttcctagctatctgagggacttaggattcggacagtgcttctcagatgagctccctgtgtagcaggagcagggagcctgggcctgggtgttcctcctgggtctcagccagggatgcgggcatccagggtcagtccaccctgcccggtcaggaggttgtctctggaagcctctcttgacttgtgcccagtgccgtgggaccaggagccaccaaccaactcgttctcaggggcacaactgtgtgctggcagttggaggagaaagttaagtagtagatgatgtgggtgagtttgagaaaggcttgtgtggactaatggatttgtgaatgtgagtcatttcaaaaactaacgaaaaagttttgaatctttgataatgaaacacttcactgtttttcaaaggggacgcttataagaatatttgatact

SEQ ID NO: 3290 - DNA, 484 bp, Homo sapiens
  I.3290 (AI292068)
ttttaaaggtttacaaaaatttattgcatccaaatagttaaccatttgcaataatacactatcgcttcataaacaccaacactgaaaatgtattacaatactgctaaaaagacaaagcatataagatttatacacaatttacacacaattgtgtacaaatttacatacaattacaatatgctgtctaccaaaatacaacctactcaaaaattaggaagttagaaaaataattctaagacttaatcgtgatctgcaaatgaattttttaagttgcttagtgcatattcaaatatgctcaaatatataatctatactaaaatagtgcaagaaagtatttgtatccccatcatgactacataacccatgggtattagatacctctttggtatagtgaatattaaacaagttaataaattgtatattttataaaaacaaattaaactgagtatagaaagacatgctcaagataaaattcaattcttct

SEQ ID NO: 3291 - DNA, 440 bp, Homo sapiens
  I.3291 (AI291041)
ttttttttttttttctcaagccgtttttattacactgagcgtgtgacgacacgcgcaacaataaccttgtaattaatatactgaatcagtcggaaaagaaggggctgatggctgaaaagatgtacagatgactaaactatacaggctgggacggaattgacagtttgaaagagggtggattccttgttttacaagggctgaataggcttaacacgacctaaatgcagcgctctaactgggcgttaccatgaaaacgttacagaagggcggtcttaacacttagctacgatgaacagacttcgccaacacatgcctggctactcgctttcctaactttaaagaactgattcctctaaggaatactagtgcagcataccccttaaatagttgcatttatttttaaagatacaacctacggagaaactaacatcttgccaatc

SEQ ID NO: 3292 - DNA, 438 bp, Homo sapiens
  I.3292 (AI290208)
tagttttttttaagacagagtcttaaaaaaattgcccaggctctttttttaagagtcttaaaaaaactcttgcccaggctggagtgcagtggcacgatcttggctcgctgcagcctccatctcccaagttcaagcaattctcctgccccagcctcccgagtagctgggattacaggcacgcaccaccatgccaagctaatttttgtatttttagtagagacggggtttcgccatgtcggtcaggctggtctcgaactcctgacctcaagtgatccaccctcctcggccttgcaaagtgctgggattacaggcatgagccaccacgactggcctgaaggggcttcttcatcttggggagttggtggaccctgtctctgccccttacaaggagtgttgctgaggaaaccagagcaccgagcaaaggcacagggggaaaag

SEQ ID NO: 3293 - DNA, 458 bp, Homo sapiens
  I.3293 (AI288932)
ttaacagattaacattttatttaatgttaaaccagacgattccctaacatggaagacagtctggaacacacaaaaaagaaaacaaggttttagagcctaagtgcaagaaaatttacatggccctagaccatattcaaagcatattggttaatgtattagtaacatttccattattttattttagtctctggtatattaggagcagaggaggaaggcattgtgaaaactgcaatggctgctgccaacacaggagagaaggcacaaaaactgctatataatccagtggcacataactgatttcctaacaatcctgggtccttattattgtattttatatatttttaagagcagagaatatgatttcaagttctagaatagtattataatctttttgaaaagttttggtgaaacaaaatttcggtgtttaagggtttatgtttgttatttggggaggaaag

SEQ ID NO: 3294 - DNA, 465 bp, Homo sapiens
  I.3294 (AI280238)
ttttttttttttaagatttccaatgacctttatttttgaatgtaaaaattcagatagtaaaaataaatctaaaggatatctcttaattttacgattttcacagaaattagaaatgatgatatggtctggctgtgtccccacccaaaatctcatcttgaattgtaaaccaagttgtgattcccaggtgctggggtggaaccttgtgggaggtgatcagatcacgggggcagtcccccagtgctgttctcctgataatgagtgagttcccacgagatctgatggttttataaggggcttttccccgcttcgctctgcacttctctctcctgccaccatgtgaaggatgtgtttgcttccccttctgccatgattataagtttcctggggcctcccagccatgcagaactctgagtcaattaaacctctttcctttatacattacccagtctcgggtagtcctttata

SEQ ID NO: 3295 - DNA, 468 bp, Homo sapiens
  I.3295 (AI279428)
  misc_feature (433)..(433): n is a, c, g, or t
gcctttgttagatacacaggcacgccacagtaccaggcattaccaataccagctcacgttcctctccttattcggaaagaggactaactttctagctcattacagacaccccttcccctttcttctctgctttcttttacatgcccaccttatctaaaaaaatcaaatgtttagccaaccgggattcatttagattgtacgacccaaccccagccaatgtggaaagggtacaggggcaggacttgtgtcaggaataaaggctctcgtgcccctttgttcaggtgtgctctcatggcgactggccaaggaggcacccctctgcgcagaagtaaaattgctttgctaagactcctttgttcgagtgttcaatttccttaggattttgaatgttattcctaacaagtctgagtgtgggaatgagggaagaccctgngctgggttttgcacacattgggtttagaatgcctt

SEQ ID NO: 3296 - DNA, 440 bp, Homo sapiens
  I.3296 (AI278194)
tttttggacaatgtttttatttttttggcgggaaagatcagacatctttcacaacagagcacagccaccttgaagctggggaaggggctgtttctgaagctcagggcttccccgtccagtttctccacccatagatcatctcagtgtgacagcctcttcccaccccaatacaccgtcctctggggaggaagaaataaaagcaagcgcattccagatgttcccgggaaaatggtatttgggaaaaggatgtttgtttagaatttaccaaaaatagagagccccaaaggaggaaaaggcaagctcttgacccatttaaaaagccatttcccaggaaggactttctaacaaacaatgtcacaaaaagaaaagctaatagctttgacaatataataatataaagctttggtacattcaaagcctccaaaagcaaaaattaagca

SEQ ID NO: 3297 - DNA, 390 bp, Homo sapiens
  I.3297 (AI277955)
tttaagatggagtcttactctgtcgcccagactggagtggtgcgatctcggctcactgcaacctccaactcctggggtcaagcaattctcctgcctcagctttccaagtagctgggactacaggtgtgcgccgccacacccagctaatttttgtattttttagtagagacagggcttcactatatgttggcaagactggtctcgaacccctgacctcaggtaatctgcctgccttggcttccctaagtgctgggattacagttgtgagccaccacgcccagccagcactaccttttctattgtgcatcctaatggtctgtagtatagacatatttataggggaaagaaaggaatagatgtgggcaaaaagaagctaaaaaacattccacg

SEQ ID NO: 3298 - DNA, 364 bp, Homo sapiens
  I.3298 (AI277300)
gcggccgctgcagcgcccacggtatgcgcccagtcacgcccgaggcccgggccggcgcgggccctccgcgctgtcccccggcgctgccgcagcgcactcaccctggcacaggcgcgcgcgcccccggccatcctggcgccccggcatcctgcaccgcacgggcgcccgccgccgcggcgcgaacctcactctgcagacagccagacaaagcgcctgctcgcgggccccttcaccatctcccggagacgggcgtctttgtcacatgtcgctgggcaccctccccaacacacccacacatgcccacacacccacacgtccctgcacccacgggcagggccgagcgcaaacccgcactgttgctggg

SEQ ID NO: 3299 - DNA, 411 bp, Homo sapiens
  I.3299 (AI277247)
  misc_feature (391)..(391): n is a, c, g, or t
cttatctattattatgtttattagtaaagttaggcattaaaaagtgacagctttcaaaatattgctgcttcatttagtgttatatcatattttatattccaagtagctttgaattttatgaatgcttttcaatacagcaagcatattttatatatactagtagcaccatggcattgagaatttgcaataattcaaaaatataagtattccttgcctaaatatatttggtatccatcacaagtaaggcagaaggttaagtgaaaaagaatagaaatggggttcttcactttaagactgcatttcattaatacaaacatctttagtacagataaaaatgaggctagccaaagaaaatttctttttaagatggaatatgtatttactgatgctntatgaaaaatgtaaagttac

SEQ ID NO: 3300 - DNA, 466 bp, Homo sapiens
  I.3300 (AI277080)
  misc_feature (377)..(377): n is a, c, g, or t
  misc_feature (452)..(452): n is a, c, g, or t
tttcagccccgagcttgcccagcggtgcttcaggcagggaggggccaggcccgccagccaggcgaaggcgcaggcagcgcgcgcggggcgccgtaggcaccgggccaggcgggcagccgccctgggcccgggaccgcgtacgaagccgcagcggcacacgctgatgagcgcggcgaagaccaccgccgcataggtggacacgtagtaggtggccccggccgcgtggcaggcggcctccgggccaggcccaggtagtaggtgagccacagctgcagcgtgagcgtgaagaactcatcaaccagagccaggttgaacaggtagagaagcagggcctggcccaggcgcccgccgctgcggatgaacattgccagggccgncacgttggctggcagccccaggcccagtgccaaggcataggccgcgggcaccacgatgaagcgagcagggtcatnccagaggctgcagc

SEQ ID NO: 3301 - DNA, 231 bp, Homo sapiens
  I.3301 (AI277034)
gaaattttattttgtctttattccacagaaaacagatttcaatatctcttgaaattaacctcatgtccacaaaggaatatgttttaagagttgttaatctaaaacatggaaagaatgagaaaactgatttttctttttttttttttttttttttgagacaaggtcttactctgtcgcccaggctgaagtgcagtggcatgccatcatggctcactgcagtctcgaccttgt

SEQ ID NO: 3302 - DNA, 448 bp, Homo sapiens
  I.3302 (AI276947)
ttttatgattaaatataactttattctcaaactacacattcacaattttattctaataatacattatgaatctacttattttatcgtttgtatagaacttctagctgtttcatttatacatgtgctgaatacattttatataaagataaaaccttgtatttatttttagttcttgtggtacagagcgctatacagtgcacatgttagatgctaggtaaatgtttataaaatgactgtgttttctgaattccattttgaaaccctacatacaaaatcaatcatagacaatagttgtatccttaatcacactggactatttcaccaatgttgaaacacatagaatgttctcattacagaaaaaatattaattaaaaaaaaccattctcattctctgttatagtaaaatcaattttcaaatagcatgtcttcagttattaattaatgatgg

SEQ ID NO: 3303 - DNA, 445 bp, Homo sapiens
  I.3303 (AI276822)
gcagaaacaaatgtgtttagtttattaaagtatatgtttaacagcaaaaaataaatagaataaatttattatccctatccagtgataaacacaattttaaaataaaaatgaaaacatcctgcttatatttgctatactatttcatgcattaggctaagatatatggttatttccatgctttcaggatgtgtttaacaaatctcttatacattttcctattgttgtcattttaatatcttgaatataatattaaataaacatttctacaaataatttgaacctcaaagtttcataaacatctatccttcaatatttaggcctaaaaagtaatctccattatctatcaaattctaaatttgaacttactatggtttactcctactttttaattattactttggttaaagatacttcatgatattattaagttccttactaataatgt

SEQ ID NO: 3304 - DNA, 453 bp, Homo sapiens
  I.3304 (AI276686)
tttttttttttctgcaaaaactttaaaaatgtatggttcgttgtcaggcagctggtgagcaccaggagcagtggtctctggtctgggcactgggacagggggcctgctggccaagtccacagaaaaggcctcatcgtcatccaccgtgtgataaacatcttcttcctgaccaagatggcactgatctctctccagattggtcattcccatgctgttgccttctaaaaacttgcggatcatagagtccttagtggcccgagagaaaccatctccagggattgggttagatgtactggcctgaagcatttcaacatagaggtcttcagtggcagctgggacaaaggcagccatggactcatagagatcctcgtcacagccggggttgagcgagcatttcataagcaggtctgtggaaaggtgggccatggactcgtacacagcatcagcctcctc

SEQ ID NO: 3305 - DNA, 369 bp, Homo sapiens
  I.3305 (AI273261)
aattgtcattttatttaatactgagagtagggtttctacactataagacaattcaacaatggttgcaacacaagatagaagaaaagggtgccccttttttgtgaagtgtaagagaagggcaatcgtagaaggaagtgggaaaagaaatcaggcttaatttctcagtcacgctttttcaggctgatacatattatttttagtacttatgaaaattagaagacctctgatctatttcagcattccactagcaaaacaatccattctgaaacaaccttgagaggtattaacaaatattcctagccctccaggtccacattagctcaatccaagtttcattgtctgagatgttctcattttggaaaagaggca

SEQ ID NO: 3306 - DNA, 406 bp, Homo sapiens
  I.3306 (AI272798)
tttttttttaaggtttaataaaactatttattttcactgcttcattaaggacatttttaagtaaaactggcttttctccccttcacttgaatggagaatatgactgctagtaatgtttggttctgctaccctgagttctgctaaggtgtcagcagttttattcatgtttccaccatcagtgcaaatgtaaacacagtgaaagaagcaaatatatgttgttagtattactattaaaaatagctttgactctcaggcggtccatgaaccacactctgagaacctctgctctaaaagattaggacactaaacctaaccacagtacctccttagtattaaatatccagatttacatttccctgattatcacataagttttttaaaggtttgttggttttaatcagtatac

SEQ ID NO: 3307 - DNA, 334 bp, Homo sapiens
  I.3307 (AI265967)
  misc_feature (304)..(304): n is a, c, g, or t
  misc_feature (307)..(307): n is a, c, g, or t
  misc_feature (312)..(312): n is a, c, g, or t
tttggtatagaaatgtttaatacattaaatcttatgaggtaaaatacaaaaggtagtattcataaaagagctattttgttttatttcacttgaagttcttaagagaaaaacataagaggagatatagacagacctcatctgtaaactcatgttgctctttacaaaggaagagacccagcagcttttaagccagttagtggtagagacaggcaagagtcaccaaaaaaggtcattttagtattctgtttaatggaacttagaaagagactacatcgtggggttgggggaggaggggggagggcantanggatntacctaatgtaaatgacgagtt

SEQ ID NO: 3308 - DNA, 242 bp, Homo sapiens
  I.3308 (AI383919)
  misc_feature (215)..(215): n is a, c, g, or t
ggttttttttttttttttttttttttttttttttttttttttttttttttttttttttttttttttttttttttttttttttttttttttttttttttcgaacccccggggctttttgggaaaaaaaccccccggggggggggccccccccaggggggggggcccccgggggggggccgggggaccccatttggttttttggggggggggggggnggggccccccccggggccaaagggggg

SEQ ID NO: 3309 - DNA, 406 bp, Homo sapiens
  I.3309 (AI383451)
tcaattaacttatttattgtccttttctctcataagaaagtacattcccctagaataacattgtagcttagagccaaagatcccagaagctcccttcttggatctcaagtcagactccaccatttactagctctgtgactttagggtaagctgcttctcttctcagagcccccatatgttgatctattgaagagaaaaaaaaagcagcacccaccacaaagggctgttataagaaattaaatgagataaatgtaaagtgcttcaagtgacagagtaatcaatattgcccattaacatttactgaagacttagagtgtgctggtatcattctcagaattctgtaagtattaactcattgtattccttacacctcatgagattaaaaaaaaaatgaggccccaaaaag

SEQ ID NO: 3310 - DNA, 476 bp, Homo sapiens
  I.3310 (AI381910)
tttttcatcggcaattatgacgtctgtatttatttatggacataaagaggcatgtgccaacaaaaaaagcatgttacaaagcaggatatatactattttttaaaatctataaatgtacagatgtaccgcaggttatgaaacacacaacagatacaaaattgttttatgcaaattgctccataaggtacataatttaattttagagatgtggacatttgtacatccagtgcaaggctaaatgtgggaaatgcacttcagagctccacagccccttccccatgcccctcactgggtcctcacctgtctccattacctgctgtgatctctgtgtgtcagccacgctaattccatgttgtttgtgtcatttcgcctttactgccttctaatttcaactggaaagtgctgataaggacagaggctagcagtctatttgaaggcgtaaagggaaagatacagcacccctagtacaaagttgg

SEQ ID NO: 3311 - DNA, 317 bp, Homo sapiens
  I.3311 (AI381886)
tttgagattaatgtgtttatttgtataagtaaaggtgtgtggccaaatgtcacaaccttcaacttggaaagccagttttctaaagtaaaatgtaaattttatttttaatggcattggttgaaagaaaaaaagcattttgccttcctccttcccaagaatcctttgtacatttgggggatgaattgttccaccatctctttcagctttaataatttatttttcctggaactgctgaaagtcttgtttttacactggtattcaaaactgcttgggcttggtgcttccccgagtatataaaaccagcttcacaggagact

SEQ ID NO: 3312 - DNA, 317 bp, Homo sapiens
  I.3312 (AI381823)
tttaattatattgttaagagttacatgcaatatttgaggctgctgcaaaaacaaaaattcactaaaatgcacatgactgcaaaagtataagataatacataaaaagaaacatgcaaggacagtaacaaaacaatttactatatcaagaaaggcataaacataattttaaactttataggaattataaaagatatgaagactttcatatgcaacaataggaaattcagtttgttctaaaattctagcactggaagagagctaaagtttctcaactagggcagtggctctgcactttagacctccatggggagctttaa

SEQ ID NO: 3313 - DNA, 552 bp, Homo sapiens
  I.3313 (AI381571)
  misc_feature (522)..(522): n is a, c, g, or t
tttcacgcttggccacaggtctttattccaagaccctttacctttgcagcacagggcccagtggaggccgcccttctggggagcccaggcccacgtggatgtgtcaggaatgctgtccccatcccacagggcacaaacctctcctgcacagtgaccagtgccgactcaggggcagcccgtctgccagtgcgctgttcagacaattgtagaggtagatatactgcttctggagatggacatagggttaggaggctcgccccgcctgccccaatctaacagaaaagggctcccttgtgtgtcccaacccctagggctccatctgggagaatgcacagaggtccacagcgccacctggtggctacccgggtggtgctgcctagaggcctgggcagaagctccctacctcccaccccttcccacaagtgagccccacgcccccaccccagccccatcgcctctcaccagcgttggggtcataaggtcacaggcctgagactgctgcaggggcacgttaaagacatncacggtgcactcagaccctgcctgctgcac

SEQ ID NO: 3314 - DNA, 448 bp, Homo sapiens
  I.3314 (AI381377)
  misc_feature (167)..(167): n is a, c, g, or t
  misc_feature (181)..(181): n is a, c, g, or t
  misc_feature (182)..(182): n is a, c, g, or t
  misc_feature (219)..(219): n is a, c, g, or t
  misc_feature (299)..(299): n is a, c, g, or t
  misc_feature (346)..(346): n is a, c, g, or t
  misc_feature (401)..(401): n is a, c, g, or t
  misc_feature (402)..(402): n is a, c, g, or t
  misc_feature (403)..(403): n is a, c, g, or t
  misc_feature (420)..(420): n is a, c, g, or t
  misc_feature (428)..(428): n is a, c, g, or t
  misc_feature (429)..(429): n is a, c, g, or t
  misc_feature (430)..(430): n is a, c, g, or t
  misc_feature (431)..(431): n is a, c, g, or t
  misc_feature (432)..(432): n is a, c, g, or t
  misc_feature (433)..(433): n is a, c, g, or t
  misc_feature (442)..(442): n is a, c, g, or t
  misc_feature (445)..(445): n is a, c, g, or t
tttcttttagacagggtctcactctgttgcccagactggaatgcagtggtgcagtcttggctcactgcagcctcaacgtcttgggctcaagcgatcctcccatctcagcctttcaagtacttgggactacaggcatgctccaccacatccagctaatttttgtattntgcgtaaagatggnngttttgccatgctgcttctcgaactcctggagggggncaagtaattctgtccacctcaacctacaaaagtgccggaactataagcatgagccactgacccagcttgaaatggtaatntaataaaatatatcatttatttttcaaagactagatctacccatganccacagatctgaatattttaaattgtcttccctggtacatcattgccattacctnnnaatggtacactctacantatgctannnnnnggtgcatanaangaa

SEQ ID NO: 3315 - DNA, 229 bp, Homo sapiens
  I.3315 (AI284334)
cttccactgagcacttcgtttattcactcaacaaacgttgggtccatgtgtgcagtgctgaagacactgtacagaaatatatcgggggtggtcccagctggaagggagccccgagtccgtgtaacccatacccacagaactcagggttcagacagggatggttctagaccacagcatcacagcattcacgcctgtagaggcccagggcctggaaaccacatccggtctg

SEQ ID NO: 3316 - DNA, 417 bp, Homo sapiens
  I.3316 (AI283175)
gcgtcggtgcaaatctttaattgcaagtgtgtgtgtgtgtgtgtgtgtatgttggggggggcgggaagagtgtctcgagcaacccaagcgcgggtctccaggcggcaaggccccctttgatcaggaaaatccaattatttgtgtatatacatttcccacatagtgattacttcattaattgtcccgcctttatctcctcccttcccatcccccctaataatcagttcttttatccagaccaacaaacacaccataggagctttgtggattcaaaggatttgctttcgcttctgaaagagccgctattctttgatgattgggtagcagcaaacttcaaagccataaatcttccctctgactggctggcggcccagcaaagtccttatcaaattcttggaggtgatcctgaagcgctca

SEQ ID NO: 3317 - DNA, 437 bp, Homo sapiens
  I.3317 (AI281098)
ttttttttttttggggaaaattgcattgctgttttattttaagaaattgccacagtcactccaacctttagtagccaccaccttgagcagtcagcagccatcaacatcaaggcaggaccctttaccagcaaaaagattacgactcgctgaaggctcagatgatcgttagcatcttttcacaataaagaatttttaaattaaggtatgtacattggcttttaaaaaacataatactattgcacacttaataagctacagtatagtgtaaacataacttttatatgcactgggaaattaaaaaattctggtgacttgctttattgcagtattcactttactgtgggtatctgaaatggaacacagaatatttataacctattagcctgtatgtgcacatatggtgatagggattcaagaaactaagagcttcagttcag

SEQ ID NO: 3318 - DNA, 450 bp, Homo sapiens
  I.3318 (AI269981)
attttaatcacatttatttcattttaagtgaagctaaacttttttttaacatatttgttgcctatttgtggttctgtccttttctcctttatatcttttactgattcttttttttttgagatggagtctcgaacaaacaaaaacaacaacaaaaacacacacacggactttccagagccctgcagttttgcgcttcagggacaacagtgaacatttatcgatcccatggttctcctacaattgccacgtggccagcgtctacacagccccctatcctgcccctgctgtcaaacacagcgtttccagaacgcagtcgtgctgggctccaggtgagctttgggaggagccccggctgagcccctgcactgggccccgcgcttcgggaagcatctcgctcgttcgtctcgcgcgcccgcgtgaccggagccctcacgctggcagcgggcaccg

SEQ ID NO: 3319 - DNA, 485 bp, Homo sapiens
  I.3319 (AI264626)
  misc_feature (425)..(425): n is a, c, g, or t
aaatgttagagtaaatttattattgaagaaagaaaagttttcaatcaatgtgtagcataagtgtacagcattttttagagtctacagtagtgtatagtaatgtcctaggcctcatactccctccactcactcactcacccagagcaacttccagtcctgcaagctccattcatggtggaccatttttaatctttataacatttttactgtaatttttctatgtttagatacaccaataccattgtgttacaatggcctatagtattcagtacagtaacatgttgtacagctttgtagcctaggagcaataggctgtaccatctagcctaggtgtgtagcaggctgtactatgcaggtttgttcacacgacgatgaaatctaatgatgaatttcccagaatgtatccctgttgttaagggatacanttgttaagcggtgtgtgactatatgtatatatatatatatatatatatgcactatataga

SEQ ID NO: 3320 - DNA, 500 bp, Homo sapiens
  I.3320 (AI264269)
gcttaaagataaaagatcttatgagtactaatttaataaaagtccacaggaacaaaacacaactgtgaagaaaagcatccattgtttgtgagaacccacttgattcagttcatattatgtggatatatgctaggacagatcactcagtcagagagaaacaaattatcagtttttcaatggaatgagcacaatggggcctgaagtccctgggggtagatgtccttggagcctatgttcttgtgccaaggtttgtttccaggggtacttttgggacatcaacatactggcttataacacaaggtaggacttcccaaatgcgacaaaattaaaatatcattaatagctcttgttcttaaagatatttattttttgtaaccctttttaaatagcctcaactgccattttacttttttccttagccttagtgctattctacaactttggatctttcttaaaaatatcttgtctcatttattgttcttctcaggaagatattgttg

SEQ ID NO: 3321 - DNA, 437 bp, Homo sapiens
  I.3321 (AI262894)
tttacacaagatagaagtttatatccttctatgtcaaaatccactcagtcaacccaagagggaaagggacaagggaaagcaggccctttccttgtaaatacctaaccaggaagcttcaaataccacttccacgcgcattcgaccagccaaactagtcacatggccacatcttgcctcaaggatgcctgggaaatgtaatcttagctggtggtcatacaatcatctagaatttctattactatagaagataggggaatggtagttttcagcacagtgggacaagccgctgtgtacagtgggaaaaggactaaacttagagataagtataccagggtttctgcacctccaaaatgtaatgagaagagtataattattaattatagttataataattatattaccccaaggctcattttttcaactccaaataatgataa

SEQ ID NO: 3322 - DNA, 459 bp, Homo sapiens
  I.3322 (AI250800)
caagcaaggctttccattccattcatttatttattcatcccggagtgctgggattaaaggcaagagccaccactcctggcgcaaggattccgtgtatatatatagaaatacatgtgtacagtgaaaggaaataaaaatggacaagaaggaagtcgagacccctgcagccgttattttttgggcaatagggaattcggtggttcttttggcctttggttttctgggttttctgagctagatttaaccatgctgaaaggctcttgatacacgaagttgccaggcctcaggattctcagagttaaaaccagcattgaatgggaatgtttgaaaacctcactgcagagccaagcctcccatgtgcaatttgcattttccctgtggaagcctgcggttccctgtaggaagccgcctcccttctccttgaagtctcctaggtctcagtttctgcatccacccaat

SEQ ID NO: 3323 - DNA, 476 bp, Homo sapiens
  I.3323 (AI245541)
  misc_feature (396)..(396): n is a, c, g, or t
  misc_feature (412)..(412): n is a, c, g, or t
catcagtcatatattcctcttccacagcaatgttgcacttgtctggctctaaaactactgtattattatcttccttcccagtatgagtccttgtagctacagctgaggctgtctctgcattttgtttggcttgttttttctttttcagtcgagcaaaataactttgtttccgttccttcttctcttccttggtatccataatacacaatcaaaagtgcaaagtatttgaaaaagtccctctttttaatcagtgagtcgtaaccctcaaaagagctgtgatgaagacaaagtattttttgaatcatcagaaaagtgttccttgtttgtacacatggcaccatttaaaagaacagaaccagcagagaccccttaactacaccaaactgacccacacangctggggtcacacagnctgaggtcctcaatgacctccctgtcccagtggctaggtacatgtgtcttaacttgcaaattct

SEQ ID NO: 3324 - DNA, 262 bp, Homo sapiens
  I.3324 (AI245391)
tttttttttttttttttttttttagggaaaaaaaaaacttattcaacaatactattgcaatagggagaatattccaaactcaatctacaggtgtctcaggatcagacaggaaaaggctttccttttctagggaaggacaagcagggctggcaaaagcctccttggagagaaggacaggcagtggggtgagcaggtggcaaaaccaggatgctccaataaaaatagtttctctgggagtcccgctcatttttggagtgagctg

SEQ ID NO: 3325 - DNA, 282 bp, Homo sapiens
  I.3325 (AI244774)
aatttaatgaattctttttattaaagcagaaagcatgcataatcaaagaagaggaaaattcaaaataaaggtcttatgaggctcaaaccaaagtaactcccaaggctgagtctgacctcctgggttttctttttatcgtcaacagttataagtgttcctgtaccaatcttaaagtgtcgtgttttaatctcagcagcctctaacacagattctgaaagaaaattaactcttcagatgggaggtttcctgcagtctacacaccacggtctctctgggtttatc

SEQ ID NO: 3326 - DNA, 394 bp, Homo sapiens
  I.3326 (AI244754)
taaagttttacttggaatatgtgtatttgctaaagttgcaagggaaaatattgcaaattatacatcatttgaaaaattatctctctttagttaattttcagtcacaatattggatgtagcagctccaaatagaggttacctgattattgcttttataattgaattcttaaagagtttacatcataattatataattgtatttttgaaacatcacagaaacccaacatgtacctatttgtaatcatcagagtatatacatctgattaggactcagctatgttcaaggcctcatcgagcccaacatacaattatcatttgcattttctgctacaatcaaagaaaacgcattgtgtgctattagtggccattgcaagaaggaagatgctgttttcaa

SEQ ID NO: 3327 - DNA, 260 bp, Homo sapiens
  I.3327 (AI244085)
ttttttagtcattcacttttattataggatccccacaaattcagtagaaaaggggtgggatacagaaaaaaaaagtgagagaatggaagttgtataatcactctatcaagctacgcaaaccaggacttaagttttttaccatgcgaagcagagcttttagcaatttcttagtgactctgaagccaggtactgtcttaggcactttttgtatacattacttatttcatttgagaaaaaaatatttaccataggaatttcac

SEQ ID NO: 3328 - DNA, 372 bp, Homo sapiens
  I.3328 (AI241294)
actcatatattttatttaacccaatatattgaaatattatcatttaacattaatattatgttactagtaaaatagtaatgagatattttacattttcttgtactaaatcttcaaaattcatcgtgtattttacactcaggtcatttcaatgtgtactggctacaatgtgagcactcaatagctgcagggtggtagtggttacaaagctaataagaagaggaactggaattgggacccccaagggggaactgggaccctgttccgacctccaagtcagttctgtccctgctgctatgcaagacctatttttgttccaacacaagtaaatgacttctctgaagatatccttaaagcttacccaggccagccccc

SEQ ID NO: 3329 - DNA, 384 bp, Homo sapiens
  I.3329 (AI241089)
tttttttttttacagagaaggcgaaaactttttaatcccattttcctctcccctacagcagaaaacatctgtccagtataatgaaaagtgtctcttttctgaactgttcatgtaaagattataattccatcttctcactgtctaaccttccaccttaaaagcaaagcgggaacctgggtggaaagtttcctttaaatgagcagaagaatctgacacgccgtgaacgtcctctctgctccctccaccctcttcctaactctgaaacagaacaaatgagcgtaatggaagaaacacattagggcatggtttcttaataaaagacatatgggaagcccgaggcacccagccacgtttagttctgccctcatccccagcctcatggcc

SEQ ID NO: 3330 - DNA, 451 bp, Homo sapiens
  I.3330 (AI224908)
tgctttatgaaaggcacaattcaatgcagagttcttttaaacaggaagtgtccctatgtacctgaagtcagataaaaataaactcaaattctattatgtaccatttttttcagtaatacatacacgggataaagaaaagttaaatgatctgttgctctggcctcagtgatttcatgaaatccaggaaagaatttctctgcccttctttcctctgtccccctggtagaatacagcagacagagaaggaacactcaaacaagacgaatttattttctcagaaaaacttcttcagaattcacatttaagtgagatagtatataatgaatatatctacatttttccaagttacagtctccaagctgtacagaaacagacttaaggcactaaacaaataaggaataaaaatgaattataaaggaaataatatcttttaatggagaataaaagagat

SEQ ID NO: 3331 - DNA, 396 bp, Homo sapiens
  I.3331 (AI224886)
agaatggacaaactgtgatatatttgtacaatggcatgtaacagcagcaatgaaaatgaacaaattaaaattacaatgacatcagcgacatgggtgaatctcacattatttctgtttagtgactaagagaaaatcattttcagctttcaaagaaaaaattacccttcaaagaagaaaaaatacaaattgtatggttctacttaaagttcaaaagtaggcaaaactaaattacagtcatgtgtcgcttgacacagatacattctgagaaatgccttgttaggtgagttcacccttgtgggaacatcagagtgtacttacacaaacctagatgactgcccactacacacccaggcaatatgatatagccctaggctacaaacctgtacagcatgttgc

SEQ ID NO: 3332 - DNA, 428 bp, Homo sapiens
  I.3332 (AI223833)
aatgattccaaacattttaattgcaccttttggtgacaaggttactggaacagcactttaccataaaacctgcggcccgagtctaaagctcccagcactttcatttttagaaaaacaatggaagaagcctgggagccccatgtccccacccatcagggcccctcagactgacattctgaaagtgttgggtggggttggggaaaggcagccccggcagccagcaggaacagcctcagtccagccggggtggcagtgccaggccagacaggcacaggaagagcagcccagcaaaaagaggcagcctcatggaggccagggcctccatccccgatggttggattctactcccagacaggcgggaagaatccgggtcaattttcctttccaaggggcagtcagcagagggaggggcggctggctgcagctgt

SEQ ID NO: 3333 - DNA, 461 bp, Homo sapiens
  I.3333 (AI379967)
ttttggaagatcaagagcagctcaggccaggcatggtggctcacgcctgcaatcccagcactttggaacagccccttagttctcggcaaagcggcccatactgaggcacaccatgagggcagtagctcatctcagctttggtgcaggcaggaagtcaggaaggatggcacaggcctggcaggctgcctggaaactgtgcaccttcagcctccagcaggaaagccacccgtctgcaggctccctgccttccctacatctctgttcctcagtaggatccttgggtgtgctcatctcatccctccatttggtcaaggtttgcccatcaatgtgcaggacccaggcaagttcacggcctgtcctggagaaggggggaagcaatgacatcagcggcagtcccctcgctccttgccagtgacgctggggtcttaccagtggtgtttgcgagtggtgactccgaacct

SEQ ID NO: 3334 - DNA, 485 bp, Homo sapiens
  I.3334 (AI379920)
gtttgtttgtttagcttacagggataggtggcattataagaaagagctcgggctttgtaatttctctagtaccttcccagatattgttccttcaaatgcccttcaggaaaaacaaatcccacttaaaatatgactttttaaattgccatgaatgaataattaaaaacaagtaaaataagtcactggcactcataggtggcatggttaaatgcatttttttccttgtagttgtatataacctctggttccatttatcaaatttggatgggctagaaagagaattagtctcctctaggcaaactcttcatttgattgaaagtttatgccaactttcttattagtcaacctccaagttattctttgggagaaatcaaagcaataaaatatcatttctttagcacagtcattaaaaaaaaacttttcaagctatacatataattcaaaactaattgagctagcatggaattaaatctttactgagattc

SEQ ID NO: 3335 - DNA, 455 bp, Homo sapiens
  I.3335 (AI379889)
atggacaaaaattttattattagcaatgaatgtgtgaacacaaattagaaatccaataccaattacaaccacttaaaaaaagaaataggtgtcagtctaaaaaacatgtataggacttaccatgcctaagaactaccacaatgctgataaagatctaaataaatggagaaacatacccatcttcatggattgaaacacaacatggtaaagatgttgattctccctcaattttattaaatttgacaggcttaatgcaatttctaccaaaatctcaacaagatgtatttgtgtaccaaacaagcttattctaaagtttatgtgtaaagaaaaactagaatagttaaaacaatgttgaaaaaaagaaagtgggaaggatcagtctacctgattttaagatattatagctacagtaatcaagactgtgtgttattggtagagggatagacacatagacc

SEQ ID NO: 3336 - DNA, 415 bp, Homo sapiens
  I.3336 (AI379294)
ttttttttttttttaaatttaacaatatatttatttaacccaatatatccaaaattattttaacatgcaaccaaaataagaaaattattaacgaggggacaaaacacaatacacactacaagaaatcttacccagcatggtaacacgaaatgtagtcttgccaacactacaagggatatttaacagaaaaatattttatactatttctgttttaaaatttaaatcaaaatttaacgaaattaaaaattcagttccttggttgcatgagccaaatttcaagcgtgagggacagtgcagtataaacctacaatgtggtcctccacactccttaggggtgactttgacggaaccaaactcttcggttttgcaaattacctcctaaagatacactgaaatcaatgggaaaattcaccct

SEQ ID NO: 3337 - DNA, 445 bp, Homo sapiens
  I.3337 (AI379119)
actttcctagaaaatacagaacaaataatttttattaaaagttcatcaataaatatatatttttttctttaataactgtccttcaataatgtctctgttgaactccaatttttcattacattctaggtccttttgccacatcttttttcccagactccataaattttcagttaccatagtggtctaatagtaactcttggctactatagtggcctaattttggtatttagaactcattctttttcattaaaaatctctaatcctgaacttgattcagaggttatctcgtattctctattgcagcacaggtatccctgcttgtagtaagcagagggtgtgatctggcttggaggtactcctatccccacctaagacctgggtgcttcattgtcggggaccagaagcaggataggagaggcagaaatctccatggctccatgactgg

SEQ ID NO: 3338 - DNA, 260 bp, Homo sapiens
  I.3338 (AI379112)
gtttagtaaacacatgccaaaaatttatttaactcattgatgaagggaatagtaggatgacaaagctggtttaaaggaggatatgagaaagatattcaggtagatagaaaacgagagagaaaggagggaaggaaaagagaataccggaataagattgcaaagctagatacaaaatggttcatttcctacagggcaataaaacaataatatttggggttattgttcatctggtcagaaatgttttgcacctacactagaca

SEQ ID NO: 3339 - DNA, 387 bp, Homo sapiens
  I.3339 (AI378990)
tttttttacaatttttaattttttttaagacagtgtctcactctgtcgctcaggctggagtgcagtggcgcaattagaactcactgcagcctcaacctcctgggctcaaacaatcctcccacctcagccttctgagtagctagcactacaggcacacgccaccacacccagctaactttttgtattttttgtagacagggtttcaccttatttctcaggctggtcttcaacttctgggctcaagcaatccacccgcctcagtcacccaaaatgctaggattacaggcgtgagccattgcgcccagcctcaaaactcttctacctaaaatcaccttcagagccatgctagaaaattagtatcattcctttacaatcggaatccaactt

SEQ ID NO: 3340 - DNA, 238 bp, Homo sapiens
  I.3340 (AI378968)
ttttttttaatgataatggaacatgttaagtaatataaagaagatacaatcatccaaatccagaaagcaagacaactaatccaattgctttaacaaataagtggcattaaaaaaaaactgtgaattgttatagattaaaagacccttaagaaccacaccaaccaaatatagtgcatggatctcacttggaacctgattaaacaaaacaactgaaaaaagacttttttttttttttttt

SEQ ID NO: 3341 - DNA, 442 bp, Homo sapiens
  I.3341 (AI378820)
gtttcacttgtgattgtattattgatttgagatactaaagtaacacattcctaaagcaacctaaaagaattcattatttatgtgtgaggccaatcacagttcataacagacaaaaacaaatacactcaacattttacagcattcttcaaaggaaatcatgattcccaggatagaagaatataggaaagtgtccagtgccccaattttaggctttgccagccacttctttggtgagactccaaataagtcctagacttgcactctgcttgtttctcaatataacactgtgttgatgatatctaacatttgcagttttacaagatgctaagcattttcctgagagcaccctgacatgaacataaaaacaccttaaaatttaaaatactatacacatataaaacatcactattactacatttgtacagaattttctccaatttga

SEQ ID NO: 3342 - DNA, 77 bp, Homo sapiens
  I.3342 (AI378712)
gcctactactactatacggttgcgagaagacgacagaaggggacaaaaaaaaaaaaaaaaaaaaaaagtcgtatcga

SEQ ID NO: 3343 - DNA, 453 bp, Homo sapiens
  I.3343 (AI378454)
tagtaagaacaattctaagtagagtatctcattgtggtttcaatttgcattttcctaatcattagtgatgttgaacatatttccatatactttttggccatttgcatgtcttcttttgagaactgtctgttcacatccttttcccactttaatgggattatttatattttttgctgttgagatgtttgagttccttgtatatttggatattagtcccttgtcacatagtttgcaaatattctctcatattcaacaggttttctctgcactcttgttgttccctttactttgcacagctactttttagtgtaagatagtctcatttgtctatttttatctttgttgtctgtgctttgaggtattagccataaaatctttgcctaaaccaatgtcctgaagtattttcaatatgttttcttctagtagttttacagattcagtaggtccaattgt

SEQ ID NO: 3344 - DNA, 344 bp, Homo sapiens
  I.3344 (AI378178)
caccataacagatttaataatgagaaactttgaaatattgcaagaattacccaaacatgacacacagaaaggaagtgagaacatgctgttggcaaaattgtgccaacagatttgcttggtgcagggctgccacaaaccttcaatctgtaaagacacagcatctgcgaagtgcggtcaagtgaagctcaataaagcaaggtccctgcagtggccgggctccgacccactctgcaccatgcaaccccatggtcgggttcggaccccctctgcgtcatgcaaccccacggccgggttcggacctctctctgcgtcatgcaaccccgtggccgggctccgacccccct

SEQ ID NO: 3345 - DNA, 305 bp, Homo sapiens
  I.3345 (AI378048)
tgcaggtggtgctgtgtcctccgcacacctcactcaggaggcactggtgtctttaggactcatcagcgggctcaggtggtggatggccacttttcctaacctttgtcttcagccgcttatcttcttgatgtgtttgaagctgtggaaacagcttgagaatgaggacagacactgggtgtccagcagaaagtgtccatggtgagttatatgtccagccagacatgttcctatggtgagctatgtgtccagccagacatgttcctctatgcctcatccacaccacctagcccagagcagggacatgg

SEQ ID NO: 3346 - DNA, 483 bp, Homo sapiens
  I.3346 (AI377802)
ttttttttaaggattataaacagaattttattataatggaacagatggaacaaaaaagatgagacttttagcaaagagggaatgatcactaataaactgctgattttattagaaagtttcaaaagaagaaaaaaatgaaattgtaatttaatgaataaacattacatgtacaatataccatttggaggttacttttgtttggtgagtctacaaataaacttcattgctattgatattcatctgttaataaaattctcttttgattatatttaaattacatatctataagtagacctcaaaagtaaaacaaacaaaaaccccaaaagctttctactctatggtaagggattgattaccctttgttgtttagtaactcctggtttttaccatttgggaaaactgggggaaaaaaaggagacagaaaggcaaaggcagaaatcacgagagatataataataagagatgaagacagaaacagagata

SEQ ID NO: 3347 - DNA, 477 bp, Homo sapiens
  I.3347 (AI377746)
tttaacgtgagaatgtgtgacgtttattgccaatcatggcgacaggctgtgatcagagtgtgagccgtagaaagttctggattggttctcctaagatggaaagagcagccaggcagggcagtgcctctgtttacacacaccgatcccacccctctccccatttcaggcaagggggtgtgagtgtgttgggggcggttaccagaacagactcagtgtggcaaattgcatccagacttcaatttttcctcctcccacagactcctacgggttgttttactaaagaagggtttttgagcacaagtccagttgtcttaactctggtgcccggctgggtacacacggctgtacttaggcctccaacttttttcactccgtggtctcctgcggcacctcttagcttctgcgtctccaaaagggataatgttcttcttgaaagcgtcttttgaggattaattgatgtttgctctatgctttgaa

SEQ ID NO: 3348 - DNA, 493 bp, Homo sapiens
  I.3348 (AI377726)
ttttttaaagagatggggtctcactatgttgcctaggctgcagtgaagtggctgttcacaggtgcaataatcacactctaaagcctcaaactcctggactcaaataatactcctgccttatcagaatgtaagctcatcataactcaagaagcatctgtacttaagattaaaaaggtagaaataaaaaaaacaaaaaataggaactaagcagtcataagaaaaaaaaaaaatgggcaggctgccaatccaggaccaaggggtaaggccgtgtcaatgcacctagagaacggaatatcaagccacagagaactattttcaagtctcagaactgaatggaatttgtcctgcagacttacaaacctgctttaaaccccttttctccttccaatttatctcttttggaatgggaatgcttcttcacctgtcccaccattgcatctcagaaacagataacttgttttctatgtatcacagctttagaaatagcctcgtg

SEQ ID NO: 3349 - DNA, 461 bp, Homo sapiens
  I.3349 (AI377276)
ttttttttttgatccaaattacattccagtgactgttttaattccataagtttctttaattgttccttttcatcttcagacaaatttgcatttaacaggtttttctgaagctcctcaattttgtccatttgctttttgattgtaacttttaacttggcattatctttttcaagcctgaaatgtatattttaaaataattattctcacagataaatttttaaaatactgtgtaatttcttagcaaacacctgaaggcataattacataaattcttaaagatttcaaaagtaggtgatttggcaactctatcgtttttctagttgtggtttgtggataatgcacaaaattctaggataatataaaaaaatccgcatttcaaaattgcttaatgctgaaatttttccttgacttcacacagatgtacttatgatcatagctgatataattctcatactacactg

SEQ ID NO: 3350 - DNA, 463 bp, Homo sapiens
  I.3350 (AI377273)
tttaaactttttaaaatttatttaaacataataaacttccactgcatgattaactagaattttgatggaaaacgacaatttaaaaaaaaggaaaacctggtgaaaagagtgccattgtgtgagaaaacattttaaatgatccattttcaaggcatgctaaatctaagtactggcagtcaacctgcagatgtgacaaaccacacagctcatgcacctagaaagtcactataagtgatcagaatgtagaggaggggtcagcccatgaaagggaaaagttttgctatcggaaaatcgaaacttaagtgaggaaggggactggggtataaccttataagggggataatgaaacttaggcaacgtctgggaagattgtaaccccatagtactcgaccagtgaggaaatgggggagagacttgcgtgctaagagataaattacctgctgtaactggcgtgggtgtgtgt

SEQ ID NO: 3351 - DNA, 473 bp, Homo sapiens
  I.3351 (AI376955)
ttttggtctagatggcattggtcagcatcatgcacactgtatattcacaaaatgaggtcctcagggtgaccttgagtgagtgctgtgggtgttactgaaaattaaattgtactgattttttaaaggtaatgcatgttcttggtgcagaattataaaaggacaaaagagagtgtccagtgaagagtaagtcttactcttacccctgccttctactggcatggttgtttacgaagaaaccacgtagcctttctgcaggcatttccgctattcagatacatccctggccatgaacaaggtataagtggacccccatccccttagcacacaaaactacaaagacctcacttggggtggattgaagtggccgctctcagtggtgacaaatactaacacacattccttctttttctacctggtttctatcttcacctacccaagtcctccacccacccaagttcaagcgcagtctcctc

SEQ ID NO: 3352 - DNA, 495 bp, Homo sapiens
  I.3352 (AI376773)
tttatatatacattttatttctcaattatacctcagtaaagctggaaaaaatatgacttcaaattaatattttccttctgggtacataatttaaaaaattatttgatattataattataaatacatacaatatacaaaattttacaatataaaattatatattttatattgtatatttataatttttatgttgtatattttataatttttacaatataaaaatcattttatattgtaatttgacatctatgtaatgtacaatgatttaaaaatcaagtcatttttctcatatataacaaaaattcagatctgaaattatataatgatactaccataatcacaagaaaatttacaatttcctccatgccttctaaggaaaatatacctaggtaggttgcaggtttttggtttgctgagaacgaagtcttgttcagggtcagggtgatggcctttcctatgctagatcacagccttatatatcacgggtaaggaaga

SEQ ID NO: 3353 - DNA, 464 bp, Homo sapiens
  I.3353 (AI376769)
attttcaccattctttaactcataaatagtagtttctttgttttaggatgtgtttgggattcgtatacccagctaattctattttcaaaggtttgaggtttgatcattttttttccctccaaataagagtcatgataaatataaccctcattatgtgaaaatatttcaggtcggctactccacctcatccccccacctagataatctctcagtttcctcccagttgaggaaacagaatgactaatgagtgacagatggacagttcacagatacaatacactctgtaatccaggagccacaggtcttcctatgtgtttaaagggttagggctggagtcaagagtctgcaacgacaatctttaattgggaaaaagggaaatgccctcctaaatgctctttctccacctcccttgttcctgacagtaagtaatggcacaaatgttctaaagtattcttcttcagttt

SEQ ID NO: 3354 - DNA, 555 bp, Homo sapiens
  I.3354 (AI376645)
tttattctgaattgatctaacagataacaattaggaacagggaggggtattacataatgataaaggggtaaattctccaaaaacatatgaagatccttatagatctcatatatagatttcaacatccttttaacagaaatggacagatccaacaggcagaaaaatcagtaaggacacagttgaactcaacgataccatcaaatacctgaatataactgacatccatagatgactttacccaacaagggcagaatgcacattcttttcaagttcacacggagtatttaccaaaccagaccacattctgaaccataaaacagatcttaatgaatttaaaatagaaagcatataatatctgctctcagatcacaatggaattattagaaaccaataacagaaagatagctggaaaattccaaaatacacagagatttaacaatgccaagagagagaacccagtcagaatctgacacattcccttacttgaggaggtggagctgagaatcccaggagaccaagacagtgagaattcaagggacagagttctgggaagaa

SEQ ID NO: 3355 - DNA, 440 bp, Homo sapiens
  I.3355 (AI376577)
ttggctgaataacctaaaattaactttattaaatgactttactataagcttcccccgtttctgcggtttcatgggatcttagcctgcgtcagccaaaccacttgctatttttttgttgctaaaaccaggtcgtgtggtgtctcaacgaggagacaagagctgtactctttttctcctcatcttcctctcatggacagtgcatactaccaataatattttaggagattccagaatttacccaaatggtaagaaaagtcatcaattccacaaaagagtttgtatttcaaatatatgtaaaaactaaacaaaaactccagtacagtagcatgcagcactctcaaagggaaggaggtttacatcgagcaccacttggttctagacaggtacccaggtggtaagtgaaaattcagtgaagtctaacacaagatcctccaccttgg

SEQ ID NO: 3356 - DNA, 495 bp, Homo sapiens
  I.3356 (AI285933)
tgcttaggtttttctgattgaaatctacacattgataaaacttttgctactattttggcagatactatatatgaaaataaatggacataaataaggtaatgggatagctttggatgaaaaatgtgtaggttatgtgggctagtcaaaacagatgcaggtgtggctgtaataagcaaagctgcttcaagggaagtacagatggcaatcaaatgtacagtgattactgcagcttaaaataagaatactgaatgagtgcacatcatcaatataataaaagaaacatttaaagaggagcaacagttcatcaaagatctactagctgacgtgctaagaacagaagaaaactaaactcaacaaagatgacaaaggattaattggctccgttactgtaagcttatggctttcagtaattgattcttccccttttcactaaaggatacaaatatttcccaggtcttgaaagtatcataacagagaccataaactctaacactc

SEQ ID NO: 3357 - DNA, 380 bp, Homo sapiens
  I.3357 (AI285914)
  misc_feature (104)..(104): n is a, c, g, or t
tttttaaagctcttcttttttaatatataaaagccccttcccaaggagtttgctgtggaaatgtgtttgggagtgggaaggtggggagaaagaccaggctgtanggactggtgggtttcagggggcttggtggtgggtgctctccagagctcatggaaaaagcagaacaattacaaacatttcttccagggcccctgaaagggtgctccccatcaagtcacctaagcctttcggtcctcatctccctcagggaccagggctggggaagggaacctggctgactcactggaaccaccacacccatctcagcctcacccagtcaaaggtcttttgatacaacccacagccaatcaggaaggttctacccatgggggagagca

SEQ ID NO: 3358 - DNA, 405 bp, Homo sapiens
  I.3358 (AI283530)
  misc_feature (363)..(363): n is a, c, g, or t
ttttttttttttttttagctgtaaacgacagggtacattttttgttgggatctttctctgaagaacctaaggcaacaaagaacaaagacgaaggcaggtatctcctgaactgcccacgactttcatgggtgatgtgatactggacattaacatacacaaatacatatgtggacgtgtcgtgactggtttcctgaaacagaataaagatgtgtcccctggaagtctacaagtgggctgaccagaagcaacgggggacttggtactggacgaaaggcaggaactagttgtaaggcgaggctcccaagaagcaccagctccactttggtttacagctgtaacagaagctccaaggaatggcttctntggaagtcccatcgacaaaagtcagatgtcatcagtcactct

SEQ ID NO: 3359 - DNA, 337 bp, Homo sapiens
  I.3359 (AI263527)
ttttttttttttttatttttagacaaagtcttgctctattgcccaggctgtagtgcagtggcacaatcatagctcactataaccctcgacctcccgggctcaagcaatcctcccacctcagcctcccgaatagctgggactacaggcatgcaccaccaagcctggctaatttgctatttttgtttttcatagagacagagtctggccatgttgcttaggcaggtttcgaattccttgcctcagcctctcaaggaatttgcattgtttttaatgaaaaaacacacatatggtgaacagtaaaagtgggagaattgaacagccctaaaatcaagtagtc

SEQ ID NO: 3360 - DNA, 475 bp, Homo sapiens
  I.3360 (AI263441)
  misc_feature (469)..(469): n is a, c, g, or t
ttattttccagtacctataaaagttatgtttaatctatattatagtctattaagtttgcaatagcattatatctgacaatgtacatactttaatttaaaaatattttattgctaaaagatgctaacgataatctaagtcttcagtgagtctttgttgctggaagacagtcttgcctcactgttgatggctgctgaatgatcggtgtggtggttgctgaaggttagtgtggctctagagatttctttaaatgagacaacaaggaaggctgcaacatcaactgactcttcctttccgaaagatttatctgtagcatgtgttgctgttggatagccttttacccacagtggaacattcttcaaaattgaagtcaatcctctcaaactctgctgctgttttatcaactaagtttatgtaatattctaagtcctttgttgtcatttcaacaatggtacagggatcttcaccagnagtagt

SEQ ID NO: 3361 - DNA, 420 bp, Homo sapiens
  I.3361 (AI240311)
  misc_feature (345)..(345): n is a, c, g, or t
  misc_feature (369)..(369): n is a, c, g, or t
  misc_feature (370)..(370): n is a, c, g, or t
  misc_feature (371)..(371): n is a, c, g, or t
  misc_feature (373)..(373): n is a, c, g, or t
taaatgttttctctagcttattttattctaagaatacagtatttaatattataacatacaaaatatgcattaatcaattgtttatattatgggtaaggcttctgatcaacagtaggctatcagtagctaagttttgggggagtcaaaagttacacatggatttttgactgcacagggggttggtgcccctaaaccctgttttgttcaagggttgattgtatatcagcctactgaacagattccaaagttaacaactttgaatctattaaatgtgatttgcttaattttccaaaaagtctatgacagggcactatgccaaaaacacaaaatcttttgccatgtaanctggagtaataggttaagatagannnanggagtagtttagaaatgggaaacaaatgatggagataattactaaca

SEQ ID NO: 3362 - DNA, 209 bp, Homo sapiens
  I.3362 (AI217869)
  misc_feature (139)..(139): n is a, c, g, or t
tttgttggacatttttgtctttattttatttagcaatgaaatcagttttgtcctagaaggtaattctttgttgtttttttacggagaaactctactggtttattagaatgctactgtgtttgtttatttaatcaatcanaagtttcagtggtaacgtaggaacaaagggaaagcttctcctttaccctcagaatggtagttgaaaacga

SEQ ID NO: 3363 - DNA, 259 bp, Homo sapiens
  I.3363 (AI217811)
ttttctttttgctttgttggcttaatttaaaaaaacaaaaaggtcttatccagtgggaaatgtggttgaaattatctagcctgccacgactgaaaacgcacgttcctcctactctcacctttttctttcactccaaattcagtggctccagtcaccctctctgattctgtgggaactcatacaatgtctgtcccgaaggatacagggggcttcccagggagttccccatctgcgggcttgcctgtcgctttactccctg

SEQ ID NO: 3364 - DNA, 225 bp, Homo sapiens
  I.3364 (AI204410)
tttatagtgtctgatatttaatacacatcttttttacaactgagaagtttgagtttaaataaaatgaatcaacatgggcatggccaagattatatggaaaactagagagtagggcttggtgtctttatctttagcctcccattttaggatcctttctcccaaaccaagctctggatgtaacacggacctctctactcaaatttccaggttcgaatggaatataaa

SEQ ID NO: 3365 - DNA, 444 bp, Homo sapiens
  I.3365 (AI200826)
tttttttttttttttgagtcttgctctctcgcccaggctaccaggctggagtgaaactccatcccccaccccccaaaaaaaaacccacaaggtaaactttaatgtacagaaattaaacttttagaatcgcccaaaaagttaaggtatcccagggtagaatgcagactgtgatgatgaaagaatctcaattgtcttataaatgtatgagaaaacttcactgaagggagtgagagaacaaagggctgacctaagtaactttgggaaagaatattttgactggaaactgcaagactgatgtaaaaatacaatgtccataaacactgcaccgtacttggtaaagatgaatttatcatgggggtgcagggtaacaagtctgaaactgccatacatgtgttgcaattgaacacataagtaaatagatgacaggggccacttttctcactg

SEQ ID NO: 3366 - DNA, 463 bp, Homo sapiens
  I.3366 (AI200787)
tttttttgatttttatcattttattgaaaacaaatgacaaatctcacagtccatgagccacgatatttcactaaaaaaaattccactgggtatgagtcttcccctaagacatttatcttgagcaccaatcagcgtgactccactttcatcaaacccaccatgcagcaaagcatagttcaatcttactcttttctttctccttttccatacaaagtaggtttctttttatccttcgatttagcaaatagatatattgttcctatgtgctggccgtattctgaagtgttgataacttctttgatcctcatagcagctccatgatgtaagtacagttatcatctccattttatagatgaggaaaccgagatgcagagaggtttcctgaaggctcaacagcaataaataccatagcaacagcaaggacgatgctacgctgcttcccatacattagagaattaaataa

SEQ ID NO: 3367 - DNA, 462 bp, Homo sapiens
  I.3367 (AI198946)
tttttattaagatacatggtcttcctatgttgcccaggctggtctagaactcctggcctcaagcaatcctcctgccttggcctcccaaagtgctgggactgcaggcgtgagccactgtgccactaataaaatggcatgaaaatatacaaagcaaaaactgacagaactatagggagcaactgacaagtccactactatggaattcaacacagcttcctcaattattgatagctataaaagataaagtagttaagatacttgattttaattttacatctaacaattagggaatgcatagtcttccacagcacaaatggaaaaactgactaatactaggccataaagcaaatcttaactattttcttccagaccaccatctatgactgcaattcattaaagtcagtaacaacaaaaaaattataaatctctaatatttagaaattaaaaacatacttctaaata

SEQ ID NO: 3368 - DNA, 946 bp, Homo sapiens
  I.3368 (AI375865)
  misc_feature (495)..(495): n is a, c, g, or t
  misc_feature (596)..(596): n is a, c, g, or t
  misc_feature (631)..(631): n is a, c, g, or t
  misc_feature (714)..(714): n is a, c, g, or t
  misc_feature (810)..(810): n is a, c, g, or t
  misc_feature (878)..(878): n is a, c, g, or t
ttttttttttaattttaaaatgttttctttacttgattttacattttaattagcaggtagcattacatattaatcagttctgtgctgacaaataagagaggtcctagtcaaaatactgtttctcaaaagtaatgtacatcatattgcttgaaactaaacaaccatataaaaagtggcaatcatttatctaaacattgattatgaaagacaactggcatatattcaggcagagtgttgagttcatgattgtttatttacaataaaagtacttttactgaagctaacataagtttttaggtcaattactacagtctcttaaagttataaaaatattatataaaataccacaggctttagaggctataacttcatgtggttctgatactagcagctgaaaagtgtttataatttaaaaataaataaactatagaggtaaaccagttacaaaacagcagaggactgagatagtcacaagagtgaaaagaattgctcagntacacaatagctaacaaaatggtgaagcgggtggatcaaaagttttaaaaacctctttcagagatttgtcatctgtttctctaccgggatcattatctggngtcgggctcccctgtcctggctgcctttgctgccntggatcactgtactgtgggctatttaacctgtaatgcctgaacagaagctgtgcactgctgggacctgaacctaccagaactnctgggaacgtccggctgtgggtcagctgcccctcaagagtactcccacgttggactgggtttttgtggaagatggctctccaggagaaagtcaatntgtcctaccttttaagcaccatttttttctggtcttgaggttcttctgggaaactgtggtagctctgntgggatgataaccggtacccttggtctatcaaactatacctttaaaatgtagggaaatcccatgaagc

SEQ ID NO: 3369 - DNA, 457 bp, Homo sapiens
  I.3369 (AI375580)
ttttacaagtctataaaacatctttatttatttgttacatatgatgtttaaatataactttgctttcaagcttcaaactttttttaaacccctggtaaaataagacttttggttcaccttaacaaaaactgacctaggaagaaacatttttagcaaaatgttattataaaattcactagaaaatacggtcctcttgttgccaaaatgttacataaaatccttattaaaaatacacacgttacaaaagaaaaattatgaatatgctatacatagtgctttaatatggaccaagggacttgcattccgggaaaatacagttaagcacactagatattatgatgtcaacttataatagtgcaaacctgaataaattacatcctgatatggaaggcatgcaattcatctgctgagaatagaacataacgaagccagaacaggaagcaatcacaaccactat

SEQ ID NO: 3370 - DNA, 446 bp, Homo sapiens
  I.3370 (AI375176)
tttttttttcatcttaaaatgttgttttatttggaaataatttcaatctcatagaagagttgtgtgaatcatacagagccccacatatacttcatccagttcactgtttgtcaatatgtctgcattcgccttgtcatttcttctctcgtatattattgatgtgttttaactgtttgaaaattaattgcagacatcatgtcccttttcccctgaatagcaaatattttcctaagaggaagacattctcgttcataaccatggtagacttaccagattcaggaaatttcacattcttacaacattattatccagtacatttttgaatcttttttatagcagtttgcccccacttccaggatgtcttccaggactgaaacaaggatcatgagcaccgcatttagatgcaacttctcttcagtcttccctcagcctttctttgctttcac

SEQ ID NO: 3371 - DNA, 384 bp, Homo sapiens
  I.3371 (AI374734)
tttttttttttacaatagttagaagaggagcttttatttttggtcatgttcaagccaaacttttcaatcctgtaagctttggagtctggtatttaggatagtcagcaagaaacacaggtaagaggcacaacctttccagctgagagaactgtgttcaaacccctaattgctccgttggccaactattttgggcaagctgctcaatgtctctgagccctggtttcctggacgggctgccggctcaccaccgggcacgctgcagtgttcattacctgctgggtgcccggctctctgcctcgtgcatgccactctggccacctggacgaggagccctggagcagcccatggcactcacagtcagcattcactgagcccctgacttgc

SEQ ID NO: 3372 - DNA, 359 bp, Homo sapiens
  I.3372 (AI374724)
tttttttttttacagttaaatatacatttattattaagcccagcaattcatttacccaaaaagctagactgactgtttatgtcctccccaggttcataccttgaaacctaatccctcatatgatggtacttggaggtagggcctttgggcctcttgggaggtgattaggtcatgagggcagagcctgcatgaatgggattggtgcccttataaaagagaccccagagagctcccttgccccttctgccatgtctaggagaacacagcaagaagaccgccatctatgaatcaagacatgggccctcaacagacactgaattcactggcaccttgatcttggacttcccagcctccaaaac

SEQ ID NO: 3373 - DNA, 283 bp, Homo sapiens
  I.3373 (H49640)
  misc_feature (68)..(68): n is a, c, g, or t
  misc_feature (227)..(227): n is a, c, g, or t
taattatgatatataagtacactcaacaatggatgtttgccctcaaatattatgacatctttgttttnccttctgtactgcccagcaagaaattaggagcagaaaagaaaactgaaagattatgaagacccatttcacatttcacctatacaggtctcagaaattcttaatgggtacccatctttcaaggtcaagtttcccaagagacttaggaaactgctcaggantatattcacacattgataacaacctccagtttttgaggctactgaggtctacaccg

SEQ ID NO: 3374 - DNA, 419 bp, Homo sapiens
  I.3374 (R93266)
  misc_feature (357)..(357): n is a, c, g, or t
  misc_feature (373)..(373): n is a, c, g, or t
  misc_feature (389)..(389): n is a, c, g, or t
  misc_feature (406)..(406): n is a, c, g, or t
gattttgaaaaagctgctgaattatacaaaagggcaatggaaataaaagaagcagaaacatcactcttgggtggaaaagctccttcacgccattcatcaagtggagacacgtttagcttaaaaacagctcattctcctaatgttttccttcagcaaggacaaaggtaatagcagcagttagaattctttgcaaatgtaccttaagacaaaataattaaacatttggaacatttgaatttgaaactttaaaaaaatgttgtacgaaattttactacgtgtgatttaactgctatttgtatgaagttgtattgggattacattaagttgggaattgtgattatgtctgttttagttgtnttaaaaggattttccnattatatgggtatccnagggtgtagacacattnggatttataagga

SEQ ID NO: 3375 - DNA, 399 bp, Homo sapiens
  I.3375 (R93174)
  misc_feature (175)..(175): n is a, c, g, or t
  misc_feature (261)..(261): n is a, c, g, or t
  misc_feature (336)..(336): n is a, c, g, or t
  misc_feature (361)..(361): n is a, c, g, or t
gcgtgtgtgtaaccttgaactcctaggctcaagtgatcctcccaccttagcctctcaagtagctgggtctacaggtgtgtaccaccatgtctggctaatttattaattttttttgtagagacagggtctcactatgttgcccaggctggtcttgaattcctgggcttcaagtgancctaatgcctcagcctcctaaagctctgggactacaggcatgagctatcatgcccagccagtactaaataatttttaacaaaagantaaatcattattttttatataaggtttctgtaaggggggctacaggatttattatacttttctgacatccaaagntttcaaatttggttatatttttccngatatatggagggcccaaaatacttttttaataacctt

SEQ ID NO: 3376 - DNA, 368 bp, Homo sapiens
  I.3376 (AI371339)
tttaccttaacacatatttatttcacagtttctgtgggtcaggagatcagaaatggttctatttcaaggactctcacagggctgcaatcaagatgttggcatggctggggtctcatctgaaggctggactggagaagaatctacttccaaacttatgtggtagttggaagaatttagttcctcaaggccgctaaactgatggcctgtgttccttgcctatgggatggtagcttgcttcaacaaagtgtgcaagcagagaagacagagagtccgctagcaagatagaagccacaatctcttgtaatctatcatttttgctgtattctactggttaaaaataactcatttaggttagcctactggctctc

SEQ ID NO: 3377 - DNA, 161 bp, Homo sapiens
  I.3377 (AA788788)
tttttttttttccttcccttacttttattccaatgggaaaatacagagagtaaataggataatcaatgagtaaattacaacatctgttataaaaataaaagtgctatgagaagaattaagtaagtgttttgggaaggagaagcattagtgggactggggtg

SEQ ID NO: 3378 - DNA, 495 bp, Homo sapiens
  I.3378 (AA707628)
tttggacattattattattccttttgtttaatgatcattattgaaaagaattctgttgtatggaggaaggaagcattaaaaaccaattcttgaccaggggcagtggctcatgccagtaatccccgcactttggaaggccgaggcaggcggtcctgaagtcggtagtttcagaccagcctgatcaacatagagaaaccccatctttactaaaagtagaaaatcagccaggtgtggtggtgggttcctgtaatcccacctactcgggtggctgaggcaggagaatcacttgaacccgggaggtagaggttgtggtgagccgagatcgagccactgcactccggcttgggcaacaagagcgaaactcagtgtcaaaaagagaaacaaaaaacaaaaacaaaccaactgtctgtaagtgaatcacatggtaggtccgccagtggagacagcagattgagcagtctagtctgctccttccatggcccctcgctggtgatg

SEQ ID NO: 3379 - DNA, 362 bp, Homo sapiens
  I.3379 (AA707510)
tttggaaatgggatgaattttattgaggagcgacttgacaatataaacatgaaacactgaggtggcagactgtagagaggtctttagccctccttattcctggcctgggagatttcggtggaggatgtttctttagttcatagttatgccacattggcatgttcagcaggttgtttggctcccaaccttggaaggatcgagccatacaaaatggtcttctcctgctgttggagcctgttgtaattgcccaggtgtgcatgtcttccagacaactgatcttgccagaacgttattaaaagtctcaccttcactgttcttcatgcctctaagtccattctttgggtttggacaggtgggcatat

SEQ ID NO: 3380 - DNA, 569 bp, Homo sapiens
  I.3380 (AA706627)
ttttttttttttttaactttgcagaaagcttcatttttactgtgggttgtggttaagttaaaaacatttgactatgccatgtaggcgactccaacacttcaggaatacaaagctctgaaaagaggttatgtagcaaagctcattttcattcacattgataataggtcagacacatttttgaagaaaaaaatggacagagcgtaaaggataacagagtacacattttcattttctatgatgaaaaggaattttaaaaattgtctgttgtacataaaaactttttttttaaaccaaacaacctagaattaaatggagtaaaatgtgagaagccccccttttttcctccttcagcagacaaaaccgctgtcaatagcttgatatgtgttatcacagactcttttctagggtgcacacacgcatatatgctacgtataggtaaacaagttttaactatacaaatgtaaacaggagtgcgtggttactgtgcaacttcttcgtcctgtcaatgtcttagagatattttcatgtccacactagagagctattgtctttatctgctgcagagtgtt

SEQ ID NO: 3381 - DNA, 409 bp, Homo sapiens
  I.3381 (AA705977)
ttttttttttttgcatggcacaaataaataatctttaatttcaataaatagctccccatcacaccagacattatgctgtggaaaaagatacaaaagcatccaacagatagagaggaaagagagagagagaaagagagagagagagagatctattctaactacactaattccttagcacgagagacgtgacattcgttcacagaaaaacacagaaagatcctcagagtatgattaaggaagaagatcatcatggatggggtgtgatagccattttaatccatatatcaagtctttgtatgtctttcgtgggtcacaatcaccatgattcggtcaaaaatgttacttttgctctatcatatcctatttactttacacacacacacacacacacacacacacacacacacta

SEQ ID NO: 3382 - DNA, 408 bp, Homo sapiens
  I.3382 (AA705808)
tttctagtttgggataatttattgtatagcaatgcataactgacacactattcaaaatcaaaaagaaaacaataactcaataaataacatggtgaaaaaaatatgaacaaataattcacaaaagaggaaacatggttagatgacaaagacacaaaaaaaagactcaacctcatttatatataccagaaatcaggtagatacaaatgaaagcaacagcctaagaccattgtacacttacctttttgtcaagaacttaaaactcttaatagcaaatattgagagatgcaagctacagtcatggttaagagggcaggctcaggggccaggctgccaggcatctaattctagttccactcacaaactttgtggccttgagcaaataatataagctttgtatacttcgatctc

SEQ ID NO: 3383 - DNA, 406 bp, Homo sapiens
  I.3383 (AI362368)
ttttttctgagacggagtcttgctctgtcccccaggccggagtgcagtggcgccatctcatctcactgcaagctccgcctcccgggttcacgcccttctcctgcctcagcctcccgagttgctgggactacaggcgcccgccaccacgcccggctaatttttgtatttttagtagagaaggggtttcaccgtgttagccataatggtctcgatctcctgacctcatgatccacccgtctcagcctcccaaagtgctaggattacaggcgtgagccagcgcgcccggcctaccctccctattttcaaaaacattgtggcaatggacaaaattcacatgtacaaccgatcattacaatcagacgctctgtgatacgtgtaccaacgacaagggctgaaataatgactg

SEQ ID NO: 3384 - DNA, 358 bp, Homo sapiens
  I.3384 (AA897457)
tttggattctggaaaagtcgtgacttgtatttagcttggagtttgttcttcttgttcataatttcctcaggaaggaaggaaagccagatatccactttcccactatacaatggaggatgctccaaatgctgcttagaagaggagggctctcaagctcaggggaggctctggcagcatcattgtgatctcagtaggaataactgtgactttgctattgcatgatgagaaatccaaatgaagctcatgaagtcgactgtaattttctaggctggtgactttcatggctctccttttttgagtagttgtttaagagacaagaatggggagaatgagatgctggcttgacagtaggtggagc

SEQ ID NO: 3385 - DNA, 406 bp, Homo sapiens
  I.3385 (AA889661)
tttaatttgccaaagtaagatagttaatccacagttaggtatgactgccatctcttcccacattaacatcctctccatcatgcttctcctcatggccagtggcacagacacctttgagatccagataagaacaagataggatgaaaattcatttgtgtatagttagtggttatattgacatcttttgcactgacttttataagagttgttttgctggctgtctaggtgtaagaagagattccagaacacccctgctgtccactctcctgagttactaggtcttaaggtcttgagaagaagtttggagagcatgttatatggggtctagttctctctaatccctgatcaaaacagaatttctctccttgtcaggaatatacttgataataaagcaaaaacacacatc

SEQ ID NO: 3386 - DNA, 380 bp, Homo sapiens
  I.3386 (AA889648)
tttaatttttttttttttaattctcagcaaggcaatgtaattctatagaagggtgcccccttacatttggagcaatagtgagcacacacctggacaagggaggagaggaggttcttattcccgatccacgtggaccctgctgctgtgttcccctattggctagggttagatgcacaggccaaactaattccaattggctaatttaaagatagtgtacgggtgagtggtttggctggaaaaatggctatggcagagcaggaaatcagaaagagtcagggtggaaaatgagtcagggcagagcaggtaatcggaatgagtcagggtggagcaggtaatcgaaaaacgttgtgccacaaggatgttaagtttaaaagtagaaa

SEQ ID NO: 3387 - DNA, 346 bp, Homo sapiens
  I.3387 (AA883185)
ttttcgaattttggtcatgccatttatttgctgttaattatcaggaagtcacataaatcttctagggctgtttcttcaacagttaaatgagtgagatcagtactgctaattccacaaccctgagtgtatgtctatcacctgaacagcttttataaaaaatacagattcctcactcctacagaatcagaatcctcaaggacgagagaggggcacttcgaatcaacatttttaaaggtctccaggtcactgtgaaagatagccagatttggaaaccactgggctatatcagacactggcaaactatggccatgggtcaaatgtagcctgccacctgtttttgtatgac

SEQ ID NO: 3388 - DNA, 326 bp, Homo sapiens
  I.3388 (AA883170)
tttatatactggaaaatttaatatatcatatttcaaaacggaagcatcttcaaaataattatgtaatagtaattcatgttagttacaagaaacttgaaaacactaaaaaagcatgaagtatatcaacaaacagccttgtaattctctgacccaacaataaccactgtcgaatttttgctgcgttgtgtccagtttgcaaagtctcttctgctttgtacagtgtaagtaagaaagatcctttacattcccttaacggggggggaccaaaacagctttatgtgtcatttgttctgctatataccttcttagacaccttcaccaccaca

SEQ ID NO: 3389 - DNA, 409 bp, Homo sapiens
  I.3389 (AA884688)
tttaataatcaacatcaaaagacatatgcaaacagcagtttaagactgggtttcttaaatctaccaggaaagtctgtggtggatttgactagggggtggttgaaaagccagtcatttttgtttaccaaatatacagtacttcttaatttataactttataaatgtgtcaacttgttttacccttatgaaaatttaataaatttaataacagcaaaagatgcatagtctgaaaagagtatctggcacaccattcatgaaagtattcagtatgattatcaagaaatataaatttaagagaacaaatacaatcactatattctaaatcaaacatttcacatttcactcaatatcacttatatagcctggggtaagcaacattaggtccaactcttcagtgactcaagttgtc

SEQ ID NO: 3390 - DNA, 389 bp, Homo sapiens
  I.3390 (AA884642)
ttttaactgtttaacttattaaaaatttatttgcaacatttctatgtgacagaagtatatgatcatgttattgggtacctctttctacagagaacaaagtgcacttgagatactgtcttgtgaactgagtctcctgtaatgatacttctattaatgaagagaaagcttccatggcacattcacggtcagatgcttccttaccagaggcagacagaatcctgaaaacacaggcgtacacattctttctttgatgtggactcctttcttcccttccaaatctccggatgagataaactgggtctctctggtcattctgcctacatcgcagaactcaggcctctgttgggatgctcatcgtgtctggtctggacctagactgcctgtaagag

SEQ ID NO: 3391 - DNA, 425 bp, Homo sapiens
  I.3391 (AA884631)
tttagcttaaaacaacagagatttattctgtcaccgttgtggaggccggaagtctgaaatcaagctgtcagtagagctattccctctctgaaggctctagggaagaacctgttctgtgcttagcttctggtgttgccggcaatcctttggtgttccttggctgtagctgcatcatttcaatttctgcctctgctatcacatgatggcattctgtctgtgtgtctatgtctctttcttagaaggacaccagtcatatcggcttagggttcaccctaattcattatgacctcatgttaacttgatacatttgcagagattgtatttctaaataaagtcacatccacaggtgttgggggctaagacttcaacatactttggagggggagagcacagttcaaccataatagcataccatgttttgatct

SEQ ID NO: 3392 - DNA, 411 bp, Homo sapiens
  I.3392 (AA884376)
tttaaaatctaagaaagaatttttattaatttaaccaaatgacagctttcattttaattataaactattatttggcatttatacacataaaatatatgtttaactgaatattttgtacaaactctatgagtattccagatacagaattatgattataaaataatcaagatatttcaaggagacatgtgattcagtgccaaaattacaattgtatatctgtcacaatacttatagcccataaaatgttcacatgaaatctctaatgtaggcaattaattgctagaagaataaatgatgttcattatatagaacatagaaagggacacaatgcaaaataaagatatgaaagccttcagaatttctttatgttgttgctagtaagatgacaaaacataaagctatgaggatctg

SEQ ID NO: 3393 - DNA, 296 bp, Homo sapiens
  I.3393 (AA883759)
gccctttatatgcttcatgttccagtctatttattttatttttatttttgggggggtgggggctagctatgttgcgcaggctggtttcaaactcctgggttcatgtgattctcccagctcagcctcccaagcaggtggaactaaggcatgaatcaccatgcctgactcatgttcccttccatatttctgaatagaataaacaaatatcgttaagatgtctaatcatgtcaattaatttacaagtttcttgcaattacaaacataatggtaattgcagtatacgctttcactgttta

SEQ ID NO: 3394 - DNA, 324 bp, Homo sapiens
  I.3394 (AA883740)
tcccccatttttcctaatttggagtcactgaaaactaagctgtgtcttttgtaaaccctgcaaactgaagccagacaacttaaactttagaagaaaataacagcaacctgcttacatacataaggcactttcatccctgcctactgatatataaacttcagagtaatgtggcctatatcgattttccaggattgttcttttgtttgttgttgtttttatcccttcctcccccattttctcttcataggacatgagacttcacaacctgctaaaaatgaactttcctaataactggggacctacccgtctaggaataaaccatcc

SEQ ID NO: 3395 - DNA, 306 bp, Homo sapiens
  I.3395 (AA883315)
tgataagtctatttttttaatgtgaaaaaaaaaaaaaaaaaaaagaaagactaactggccaaagctttcttcttccaagttcaaaggttaatgcaacacatttactgtaagaattagaggatgctcagtgtacacatcgcagtttaaggagcttaggaccaaacaacctctgcggtctaacccttccaacacaaatgtttgaggtcaagcttttacccactatttggagacaagagagacaatactgagagttgcctggctgtagcagtcaagtgcatctgaacattaagagagtaaagctgaaca

SEQ ID NO: 3396 - DNA, 462 bp, Homo sapiens
  I.3396 (AA883119)
tttttttaaaagtctgaaaggccatttattaaggtctaagtggtgaaattaggaatgatttttcttttcttcccttggctattttcaccttctgttttcacaagtgcatattctcatttgtttgtagaaaggtacccattcaaggctgtgctgtgaaggactggatagcagctcaagtcagaacactgccctctggaaaacctctctcagtggcagttctgggtgacatgggctccggttcaggacatataagctgttgacatttataattcccatgcaggtgaaatgtgagcactttctctctctctgtcatagacgcaataaaggctccaataaactcaggagacctcacggcaaaccacggatgacttcagtttatgagacaagtgtacctggagtcctaataactttgttcatgattcttccttctttaattgcaagggagctaccattctcccctcc

SEQ ID NO: 3397 - DNA, 531 bp, Homo sapiens
  I.3397 (AA868726)
ttttttggatcagccaagctagaaaactgaattagctttcaattctgtctctataaattgagaatggcaatgaggtcatggacacagcctatggtcccttaaaagccagcagcattctccttccacacacccagtgctcaggttcaggaatcttcgctgagactgggcccctggtgctgagatcctagcccttagatacaacatgcagccagcctctgctgatgcttcccggaaactgctgctgagcagtgtgagattccctgtggctccccctttctccatccaggggaatttctggagagaattaccatttctctccaaaagttaaaaagaaagaaagaaagaaagaaagtatttgccctcttctctttcctccaggaaactcttcataattctcttcaagggccttgggatttttacaaaacccaagaggaggctttgactctattgctggtaaattttgcctgggaaaaatccccagtcccaggaaagcaatggaagatgtactttctcccattgagagaaactggg

SEQ ID NO: 3398 - DNA, 481 bp, Homo sapiens
  I.3398 (AA868356)
tttggctgccagattttatttccacaccagttatcttcttcttaacaagttacacctataatcttaaaatcgcccagttattttacaaacatctgtcctcaatcttaatctttatttgccactatcctaatgtacttgctaagttttacagcaaagcagaagtgatgcagagatgaagtgttagtcataaagaccaataaagacaaaaaatgatgtgctgtctgcggtcttccccacacggtctgtttacaagtaacattacaaatctctcaagctcctcccagacactatgtttatagaagtgctagactatacacttttggtccacccatatttaatgtctttggtaaaaattacttcattaattaatagaaaggtttgtaccttgctatctctagcatgacacaaaacaatttgctgattagtcccaataatgacaagtttatacaatattgatatttacagtgtgaaaataaagctg

SEQ ID NO: 3399 - DNA, 448 bp, Homo sapiens
  I.3399 (AA868082)
ttttgttttgtgaaaatactgtgtagtacattctgtgttacatgttttgtgtaaatactgtgtagtatgttacattactgtgtaatactgtgtattacattccccagtcttcttttctgccatagataatgagatttcaggaagggaatggaacgcaattgtgttctctttggcagatccagtcttgtggtagataaggagatatcagagtaaagcttcttccagcatcaaaggcctctaacttaaaataaccaacataccaaagtgccatattgtagtcacccagtgggtccttcttgcccactgcacagataaagctgattcactgacagcagtactgcccaaacttacagatattaaactgaggcgtggagagaggtggcatccatagcagtcaagtaaatcagaaagtgctgcctttgctgctgttgaccgttgtgattacccc

SEQ ID NO: 3400 - DNA, 151 bp, Homo sapiens
  I.3400 (AI350020)
cgagaagacgacagaagggcccagcattgcctgtgcactgtttccaccaaatatgtatgagggagctccagagaagcccaaattaagggatgttcaacaacataactggcctctacccaaaaaaaaaaaaaaaaaaaaaaagtcgtatcga

SEQ ID NO: 3401 - DNA, 459 bp, Homo sapiens
  I.3401 (AI347255)
gcggccgcccgacctcctcagtcgtctctggtcggaagacctgggacgctggattcaggcccaagagcacatctgaagacagctctggatgcttgtggcagggtttgctcccaccttccatgggaatgacactgcatcgagctggcacacacacaggcccgaagagactacacctcccagttcccgtctggtgagatgtggtcacaagactaagctcagtgcaaaggtgaatgtggcaggtacaggtgtcacagggacaagggcagcaccctagttggtggcagagattaagatgggagatggggctcctctgcttcctcgtgaaacaaaaaacatgccaatgacctgagcctggaccctctgcctctgggttacctgtgcaagaaagaaacaagtctctgtagcttacacatatgctgtgtgcagccaagcctatcctcacccaccaggctctacaga

SEQ ID NO: 3402 - DNA, 265 bp, Homo sapiens
  I.3402 (AI343516)
gaacactaacatgggtgaactttattgtacgtaaattctaacccactttaaaaaaattctctaaaatagtcccccatttcactcagagtataagcaaatcctgaagaagacctacacgacccctcttactattcacccccctcattctcaccccaggtgagccaccctggcttttctgctccaatacagccactcaaagcatggccaggactgggcatgggatcagtctgtgaattattttcagttcttagacaagtacggtatc

SEQ ID NO: 3403 - DNA, 424 bp, Homo sapiens
  I.3403 (AI342905)
cttaccaagacgtaataatgtctgaaaagtttcagctttgctaagttaatagcagctagagagaagaaagaacaaaatgaagagctcgttaacttctcatttttaaaagtaagcctcattcagataccttctcagtcaagaggccacctctaatgcagatgaggaccactcagaggcacatccatctatctggaatcaagtccgctgggcggtctctcctccaatcaccaggaaaaaatgtgggagcagcacagccccagtgagccccatgagctggagttggcttgcacaggcgattcccgccccagggtcagcagctgtaacctggctatggtgggagtatactgacatcacaggaattggcagatgctacaaatcaggaattttttccccccagagagccagcattaaacatttcagctct

SEQ ID NO: 3404 - DNA, 420 bp, Homo sapiens
  I.3404 (AA897543)
ttttcataggcaaacattattattttatttattcccaaatggtgcaagtattttagagtatgccacatagttttctatatgccagcagtctttttcaaaaatacgtatacattccacttcagtccccctcatactgtaaatttgtagacaacatgcttgttacattgctctcttcctgcaatacagtccttatttcccctccatccatcttgaaagtattcctttaatttctccagtaacactatgggtttgccatttcgggcatcaatgacattcagggatgtggccatagacttctcgcagcaggagtgggaatgtctcgaccatgttcagaagaccttgtattgggatgtgatgatggagaactgtagtaacttggtatgttttctgcctcagacaatttaggataactttgaatct

SEQ ID NO: 3405 - DNA, 491 bp, Homo sapiens
  I.3405 (AA897528)
ttttcacaatttcacaaatgtaatgttgagtgaaggaaaccaggcacagtaaagtacatgctggataattctgtttaggtaaagttcaaaaccaggaaaaaggaacctgtgctgttggaagagagttacctttgtcagggaagtgatgaaaagggagtccaaggagggcagctagggtgctggtaatgttttgcctcttgatctaggcattggttgcctaggtgtcttcagtttgtgaaatctcattgagttgtagagttatatatgtgtgtatttctgtaggaatatcatacttcaattttaataaaagagtaaagaatgcagcaggcagggtacatggtgtagaagagatggctgattttcactgggaaagattacccacagccctggagttcactctctgggctccctgatgtgcgtactatcccacagattgttctccaaattagaatgaatgcaggctggtttcagtattatgggggtgctctctg

SEQ ID NO: 3406 - DNA, 506 bp, Homo sapiens
  I.3406 (AA884467)
tttgaaggaaatagtacagagtttattcaatgctatagaagacattaagcatgatgactttaaggaaggtatgaatatcattcatgaatgaggggattggccaggagtgtgtaaatggcacccaccaatgaggaggtggaagactgcataccttctattatgcattgaaatgggatgttacaaagggttataaaagagtgctgatttgcaagaattaacagggagctaggatagtgctaacccttcttttgacccctgtagttcatggcaaatagaagaaagaacaaccttctaatgaagagctggtatcagtcacttataactcagtatagactgtagagactgtatttcttctctgaagatatttgcaaattaaatttaagccctctttagaccatgaaagctggtaggttgtctgttgtgaatggcagcaaacctgaaagtacgtcacttgcacaattctggagactaccttcctgttggcctccagagcactctggcctcgt

SEQ ID NO: 3407 - DNA, 440 bp, Homo sapiens
  I.3407 (AA883909)
ctcactcactgcgcgcctcgccagcactcggcctggaatccagcgctcaacgcagttcccgctcgtatttgaggaagcaaaggctccagagctccagctgggcgggaaacggagcaggtggggctaggggtttgaatcgcccgccttttgggaaaaggttgtctgcgaaccaattggttactttctttcacttttaaatcagccgtgcctcttccggcctaaacctcaggtagctacagcgtgcagtacttgacgctgtgtttatatcagacagcactgccagtctgaaacaaaactttctgaatttcctaatccccagagccagcgtgagaagtagacttgagcctgttctcttcccttgaacttttcttttacacgagtacaacaaaaaacaagaacagagacaagtcgtagtgttgctagtgataaggcagattttt

SEQ ID NO: 3408 - DNA, 483 bp, Homo sapiens
  I.3408 (AA883906)
ttttttttttttggggagtgatgtattcttttattgaagcaagtatgtccagtcacaccaaaactgacgtcctgcattatggtacagcttcatactcagagttcatctcaaataccaaaacatcaaatcagggtatgtatcaaattgggaaaataaagtagcagacagacactgtttcaagtaggtactagaactgatcacccgtgaagtgcacgtggatgtgtacagaaaccgttctaaggctgtattccaaatatatattctcaagttttaagcctttctcatctcaaagacataaacaaagcaatatgtactatcaatatacaatctgtactagctagaacctcagaaagtgcaaacacactgtgacaatacagtggaactattcctgctccacccaggaccagaggcatgggcagcgggcccagggctgcctcctccccaggcccagcctttcccaatgtcttcaggctcttccaggag

SEQ ID NO: 3409 - DNA, 489 bp, Homo sapiens
  I.3409 (AA860398)
  misc_feature (445)..(445): n is a, c, g, or t
tttgaacttggagcaaagctttaatagcaggcactggacaaacccaggaggcctcctcagtgaggggctgcagaaagtagatacagaaagacaacaggtcatggaccagtgcccagacggacactcggggcgtggcagtagcatgctgggagctggagctgatggctgtgcactgaccctcgaggtggggctgtcacaggcagaaaggggcctcagtgtgtggagagatggacctgctcacagaagaccacctctccaacctggacttcctccacgatggcacacctggtggctggtcactgtggcttcccgggtgggctgcgaggccagggacaaggagtactgagtggccagcctgcagggagaggagcacccatcgacccagggatgccagccagcccaggcccctgcaagcactgctggggagaagcaggccctggcaganggaggttcccctaaattggtgaaaaatcacagttgggaatgcac

SEQ ID NO: 3410 - DNA, 212 bp, Homo sapiens
  I.3410 (AA860265)
tttcagggatctcctcttttattggcgttaggaaatacaggagaacgaatgaagagcatggaaaatttccagcagggctagcagtctaagttctgctgttaacaggatcttagacatattcttttcatctgcagttttccaggtatcccaggtcttgatatgtttgttaagcaaacctccctgagatgtgaggtttctgtgtttactctgat

SEQ ID NO: 3411 - DNA, 457 bp, Homo sapiens
  I.3411 (AA845475)
gcctgccttcccgtggtttaagacaaaaacacataaacaagttcagacaactgattgtatgattctgggaattctttgctttcctttccttctccctcggcaccacctcctctccccaggcctccctgtcgggcatggggaggaggttggagctcagcatcttgaggaatgtgtcaagacagcccctccgctccgcgctgcacggccagccgcctttgtccgggaggacagacagaaacgcagcaaggcacacaccaaggctgccggggaggcccgggcaccggacagatgcctgttgggaagccaggagctgccgagccacggaccacctaacagcctctccgcccggaacgtgacatagagagtgttggcattaactcggggggtgtccgatttcacttcagacaccaagtttttctttgtttgtttaaacatggaattcagacttcattgtaca

SEQ ID NO: 3412 - DNA, 383 bp, Homo sapiens
  I.3412 (AA845382)
gcggccgcttcagcagcacctagggaggttgtaagaaatgcagattcctaagccccacccctgactcagcagcttgggaggtgggggtgactcaggtaagccaggcatcctgggtgtcccactgtgggctggagttggagaccacctctgcgtgccctgcccctcccagccactctcccatccgggctctccctccccctcccgccatccttaatggtcatccctggaagcccgcacagtggaggctcctgcccggcggagaggtaagtccccacttcccatggttcccaaccatgcctcacagctccctggggttctttccatccatccaaatttccagagctcggcctcagaggtgacaatccagcagatctcaggggatc

SEQ ID NO: 3413 - DNA, 493 bp, Homo sapiens
  I.3413 (AA845372)
ttttttttttttttttttggggaattaaagaaatgtttattgaaacattattataatcatgattttacacaattatattatattgtataaattatatcacaatatgatggcatttatattttcaaaaggatccccagatttttgtgatactttcaagcagtgaaattggtaaaccagctctctctaaaaaaaaaaaaaagcgaaactgttgctttatagcatctgtgaatttctgtggtgtaaatactcccactatggccaatttcaacatgagggctcatgaagtagctcatggctaccaacgcaaggtcactgagtgcagagttaggaagaaattctcacagttgtcccttgtgagtgggcatgagctggcttcacacaccactgctttcaagtatacttttgaggaggaatcaatcattcaataagcctcatctgaggattctattcaccaggaggtgaacaggaggttacacaaaagcaaagaagccaa

SEQ ID NO: 3414 - DNA, 489 bp, Homo sapiens
  I.3414 (AA846850)
tttgttttgattggttgtttattgcttgtctctctccactccctcagaatgaaagcttcgtaaagacaaggaaacttgtggctcatccctgctgggttcccagtgtttttgaacagtacttggcacatggaggattctcagtcaatattttgtgtgaaggttataggatgtaacaagccttgctcttggatccctcatgagcaattatcttttcgaggagtcccactgtccttgggtggttcctggtgtccagagccacacataggaggggcacagtgggagaaaaggaggctcttggctctgctctctcctccctctcatcttctgccctcccctctgctatgtggggaacatgaagatgaagggcctcctgagtgagtccggctgtggaagagggtgagcatgattgcctcctgccttggctaactgtgccctgcatgaattggctcctgattttcttgccctccagttccttgaacaaaccaggcc

SEQ ID NO: 3415 - DNA, 373 bp, Homo sapiens
  I.3415 (AA846527)
ttttgctcatatttattttattttgattttttaatgctgcacaagacaatatctattttttcttgtatttatatgctgctatttactgaaagtcagagggaccttatgtggcctttttctttttctgtaggccaccttagagctttctaaatttggaatacttgatcaagctgaaagaaaaagggagtttcacaaaatcaatgggggtggggaggggaaggctgcttcattaattatgccctgtggtggttgattaactgcttgtacaattgtttcacttttaataaattacgcttacagtgctcctgctgatgaaggcacctgagctgaatacagttacatccggggtacaagtgaagggacagtggcatta

SEQ ID NO: 3416 - DNA, 476 bp, Homo sapiens
  I.3416 (AA846524)
ttttataatcaacataaatctgaatatttatttagtttaaaatatgttgttgacaatgtaatatgaacacaggcgataaaaaagatctattgacaaaaagaaaaaggaataaatgtttctagtatattctgcttggaaaactgccttttagtacatctaagattttcacctgcaagcagtaatctgaaccagtgttaggcttcgtttgatgaaatatctttttctgtttgaattgcttactacacctttgtaaacgaaagtaacatgtattcactgggaaacactaaaaaattcaaaaaagaaaataaagtgtaattccaccactcagggtaagccctattaacaccttggtacataccctttaagtgtgggtggttttaataacacgacatcattgtcaccaagacacttcatccactgtttcatttctgtgatcacagtaacatgcagggcactctagtctctacaatttttaa

SEQ ID NO: 3417 - DNA, 771 bp, Homo sapiens
  I.3417 (AA846412)
ttttttttttttttaagataaataattttgttattgttacaatatttaaaataatgtcagtgtggtgattaagaggttgttttggggcttttaggaaaacggactagaagatatcgatcgcatcctagagaggattgaggacagcactgggttgattcgtcccggcccatctcccctgagctccaggaagcacgttctctacgtggtgcacaggtgtggcccccgcccttctctgtggctgcccttctctgcgggtgcccttctctgtggctgtccttctttgtggctgcccttctctgtggtcgtcttagatactttgcgggaggtaaaggtttccccgtcattctttgatgagtaattcatctctttgtcttatagtttcttaatgaatcgctgttcttactttagtatgattggctgctttaaatatataaagccctgtggatgtctgttagacttttttgttgtagtgcatggtgtgtgctcgttcccgtttctaccttataaatagttgtgttgcttatttgtgtctctgtgataagctcttttgtgtgtcttctgtttatttactggagttttctcttgtggtctttggggtatgtctttttttgtggttgggttttttattttatgaatggtctgtatttgcttttcaattcaatttctgtgttctctccttgtttatatgtgtgtctttctttattgttgtgtattgtttttattatgatttttttgtttgttgcttattaatttatcttgtgttcgtatttt

SEQ ID NO: 3418 - DNA, 479 bp, Homo sapiens
  I.3418 (AA844053)
  misc_feature (160)..(160): n is a, c, g, or t
  misc_feature (161)..(161): n is a, c, g, or t
  misc_feature (432)..(432): n is a, c, g, or t
ggggccgccccgggttgtgagggcgtgcgcgttgggcagccgtgggacctcgggaccgtccgcccccgctctgtgtctgcacctccactgggctgagcctacccgggccctgcagtccagctctggccagggtcgtctgggtccgtgggggcgtcggctnnggtctctgacttgatcctgtgtccagagcagccttggggaacaggcagctggagccgcgtttaaggcctggggtagggtgcctggaaacgtgaagtggtttgaatgacccaggggcttggaggggtggcggccgagaagagcggcggggaaggtcaggtagggggtaggggttgtgtgcacaccgagtctgcatgttttccatcattcgtggcgtgcaggcgtgtacacctgcgtgaactacatgttcacagacgtgtgcacaagtgtgantcggctttgcttggtggacatttggcaaacgacaatggaggcaaaga

SEQ ID NO: 3419 - DNA, 409 bp, Homo sapiens
  I.3419 (AA843281)
tttttccgataatagtctctgttgacagtctatttaattatttaaatgtaatcagttagtcattcaatatttaattttaaagttatcaattgtaataaaatatttaatgcttagttaaaaacaaaacaaaacactagtccaaggtcactgatgatgacataactatccaggtaataatagtcccagctgtgcccagcactccctgccccctccaacaacagtaggaggtgggtgcttgctgcccaggctggctcatgagtgggaggaagaacagtgtgttagcttggaaagggccacaggaatcctactgacgtggctgtgtttacgtgcctcctccccaaagccctctctgttctcacacatggcctggtctgtcccaaaggcctcagagtggggcccatcctgaagc

SEQ ID NO: 3420 - DNA, 504 bp, Homo sapiens
  I.3420 (AA843170)
ggacttcgagcggtaccgggagacccgcgcggcctcctcggagtggacagtgaagcagcagctgggctaggcagtggggctgggctgccatggggacccgtccacgtctccaggacatcagcctgagcctcttcgcagcctcgttttctgttgaccgagttctgcaaggggacgtagaggaaccacagcgttcttgcgcttgagaccgctgtgattttctgacattttggaggcagaaatgcctggggaaaggcccacagatgcaactgtcatccctagtgccaaaagggaacggaaagcgattacccttgacctcaaattggaagtgttacgacgatttgaagcgggtgagaagctcagtcagatcgcaaaggccttagatcttgctatctctacagtggcgaccattcgagatagtaaagaaaaaatcaaagcgagttcacaaatagctactcctctgagagcctctcggttgactcgccatcgaagtgcagtgatggagag

SEQ ID NO: 3421 - DNA, 400 bp, Homo sapiens
  I.3421 (AA835056)
ttgttttctatttgtttatttcttatatatatattttttcaaggctcagggttttgataaaatttataggtctcagtttctccttttttttttaaagggtagtcaaatgaagcagtgagagtggagagtttcttcattttttaaatgaaggagaagacaagctacttcataagaacgtaggtggaatgaagatatgtacgttccctggggctctccaggagtgttgtgatggttgcgatggctctctgagggcctgctgcatcttgaggcccagtagatatgttaaggcttgaagattcctgcaatctcaggtgggagccggacgcctgggataagttttatcagaggaggtagaattgaagtatacctagctgtcttccatgtttgtgttgaggcctct

SEQ ID NO: 3422 - DNA, 463 bp, Homo sapiens
  I.3422 (AA835001)
ttttaacaaaaacaaaaacagtttattattcctcatggttccggggttgatagggctcagcaaggtggttcttgcttaagtgtttcatgcagctgcagtcagatggcagctggggctggagtcatctgcaggctcattcacatagttgacagtcagctgggggcttgctgagaccgttgactggagtgaccacatgttggatttaccacaggacctgcacttctcatagcatggcagctggcttgtaggagggagtgttccaaggccaagcattgcaagaggcctggcagaggcattaaggcttcctgcgacctagtcttacaaatcccagaatgtgccttctgctatattctattggccaagaaagtcactaaggccagcctagattcatggggagggaattacacttctcttcctgatacaaggagtatgatatatatcgcaggaaggcaagtattggtgg

SEQ ID NO: 3423 - DNA, 434 bp, Homo sapiens
  I.3423 (AA833655)
ttagctcatcagctatcattcgtgttagcatattttacgtgtggcccaagacaattcttcttcttccaatgtggcccagggaagccaaaagattggatagcactgccctagactatcagccacgccgctctggctctcacttcccacttccccagggcctggctcaatatttttttaaaagtatggtataaatgaataactgatctcttgttctgtctgctttaatcatgtgactgagtgcaaaaaaacaattacccacttaaaaacacagagatgcaagtgaatcctttgccataacaatgagcccactctttatcaataccctgttgtgccaaacaggtagagaggttttaaaaaaagagtcaagtatcccaactcatattaaatttccccatattctccatatttaaaagcactggtttagtcatgggtga

SEQ ID NO: 3424 - DNA, 435 bp, Homo sapiens
  I.3424 (AA833528)
tttattatttaagaaataagatttaataaggctatagctgtcatggatagtgatttctctgatagacctgggcaaagtaaattgaaaaccttctgaaaaggatccaccattctaaattccattaagaacattcatgattcatgagagggggtcaaatatcaacacgaacaggagtttggaagaagttgattccaaccttcatgggtgactttgagggatccaaaacttcagtagaggaaatacctgcagatgtagaaatagcaagagaactagaattatcctgaagatgtgtctgaatactgcaatctcatcataaaacttgaattgatgaagagttgcttcttatggatgagcaaagaaaatgttttcttgagatgaaatcctcgtggtgaaaatgaacaatggtactactctctgtcctgtttggagtcaggt

SEQ ID NO: 3425 - DNA, 505 bp, Homo sapiens
  I.3425 (AA824335)
agaattttcttactattcctccactacattacagttacttcctcatccctatacataccgcaataatgagtcggctacatccatttagattatcaacccaacccaggaaaagctggtgcgacgttgctccgcacaatggagggccttaggatggcaatggttaggttcctgctctcctgctgcaccaccatttctcccaaggccttgctataggtctaagtattgggacaatctccaatccgcttgggagtgatctcgtcaataatggcgttgtctcctttgatatctcctggagggctgtgatgagggccactgatgctggctgtgggggtctccatttccctgcctctcacccctgcgccttcaggcacacgcacctttccttttttacatggcagactagctgtgtcttctggtggccacgtagcttcagaagtgtggtttttagtaggtacagatctactaggaactttcattcaattaaagcttctaggaactttaacat

SEQ ID NO: 3426 - DNA, 497 bp, Homo sapiens
  I.3426 (AA824277)
  misc_feature (126)..(126): n is a, c, g, or t
  misc_feature (286)..(286): n is a, c, g, or t
ttttttttccatgaacatcagctgtcatttattatgatatatatatattttttaccatatttcatggactctaaagtgctaccaatggagagaagcatcctgattgagatgtgagaagctctggtncttagaaccagtggaacagagtaatacaatcaaacccacgggccgtgctcccctgccgctcagtcaggcctggggatgcttccctagcaccgggctcctggtggacagccttagaagggatgaagccagggccgcaagaggttgtccagggcctctctgngcatttagtgggggaaggacatggggacatggggagtggcggatctgggagaacagtcccaggccctgtcctccctgttggtcacagcaaacgtggaggaagcagcatacccagccccagtgccaggctggtggtggccccactgtctggctgctcggggctctgttacacaggcggccggtgcagcagttggtggtgaggctgtaggtga

SEQ ID NO: 3427 - DNA, 454 bp, Homo sapiens
  I.3427 (AA824381)
ttttaccaagtagatatgtttatttccatcttaataaaatcatagaaaatacaagtttaagcttaagtgacataaagtatatcagtagttgcaagaatgccaggttgttggtgtgcttgactacaaacaggtatgaggggttatgacatttaatatcttgattgtgattttgtttacatgggcttatataattatcaaaataaatagaactgtacacttaaagattcaaattttactataaattatacatcaataaaatctatttaaaattttttgaaataaataaaaacatgaaaacaatagaaaagaaacatggacagattgaggaagcaaacattgcaacttcaggagagtggacacaatctcatttgttttatccaccaccagtttagaagctgtatgtgcctgtctcaactcagtacccaaaaaatattagttgaattagtgaatgaaa

SEQ ID NO: 3428 - DNA, 386 bp, Homo sapiens
  I.3428 (AA813364)
tttgaagactaaatagcaagcagtgtttaatctgaagtaatgaatgttatttcaaggagcaaagaagctaacacttgcaataaatctttgttttgaagtatctttctcaaaggtcatcaaaataagttttaatttagattcctaaatccagtttctgctctgttagttattggggattttttgaataaataatctacgcagaactgtggactctgctctgctttttcaaccccatggtgtggtcatccagaaaggatttcttctccgctctaggcttagaaatggggtacctcctgcctgatgtatcctatgctttccagaacctgaaagattaagatgaatcattataagtgaaatgaccctagacagagaacaaagagggctgg

SEQ ID NO: 3429 - DNA, 89 bp, Homo sapiens
  I.3429 (AA813160)
ttttatcattgataggactaaactgtcttcaacttactaactggagtttctttacccagcagttcagagcagtgagaactacagaaggc

SEQ ID NO: 3430 - DNA, 508 bp, Homo sapiens
  I.3430 (AA813015)
  misc_feature (495)..(495): n is a, c, g, or t
ttttcattgttagtaatgttgggtctttactctccaccttctctgccccaagaaacatttaaatgagctgttgcttacagatataacgatttttatcttcacaggattcatctaaagcatttccatttggattatacgctatgcagttctttgtattaaaagtttcaaatgatggaaatagatactgggagagtgcagagccattctcccacaaccaggcggtgtgctcctcactgtaagagagtccaatccagtaaaattgttgactggagctcataaaatccagttcatctgtgttttgaagctgaagcaggctggatttctgagaagcacagagatgccgactttcgttccaagttttctgttcactggaaatgaagtaacagttgcaccggtacccaacccatttttcttggcaagaacagcagtcagagtctttctggagttctatgttgggtcctggagtaaatgctggctcaatactcagtttagtanaagctgccatgag

SEQ ID NO: 3431 - DNA, 401 bp, Homo sapiens
  I.3431 (AA813007)
ttttaaaagaatagccatttactcccaagttcccaggctgtgggtcacactgggtttgtcttctttctttgagatgtgagtctagggtccgcagagaaagctttgctttaggctgtgggtcttcaaggcagcaggtggagctctgcttaggtgtctcacttggggacccagctgaaagacagggctaccagaaatgaaactgcctttgcaaagatgatgacagtgagaaaagtctagcatggctgactccatcttgcttccagcctcacaggttggctgtctttgctcattcctgcagaggccaagcaataacaagaaatgaattattgacaaatgcagtaacttggatgaatctccaggtaattctgcttccctataggcacactttctcagtggaacca

SEQ ID NO: 3432 - DNA, 496 bp, Homo sapiens
  I.3432 (AA812958)
ttttttagttaataactcttatttttattgtttttcatgaagctaatggttacattttgttggttaaggctttgtatttaaaggaaatattttaaaaattatagtataaaataaaacatttgctcatgaatcctttacttctatgtcaggagatataaaattgtattcatttagctcattttctctgttgatcccaaagaaaagactctgtgaggttgccactatagtcaaacattttgaatttcctgcattttctctgctattatgttgacttaatctgtgatttaaatgattatgcttcgcaacactttctgcttttcctcgctccaagtttgtctccagctgctccttgttgagggttttgttctcttttcaacaggaaagaacgtccacccacaccagcttgaagtgccttcagtatgtagttaggttaagcgccatggtcaaactggaaaatcttgtaatttacggcaaaagaaagattatttgaaatatc

SEQ ID NO: 3433 - DNA, 439 bp, Homo sapiens
  I.3433 (AA812763)
tttaatatttcattttaattcaagtattatcatctcaacatgtaatcagtatgaaaatcattagtaagatatgcaatattattttcacacttacagcacatatcaaacagactagccatattacaagtgctcagcagccacaacgttactagtgactaaggtagtagacagtacagctctaaagacttgagccccatctctctctttgcaaaaatggttttaaacttgacattttaattgacttttggctgcagtaaaagaatttaaaacagtcttactaaatggtggaaagtaatacctttcaatgaaggtatggtgggccaaaacaaagaggtaaaagagagatttgagtcagaattatttattgaaaaatctccccatgtttcaatttattcatttaaaacaaacttttatttctaacttgaacaaacactgtcaa

SEQ ID NO: 3434 - DNA, 349 bp, Homo sapiens
  I.3434 (AA813551)
ttttttttttttcaaagacctaaatgtaagatttaatactacaaaactcttagaagaaagcataggggaaacccttcatgatcttggattaagcaatagattcttagttatgacatcaaaagcatgagcaaaaaagaagaaaaaagaaagataaattccaccatattagagttaaaaacttttttgcttcaaaggaaactataaagaaagggaagaaacaacctacagaatggaaggaaatatttgcacatagtatatctgatcaaggatgttatccagaatcatttaaacaatctaaattcaatacaaatcccccaattaaaaatgggaagagaatttgaatatgtat

SEQ ID NO: 3435 - DNA, 369 bp, Homo sapiens
  I.3435 (AA813460)
ttaaaccttaatgggaatagtctgctttgtcagaaactaggagtgcaacacctgcttttttctattttccatttccttgaaatatttttctccattcctttattttgagcctatgtagggcactgcatgtgagatgggtttcttgaagacggcatactccaatgggtcttggttctttatccagcttgccccctgtgtctttcaattggagcatttagcccatttccatttaaggttagtaatggtatgtgtggatttgatcctctcgtcatgctgtcagctggcttttttgcagacttatgtatgtggttggtttttagcatcacttgtctgtgtacttcagtgtgtttttgtagtggctggtggtgg

SEQ ID NO: 3436 - DNA, 409 bp, Homo sapiens
  I.3436 (AA813439)
ttttcctgtaatttaaactttatttcatatctattgttaaattacacaaaatcagtgaatggtttgtaaagctacaccaatggacagatgtttacagttgaaatcatgggatttacataatggcaaaaatgtatatgtatatttataacatcctctatatacaataatcagtatagacagagaaaatgcacttaatctttgcaaatcatgcacaccacagcaataacacaaaatgttttttctgtaacaagcttttccactggctcaggcttcatcctgctttccaacaatacctatcagttttaaaagcaaacattttcaattaaaactaaagaaaattgaaataccatagtgatctactaactattttaaaaacacaattgtacacaaaatagttttactctaaaac

SEQ ID NO: 3437 - DNA, 339 bp, Homo sapiens
  I.3437 (AA813050)
tttttttacttttaaaattttgactttattttggagtagttgaagttggcagtgaagatttgcagcgctcaaggatcttggcatctatctccccattcaccttgacatgtgtgtattgcagatgctaggggcgtgtgcttgggctcagtattcaaatatgaatgaggaagggtcccttgtcttcaaagacctcccccaaacccctcatgtggtggaagagatggacagtaaaggaggaaggaactccttctcagagacattaaagaagcattcagagaagaggagctgggcaatttgctgggcccagatcttacagtgaagggggctatggggatggga

SEQ ID NO: 3438 - DNA, 482 bp, Homo sapiens
  I.3438 (AA789266)
tttcacagacaagtttttattatcctgcatagagaacccaagaaatataaaaacatctccagaaggaaccccctccgactggccccctccctcccagggtgagctcagaccagggtaatgggggcttgcaggccacctctgtccagtgaacaagttccatataaaaatagatctgtagagggttcccagagagccatcgccccacatcacatctgtgcagggctgaggcctgggacccaacaggattctgggacctcactcctcagtggaggggagatctaccctggacaccgaagtcctgccaacacagccaggggcccttctgcagaaacagctggggtagggggaggagattttgccctgcagagaatgactgatgtagctggagatgaggacgaggctccatccacccaagaagggatgctggtccaggcttcccaggaggggtggggaaggcggatcctggagggcacctggccggg

SEQ ID NO: 3439 - DNA, 216 bp, Homo sapiens
  I.3439 (AA782547)
tttttttttcaagggcaagtttattctttgtgtatcaacaattcaaaataatgaaatattatggaacaataataaataacataaaattacttagagcactcagattcagaataatcaatatataatgttttctgtaaagcctgtgtttacctggagaaacctaattttaactgacctgttctaaattggtagtagtatttttatttaaaaaaaatg

SEQ ID NO: 3440 - DNA, 404 bp, Homo sapiens
  I.3440 (AA781857)
tttaaaaaagatggagtcttgttatgttgcccagtcctggagtgcagtggctatccacagctgtgattctagtgcaccacagcctggaactcctgggctcaagcatctttctacttcagcctcctcagtagctggaactgcctggcttcaacgtttttacttttagttttttgttactcttgtttctgttaagtgggataacaggagagatgacattgcacaaaaacctatagcataagaatttttttattgctttatatttaaatgaagagattttagtatcttttaaagacaaagaatttaggaaaggaaatgctgtattacttggcatagcaaaaattggaaacaaaagttcatttgattctggttaaataaattatggtgctgcaagatgctatatgatc

SEQ ID NO: 3441 - DNA, 471 bp, Homo sapiens
  I.3441 (AA781425)
  misc_feature (217)..(217): n is a, c, g, or t
ttttggaagctgaggcagctttattgaaaggaaggccagtgagtgggactcacatttgatctgccccagagtggggctgggaggttaccgagaacacagtcccgaggtgggggaggcctcagagtcacacctccaggctggactgagaggagctgggcttgtgacccatggggctcttgccatacacagtgccagcgccagggggtggccagtgggnaaccacgtgccggtaggaggtggccaggtagttgatgttgagtttccgggcgatgtaacggcccaagtattccatttgctcgtagtgctccgacagctgcaccagcaccaggggctccaacctgtggccgccgaggaccaggtggaagaagcaccttccgtgggcatcggagctgagcgccaggccgacgtagaccagatgcaaggggccctggcacacggtgcggccctggatggagaagtggtacacgccgc

SEQ ID NO: 3442 - DNA, 467 bp, Homo sapiens
  I.3442 (AA781411)
tttccaagagaacatagatttatttggaacccagagttgctcgactgaaggcacattgggatcacccccagagatggcatgaaaggggcgagagagtggggatggccacagcaggaacgtggcacggagatgacagggctgatgacgggaagctcaggaaggggcagtgtgaagggagggaggaaactcgggaggctgtggggtcctcctgacgtaaactctccagtcatcttctttctttttatttaacctgggatgtgtattaaacgtgtagactcctgggcatcgtcagaaaatctgggagcgggacttggagatctatgtcttaacgtgctcttgggtgattttttgtaatgcaagttaatgagagcatggggactgcatctaccttgttcacatgtgtatcccagaaacctagcctagtccggggcagggttgaggaactcagtatatcttgatgggtgaat

SEQ ID NO: 3443 - DNA, 326 bp, Homo sapiens
  I.3443 (AA781168)
ttttacgacatttaaaaactacttttattttgagtaagttttttggctccttgtcttttgaaagccttggtttagttctcggtgcatgctgctttatttcttcagacctggccaaaggaaattcccctgcgccacaaggtatctgcaaaatctgctgtcttacgtgcttgcaaagggcagagggagatccacggcccacttgccatgtggcctcacatcaagggacgccgtgtgatatggcttggagacatgcacttgacggcagtgacaacagctctcagccatgtctggcagccacttactttccccaagcacatcatatcatc

SEQ ID NO: 3444 - DNA, 490 bp, Homo sapiens
  I.3444 (AA781133)
ttttcattcaatgacgtcaagatttattcaaaagcattggcctggggagtgtagggaacctggactaagacaaggaatggggcacagcttggagaaaaaggggagagtctcagggcagaaatagagcatcagccttaggaattatttattgtggcatcagaccaatgactacaaggacatcagcatgcaaggggcggtgttaccccgggagtgagcagctgtcttcagatgaactttcagaccacgtcatgctggaagcagaactctcacatggagcagtcagggatttgattgagtgtggttggatgtatgtgcttaaataggaagagaaagtctaagggacagtgtgtgtgaagtgaaatgtgaatgttttatttgaactccctgcagttctccccctccctgcagcatctgggaccctccgctgttgaagacagtggttgatgatggggaacagcaaagggcaagcaagtggtcaaattactttctc

SEQ ID NO: 3445 - DNA, 371 bp, Homo sapiens
  I.3445 (AA774441)
ttttcctttatttcttttttgcttaattcttatggccaggacctcaagaattatattgaatagaaatggtgaaactaagaaaccttgttttgtttctgatattagaagaaaagatttcaatcttccaccatttagtatgatgttagctgtgggctttgcatatatggtctttattatgttaggaaatttccttctatttctagtttgttgagagttttttccatgaaaagttactgaattttgtcaaatgctttttctacatcaactgagatgatcatgtggggtttttttccttcagtctgttaatgtgatatattactttgatttttgcatgttgaactatttttgcattccaagaaaaatatccctct

SEQ ID NO: 3446 - DNA, 334 bp, Homo sapiens
  I.3446 (AA732769)
tttttccaggctgatgctttcagattttaatacggcggtgcacacagatggttaaacaccgtgtggcacagcaacatccctgcccctccccacactcagcaccttctgccacgagggctggtaacccgtcaagaggcaaccgcacacgcctgccgctccgtgggacatccagtgtctgtcgccgtgggctctgctacggtggtgcaagagccaccaggggatgtggacacaaggggtgcagccgtgtgcccgagacgcttgatttacagacactgaaatctgaattttacaattttcttgtactatgaaacatcattagaatggttttgacttt

SEQ ID NO: 3447 - DNA, 394 bp, Homo sapiens
  I.3447 (AA724726)
tttaagaattaaaaattttatttaaacaataagaaaacaaactgaaagtattacagtgctccaacatgaaaaaataacatattcatggtataaattacattctcttctttgaagatcttaaatttcacaatgacaaccccacctataggaaagaaaacatattaagtatcaagtaatttaagaacaaatgccaaaattacaaacacttttttgtattacatgctaagaacttactaactgttcgttagcccagttaaatatcatcaggactctcaaaaaaaaaaaaaaatctagtactggatcagaaaaatacagaaacctcatttcctaagcaaaatgaaagtcaactaacaatacattgagaatactacttacctccaccaatgctgtgaac

SEQ ID NO: 3448 - DNA, 352 bp, Homo sapiens
  I.3448 (AI334980)
tttttttaatttccaaatggagacatcctttatcagaaactaccctccccagggctacttctacaggtttctacttctccttctgaataatgggtaagaagctgaatgtgtccaggaagtgtcccagtgagcatgaaatcagaaccttccctcttttctttccagtggttaaaaagtgggccttgattaaaaactgctctgccgcttgccgatgagcttgtccttaggcagtttctcagattcactatgtcttggttttcccagcttagtttctattggataaaaaggtgaatagttttgttgtggtggttgttgttgttttaagccttcaactctcaaaaggcacagagtt

SEQ ID NO: 3449 - DNA, 421 bp, Homo sapiens
  I.3449 (AA769834)
tttttttttaaatttttaggatattttatttaggaccatgcccccagggttagtttttttttttaagaaaaagaatccccaaacaattaatataactaattttagcaagtagcacagagtaagcagatgaggcagtcatttagcacccaaaatttttattaggccattttaggagaatctaaaattaaatgtaattaaacagtaaatagataattcaaaataattataatttacatcctatggttgattcattaatgacgtatgacaaatctagatgtaggatctcctttattaacaataacacatagcaaacaaaaggaatatttctagagtatttatgctaaaattatgcattttaaatggtgacaggctttcaataaattctgagttcttcactttgaatatttaatttgccagagcc

SEQ ID NO: 3450 - DNA, 396 bp, Homo sapiens
  I.3450 (AA759213)
tttaaacattttgcttgtttattgtttttttttttttttctgttaactcccttgatgacttaatgtgtggtcagagttgagactaagcagttacagagtgtagaatgctggatatataatgaaatctgggtgaactaaacagatgtgatccctgccctcatagagccttagagcctgggcggagagataaacattaaacacaaaataaacacacaattacacattgtggtttgggttacaaaggaaaagaatggggtggaggtcgtgtgtgttacagcaaatggggcatctttccaatttctgggagaagacactcaacggctataaacaccatagaattcagctccatgaaatcagctatataaattgtgactaatgcttccgtgtgttgtgcaa

SEQ ID NO: 3451 - DNA, 348 bp, Homo sapiens
  I.3451 (AA759092)
tttatatccctaaaaaggaaagatattctttttatttccataaatgttttttaacaagacacttcagttaaattccaaatgtcagcaaggagtagcaaaggctcatagctatatactttacaaaataaggcactgcgattgtctgtagttttgtatattttactgaagagcattagtactttctttgattctgcctcagtcgtcaagtggtataatactcacgaacagcttgaaccataaacacaaggaaattccaggtggattcaataccttttcaagagcagccattaactcagagcagtgttaaaatgaagattatcaatttctagctgaatcacttcaatacgg

SEQ ID NO: 3452 - DNA, 311 bp, Homo sapiens
  I.3452 (AA758285)
tttaagtttattctccggctggtttgtttccccagaaagcagctgtttaaaattgagaaatagttacaactcttctgtaatacactctggggaaagagaagaggaaggaaagcaaatacgatattacgaaaaagcctgtgcggtgttagcttaaattagaaacggtttgagggttcattctctcatcagaaaggaaaaagaaacacaggaagaaacagatgagtacatctgagaggaaaaaaattcgattatcattatacacaggaaaaattaagctacttaagagaattattaagcagtgcgtatgttag

SEQ ID NO: 3453 - DNA, 377 bp, Homo sapiens
  I.3453 (AA759368)
  misc_feature (53)..(53): n is a, c, g, or t
tttttgcaaaaaatatttatttattgagcacctactatgtgcgccattagganatagtgaaacaaaatcaggtttctttgtgagatattcttaggtatgcatcccagccaagcaccttgtccccactaggaattcctaaggcatcgtcagtcacattagtcatgttcctagaaaccattttggaaacaaattccaagccctgggaaaaatggaaaataagcatgcctttcaagatgagactggtcatagatgacggtacatccaaaggaatataacatcatgcttgaaggagaaagtagtcggaggtcgtgcgcttcagagcagcctttgctttctcactgctccagtccacctccagggcttctttaacagggcag

SEQ ID NO: 3454 - DNA, 360 bp, Homo sapiens
  I.3454 (AA759326)
tttgtagagacaaagccatggtgattaagcataaattaaaaattcaggatttcttagtctcctttgaggaatggcatgaccaagatccagttgtacgtttcagctctcgtcatacgacctgttcacaagttaatctctagtcttaccatccaatttgtgtggcttgatgtcatgccttttcagcagcaatcctgtctctttcaaatgttcttggtgggctgtgtcaatcttcagatgaaaaagtaagcgtgccccacctcaacaccaaagatatggtgttggtgattcagtaagtggcacatttctctccgagtcagatccatagacattaaactgtcaacaacagcagcttttggtatg

SEQ ID NO: 3455 - DNA, 392 bp, Homo sapiens
  I.3455 (AI285713)
ttttttttttttttttttttttagtagagatgaggtttcaccatcttggtcaggctggtctcaaacttctgacctcaagtgatccaccgccttggcctcccaaagtgctgagattacaggtgtgccaccgtgcccggcctagtacatccacttcttaaaagccctcctcctggatgtgggcacagcattcctgctcatggtcccttggtgaaaaccagtcacaaggccgcagctagatgcaagggaagctgggaaatatagtcactgaccaagcagccacttctgtctccaccagggcttcccaacctcagcaatattggcattgcagggtggataattctttgttgtcaggctgtcctgtgcacatggtaggatgtttggtagcatccctg

SEQ ID NO: 3456 - DNA, 389 bp, Homo sapiens
  I.3456 (AI285411)
tttttttttttttttttttaaaacaaggtcttgctatgttccccaggctggtctcaaactcctgtactcaagcaatcatcctgcctcagcctcgcaaactgctgagatgacaggcgtgagccatcacgcccagacctgctgtatataactttcgacttccaaaaaggtaaccactgttgactggaagctttactgataacagaaaaagctgatatatatatatagtatgttttcgttattaatttacctattttgaatgtatcatgtgtttttaatgtgcatttctctgacaataatgttaacaacattgaacatattttcaagtgatattggacattaatatatcttctttgctaaagcatcttccgcatactttactctcatttatt

SEQ ID NO: 3457 - DNA, 403 bp, Homo sapiens
  I.3457 (AI284492)
gaacctacggattatactaaaacttttatttctagtaagtccccaagtgataccaatgctgctggtccaggaccacacactttaagaaccacgggcctacattaagaaaacggcaggcagagatcctcagacacaaggtcaactctccactaacaccttggtggaagagcagatggacagtcgggggaagaagagaagaaagtgctcatataaagtccaattagctaggggcagagtggagttactgaaaggaagacttagtcctcacggtcattcaaagaaccagactgacaatctttgccatcttcggtggcttccaaacttatcctggatacgaccgtccaaccagcagctgggagaagagaatggaggatcatgcaagaaatgtttatggggcaagcct

SEQ ID NO: 3458 - DNA, 183 bp, Homo sapiens
  I.3458 (AI281774)
ttttttttttttttttttttttagacaggggctcattctgttacctaggctggagtgcagggcctcattaaagccttgacctccccagcctaagtgatcctcccacctcagcctcaaccggaggttgggaccacaggtgtgcaccaccaaacttggctaatttttttttttttttttttgaga

SEQ ID NO: 3459 - DNA, 271 bp, Homo sapiens
  I.3459 (AI275776)
tttttttttgcaggatgcacgtactttattgtgatgtttaatatgtgcacagtgtaacaaaggagatgcaggtggggggagtatgattatatgataaggaacttgaactggaaaacactatataaactctctcctcctgcagaccttaaggcactaggattttgtcatgtgccaggaggaaggggagcaggaaagaccttctccctgcctgtagagatcagagatgcagcatgaacctataggagatgaggccaaagctccaacctcagct

SEQ ID NO: 3460 - DNA, 418 bp, Homo sapiens
  I.3460 (AI274746)
tttaacaatatttgtaccgtttttatttgtaaaaataaccatctgaatgcatttccatagtatattacagttaagtacttcattacgttattagagcattcagtagttgcaaaagtattaaactgtgcttgagaagattcagattgtttcaaagtcattcactgaactaaaagtcattttccccatttttacagtcatgacatttaccagagtcattcaactccaatttacataagaaaacattatagacaaaatcccactgaaatcatcaaacaatattttatgctgttacaaatatgttatgcaaaatataacactggcaccagatttgtatcatcgtgctttacaaagatatattgcacatgctagagcataaaatatgtagacaaaactaccaaataaaagatatttgcattga

SEQ ID NO: 3461 - DNA, 214 bp, Homo sapiens
  I.3461 (AI273880)
tttttttttttttttttttttttttttttttggtcttttcttggcagctacaatctctggtatcttgaaagtcaaatctaattgaataggaaataaatgcatgctggtaactctggggattttatttccctaatttctgctattgctgcaaataaaaaaaaaagttaccaattttttagcccaggcattcaccaagcaataacaaaaaccactt

SEQ ID NO: 3462 - DNA, 338 bp, Homo sapiens
  I.3462 (AI263135)
aagaaacaagtctaatttttattttctaaatgaagctaaaaacataatgaccagaaacatgattaccatttgttcatatttaatggcatccttttcagcaatctgagctgccctttctttattcatgtaagctgcttttaatttcttctccaattctctaagctcaatgctgtttaaaaaaacaaaaacaaatttaaatgttaggaccataagagaatgaaaacctcacagaaaactgagtaactgtatttttaatttactcaaagagggaatacagcgggtattattttagatccataggagaaataattcattatatttaatggatgcctttaggg

SEQ ID NO: 3463 - DNA, 444 bp, Homo sapiens
  I.3463 (AI243326)
  misc_feature (425)..(425): n is a, c, g, or t
ttttatatatacacagcattttaaagctttttattgaagcataatttacatacacagagatgcatatatcaatagtacagctcaatgaattttcacaaactgaacacaccagtacccagctcaagaaacaacactaccagctccccagaagccgattggtgttctctcctagtcatcagctctctctcaagggtaaccactatcctgactttgaatagcatcaatgacttttgtctgtttctgtacttcacataaatggagtcccgcaattgtacatctcccttttttcacttagcacatttgtaaggttcatatattttactgcatttggaagcagattgttcattcttagtgtggtagaatgtactctgttgtatgaatataccaccaattatttatctattttactgtttatgaccatttgngttgtttcctggttggggg

SEQ ID NO: 3464 - DNA, 388 bp, Homo sapiens
  I.3464 (AI240539)
tagagatggattatgctctgtcactcaggctggaatgcaggggcacgatcacagcttactatagcctggaacctgggctcaaataattctcctttcttagcctgctgaaacagctaggactacaggcatgtgccaccacacccagctaatttttaagttttttgtagagatagggtctccctatattgcccaggctggtcttgaactcctgggctcaggcaatcttcccaccttggcctaacaaagagctgggaatactggtgtgagccactgcagctggcccattcctgcttttttcacttgagtctcatgacatgggtttgagagtcctcctcaccatctcttttttaacactatatttaagcaatctatttatgttagctcgcat

SEQ ID NO: 3465 - DNA, 405 bp, Homo sapiens
  I.3465 (AI224988)
ggttattagaaatctcattttattcaaaattattttgaaataatgatattcaatgactccacagcaaaatcagcatctttctaattataagttacattgcatcaagaccacgactattcctcacctcacaatattcccccgaggatttatcctgcaaaacctggaattttttttaacattttctaaaaagcaagtttttagaagtcaaggggcttcatattgagtgggcttttttcatattaattgacataatttgaaccagtcttccttttctgaaggttatcaataccataaaccgtaagataaagtttttcaaaggctagacatcattccatattaaaacaatctttaattaacacattacctagggaaagcaatgttaagctataatattttttccatttg

SEQ ID NO: 3466 - DNA, 499 bp, Homo sapiens
  I.3466 (AI089514)
tatcaagaactcctatgcattattgcccaagattacagaaatagagattgaaacattagtgactcctcctaccatccacttctcataaggtctccctagctaggaaggagctccatctgttaccaaaggagcccagagggcaattctggatgaagaaaagctctcactttgcttgcttcttcctccctgctatttacattcagctatttccaaaaaaattcaagtgaaaaatatgtgatgcagccactacaaaataagtctaacagagacagtgatgagcagaatccacacaaataaaaaaggttcaaggacatatatgtctgccaatgacttttctgataggctaagtgaatgggaattatgagtcacctaaaatctaaaatgaaagttaatgccatctaggaagggatggatatttatggggattttgaggacatatattcagaaataataggatatatggaaagatatgtaggggctaaatcaagtgttaacctca

SEQ ID NO: 3467 - DNA, 404 bp, Homo sapiens
  I.3467 (AI004459)
tttagaagttcatcatcttctcatttattttcatgaataaagtttgttctttaaatattttatgtgaagcttgtttcacactttcatttctcaggctagaaatcaaggagttcaaggagatggtcacacacaagttcggtctctgaatcacagaatcgcagagagctctcggtctgagcttctgtccatggccacaaagagttgcagactgcaggttgagcaatgcaggttgagaaagcaaagaggtgagcaaggcaggttgagaaagctccatgcacactgtctataagcaacttggattataggaagcaccatagcaacctgggaatagaatgatgtgataacgtacgctgagggagcctaatcagtcacctttctgcccacttcctcgtctctgtgtacca

SEQ ID NO: 3468 - DNA, 273 bp, Homo sapiens
  I.3468 (AA992840)
tttactggtccaaaagcactttaataggctttggtgaattagattcgtgcaagaaaagggactaatgtattttcaaccgtcaaaggagtgtttagcttaataatcagctacccagaaaatgaaacagaaaaacacttgaatccaaagcaccgaagtgaactgaagcggcctccactgtcctcccctaactgtccgcacggcctgtcctctgtaggagtgtccttgtgtacgtgtggaggttgtggacacacatgcctagggttacagatgctc

SEQ ID NO: 3469 - DNA, 329 bp, Homo sapiens
  I.3469 (AI308602)
gagaagacgacagaaggggatgcccaagaggagtatcaatgcccagaaaaatgcttggcttagagggttttgagctttaagtttctacttcaatttgctgtaaattgaaatttgtcagtttgaactcatgctgtgaagagtttcagttacttagcaaagaaaaaataagctggatcagggcttatctacatatcaaaacaaagttaggaattctgttgtataactccaaatctaaaaaataacttcatacctactagctgatagacaaaatttcactgttgaatgagaagtaaaaaaaaaaaaaaaagaaaagaaagaggtcgtatcga

SEQ ID NO: 3470 - DNA, 133 bp, Homo sapiens
  I.3470 (AI308590)
cgagaagacgacagaagggtacaggatacctccaaggtttctaattgggtgagtgaaggcacacattgtcaaccgggctgggggcacagaaagaggacctggtttagaaaaaaaaaaaaaaaagtcgtatcga

SEQ ID NO: 3471 - DNA, 559 bp, Homo sapiens
  I.3471 (AI300167)
tttgagacggagtcttgctctgtcgcccaggctggagtgcagtggcatgatctcagctcactgcaacgtccgcctcccgggttcaagtgattctcctgcctcagcctcctgagtagctgggactacaggcacccgccaccatgtccggctaatttttttgtatttttttttttttagtagagatggggtttcaccgtgttagccaggatgatctcgatctcctgacctcgtgatccacccacctcggcctcccaaagtgctgggattacaggtgtgagcgaccgcaccgaggcagggggtgatagttttataaagggcttttccttttttgcttgtctctcattctctctcctgccaccctgtgaagaggtgccttccaccatgattgtaagtttcctgacgcctccccagccgtgtggaactgtgagccaattaaacctcttttctttataattgcccagtatcaggtatttcttcctcacagtgtgaaaacggattaatacaaacttcatgttggaaagaccactataagtcattttctccactcccagtccttgac

SEQ ID NO: 3472 - DNA, 441 bp, Homo sapiens
  I.3472 (AI300099)
ttttttttttttttttgaatagctgaaagtttatgatttgagaaaggggcaaggtgtgggacaatttcccacacaactcggaacccagggccagggaggcacctctgatgaaaagagatttctgtaaatacatgagaaagtgattctgttgacacctcattcttctgtctgtagaatgtacgagtgacaacaggacatgttgttttaacaccagacaatgaagctccctgctctccactcctcgccagtgatggcactgacagcttcgttcccgcaggttctggcgacgccccccttttgagctcctgggccttccagcaacaagctttcctttcgaatcctgggtccgagccagacagcaatgcgtgctcctcgtgcagtgccagggaaacagcagctatgaatccataaaacacgccctaaatccatcccatccatatt

SEQ ID NO: 3473 - DNA, 326 bp, Homo sapiens
  I.3473 (AI299411)
cccaggctgaagttcatggcgcgatctcggctcgctgcaacctccacctcccgggttcaagcaattctcctgcctcagcctcctgtgtagctgggattataggcacgctccaccgcgcctggctaatttttgtatttttttagtagaggtgggatttcaccatgttagccagggtggtctcacacccttgacctcaagttgtctgcccgcctcagtctcccaaagtgctggggttacaagcatgagccaccatgcccagccacagtgtaaattttatttgtaattattggatttctggttcaagttgatgtttgaaaaataaaaaa

SEQ ID NO: 3474 - DNA, 146 bp, Homo sapiens
  I.3474 (AI254989)
gagaagacgacagaaggggggtcatggatgtgttcttctaatgggctagaaattctccgtaggattgcactgcactccagcctgggtaacagaacaagactgtctcttaaaaaaaaaaagaaaagaaaagaaaaaagtcgtatcga

SEQ ID NO: 3475 - DNA, 442 bp, Homo sapiens
  I.3475 (AI222914)
cattactactagctttattccagactttaactccagactttattcatattttttaatttattatttacttatttagttcttgagataggatcttgctctgtgacccaggctgaatgtagtgatgcaatcacagctcactgcggcctccacttcccaggctcaggcaattctcccacctcagcctcccaagtagctggcagtacagacgtgtgccaccatgcccagctaattttttattttttgtagagacggggtctccctgtgttgcccaggctggtctcaaactcctgggctcaatccgtcctcctgtctcggcttcccaaagtgttgggattataggcgtgaaccactgtgccctgcctttatcctatttcactagtttttatactaataccctattctggttgcagaatccaatccaggataccacaatgggcattta

SEQ ID NO: 3476 - DNA, 468 bp, Homo sapiens
  I.3476 (AI222898)
tgaatggaaaatggtttatttgaccactctcttatgtatgcatctttagattgttaccaatattttgtaatgattaaccatctcccaggacacctgtgttccacagagcccagtctggtaaacaacagtcttaaagaaaaaaaaagaaaagacacagaaagaaattcaagacagcttctgtggacagcagtgaatggcaatacccattctggattccacgacataggctttctcttagcttctgtttaatgatagcttttgccaagttcaccatcttatgtaaactaaaggaacacgaaattcactctagccttaggaaagctgaggggatgggattattaggaaaagaaagtgtgtgccagtaaccctgaggccttcagtgagtaatcctggccaagcccagggcagccagggatgtattattgctattccattctgaacaatggatgactgacatttgcaagagct

SEQ ID NO: 3477 - DNA, 385 bp, Homo sapiens
  I.3477 (AI216540)
tagcattcagatggcatttaattccatggaatgagatgagatcacccaggttagagaggcatgtgggtggattgaggccaacatttagaggaggaggaggagcacatcaatggtgtcctggcaacctaaaaaaaagtatgatcagtgtcctggggctgccataacaaagtatcacaaactgagaggcttaaacagcaatgtatttctggaggttggaagtccaaaatcaaggtgtctgcaaggttgattccttgtgagggctgtgcgagagtctgttccatgtttctctcctggcttctggaggtttgctggcaatctggcattccttggcttatatatgcatcaacccagtctctgccttcacattgccgtggcattctctccc

SEQ ID NO: 3478 - DNA, 363 bp, Homo sapiens
  I.3478 (AI216236)
  misc_feature (33)..(33): n is a, c, g, or t
  misc_feature (111)..(111): n is a, c, g, or t
ccctaatcgatttctggatgaccaaggacaacnaattaaaaaagaaacctgtattccttttgggatagggaagcgggtgtgtctgggagaacaactggcaaagatggaatnattcctaacgtttgtgagcctaatgcagagtttggcatctgctcgcacctgagggttctaagaagcccctcctgactggaagatttggtctaactttagccccacatccatttaatataactatttcgaggagatgaacgccatctccaagaagagatggtaaaaagatatataaatacatatccttctaagcagattcttcctactgcaaaggacagtgaatccagcaactcagtggatccaagctgggct

SEQ ID NO: 3479 - DNA, 378 bp, Homo sapiens
  I.3479 (AI216172)
gacggttcatatctttattttgttacttgattcccagtcttacaatagctcttctcagattattctcaactttacaagataatttggagttactgcttttcaaaatcctttggtaattgcttgtgcctaaatcatgccaccttattccatgggatccattaatatttgggtaactagacaagggtatttagcaatccagggatgcagatgctgtgaaatgggttttcacagatacggagctgcagcttaacgttatcttcagagagacagaaagcggagtctcattatcattttctaaattttttgccaaagggaagttcagttccatatctcttgcttttctttttgcttatcttgttttctacacacctcactggc

SEQ ID NO: 3480 - DNA, 430 bp, Homo sapiens
  I.3480 (AI215652)
ttttgccgttcaggaaatgttttatttaagaaaattaataatatttagaaaataaattggatggaaataaatttttaacattccttctctgatgaagaactgacctaaaatgtagttagttctttattcttgctttttaaccttgtagataacatcatgttagtcatttacccccatacaagttgagcactctgtaagggatgtaatttaaacatgtctcaaaaccaaaaaccagtccatgggcagatctttttattgcgataatatataactacataactgtaaattggaacctaaaaatatatatttaatatgaaattaattttttttaattaacccaaactttaacttttttataaggggttgtgtttgaatgctttagccactaggcatgtgtttttctttctgatgctgttggagctataaatag

SEQ ID NO: 3481 - DNA, 286 bp, Homo sapiens
  I.3481 (AI214646)
ttttttatttttcatcagctctatattttgtcaaactatatatatttttgttacataaagtatatataatagatttagttatttagtaatgattttcaaaattcaattttgaagtatttcttagaagttattgaaatattaaaacatcttgtggttttatagaaatttaagagtaaaactggaatttttaaaatctggcaatttgctctgataggaaaattgccttcattacattattacacagaaaaacaaaaaagccagtgtttcctaatactttctttttttt

SEQ ID NO: 3482 - DNA, 362 bp, Homo sapiens
  I.3482 (AI214494)
aagtttctacagatagtttattggaatataatttgcacccatttaaagtgtccaattcgatggttctttagcatattcacagagctgcacaaccctcactacaatcaatgttagaccattttcatcaccctagaagaaagcaggtccctgttaacagtcactctctattttcccccaaaagtccctgtccctggcaaccaccgacctatttcctgactctggatttgcctaccttgggcatttcatgtaagcagatcatacaatatgtgagcagatcatacatgagcagaccacacaatacatgatccttcctgtccggctcctctcacttagccctgtgttttcaaggtccttctatgctg

SEQ ID NO: 3483 - DNA, 448 bp, Homo sapiens
  I.3483 (AI263171)
ttttgccaacatactaatctctttattgagataccaaaatccaaaggcagctagtacatcagtctattttaaaaggttaaggacctagattgctgccctctagtttgctggtctatactgacatcattggtgcccaaacaaagagcattttgctttatgagggcctaggtaagcataaggtgccacgtgtgaatatctactgtgctagaaacagaacatggccaaggagtatgtagcttttaggtttcctgggtctatagtcagcaatagaaggatcacacaagctgagaagttgaaatacaaagttgccataagatactatcaggtcactgctaactgcaaatggcttcaacaccatgttatgcctaaaaggagcatagaacctcaaaggcccacacaatttctgtaggtaaaagtatcttcttcttttctgttagactcaaaaact

SEQ ID NO: 3484 - DNA, 568 bp, Homo sapiens
  I.3484 (AI249131)
  misc_feature (304)..(304): n is a, c, g, or t
  misc_feature (429)..(429): n is a, c, g, or t
  misc_feature (545)..(545): n is a, c, g, or t
gggtctaaaactgttcaattccgtaatgagtgtctgttatgtaactaaaagggaaacacttcaaacttttgttttcacttaacttttcggaaacactcctaagtcagaaactgaagaagaattgtactgtctacccacagcagtcagttaacctttgctaatttctcctacaacttatcctaacaataaaaattggtactgctattagataaacagatgctagggccaggggaatggacagggctgggcttcccgcaaataaggtggcaccacgcaaggcctgcagttcttccaaggtggctancagcacctgtcatgcaattccctgcactctaagacctcttcagaaaggccttgcctgtcctgtgagattacttagtgctactcagggggagcaaggaggtgccccagccagaactcttccatcanctccctaaggcgctattgaagataagtgaatttagaggtaacaggtctttattgagaaagaaaagctctttgagggatgatcagttaatacactgctattctttcatctttcttgnggataaatcaaaaaaggaagagt

SEQ ID NO: 3485 - DNA, 382 bp, Homo sapiens
  I.3485 (AI249089)
  misc_feature (140)..(140): n is a, c, g, or t
  misc_feature (141)..(141): n is a, c, g, or t
ttggagctactttacctggtaaacaatgtagtctccatattataaagccatctatcttcaagatagtgatagccctgattgaccacagcatggatattgagagtgcgactgcactgcgttcttagggcttgcaaaatcanngtgctagagatacctaagattatagaatagtggaataagatttggaaccagagaattgggcttgaatctcaggcctgccacacattggttttgtgaccttggataggtaacttagcttttgagcctcagtttccttttttattgtaacatatatacttcacaaggatgtgatgagaatttaatggcgtagaaagtataaagcgtggaaataaaaaaagctccatagaataccgtacaaacc

SEQ ID NO: 3486 - DNA, 380 bp, Homo sapiens
  I.3486 (AI249085)
gtataagaatcctaaggttcagagaagttacgtaaatatcctttggtcacacagctagtagggactaagctggaattcaaattggagcagtaggacacagagcctgtgctcctcaccatgccttgccaggccaagattcatgtgcttttcatggcatgaaatcagtgttgggggaattctgcccagcatctctggttagcagagtgaattgcttttatcatttgccaacatgtcacagaaaaaaacaaaacaacaaaaaaattaaaactcctggctctagatttcctatcaacctgaagtttggcttggttacatattatttgaatatctgacaatcttagaaaaagtctaacgagaataaaaaaattcttcatttatgc

SEQ ID NO: 3487 - DNA, 466 bp, Homo sapiens
  I.3487 (AI248490)
  misc_feature (350)..(350): n is a, c, g, or t
ttttatttaaccatgtgtaatgtaacccgtaagaatggaaccaggttcgtctgaatccattgtgtcattaatgtccctttgagaatcaattccattacactggccttcacacattccacaggacatttcctatgtcggagttttctaaactatgaaattgttattcattactctgtgagttttggagaatcaagacatggaagagacatcccatcagtctgtgcatacctatgcatcgtgacattaaattgtcaccgggtatgtacccaaaccattaaatgggaccttgcctcagagatcataaaggctacacccttttgtaagtaaagcaaggaaggtctgggaaggtntgaagtgacttaaaacccatccaagtcactagtggcaaaatcaggaccgaaatccggcaccataaaggccggctccatgcttgcttccgcatcactgctgtctcatagcacaattc

SEQ ID NO: 3488 - DNA, 413 bp, Homo sapiens
  I.3488 (AI248323)
ttaatttagacttcctacgtgtaactaaaatctctaaaacaaggtggcttattttacatatctgaagaaagtgaggcatgcaattttcccttcctcatagtccgacctaagagtgtgtggcaaactttgtagaattctaagtttccttcaagaacttttcatcttatttccatccacaaattaaaagggatggaattactcaatgtagccatagctaggaatacagtttagtgaagaacaggaagggagagagacagaaggactcctacagtttttctttacaatctaaatatgttaaatgcatgatggaagcaatggagccaggtcaaaatggcacttgctgtgttgtgaaaaatcctgactatgagaatcttctgtagtagaaaggcaggtcattctatcacaccaactgg

SEQ ID NO: 3489 - DNA, 429 bp, Homo sapiens
  I.3489 (AI248075)
tttatttttatttcctttctttagctctagtccctcttccttctcttttttaatttagcattggtgattttagattgtttttagcctactttttaaattgtgtattgtattgtaagcattttcaagaacagaagaggatcttttaaaaaatattatttcttgatctctgtcacggtccgttcaaagagggccaaataggaacagctcccttctgcagctcccagcgtgaacaaagcagaagacaggtgatttctgcacttccaactgaggtacctggttcatctcattgggactggttggacagtgggtacagcccacagagggtgaggcgaagcacggcggtgtgttgcctcactcaggaagtgcaaggcgtctgggaatctccctcgtcaggccaagggaagccgtgacagactgtacatggaaaaa

SEQ ID NO: 3490 - DNA, 287 bp, Homo sapiens
  I.3490 (AI248002)
acagaattttgctggttagtcttactttaataataccccatattattccaaaaaggattgggtagcttaaaacaaaagatctaaatagaaacacaaaagaaatggaacatggtggttgcagaaatgaccaagtaaagatgctgtggtcaagttgaatttttaaactctgaacttcccagagacagaagtaaaataagtaatagaaacaagaattaaggtgtaatgagatcagttatggcccagagacttcatgtatagtctcaattaacttcacaacaatctcagga

SEQ ID NO: 3491 - DNA, 361 bp, Homo sapiens
  I.3491 (AI243501)
tttgaaaaatcgtttaaagtttttattagaagaaagacatgctgaaatttgcttttaaatctaaaataccattctccatggagtgcggaaaacagattacaggattaagaacacatgtgttgttaggctggactatctccatgtttttctctggcattaaatgccatcattctaagatgagagtctcaaaaactggctttttttctttcatatgagttacatgaagttaaccaaaagttacattctgtggagacacttcagaaaatgctattaaattttccaaacatgcaaagaacagttttgaatttgtaagatgtcagacattccaaaaggctaacaagtaagggcaaatttaaaattg

SEQ ID NO: 3492 - DNA, 210 bp, Homo sapiens
  I.3492 (AI242982)
gatgactgcagggacagggaggggctcagtctgcaactctctccagccagcctatcatgagagcccctgggccacccaatctgaataccagttcttggtcgcgctttctcttctttggattggccattcccattctcctatcatgagagcccctggaccgcctgtctttagaagtctgggcctctacaaaaaccatccacattgcctaca

SEQ ID NO: 3493 - DNA, 404 bp, Homo sapiens
  I.3493 (AI241516)
aaatgtatgtgaaatattgagcatggtgcctgacccatagcaaatgctaagtaagtagtagctgttattacttttattaacaagtaacatttgtataacatttatgacctacagagccctttcacatgctgtttcttatttgtgaactgagtgttttatacagaatgggtttttaaatgttccataggctttttattcatggcttcaagaggttgttccctttttgggacctgtacagcttgtgtatactcagttggcatttgtcacgtatcttcatgccagtgtctttgtatctgaattctaaaactgcgtgaacacaaaggttatgtcttttgtcttattcatctgggttgtcattggaacagagtcaggagacattcctatttattatgtgcgtaatcgta

SEQ ID NO: 3494 - DNA, 370 bp, Homo sapiens
  I.3494 (AI240777)
  misc_feature (346)..(346): n is a, c, g, or t
ttcttattcactttgttttacacaggccagtttttcccttctttatttatagaagggaaaaaaaaccatgaaaagcaagttagatattggaatgtatatgtaggtttagactatgacataaaagtaagcaaatactgatttctgttctcgccctggtttgccacagtcaggggggatgtggactggagagttctggagaagtggtatttatgttgagagaaacaagagcaaagtgattaaaagcatgggctctggataccaactgactggatttgcaatcatggctccacttagcagctgtgtgacattgggcaggttacttaacctttctgagctccaatttctntatctctaaaatggatataataat

SEQ ID NO: 3495 - DNA, 387 bp, Homo sapiens
  I.3495 (AI239748)
ttttaaaagatttactttttcttgggctttaataatcaccaagaccttgacatgtggagatacagaagaaagggaaagggaaggaaatgagttttccagttgagctgcagcatcagcataaagttttggaaaggatctatgtcatggagggctttgaaatttccttggtaggtggtgggagccattggagttttactgcgaccaacattagcacagcaattcttcagagagagaaatttagacatcttttggtagatgaattggtgtaagggcaaactggagacaggaagatcaatcaattagcaatcttttctgagatgacagccttttgatcttgcctgtgtctctcctctactcctgcaatcaccaggaccagatatggcagcg

SEQ ID NO: 3496 - DNA, 504 bp, Homo sapiens
  I.3496 (AI239495)
ttttttttgagtctccaataaacatttattttgtttttgagatttttctaaactgctttttaccatggtaagtgaggtgccttctgctgtcagtggtcctggtcacttgcagctgctatttccgtaaagaactgtgtaatgctccacagactacctgcagtcactgatacaaccacaccacatccatgctggatcacaactacaaaggaataactctgtgaaaatgcagaaatcacccgtcttctgtgtcgggcacgctgggagctccagaccagagctgttcctatttggtcatcttggaatggaatagcctgaaagaagtattggtaatgaaagtgcttacttgtcagcatggtggctcttgaagctaaaaaccccaggaaggtgttaccagaagaaagtgactcatttcaattatttacaaatttagcactcatatcattaggttattttttaaatcattaactcttaataaaagcatatgtaacttctgtgtctatgata

SEQ ID NO: 3497 - DNA, 582 bp, Homo sapiens
  I.3497 (AI239415)
  misc_feature (485)..(485): n is a, c, g, or t
tggaaaacttctctttattctgaagaaagccccaggaagttacttttccaagggttgtaagcaagcaacttgtaaacttgattgctaccagcagctgtcctaaaaccacaagcggaaccagtcttaaagtgaagccaaaactgtggcttgcagagcaaaaaaacagaagtgaatcacatgggtccttgatgacatcatcaaacagcactgaaggctaccctatcctggactttctctttatgagctagtaaattctgtttattagacataaatccatttaataactttctaaaccagtttgagttctcttttctgttgttacagtccaaaagaccctaattgaatactgacaataatacagccaatatggtagacaatggtttaaaaaaaaaaaaaaggctaaaatggagcacaaaatgaagtaaatgaagtgggaaatctgcccattgggggataaggagaccaccagatgaaaggagtaacanactcttttgggtaatatcatgactatgtccttgcatcaactgtcttcattaaacaatcagtagtttcatatgttgctctgacacagcagcatagcaa

SEQ ID NO: 3498 - DNA, 371 bp, Homo sapiens
  I.3498 (AI223374)
tttaataataataataataattacaacttttatttcagattcagggggtacatatgcaggcttgttacatgagtaaattgtgtgacactgaggtttgcagtatgaatgatcccatcacccaggtagtgagcatagtacccaataggtagtttttcagcacttgccccctccctcccccatctagtagttttcagtgtctatcgttcccatctttatgtccatgtgtacccaatgattacattgtttttcaccctgtgatgaaattcgtaaatgccaggtgctaatgataaatgattaagatgaaaggaaacttttgcttaataaagttactatgcattttttaacaatgaagctttaggtcatttttttaa

SEQ ID NO: 3499 - DNA, 385 bp, Homo sapiens
  I.3499 (AI223092)
ttttttttgcaacaaccaaaggactttctcaagacaaaataccagtgaggaccaattaaagcagccccaaatagtgtggatatgccggaggacttcagcgaggaggagacacgggaggcaggcaaggtgcaccacgggctgtggagaagacgtacttgagctgggtttgcaggaaggaatgcatctgggctggccagaggcagggaaagggcatccaggtcacggctgggctggagaccaaggttctgcagggtggagtccactcctccactgtagggtggagcaagccctgttcagaaatatagatggtttcaggcagaaatgtagaggcattttgctctgatggagcaaatattttcttctaaatagggactttcttctctcg

SEQ ID NO: 3500 - DNA, 443 bp, Homo sapiens
  I.3500 (AI223051)
ttttgcctttcagggaacgtaaattttatttactgaacgtaaatcttaaagccatagttttcaatctgcatgtgtgatcaccagaaattgatttcaaagagatacaaaattatttaacgtgttgcttggcaatgcaaatcccaggctagatagtcaagattgtcaatagtggaaaattcacatgatgtttcctgttgtgatccttgttggtacagattattttcatctgccttttggtgaatgcgccactactggatgcaatccatgtcctcaagcggcccattgcttctaataggcacttcccttgtactagctgaaatacttcttctgtttcatgccacacgatcccttccaaattcacactggtcccaggttcacagggcccaagacactctggctctgtcactactccaacttcacatgtattgacacccactgaacga

SEQ ID NO: 3501 - DNA, 418 bp, Homo sapiens
  I.3501 (AI223022)
tttaatgtgatgatgagttctctggattttctttttatttcatatatctcagacttggagccaaataactcagcaacgcagaaacaccaaatcactcagacctccccaccacccaactccccaagaaaaactccaagaaaaaaaagcttgttctttgtagccaaaagaccaagaaaggggtagcttaggaagaagactttttgacaattgctattctactctagtcaaaaaaccacagaaacctagtccccaccccacccgaacacaagcaaaggctgagtggagagcttagacttccaccttcctgaagttgcaataaggtatccttaaacctctgccaggtggtttctgagaaagttaagtggggaccaaagactttcttcttgttggcaggtatcaagagttccccacaccaaag

SEQ ID NO: 3502 - DNA, 453 bp, Homo sapiens
  I.3502 (AI222995)
ttgcagtgataaaacatttattgggagcaccctctgtgcaaagcactctgcccagaactgttccatttgagactccacatgctgaagacagagaggaacctgctctctgtggaagaccttggtctgctacctacaatggcacgtgcatgaggggcaagaggaacagtcatgtacatgcttaggattagggaaaaaattcagaaacattgaacagtaggggaatcctcatggtaagtggggcacaatgccaaaacagaacagtagtaacaagccgcagaggcagcggcaacaaaaatgacctaaagggagcatctttagctgtatgacacatcaaaatgaagcaactacaacactatgggcagtgactacatcaaaacacagccaaacctcttcccccatgctgtactccaggcagacggcactatttgatcacagcacaacttctggctaagc

SEQ ID NO: 3503 - DNA, 186 bp, Homo sapiens
  I.3503 (AI222461)
ctgcatgaacaattttattgatttttctatgggatgtgctcattccttctgaacctttccatagcattctgcacatgtggcaggataatatttataagctattagccattggttctctctttatttctcttccctcctccaccttacttctcaaaattaaggaggggaggagagagagagagagag

SEQ ID NO: 3504 - DNA, 366 bp, Homo sapiens
  I.3504 (AI222359)
tttttgtgtattctgtgcctactatgtgcaaggcacttatttattccatccattattttcaatatccacaaaaagcccccatttaagtagcacagcctgcattttacagatgaggaaactaaactgaagttcagtaaagtcaggaaacttcatccagaaccactcatttctagtaaacagatgagcagacctgaaaacccagaatgagtggcatcaaaacgcgcactggtttctctacacagccctgattcggtctccacacgtagaaaatgaggttagacaacaatctctagggtcttccgtggccttgagagttgataaatctcattctggacttcctagcttcagcaggcagcctgaacatgt

SEQ ID NO: 3505 - DNA, 404 bp, Homo sapiens
  I.3505 (AI221971)
  misc_feature (400)..(400): n is a, c, g, or t
ttcacttatttatatcttctttattttgacaaatgagtaaacatcctttttttcagagtacaagttttcagagtacaagtctttaccttcttggttaaatttattcttatgcattttattcttttggaagctactgtgaatggacttttttttcttaatttccttctctagttattcattgctggcgcattcttttacttttaacctaacaagatctttgtatttaaagcaaatttcttacagatatgttttaactttttatccaatcttataattggtatatttaaaatacatttaatataattattgatatggttggaataaaatctataatcttccaaattttctatctgatccacttactagctgttccttttttctttttcctgattaaataatntctt

SEQ ID NO: 3506 - DNA, 412 bp, Homo sapiens
  I.3506 (AI221958)
gacatttttatttgtgtatttgttttatgtaactgaacgacatgaaactgctgatattaggcctctaagaaaaatctacaatatgacaacttcaaatgaatcagcgtaatataaagcaacttgattccatgcaacaaccaaagcaaaaacgcaaaatcctgctgggcttaaacaaaaaacatgtcctaatctatgtcttcctaatggtttttgtggcaggtgtaggaactgaataaagaaaaagggaagaagaaaagaaaaaaagaaactaagactggaaatgctgtacctttgttccagctgcctcatggctgcagtaattttattggttttttcttctagtcgggcaattatttcatttttttctttcaagccatcttcagaaccctgcaacttttgatacatctctatg

SEQ ID NO: 3507 - DNA, 334 bp, Homo sapiens
  I.3507 (AI221956)
tttttgatttttgttacattcttctttatttggtttggcttttaaagtcccactttaattatactgacacctgttttattctttaccagctttaatcacttgcactgatatttaatggagagaatgatgtatataagagaacagttgccaacttgcaaatgctaacaaaatgctaaaagaccacatgcatctgtcaggcaagtaataattcatatgagaaattatatgagataattatacaagataattaaaacacataaaccacaataattcaatatcaccaccaaatacttcaaagtagctaagggactgaaggatataccatcccaaaatt

SEQ ID NO: 3508 - DNA, 405 bp, Homo sapiens
  I.3508 (AI221860)
tttctgtagcctaggctggagtgctgtgacgtgatcacggtttactgcagcagcgaccttctgggctcaagcgatcttcctgcctcagcctcccgagtagctgagaccacaagtgctcactgctgctcccctaatttttaacttttttttttttttttttgtagcgatgcggtttcactatggtgtccaggctggtctgcaactcccgggctcaagcgatcctcccgccccgcctctcaaagtgctgggaaggtcccttccaggcttaagcagcgataatggttttcaagttaaaaacaaaggtaaccaaggaaaaagttttctctgaataccgagataaattagggaaatcgccagagacctgggtgctgaggaaacactactgaattataccacacagaccgg

SEQ ID NO: 3509 - DNA, 341 bp, Homo sapiens
  I.3509 (AI221803)
tttatgaagcgccccgtgtagggtcctctgttttattaatggaagggaatcagtaaagcaagttcatgttcctccccactcttagttttaccagaactgccacctctgctggccagggaaagggctgccagctgtccgctttgccccttggagttcagaggctcttctgaacgcatgggtcatgaggaatgtgattctggggttgggtctctgatccctgtaactggctggtgtgacctgcaccgctgtggccttggcaacaatggtgtctcttcaaaggactcctgtcccgctggctatgctttctggcccctactcaccccacagacagccccagctct

SEQ ID NO: 3510 - DNA, 472 bp, Homo sapiens
  I.3510 (AI221524)
  misc_feature (433)..(433): n is a, c, g, or t
  misc_feature (437)..(437): n is a, c, g, or t
atctgcttgtattgattcaaaagaatggtctttgagttctgagattctttccttagcttggtctattctgatattaatgcttccaattacattatgaagttcctgtgctaatttttcatttcagaagttcagtttggttctctcttaaaatgaatatgtcctctctcaactcttgaaccattttactgttttctgtggattgagtttcaaccttctgtatctcaatgagcttccttgacattgagattctgaattctatgttatttcagtcatttcagtctggttgagaaccatggctggggagctagtgtgatcatttggaggtatgaagacactcttgctttcagagtggctggagttattgcactcgcactttctcacctgtgtaggctgatgttcctttaatctttaaagttattgtcttttgaatggngctntttgcctttatattcttcaccatcatgcccagact

SEQ ID NO: 3511 - DNA, 372 bp, Homo sapiens
  I.3511 (AI221341)
tttttttttttgggggtaggcagagggggcttgtgatttattggctcttcaaggagtgtttctggggccactctggcttcctcctgccaccagcagggtgcccaggggcccctccaccgaggtcatgagccaagccacccaccccaactggggggcccctgaccaggctgaagggccacactccctccagctggtgactcagaaacatccagtattaactgcactgggacagagagacagggaaggagctaggggcaggaaggaacagtcctggccctggaacaggttgtgggtctgcctggggctgagtgctcctgtgtcctcacactgaggggcttctcctggcctggccacagcgaggctaatggggtc

SEQ ID NO: 3512 - DNA, 434 bp, Homo sapiens
  I.3512 (AI221316)
tttttcgccatagaatgttagactctttttattaaaaaaaaaaaactgattataaatatttgcacatttataagaggagttttcaggaatttgacagggcacacctagaaccaccggggtggtgctcaggacccaccaggtacaccaaggacccaccaagcacaggtccagccccagttgtccatcttgctttatctattattcaccttttttgatgtcatattgttttatccataattaagtcagtagtatataaatcgaacagacgagcatttttaaaaaccacaaacccaccattccattatcatacctgacaaaattaacattaattctattatttcacctattacgcagtccgtgttcaaatgtccccaattttctcaaatatattttacagtcctgttgaaatcacagagtaaagtccacaaattgca

SEQ ID NO: 3513 - DNA, 413 bp, Homo sapiens
  I.3513 (AI221136)
tttttttttttttttttaaataagacatacaaatgaaatgggcttagaaattacataaaggctggaatttaacaaaatctatttatgataaccaattgagcaattccataaaaacacaaaaagttaatcagttaactctcatgttaagattcatattgccaatattggcattatcctaaaagtgaaatatgttggtatcacttcataaaagaacaccaagatcctcttttgccattcacaaccctacgcctatggaacaagagtccaaggactacaggccagaggtagaaacacaaatgtttaatgaaagcatgaaattatttgtgatgtcagagacaaaatttcaaagttagaaggacctctggggaatgactagtctgatccctttgctaacaactgagaacacaaaggag

SEQ ID NO: 3514 - DNA, 390 bp, Homo sapiens
  I.3514 (AI220583)
ttttcttttaatgccatattaattttgtttattgttctttttgattttaccttccaaaaataatttttctatattttttcagtacatcatattcttatttcaagattacaaatattttctttcattgatgagaagatacagttttttacagttcctccccccccccgaattacctctaattccaccagtttccttttggcttttttaaagacttacttttttctttttttcaaaagccttatgtaaattttagattgatctcttaagccagcttactaactggcagacttctggtcagggttccagtagaaaggtagccatttcatttgtaatctccaaaggcagatgtgacattaacattcagtttcttaaacaaaggtgccaatgttc

SEQ ID NO: 3515 - DNA, 456 bp, Homo sapiens
  I.3515 (AI220472)
tttaagaatttgctaacatttattgacgagcccaggcaattactgccaagtattcaaagcttaaatgatggtactaatttgattgagagtagttttcagcatctttaaaaacaaaaacaaaaacaattcccgtagaactaaccactctagaacccatgagattaattggtatagaaatgaaaaagggagcctaaagcctttacgatgtttcctgaacagtttaattataactcaacctcacctagcttttctttccctttataaattaacatttccatctcacttgtcaattcttctacttatatcaactagaaaatagagaactattgcttataaacacctaaacctattaaaaaactaaacctttttacacttagattacagagaagaaaattatttagaaattggtttcaaggaaattgatatcactatatttctctgatatacaattatggg

SEQ ID NO: 3516 - DNA, 399 bp, Homo sapiens
  I.3516 (AI220247)
tttggagtgacagcatttaacctttaatgtgggtctctcagccctgagtacagctgcagtctaagggtggggttggggggatctaccgttttttcctcttagtgtgtgctttggattagtaacctgatggaaagcacgctggagttggacggcctggtttgcatctgcttctaccacctttgttatttcggcagtcctcagtctcggactctccctctgtgaaatgggggaacatgaacttcctcagatcgtgacagcgcagctccacctggcacagggtgaatgcccacaggtggcagctgagtgacgcagggagggccggccagccctgcagcaactgaagcatccactggcacctcaagtgctggtcataggaccagacaccaccacaccagctag

SEQ ID NO: 3517 - DNA, 347 bp, Homo sapiens
  I.3517 (AI220062)
tttgtactttttattcttttatgtccgtgtgtacacaaatttttgtatttttttgtagagaggcagtctcactgtgttgtccttactaactttatatacaaaattttatctgttaaagccggaatggttcttttcagcgaggccctgtccctgctccagtatctgtaatgaattctcgtgttcctcccacagtgggacctgaaccgccaaaccgcacctacgagcaaacggtaggcgctccataaatacttgttgatgtgggtgccatcgtgtagatgacggagcacgaacccgaggctcagacaggggcggcgacttgtccaaagtcccactccgtggaggaagcg

SEQ ID NO: 3518 - DNA, 435 bp, Homo sapiens
  I.3518 (AI219996)
tttctatttactttttcttttattaagcggaagaataaataaacataactggcctcaattatttaacactaaaaatgttgacattgtagagataaacgtcaacaccaagaaatacgttttccatgttctccttaaaacaaatagaaagtttgaatgatatcaataattatcccttagaattgggatgtattcaggttttatgcgtgttacatagagcaaacaggctattttcaatttctgtgtttgtatatttacctataattgccaactttctgcaaatgatgtttcctcttgtgtaaataccaactggatttagcaaatgtcatgattattcgtgccacctattagtgaaatgtagtatgacagcatcttttgtgtgcaagacagctactatggggagaggaaggttgtcaggacaaattaaacaggaattct

SEQ ID NO: 3519 - DNA, 393 bp, Homo sapiens
  I.3519 (AI219658)
tttgaaacttcatactatttttattagattagttctaagttcaatttaagacaaatttagaggagttgaaattttacaacagtttgtttcttgtcttgtttttttgaacctttgatgttttttaaaagatattgtttgttctctaaatgtttccaaatgttagcagccaaaataaaggttttccttcgatggcaaacccacacacacatattctcacacaggcatacacacggggacagcttgaaggtgacacacagtgacacgggagcatggctctgcacagaaagggatcccataaccagactcagcagagaacaccctgacaggaagcggagggtgtgctgactgtgaagagctgaggcagaggctggtgcaggggtacggtgtttctgt

SEQ ID NO: 3520 - DNA, 376 bp, Homo sapiens
  I.3520 (AI219653)
ttattcaccagtaagagactttattttgtattcaaataaaagtctaaaccattaaaaaaggcagtgtatgctttttgaaaacttgtcctgagagaggattttcgttggcttgttttgtcatgttgaagcagggtgaccattcaaactgttgggcagaaaaatttctctgccctgcgtttctgctgtgaggacttcttgtcttcctgaggaagcattacagctaatcatgatgtggactttgcctcctgcccacttctcttgctgtgtctgtgcccctctgtgtctcaaggaatgtctctgggtatttacactgactgttctgtgacttacatctggtagatttccaggccccctattctatgcctgctctttgcct

SEQ ID NO: 3521 - DNA, 443 bp, Homo sapiens
  I.3521 (AI219513)
tttttaaaaaagctttattgaaatgcaatttaccataaaatttacccacgtaaggtgtaagatttaatggtttttgtgtatttacagaattgtacaaccatcaccagaatcaattttagaacattttcaccaaccccaaaagaaaatctactgtttagatatcaccctccaatcctccccaacccctggctagcactaatctgctgtttctctatatatttgcccattttggatatttcacagaaatgggatcataataatatgtggtcttttgtgactggcatcttccagttagtataatgttttccggtttcatctatatagcagcacacagcagtacttcattctttttcttttttaaaattgaagtaaaattcatataaaattcaccattttaaagtgtataatttagtggcccgtagtacattcacaacgttgtacaa

SEQ ID NO: 3522 - DNA, 435 bp, Homo sapiens
  I.3522 (AI219463)
tttaatgttacatattctttttactttttaaaatgtagctacttccaaatgtaaaccacatatgtggctccaattggtggcttgcatgatatttctattagatagccctactctagaatcagctttctgtgttctttctgtttcaccattaccactactatcctcatggtttatccttattcttcacaggagtgagcagtgacaccagggcaagctaactagctattcctgggcctttgtaatcagaaaatgttgtgtatttcagtatgtggatactctgcttgattgcactaaaggacaagggaggctcagattcttgtacctctatttatacacagtcctggaaaattcagtgtatattttcagatgtgaaaaatactatatgtttatatagaaaacatagtcggattccttgaatgtctggcgggacatgaa

SEQ ID NO: 3523 - DNA, 396 bp, Homo sapiens
  I.3523 (AI218498)
tttgagggtcagagagcagctttattaagcaagctggtggagggctgtgggtcccaccacccccgggctcggcgccagggcggaaggtccgggggtgccgttcaggccacgtccacgcgagcgaagctctggtccatgcccaggctgttctccacgtacacctcgtacttgccgctgtcctgaggcgtggcccggcgaatggtcagcgtcgtggtggtgctgccgatctcgaagaacaccctgtcatcctccttgatgtcctccccgtccttggtccagcctacgtcgggcgcaggctctcccaggatctccgcagtcagcgtcacggaggtgcctttgcgcgccttagtgttgtcgggtcccttttgaatcttcgtcgggactagcggaaggaaa

SEQ ID NO: 3524 - DNA, 363 bp, Homo sapiens
  I.3524 (AI218303)
tttatattttggagtactttattatgcagtggtagataatgcaaagtctaaggcggagggcatctcactgcaaaaataacttgaagattttgacgttcttcaatcataaatggacagatccagcagacagaacatcagtaaggacatagtcaaactcaacagcataatcaatcaccaaaatttgtggggtacagtgaaagcagcgcttacagcgaaatttatggctttgggtgagagtgatgtgtccatgtaggctcattgattgtaacataacgaccactcttgtgctggattttgatagtcaggcaggctatgcatccctgagggcagggtttccataggaaatctccgtagcttctgctc

SEQ ID NO: 3525 - DNA, 450 bp, Homo sapiens
  I.3525 (AI217385)
tttgcgaaccaacgatagtaattttattgactgaggtaatttgaagccaaataatggttatgaggaggatggaagcttttggaaaatgtgaacttgaggcactcttctgatgctaaaaatctctaaggaaaatagtacatcaccagtgtcaccagtgtggttctaaggcagctggtggcccagaatgtgaggacgtgaaatacaaaactttctcatttccaccatcatattatttgctggattcaggaaaatctgaaggaaggtctttttatgcaacacacacacacacacacacacacacacacacgcatgcacacgcgcgcaagcgcacgcacacacactcagcccaggaagtagacatttgattaaaccaaaaagtcagtccaaagcccaatttataccaagggaacatgcagatttcacaaacactgactcagaaaccagattttc

SEQ ID NO: 3526 - DNA, 390 bp, Homo sapiens
  I.3526 (AI217310)
ttttgaataactgagcctagtttttatttatggagggactgcccgagggccttcagtccataccattctatttgtccttgccaccagccaggtggtattcatctactctatagaatgactagcaaaatttacaggagcaggagtgggaaagatacccagaggtgctgacagatgttttgcatgagagatgcaggagctgggccattttctgctcttttcagtagttttcttattaaggtgaaggagtatggcaatcaactgcagtcagagctgtctggcaggatgtggcagacgcagtagtccgtcatattcgaagtgtttgctagttcaggagagcctcaccagattattttccttcatgagtaaagatccagtgatggctctacactg

SEQ ID NO: 3527 - DNA, 354 bp, Homo sapiens
  I.3527 (AI216852)
tttttgtaatataagtagttagatttttttaatagtcattaagaaatactaggaattattttgtgaagaatgcagtggagacttttcttcttcataaaaaataattttgttgctttcaaaattaagctatttcagttgtttatagagacaggtctctttccactttactccaggggatttctgtcttcgtatgaagtactccagacacttctcttcaattgttttgttgacctgtttaaagttgatttcgggtgaaacagggaatatccagtccagtcccttaaggctgaaagctgggctccaaattgtcagagtgcagttcactgatgggggttccagggctgtgcccagaga

SEQ ID NO: 3528 - DNA, 476 bp, Homo sapiens
  I.3528 (AI215108)
  misc_feature (431)..(431): n is a, c, g, or t
gaatccacttgtcgatttctaccaaaaaacccgaaaaaaaccaacaacaaaaaaacaacctgctgaaatttttattgggatttttctaatttgtaggtctactgggggagcattgatatcttaacagtattaagtctgttgacccttttttgtggcatctcactttattattttacatcttctttaatttttctcagcaatattttatagttttcgctgtataagtctttcatgcttttgctagagttgcccttaagtgtataatatttttaatgctaatacgtatttttaaatttaattttctcatgtgactaaatgcacaaatatcatttgatttttttatattgatcttgtgtgcagcaaccttgctaaactcaaattccagtagctctttttacctgccttcagatttactacatagatcatcattntgtctgtgaataaagagagttactcctttctttcccaattagttc

SEQ ID NO: 3529 - DNA, 332 bp, Homo sapiens
  I.3529 (AI214845)
tttcaatatcaaaatcaatttatttataatccctatgtctagaatggtagcttgctttaattgtcctaaatatttttctgtgtcctttcaactattatatagcacagcttgcatcttaaggttgacagaggatcttctctccccattccagttttacagatgaataatctattgaaatgcttctctgagggccacaagcatagacagaaatctcactatcaagattctttttgctcttggtaaaggagactccaaagaaaaaagtcagtgatttatatttgttcccttttgcgttatctctctttcttcctttctctttttctctctcctgc

SEQ ID NO: 3530 - DNA, 355 bp, Homo sapiens
  I.3530 (AI214830)
ttttcaataaaggcagactttattgtgaatcacagcgcctggtgtatcctgaactttgaggagttatgggagggacacgttgggggaatgggaagggcaccattcaggccaattatggggaaacccctggaggagggtgaatgccgaaggaggaattgggggagtccaggggctccaagttaccactgtgacattttgagagaacccggggcttttgcagattctacaaaatgtgggccaagttcatcctgtccaagtgtgcagcagggcccttggcccccatcactatcctgcagcctggctgcctttccgtctctggctgcgctctttctccagcctcggtctggccgcactt

SEQ ID NO: 3531 - DNA, 390 bp, Homo sapiens
  I.3531 (AI214363)
tttcctgctgatttgttttaatcaaattgctcagtgttacaaaacacaaaataaaggaagatgagctttgcttgttttttccagatgtgctctggagcagttttgatttctgcttcctcttccaagacttgggcctctgtgtgtcacattcattggtgctggactctcagttccctcactggacaacacacacaggccaacatgtggagctggacttattcccaggctcctgcctcctaggcactgcagagtatttggtctttacagcaaactaacccagaaaaaatttatttcctcctggagcatttcaatagcctctgaactggcttccttgtggcttcttttgcttcatcagtccattttccatttagatgtcagagtagttctttt

SEQ ID NO: 3532 - DNA, 440 bp, Homo sapiens
  I.3532 (AI209214)
tttatgcttagaaaaacatcctttattttatcagaccctttaaatatctgtacatcataccaacatcctaatgcctttacaacacttccctcatttggaaacaaaatagttgatagactcgtggagttctagataatttcttcatcaacagcttctgctaaatgggagttttattaggttggtggaaaaatggcaaaaatcacaattacttttgcgccaacataataaatttcacaaggaaaacccatagcccgctgtgagcataggtgattatagtaaagagataatccatcaagaactggtatcaggactcactattgaagccctctgtattcaccaatcaaatttggggcctttcaggattcagaagaaatttagagcaagcagaattcaggtgactcacagaaacttaacatttctcaactatacattatctatca

SEQ ID NO: 3533 - DNA, 405 bp, Homo sapiens
  I.3533 (AI209108)
tttttttttaatcatctataaagattgtccattctaggctatcaggacaggttgaaacgggatcacagatcatagtgtcggagacccactactcaaatttacctaagagtactgtcccctgcacaagaaggcactgctggggaagtcaaacactctgctcctggaccgttccccacacagtggccagagtgatccgatctgacaatgccactgtccttctgtaaccttctgtggcctctcattacccaaaaaagacccaagctttttacaaagccctacctgatctgacccttgatagaagcagtttaaaactcacctgcttgaggattttaaaagttattcaaaaaaaggttttactctttgcaatcacaaaatgaactggattgaattctttaaaaagccttg

SEQ ID NO: 3534 - DNA, 402 bp, Homo sapiens
  I.3534 (AI208914)
tttttaagtattaagaagtgagtccttttattaatccgactttacacaccagaggtctaaggcctaaataaatgagcaatttgcttaagatcatatggctggttattggtggagtcatgcaagtctggaaacagagtcatcgctaactccggttcagtgctacacgagtgaactgtctacaacaaagcaataacatattatgagtgcccacagtatcgaacacatacggtaaccgcagtccagccagcacccctgcagtgcccagagcaccaagcacccatccgttgaccccgcatgcgtgacgctcacgcgcgcagtccccctggcttcttccaggaaggctgaagcggcctaatctcggccaaaagatcaggacgactcgatctgggctggactccttct

SEQ ID NO: 3535 - DNA, 391 bp, Homo sapiens
  I.3535 (AI208811)
ttttcaaataggaaataaatttatttcttggtcccatacagtcccaaaaaggttcccagttagccagtggccctctgcaagtaatgatgtatgctccttccatcttgtgactctaccctcctgaaggctttttttttcaaggttgcatgctcagctcgatcaatccagcaggtagaaaagagcatggaagggatattgcatgggaggttttcatggaccaagtcttctgttgcattggctgtcaattcagtcataagtcacccctaactgtagggtgtctgggaaattaacataaatgtacaaagtcatgaattttcacaaattgaacaaggcccataagcagcattcagatgaagaaacggaacagtatcagtgtcccagaaatctccct

SEQ ID NO: 3536 - DNA, 454 bp, Homo sapiens
  I.3536 (AI208772)
cagaaagaaagaagtaaaattatatttgtttgtagacgacatgatcttctgtgcagaaaatcacaaagagtcaaccaaaatactactggaactaagtaacatattcagtggatttgcacaatacagtatcagcaccaaaaattagttgaatttccatacttttaacaataaacaactttaaaagaaaattttaaaacacttccattggctggagaacttaaagtaagaaatacttagaaataaacgtaaaaaggtcagaggtttttaccttgaaatctacaaacattgatcaaaatgattagaaacatagagctacaacccatacttatggtttggaaaaattaatattgttaaatgattatataacccaatgtgatttagattcaacacggtacccataaaaatccttatcacttgggctgggcgcagtggctcacgcccgcaatcccagcac

SEQ ID NO: 3537 - DNA, 341 bp, Homo sapiens
  I.3537 (AI208749)
ggaggagcagggcaccagcttccttactccccctggctggatgtccctgagctaagtcccaggcgacttccatcgcaggatgcagctctttccctcagccagccccgctttgtagggcagaagctcctcccaggctgagggctgagcttcctaggcaggtggccctgacccagcttgctggtgggtttcacactgatagcagcaaacccagaagaccagagatggctttgacaccaggcacccagcttttgaggcagggcacccctgagagacagtcccccttgtcttcaccccatcccagatccaagtcagtggttcagattttgcccagggagaggcag

SEQ ID NO: 3538 - DNA, 324 bp, Homo sapiens
  I.3538 (AI208658)
ttttaagaagtttggctgtttttattccttcccagccagcattgtcagtacaaaccaagggagaatgtcataaaccataaagcaaatttggggcatccgagggccctgacctgcctgattatctccaacactacatctaactggtggggacctgtggctatcacctgtgcagctagaccagaagatagactgtgagatatcagtaaccccttcccacacccagacccaggttgaccttgaccacagtcataaaactagcccttcataggggttctcgtctcagttttacagatgaggaaaaaggctcggggagatgacagagac

SEQ ID NO: 3539 - DNA, 259 bp, Homo sapiens
  I.3539 (AI208537)
tttttacagaagaatttcaaatgtttaatgtagatattccctggtgaagacgattccgcctccaacgccttcttgaatgtgggctacacataatgacttgcttccaaaaagtagagtatgggaaggggaaaacgaagcgactttacagtggagaagcctgttggatgctgccatggccagtaattgttcacatcctcagtggaaagtcctgttgatgatgtgattgttgacacgatgtgatgagaaggccacttcacct

SEQ ID NO: 3540 - DNA, 288 bp, Homo sapiens
  I.3540 (AI208465)
ttttttaggacgcagctgacattgtttattacccagctgtgtcacaccatacattatgtatcacgtcatagaagggaattcagctgctaataggcagatgttagacacaccatacatcatcgctgaagaacaggtgtagtgtgtatcatccagtcggaaatttatcattgaggtttctgatccttggggagtcctggagccctgctcccaggctgggcttctgtggttcagctcaaccctgcatggtggacttcctttatcagagatcccaagcgagctcttgtactg

SEQ ID NO: 3541 - DNA, 398 bp, Homo sapiens
  I.3541 (AI208368)
ttttattactaaaaaatgaatctttatttaccaagagggaaaactagcaaatcaaaggggaaatgattttgattttttggaagaatttcagtagctcttagtattggtatatgaacaacttagataacatgcggtgggaccagactgcagatttggccttagacaaaattgtaaatagacaaagttcatccatacagtctctcttttggtttttctttctttttatatctccttgaacaagtttccagccattatgttgacttttaattacccagtttctactgctttcttagctcacctgtgtcttccctgggtctttccagcaccttgtctaacatggtttcttctttcctctccagaagattctggagacacacagccagcaagatgagcatctg

SEQ ID NO: 3542 - DNA, 531 bp, Homo sapiens
  I.3542 (AI208352)
ttttttttttttttcagtaggttggaaatgattgtttattgggcccattcactgtctgttgctttcccagagcttctgggcccaggtctggctcaggcccacaaagacaccaaacccaaggaccagggcaacagctggcagcaaaaggaccgcccaaaggagaggtctcaggctggagttcccattggagtctgtgggcccaagtgtgggctcctgcccataagaatcctcaaagcccactggccccggagagctcacgatgtcctggggcctggcagtgtcattacggtgacctgaggatcgtcgctgtcttgtagtgccagtgctacatgcagtggagcaagtctccagccctgaggtgtggcaggcagaggtgctgcagaacaagtaaaccagtcctctgagggctctctgggagcctgagtccaggagggcgaaggtagcaacagtgaatcgctggtagtgcgactggaaagggtgtggccccgtccaggctaccatttgcgttctgtagctgtcgcccttgaaggg

SEQ ID NO: 3543 - DNA, 362 bp, Homo sapiens
  I.3543 (AI208343)
gcggccgcgtccggaactggatctctcctcttccgccctcttcgctaggacagtcgcttgcaattggccgcacgcccctagctcctccttaaggcacctttccccgcccccgggcgggctacttccggctgctgaccgccgggctcggagaagcaagcatcagctggctgtcgcttggggtcacgttgcctgtgtcgggcagggcagggcaagaactgggtgtggcttcctttggcccaggctctgccctgtccccgcactgccatctccttctttcctccttggcaccccaaaaattgccgctggatctaaactagattagactagtggattgtaaataaataaacaaactaggctctctc

SEQ ID NO: 3544 - DNA, 451 bp, Homo sapiens
  I.3544 (AI208269)
tttggggatccagcatggagtttattgggaagataaacactaagaaagtaaacaaatatatacaattgtcagagtgtagtaagattcatgtaggaaataactagggttctatcatgagaaaaaaacagggtgatccactttagcacatggggaagagagccctgtgtgagcaaaagacatttgaggcatgtccctggacgatgaaaatgagacagctttgtttagagcgagaagagccatgcaggaagaacaatcccttttgccaggtgcgtggagtgggaaagccttggcaaacaggaatttgagcttcctccaagagtgcaggtctgcttaaaggcagaaggctggacctgatattaaaaaaattagaatctcatcctcatattatcacagttggaggagaccctggcagcatcaattccaagttcttattcaagaagttcccatcttg

SEQ ID NO: 3545 - DNA, 435 bp, Homo sapiens
  I.3545 (AI208212)
tttgattgtttaactctctcttctcattttaataatgtgttatattgcacatttttctcactgatctgcctctttagttcttttctcttccactgagcagcgagctcctttaaggacagaaactgtgttattcattttggtgtatttcctcttccctccaacaaatagtaccgactacgacctgacacatagtaggtgtcaaatattttttgagtaaatgggtgaaccaataagtgatcaataaaatcataaatgagattcaagaatatctttaaaaaaatctcttgaaaaaatatagatttcttttttctctgaaatatgggctgaatctgtaatacccaaccttttttagtagttacaataaaacaagcactgtgctgtgctgtgtatgcaatgtctcatttaatttgcaaatgaatcctcactgacagtatc

SEQ ID NO: 3546 - DNA, 263 bp, Homo sapiens
  I.3546 (AI208047)
tttattatgtcttacatttttattctaggtagtcataagtagaagttaaagtaaaaaggctaaatcttttaaataaatacaatagtaaatatgcaaaataaagtgaattagatttgctgtccatttatctatgaaaaaagtaaaatattatgtatgatatctgtacacatacatctatagatagatactatgtactatagtatatgaactgagagagagcatatgaaattactgaggttctgctatatgccagatcctgttcc

SEQ ID NO: 3547 - DNA, 400 bp, Homo sapiens
  I.3547 (AI207993)
gcggccgcccggatgctccggcccgacttgtgccccgaattcccctggagaccctcgcactagcacggcgtcaggaggaggcttcgggtgacgagacagcgggcaacggctctggtccagagcgcgcgtgtccgccgttggaagcggtcacggcggaaccctcaaatcgccccctttcctagagacctcagcggagccgcgagcaaccgcgcagcccccgcgctccagccctgcgccctaggcacacgccccagagcagcagctcgggttcggcgccgactccgcgccgagaccagcccgctaggggaggactcacagcacccagctcccaggagggcacgcagaggactaccgagccacactccgccccacgctcgccgctatggttacttgccagccg

SEQ ID NO: 3548 - DNA, 400 bp, Homo sapiens
  I.3548 (AI207975)
ttttttcattttaaacttacagattctgctggcttgcattttattttatactaacttgcctactatccctttaaactgcctgttctctccctcatctctctttaaacgaaaaataatatcctataaaacagagcagacagacagctgtgcactactgcgtaatccatctttctaaaatcctcacacttgacacagaagccaactctcattttagatgcttggaaatagaatcaagagcaaattctagcattctgggtggctaggttgaaagtacacatggcagttctcagaagggtgatggggccagcgtcaagaaatgctctgttcttaccgatcacacccttcatccagatcttgacaatcacacaaacaagtagccacgtggttcttttccccattc

SEQ ID NO: 3549 - DNA, 436 bp, Homo sapiens
  I.3549 (AI206106)
ttcattttaaagtttattcaaatgacagaatcttatcgtgcttcacattctgttttttgaatacttaagaaaacttctataaatgtgtaacaaatgtatgtatgtataaattaattataaatgagaaaccaccctttacaaaaaaaatttatttattccatcaactacacccaaataatttcaaaaagtatatcaaagaattatttctaaattgatttttttcttgctgtacgtagcgctaaggaaaacctgtcagctcttaagcttttgtttgacctgctttgtcaaatgctttgtgaaatgatattcagaacagcaccatgtgatgtcaacttgcattaattctttcccaaagagaggtgttcagtattcaaactgtgtttatactggcacaatctatttatgtgtcagcttcatttctgaaagttacaagtac

SEQ ID NO: 3550 - DNA, 353 bp, Homo sapiens
  I.3550 (AI205831)
tttaaagcagtctgcatctttctgaaacttctagtgagtctcaagtcatgacaacctgggtcagagtcagtacaaatgggacaaacctgggggagaagaaaggggaagatgtggccctagtagcttatggtagattctcggtcattgaatgctctgtccagcccaccattgtccttgggtgggagaggtgaataatgttggaaaagatagaagatattgctggcatcttctttgttattgtcccctacaaaatgcagtggatgctaccagacattttgagactcaatccttatggaaaagtaagaaccaaaagaactatttcttgcaaacaagtatctcccatttgactttat

SEQ ID NO: 3551 - DNA, 201 bp, Homo sapiens
  I.3551 (AI205773)
tttaagcgaaaaagggaaatttatttggctgttgtaattgaaatatccaggccttgctttaggcacagccagatctggtgacctaaatgaggaaactgcttctctccctctctcgagaacattttcctctctgggagcttcattcgcaggcagccacctgctgagttccccacagtaatactttcttagttcttagaaacc

SEQ ID NO: 3552 - DNA, 573 bp, Homo sapiens
  I.3552 (AI200330)
  misc_feature (526)..(526): n is a, c, g, or t
tcacaaggcagtacaagttgtattataaggtagcaaaaacacactattaggaaaagaaagcagagtcggttgctctaagccaatgtgtctcagaagacaaaaggccagcaccctttctttaatttaccatcaagttaaagcactttagaacccactgaatgctaccacttttctaacctaagcattgataattcaattggttgtaaagatttaggacttgatattttcaccaaagaagtatattaagcgacaaataactgattaaagactgtctctaaaagtcatatatgttttcttttttttcttttttttcagagagctgatatagctgttgctccactcactataacattggtccgtgaagaagtcatagatttttcaaagccattcatgagcctgggcatctccatcatgataaagaagcctcagaaatcaaaaccaggcgtattctcatttctggatcccctggcttatgaaatctggatgtgcatcggtcttgcttacattggagtcagcgtagttcttnttctagtcagcacggtcagtccctatgaatggcacttggaggacaac

SEQ ID NO: 3553 - DNA, 451 bp, Homo sapiens
  I.3553 (AI199794)
ttttttcacaaggaatagtagcgctttattagaaaacataaatgtcttaaagatgcaatttatgatagtaacatcagctatacaatatgaagaaataagtccagaaaaagatttacatgaattttaaataagaacaaaattatgaaacttgttgaagtacaaaacagaacatttgagtatcaggagatttatcacgtcgaaagacataaaaatgcaatgttaatttctcccaaattattgtacgaaatcaccaattaatctatagtaataagtgcacttttaataacaatctcaacaatatgtatgagtctgcgtgtgtgcatgcatgtgtacatgtatgtctgtgtgtgtgtggcatgtgtgtgtgtgccgcttgtgcttgcatgtgtgtgtgacctgacaagttgttccaaatgattgtatgaaagattttaaggctaagactagccaa

SEQ ID NO: 3554 - DNA, 600 bp, Homo sapiens
  I.3554 (AI271766)
  misc_feature (408)..(408): n is a, c, g, or t
  misc_feature (427)..(427): n is a, c, g, or t
  misc_feature (441)..(441): n is a, c, g, or t
  misc_feature (482)..(482): n is a, c, g, or t
  misc_feature (521)..(521): n is a, c, g, or t
gagacagagtcttgctctgtcacccaggctggagtgcaatctcagctcgctgcaacctccacctcctgggttcaagcaattctcctgcctcagcctcccaagtagctgggattacaggtgcctgccaccacgcctagctaatttttgtacttttagtagagccggggtttcactgtgttggccaggctggtcccaaattcctgacttcaagtgatccacccgcctcagcctcccaaagtgctgggattacaggcgtgagccactgcacccagcctcacttatcattattaaactctaacatgtgttgatcacttaaaactctcgagttgtactgtgtgacatgtgatagctaccttatttcattacttcatttattcccttgaggcttggagactgatgtgtgagggnagagtctgagggctcctgngccctcgcccatgngagctgggtgcgtggctgtccctgtgtaggacaagctgcanggagagactgtgttcctttgccatgtcccgtgggcccancatgatgtctgatagcaaaaagatggtgagggagggctgctgatgagactggctgatcatttctgcctcattttacccc

SEQ ID NO: 3555 - DNA, 176 bp, Homo sapiens
  I.3555 (AI271764)
ttctcctcgttccacaccgcccactggctcctggtccatcgtcgtcgccaccacagggctgctggcgccgcagcgcccgcctcgcgccgcgcctagccaagtctctgagaaggggactcgccggcctgaggggcggggccagcccgcgcctcgcctagcccgccgggctccgcacc

SEQ ID NO: 3556 - DNA, 425 bp, Homo sapiens
  I.3556 (AI270372)
tttttttttttttttgcagggggagggccagcggcaggaaagccgctacaatttatttccgagtcccctccagaccaccaggctgagcctgtcacgacctcctcaagggaccagccattcctgtccccagtgctgctagccacaggcctgggatccggccagagtcagcccagccccacccctggagcgagcatgtgacgtgggctctgcatctgcatcgtccctgcggccacctggccttggaatctgctcctccaagacccagccaggctgggccagggcaggcttcccacacgagggcccgtcgacaggccctcagcgtccaggtggcgggatccagatgagaccagggcgggctcccaccagcctggccagttcctgccgacactgtccctgtagtcgacgtagcaccgcctccaggcagg

SEQ ID NO: 3557 - DNA, 303 bp, Homo sapiens
  I.3557 (AI267659)
gcgtggtcgcggccgaggtacttttttttttttttttttttttggtgtcatagaaacagagagcagaacagtggttatcagagactggggagggcagttgggaggggaggatgaggagaggctggtcaacaggcagaaagttacaataaggtgggagaaataagttctggtgttctgttgcacagtagggtgactctggtaaatggtaaggtattgcatgctacaaaataactagaagagaggcttttgaatgttctcaccacaaagaaatgagaaatgcatgaggtgatggatacggtaatt

SEQ ID NO: 3558 - DNA, 368 bp, Homo sapiens
  I.3558 (AI266752)
ttgagatcatgccactgcactccagcctgagtgacagacactttaaaaaaaaaatagattttgctattgggtaaggtatagtagtcggcagcagaatggactgattgaggacaactataaaattacaaaaaatatttaaatgcaacttattgctatagaagcaaagagaactaaaggagcaaaattctagagagtggtaaatcccagaaagcacatgcacagaatgcagctctttgctctggggaccctttccacttctggctatagggaagaacctgaatactgaacttggttcaggcagagggccataccctgggggtcaggggaaggcatgggggggaccagaaaccaggagaacaatcaagact

SEQ ID NO: 3559 - DNA, 295 bp, Homo sapiens
  I.3559 (AI263210)
tttttacatgtggtagcgcatttaatattcacagcaacacaaatgggaagtaatattcttatcgccattttacaaataagaagaccaaggcccagaagggttgaatatcttgctcaagatcacacacattttgccaccccccattccaagtcccataggcaactcagactcagcatgtccatgatgtaacttatcttcctctccaaaccatttcctcacttgtgccctactctcagtggggacatctccaatccccaggcccaagctggaaaccggaagccatttccctcgtgcc

SEQ ID NO: 3560 - DNA, 118 bp, Homo sapiens
  I.3560 (AI254292)
gagaagacgacagaagggaccttcctctacttgataaaaagcatctacaaaaaaaaccactacttccagtttcaacacaagaggacaaaaaaaaaaaaaaaaaaaaaagtcgtatcga

SEQ ID NO: 3561 - DNA, 326 bp, Homo sapiens
  I.3561 (AI242263)
tttttttttttttttgaaaaacatagagttttttacaactttattaagttatcccataatcagacccgtataaacaaaagccataatgtaacacgaatgtaacatttcaccatagttaaccaagtcacaacaaatttcaaaacatcagaattctttgaatttactctcataacatcctttatgaattcagtatatagcctgcaaagaagccacacagccattaagtagtagaattctaggtgagaatccaaaaacacctcaaagcaagtttccatatcctgccgacctactcagccaaatgcctgcctgtgtatgaaaccgttttg

SEQ ID NO: 3562 - DNA, 450 bp, Homo sapiens
  I.3562 (AI218611)
acattttttttttttttttttttttcaatgcttctgaaactttattgtggggattaatcacctggggagcttcttaaaatgcagactcggatttagtaggtctgaggtgaggcttgaaaagtcccaggtgatgctaatgctgcctgatgacgtcaagccttcactgaagtgaatgtagcttcctgtattcaagaaatacaactcatgtattgccagtgagatgatgttgctaaatttaaagcaatccatatgacatgcctgctcccctttcatcttccaccatgatgaaaagcttcttgaggcctcaccaggagctgagcagatacggttgccatgcttgtacagcctgaaatgagtttagctttaaagtggtcgtagaaatgtttttcttatagtgcagtgaatccgcacagctggaggagttcaatatggcacatcaaaggcttgctc

SEQ ID NO: 3563 - DNA, 445 bp, Homo sapiens
  I.3563 (AI217901)
tttttttttagggattgcaagactttttattacctaagaatgatcagagaaattctaaggcttttgccttatatttttctaggggcaggggagagacgctcccacttagcaagtctaagcagacatatcaggagtcctgctttcaacatactcgttgcaaaggattggactgtagctgggaagacaaggttccaccacaggaagtctgtgacctcatagtggctgagaaatccctggggcctggagccccttcaccagaagagatggaatcatggctggctggacagcttcttccaaggagttggtgcccggagtctaggtgggaagtcagcaactgaccatgcaaggcctgcaggagctccagacccatctccacaccaagagtgaccaccgtgctgcagattttgttgtatctgtccattctcctcctcggcttcttactgct

SEQ ID NO: 3564 - DNA, 477 bp, Homo sapiens
  I.3564 (AI217168)
ttttttccgctttgtagcaacattttatttaaattattttgaatgggagcaaaagcatctctagggcgggacaatgacagcagagtgggactgtgagtgataaggagatggcaggggcactggcttctgttaaaaatagaggtgggaaatgttggagaggaaggggctgcagccccaaatgtgggcagtgcaccataggcctggctgtcacttgcagcccagcatcacacctgggctgtggcctgggacggctccagggagtctgctctggttcaggaggtcacaggggatccctagaggtggaatgatgggactgaccaaaggcttccaggctccaacacgctttggtttcctcaaaagccagctggggtcacgttaggtcctccaggctgggcctggactcatccattagctaagagatggcatcattcaacttctctgggctctgctttccccatcttgatatctgttaccagc

SEQ ID NO: 3565 - DNA, 467 bp, Homo sapiens
  I.3565 (AI217106)
tttttttttttttaccaagcacgaataagtgtttccgttttatttaacacttaagcagaacatttttgactatacatctatataatgcacagtactaaaaaagtgcaaaatattcatcataaacatgaggaaagtgaataccacaatggttgcatcaactcaactaggcaattttgctcgttaacaaaaacacagctttttctgaaagttttttggacgttaacagctgttcaacatcatcttccatctaattccttctgaactgcttcaggttgcctagcacatatgcagctggtgttaagaaggtgtaaaaaacaccacaagtccaacagccatttccgcggcagacaggggccgctggcgcgggggccccgagtgggcgaagcggggagcgggctgcaggccgagcagggccaagcggcggtagtggcggcgggcaggacagcgcccacgcaggagaggcatat

SEQ ID NO: 3566 - DNA, 378 bp, Homo sapiens
  I.3566 (AI204538)
tttgttaacctttattaaggtataatttataaaccataaaatccacccattttacacacacacatcaacgatttttaataaactgatcacgtagtgcaactattgccataatctagttttaggacatttccatcatctctgtaaggtaccctgtgcaatttatagttaactcccatttccacttctggcaaccactcacctcatgtctgtccctacagatttgctattctatacatttttattattattctgcacatttcacataaatgggaacatatactatgtggccttttgtgcctggcttcttgcatttagatcagtattttctaggttcacccatgttgtggcatgcatcgatactttattcctttttatagc

SEQ ID NO: 3567 - DNA, 369 bp, Homo sapiens
  I.3567 (AI204358)
ttttcattcagagatatagtttattacttttgtacatacttctatctaattgaaatattgcctgattaaaacttatatcaaaacacgatgaacgatatctacattatcaaaattatcttaaaaggataatattggcttaaaaagcaagatcatttgcattgtaaaatgcctggtgcataaaatttttaaatgcaaaacaatctcattaagaaccatgtttgctgtgctgctgatttcaccattcaaatagtggttactgcttgcagggatattttccatgatagaaatcagcataacagttgcaacagctcaacggtgccctagccatcagagtctccatggaattctctgcgtatttcaatatggtct

SEQ ID NO: 3568 - DNA, 495 bp, Homo sapiens
  I.3568 (AI204203)
ttttttttactggtcacctagtcagggaagtttaatgctcaaatacaggccaaaggtcagaaaggggggacaccagccccctagacccttacagttgagtccaagatagccgtgggtcccactctgctcggtgatgtgaccccaggacccaggggttcccaggagctggagtttctccttcactttttccttggttagcatgatgttctctacaacttcttttagactctgcttccattctcccagcagagcagggttgcagaggatggaggtgatgacacgtgcacccgtgttgggggggtttagccacagggcctgggctaatccttccagctgggagaggacacacagcagctgctggttgttgactgccaccaccactagcatccccactccttcatcataaatgccaaaattcttggacagagactggctgcagaagaactcaaagccttgagacacaaagtattgtaagattctagtatcttctttcaa

SEQ ID NO: 3569 - DNA, 457 bp, Homo sapiens
  I.3569 (AI204202)
tttttttttttttttggcaatacctaactgctttgatattaggttgagcaaaaagaagcagctgtggaaaagtaactaaattacgtggggaggctgcaggaagataggcattattttaccacggtctgtttctacagaattatcttcgctatggctcctggtcgcagaatgcttcttttctcccggtgcagggaagggcatctttcacaggaatgtttttatctctcagcaaatgcacggcatacagatggtgaagaggtgattcagtaaagttttggtttcaagaaatcctggcccacctaagtaatctccagcatagcaaggtttatcttttcaatgtggctctgtatccttagcaaacctatggattctctgccagtggcagaatagagacagttgcaaactcttttcttctcccatcgaaagatgaagtctgatttccctctccttaacactg

SEQ ID NO: 3570 - DNA, 479 bp, Homo sapiens
  I.3570 (AI200729)
ttttaaaacacaataaatttattatcttacaattctggaggtcaaaaatctgacacaggtctcactgtgctaaaatcaggatgtcagcaggggtttttccccttttttactaatgtgtgatagatgttcatagtgtttagaagtagatatgatcatataatacattcatataatttgtaaagatcaaatcagtgtacttgggatattcatcaccttaaatatttgtctttgctttatgctaaaaccatttgaattctcttctagctattttgagatatacaacacattactgtaaactatagtcaccatactaatataacattagttctcagttcttctatcaaaccatatatttgtacccatcaatcaacttcttttcaaacccctcttccaccctacccttcccggtctctgatgaccaccagcctactctctattttcatgagattcactcttttatgtcccacatgagtgaaaac

SEQ ID NO: 3571 - DNA, 489 bp, Homo sapiens
  I.3571 (AI198847)
ttttttttttttttttgcaggtgggtgggtaaggagtaagggtaagggtggtaatacaaatgttatagagtcccctaacattttcactacattctaagcctataggagttctcttaaagacttccatggcttccatggtactatcactggtatgaaaagtacccacagatgtgttctacactttcctctatgttttcaattagatgcaataaggagaaaattgcaacaaccaaaggtttttttttttctaacatctgtgtgtatataccttgtcaaaaccactagagtacaccagaacatggtataacaaacagaccttttacttaagatgtcaaatctcatgataaccaaaaaattctaaaacaaacatacaactagctcaaacttactgttattgaaatttcaagtgtaatgtttttattttccaactgcttcacgattttggcagtcttctttttaatcataaaatatgtttaataactgaatttt

SEQ ID NO: 3572 - DNA, 425 bp, Homo sapiens
  I.3572 (AI198669)
tttccatactctgtgacctctgtattaccctattagcagtgaacaaaatgccgatcatcaaacaaatactcctggatcacctaatgaggaggcctctgggattctataatcttaggtgttgtgtctgagtgatacttccatctgatctcatcaatttcaccatcatcaagtataaatgaagccagcactggaacctgagaaaaatagttcttagccaggatatgtttgtgtttgatcttgtgaataaatgagcgttcatatccctcttcaatacttgttagcttgagatgagcagccgcttcatctttggtaagaagaatgcagttccagggggaccactccagggatttattccatctgaccatgaccagatcactgagattgtcgcaagcactgaggactgactgggacgcccagatgttctc

SEQ ID NO: 3573 - DNA, 449 bp, Homo sapiens
  I.3573 (AI187418)
tttgatctcaaaccttatggagtttattgttatgctcttttttttaaaaaaaaaaaggtaactcacaaatcaacagcaacataataaaatgattccaagagttatgtggtaaataagacatataacagaaggagaattgacatgcataaaagggtcagaactgctttccttagaaaagtgtagcagacctgatatcagagagaaagaaagcactaagcaggaagaggtaggtgaggtggggattcaggcacaggggccctgcccataaggcagcatgacaaacctgagggtagaagggggaagcaaataaaaactgaggctcaaagatagctagggcacagagaagaaggaaccccacagatcacctcaagactttagggtttatcccaagaatagcagggagcatcaaaggaggccatcaaaaaactcttagggaggctgattcttgt

SEQ ID NO: 3574 - DNA, 455 bp, Homo sapiens
  I.3574 (AI187401)
gcgggagactgggagggagagggcctgtcggcggcgctgcgcgtggtggcgatggccaacagcgctctcaatcccttcgtctacctcttcttccaggcgggcgactgccggctccggcgacagctgcggaagcggctgggctctctgtgctgcgcgccgcagggaggcgcggaggacgaggaggggccccggggccaccaggcgctctaccgccaacgctggccccaccctcattatcaccatgctcggcgggaaccgctggacgagggcggcttgcgcccaccccctccgcgccccagacccctgccttgctcctgcgaaagtgccttctaggtgcttggtggtcagagacgggtcatctgtcgctaaggcgcaacctccagggaactcgaggcctgccagggtctgtccagatcacaaggggcaagagagtctgtgagagagtgacactggag

SEQ ID NO: 3575 - DNA, 388 bp, Homo sapiens
  I.3575 (AI184594)
tttttctgagtcaacacatctttattaaacacctgaagttactgggaggaggccatgatgctggacacacctgtggggaaggagagaccagactgaaggtgagaagggcgggagacaaacctccagccacctgctacagcacccacaattctttagggggagatcataaactccttccaggccccagttaccatcacaaaggcagtttggtgcagtattttaaaaagatggactctggagcaaggagggctaggttcaaatcccagctctgccaattaacagctgggtcacttggacaagttactgaacatctctgagcatcacctaccttcctatctttaagaagcacctaccttataggattgtaggaccaaacgaggtgcttaga

SEQ ID NO: 3576 - DNA, 423 bp, Homo sapiens
  I.3576 (AI150579)
ttttttgtggttgaatgaaatgcaaatttaattggagaaaaaaatctagatgatttcatcctgtattcagggacaatccacttctgaggatctttctctttctcctccctagcccccctatattctaaatcttagtccagtcttgagtaagctgtttcactatatctgactgggagcaaggtatttctagtctttccatgtggtttcaattacatcacactcagatacaccctgggtcccttcattgagtgtgactactctggaaaagtgtcttgtaacttcattttagcagaaagtaggatttgctatggttttcctgacaggaggctgagtgatggactgaatctagcatgagggaggaataggagaaagagaaattaatgttaaccctctggacataatttgccaaacagagaccaaagc

SEQ ID NO: 3577 - DNA, 371 bp, Homo sapiens
  I.3577 (AI150518)
tttagcaataaaatattttttaattaaggcatgtacttttaaaatacataatgctattacacacttagactatagtatagtgtaaacataacttttatgtgcgctgggaaacccaaaattcatgtgattcattttcttgcaatatttgctttactgtggtgttctagaactaaatctgcaatgtttccaaggtatgcctgtaagcaccgttgaatttgaccttcttggtagcattcagatccattcacatctctccatcggtcttaccaaaatcctggtttagctcttcaatgtcttatctggattaacactacagtttcttctgtcatcttgcctctaggcttccatttcttctcttatttttttcacac

SEQ ID NO: 3578 - DNA, 439 bp, Homo sapiens
  I.3578 (AI150493)
  misc_feature (417)..(417): n is a, c, g, or t
tttgtgatgcaaagactttattaacttcagttatcctatacagtaaggacaccagtcgaatcatactgtgttaaaattagaagagatcttctcccaaattcttcattttacaaataaagaaaatgaggcccagagagagagtaaacagtcacattcaagatgtcagggctagcctgataggaacaaaatgagaaatcttgaaaggagagagcgcacaactgtagacccaccttgcgtgcaggggcagtcatccctgggtatctgtggaagactggttccaaaactctcacagatagtaaaatccttggattccccagccccttaagttgatcctctttattcaccagttctgcatcccatctgcagataggaagggctcactgaggtaacaacagaacaatgcatgaatcctcattntatctacatgcattaacattat

SEQ ID NO: 3579 - DNA, 466 bp, Homo sapiens
  I.3579 (AI150418)
ttttttttttttttttttgaggctttttcatggttcttggaaatttcttttgaataagcctaaacagtagtgtgaaagatatactgacttcctgccgaatacccagatactccattaatgattgcattatcaaatgtttccccttcaatccagctcaaagtgtttgtgagaaatacatggggaaagaatgagcagggtggagtggaaattggaccttccggagaagccccaggaagacattaccactggaattcccgtcccaggggaaaggcccctcccaacagacttgattctggttttggtctaccagtttcaaccccagcacagcttccagaagtctttgcgggaattcagagctgatttaggacgagtcacctatcgagaggacgggaagctttgctggggacgcttgtctgtccaagtaagaggaggccatgtggctgtgtgacagatgtgttttgtttct

SEQ ID NO: 3580 - DNA, 421 bp, Homo sapiens
  I.3580 (AI150359)
tttttttttttttttttccctcaaatatgatttatttagcaatcacatgtaataagaaacacagaaaaatacagcataataaaaacacaagaattgtaggttgttatgttaaaaattaaataaaagaggtttcggttaaatgaaaaggcatataaactgcaagatatatatgttggggagctgaggttaaaaatgcaaagcaggacattcacggtgcaacagcctaacctatcaatccctctcttcagatggcctcaacagtaatgtttgcagaaagacatgcacagataacctccactctgactttctactaattagtgctcagtagtagctgtcttacagagaggaaaacaaaggaaggaataaatataaaagcttaaaagaaaaagaaagaaaaggagggagtatagcagatagagag

SEQ ID NO: 3581 - DNA, 516 bp, Homo sapiens
  I.3581 (AI150337)
  misc_feature (514)..(514): n is a, c, g, or t
tttttttttttttttttgtgttaaaatatttattcttaaagttcttaaagttggacatgttcaaggcttaaaaattaacttcaaaaagtcaagccaattcacaaacacctaaattaggtgaaggagaatctctcccaactttaaaatacacattaaataccttcccctcatgctgcttcattattttttataattatctccagttgggtgtaggctatgtcttcttagaccgacagaaaatttggcttttctcagaatttatgcagaatagcagaggttaagtgttagagtttggaagaggtcagttgttgtataagcagcttctggatcatcttccagcactctggagagaccaaaatcagaaactttgcatactaagttgctattgaccagtatattccgagccgctaggtctcgatgaacataacccatatcagaaagatacttcatgcctgatgcaatgcctcggagcattccgaccaactggatgactgtgaagtggccatcatgcttncg

SEQ ID NO: 3582 - DNA, 436 bp, Homo sapiens
  I.3582 (AI150334)
ttttggactgtacagtacgttttatttccctctctcacagttgacagtgcagagcccagcaggaaaagtctccagcgggtaatgagtcaagacttcccatcttgatgcggaagaaggatggaccatcctccacccccaccttgtctcccaggatgagctgagtgtgctcagcttcatgtctggtgttggttgccttgctgaggccctcggataaagccacacccttgtgaggagggagcatgaggccggtcacattctaggtttggtcatccaggaaaaaggcagatcctcaactggaaacccaaactccaatagatggccttgggcagaagccaggagtccagacatggaagagtttggaggagtcagaagaggcccccagagagtggaggagatggccttggcctcacaagagtaggtcaggcagggcaggcct

SEQ ID NO: 3583 - DNA, 393 bp, Homo sapiens
  I.3583 (AI150305)
  misc_feature (318)..(318): n is a, c, g, or t
tttgcagttgggaatattttattagtgagttcactttgactgtaaatggcaaaaacttaccagagctagcttaagaaaatggggaatttagtacaagaatatgacgatgtttcaaggaaccacagggcagaggttcaatcaggccttggcagggagcttttgtcagaagagaatggagcatcatcagttagaagagaaaaagtcttcagaggtaaaggcacccacatgtgtgtaagtcaaggagatgatgaaaaccaggcacacatggactaaagagtgtcatccccgccatcttgaattctctcttgatgttcacancatagccttgttatgagttttctacttttagattcaacccaggaggctttccttatttcttcttacataagactc

SEQ ID NO: 3584 - DNA, 451 bp, Homo sapiens
  I.3584 (AI150243)
ttttacaagaatgttaattgcagcttaatttattatggccccaaactcgaaacacccatgtgtccaacatcaggagaaaggatgaacaattgcttcattcatacaattgaatacaattttgcaataatgaactaccaatacatgcgacagcatggatgattttcaaaaacatgatgctgagtgaaagaagcctggcacaaaggttcatcttatatgattccatttacataacattctagagcaggcacaattaacctatagtgatgaaaattcaaataggtgaggcaagattgactggaaagaaacacagaactttctgaggtcatggaaatattctgtatcttgatgatggcgtaagttatgtaagggtatacatttatcagaatttaacaaactgtagacttacaatcctgcattccacctatacaaagtataccttaatgtctccatt

SEQ ID NO: 3585 - DNA, 325 bp, Homo sapiens
  I.3585 (AI150046)
tttttaagcaactaaggataaattgattaaatttatttaaagtaaatttattacatttactaactagttatttattaaagtaatccaattactttacaattagaatttgacaaaaaaaatcattacaacaaagaatgttctgctaaagaattattctttacaaaatttggaacagaaaaattcaatgtacttttatcattcaaaagatagtaccatactttccaagatcaaatccacattctgaaacaaaatggaacaagtcaatttcaacaagaaaaacctcccctcttctcactattctaaacttttattatataatacacta

SEQ ID NO: 3586 - DNA, 483 bp, Homo sapiens
  I.3586 (AI149857)
tttttttttttttttagtaaaaagaagaaagtatcagatgacactacatgatattttactatgaaaatactagatgtcacttgcctataaaatgggactatcaggtgtatgctgttattttctgtatttgtcagaggtttgttttgttgttgttttttaagagacagagtctctgtcaccatcctggagtatggtggcatcatcatagctcactgcagccttgaactcctgcactcaagtgaccctctctcctcaccctcacaagtaactagaactacaggcacatatcatcaagccaggcaaatttattttttgtagatatgggggtcttactatgttgctaaggctggtctcgaactcctggcctcaagcaatccttccaccatggcgtcccaaagcactggcattacaggcatgagccaaggcccctggcctatacttttcagagtttttgagaaattgaaaaaataaaataatgtaggt

SEQ ID NO: 3587 - DNA, 507 bp, Homo sapiens
  I.3587 (AI149818)
tttaagtagtaactatattattgtttattaatcttaaatatctaaattatcaaaaacaaaaaatacctaatcatcaagatagaagaattgcatttaacatatttttaagtgaatccttagaaaaaatccttttatttgttaacaccacaaagccaacagtcaggtagttaaaaaatggaataataaccaagatgtttctataaagagccacccatcctgcaccaatcttccctgtcctaggtgagtgtgctggtcgtggtggtatagctgtgtttacttgaataattgatattgacaattggtatgtgtgttgtgagtaaactttcaaagaaaaaaagagggtaatgacaaattagggctaagaagctgtttttggcatgtgcagataattcctgcatagattcaaaataaaaaataaagatgaagaaaaaaatctaaggatgggggaaagaattttagataattaagaacagagatgaaagaatgtccacttaatagactgcgaac

SEQ ID NO: 3588 - DNA, 509 bp, Homo sapiens
  I.3588 (AI149817)
tttttgcgacagggtctcactctgtcacccaggctggactgcagtgttgtgatcctaactcactgaagccgtaaccctctgggctcaggtgatcctcccatctcagcctgggcaacatagtgagacgctgccttgacaaagaatttaaaaattagccaggagtggtggctcatgaccttagtcccacctactcaggagactgcagaaggactgcttgagcacgggaggttgaggctgcagtgagccttgactaggccattgcactccagtctaggcactagagtgaaatcctatttaaaaaaaaaaatctgcacacttttacattagcaaggccatttctaggaaagtatcctgaggaaacatttcagattctaaggaaggactttcctgtaggtgtgctgtttagaagagctgaacgctgaaaactgtaatgcccacaagcagaggactgggtcaaaatgagcgtgctaaaaccatgccaaggaatgccacacagtggtccaaattac

SEQ ID NO: 3589 - DNA, 495 bp, Homo sapiens
  I.3589 (AI149647)
ttttatgatcaaattttattgtttattttataaaaacagtacacagtgaaacaaaagaaaattattcttctctcagaaagtaacgagtaggtcagccttactgttaagaggataagtagacatcatataagcttgcagcttacaaggtacatgttagcctgccacagtttctttgcatcttctcatgaaaccacaagaatacaggattgttccaaccacagacgtgagtttactgttttcttgtttttgctttgccaggccaaagtcagtaacggttactttgtccttatcccccaacataatgttgtttggtgtcagatctctatggacaatcctcttctccttgtgtaagtatcgaagagctaagcacagctgtataaatattttccatagtctttcttcagtaaaatggggatgtttttccttcaaagaactgaaatgctctccaagcggggctccttctatcagctccataactatgtacaacctatcatt

SEQ ID NO: 3590 - DNA, 229 bp, Homo sapiens
  I.3590 (AI250034)
ttttttttttttttttttacacattaacagtcttctctttttattgaaaacagtttgcattatttgtagtgaaacaaaaatcatgccttgatgaatgtaattttaatatatccatctcttattaaacaaattatacatttaattcttggcacctatatttaatatcttttatactaacaaagattacatacacgcattgaaggaagactacacactcatgtctaagcct

SEQ ID NO: 3591 - DNA, 376 bp, Homo sapiens
  I.3591 (AI248068)
ttttttttttttttttaattgctctctttaaactttacttttctcctcttccagtgtttaggaacagtgtttaatcccaaaacgtacctagactcaaaaatcaggccatttatagttgtatctcttgatactgcataaattcgattgtgcctaaaaagttttccaaatggtccattcaaaagtatgcttatgaatgtatagttcctgttgtaagatggctacattttcatgcaaataggatattgttgcatgatcttattgtcagcaaaaagaaagcccaacatgaaggtttcttttttctcttgcatgtttctcccatagagtatctacatgagggaaaatggcatctcaccccttgaaaaggtgtagaacatcc

SEQ ID NO: 3592 - DNA, 413 bp, Homo sapiens
  I.3592 (AI247957)
ccataactaaagaaaaaaacaacttccaacacaatttaatgggcaatatttttgatcttctccaaaaggatccataaatctcttctaaggagggatgttttaaaatactgtatatgctgtttgtattgttgtaaggaggtttagaatattttggctactttactactgtagactgtatttttaacctaaacactgatttatttatttatttttagagatggggtcttggtatgttgcccaggatggaatgcagttgctattcacaggtatgattacagcctcaaattcttaggctcaagcaatcctcccacgtccagagtagctgagactatacacatttgtcactgcaccaagcttaacttatacattaaaagattatctttccttcatcctttccacctaaaaataattct

SEQ ID NO: 3593 - DNA, 473 bp, Homo sapiens
  I.3593 (AI247361)
  misc_feature (439)..(439): n is a, c, g, or t
tttttgctgtttctttagcagttttattggaacatatgagaactgacagtctctgtggggaacgagatatcatgttgaaaaaaaatctggttttcattacacttctttcaagaaagcaacaggctgcccaacagacctctcattgattggaagagaaatgagcccagagcctcctaacaacagccttggagtggacaggatgatgaacagtgatgccaaagactcaggatctgaaggcagacaggcctggtccaccacctgtgtctgccatttgcaggatgagtgaccttgagtaggtcacctcacacctctgaacctgaattctacatctgcaaaacaggaatgatgaccctgactgacagcctccctgtgaggagtaagccatacagcatccctccctccttcacgtgacaaacttttcctgagtcctgacctcggnggcaggagctggagatactacactggattagaaa

SEQ ID NO: 3594 - DNA, 438 bp, Homo sapiens
  I.3594 (AI247344)
ttttggttttttatttatatttttattcctaataaaggcctctggagtatctctgctttgtgactttaaactgttcacggtacctttctgagcctccgtttcctcatctttaaattaattctgtctaccacgaggggagaacatggctggaacataatggaccatggaatgaagcgggcttgcatttgtatcccagtccaaatccaactggcagggtaaccttggccaagacacgttatttctctgggcctcagtcgtctaatctgtgttccgggcagcaggaacagcaggtgcaaaggcttggaggtaggagtgtgtccacttgttcaaggaacagcaagggggaagggtagttgagatgcatcacccaggccgtattgtttgattccctgcctaggatgttagctcagctggggcagggaatttgttttgttcact

SEQ ID NO: 3595 - DNA, 519 bp, Homo sapiens
  I.3595 (AI244486)
tacttggtctctgaaatttattttcccaagcctgattatgtatcgtctttttctctgttagctggctggaatgatggcccctgtttctaggtgtggtaagcacgatataaaatcacaaaatggtactaacagagacctgtgtgattatttatgtcaacattttcattttccacatgaggaaaccaaggcacagataagagaaacttcatgcttccagtccagtgctgtttgtattatgccagattcatcttcgactctaagcaggatcggatgtggggtgtgttgtgaagtgcaggagaccagatggaggcaagccccccttcatgcctgtggcgggaatatataaaagcctgctcgtccgaatcttgcctcgaggccaatccctataggagcgataaatcgaatctgcatactgttcctgggaatgtatccgtccatccaacacatacaaccgaacataaggtaagcccggtgctaagaggactataattaatgtggctctgccctttcacggaaaac

SEQ ID NO: 3596 - DNA, 401 bp, Homo sapiens
  I.3596 (AI243166)
ttttaaaatgttttatttttatttcacctaatatgtacacatagttatataattttgcttagtgaaaagttcatgttttaggttccaagaacttggccaaacttgaacgctggagagaagcgaaattcactccctagctctggaaaggggaatttggtagaagacggatctcatccttccaatttcttcccctcaggtagttttctgtaaataattttatgaaaagtatagcaggattctctgttccagtggttatagacaatgggattgacaatcaaatttgcatgtgacaagagaatggtcatcttccttgcccacttgggcttatctttagcctgagctagctgaaaaagagtgacacagtccatggtgcgcactggtagcgagcacagagcaaacat

SEQ ID NO: 3597 - DNA, 451 bp, Homo sapiens
  I.3597 (AI239477)
tttttatgtgtctttttttgtttaatatataattttctaaaaagtaaaattatgactctactgcaaatataagataaacacatatcaacaatgtttttcaactcaataagcgatgagggttccagtaaataggttcaaatccttgcaaggaacattaaaggagctttacagccagtgttaaagtcagatcgttgggtacttacagtactggttagtatccaacatagccagaagctgtcatctttgtgagttctctcttccacggcacagaaataatgtgtttttctactgtacaaaatatttatcttttctactacttctgcacataaaaatattgctagtcagaaaagaccaggattgcactgaaaaaaaatctcagtaatatctctcacctgtattcatacttcttttcttcctttatgaaatatctttcaactgcattttctatctg

SEQ ID NO: 3598 - DNA, 326 bp, Homo sapiens
  I.3598 (AI202270)
gttaataaagctcgcttggggtcagattgctaggaccaaaaaggccctggcagacagcctagtccattatatagacagagaaactgaggctcttggggcgaggcaacccgccagtgccctccggtccagcccaggctgggacccgggaattcgggcggcgctcgcctgctgcccccgtgtggccgccgcgggcgctgcaggcgggtcctggtcacgcggggcggggctgcttctcattgccaagcccaggcgggacgtggggagcacccatagggagaaggcctgccctggccacctgagactgcgactcgaagaagtgcctgaaa

SEQ ID NO: 3599 - DNA, 401 bp, Homo sapiens
  I.3599 (AI192051)
tttaattattcctggaggtctagcagatctttttgcaaacagtatatgcgctttcagtgctcactagatgcaaggatgaatgatagggccacccagaagtttcagaattcctgagctccctacacaaactagcactctccacagtccctttccagttattaaatgcacccgttccttatttttcacacaaaagtatgagaaaaccaaatgtattagtctattcccttgctgctataaagaactgcccgagactggataattcataaaggaaagagttttaattgactcacagttctgcagggctggggaggcctcagaaaacttcatggctgaagggcaagcaaatgtgatagcagaaaggagaaggagcaaaaggggaaaagccccttatgaaactacca

SEQ ID NO: 3600 - DNA, 273 bp, Homo sapiens
  I.3600 (AI192048)
tttattttttgagcatttttatttttcatgttttcagaatgagcatagctttgtcattggaaaaaaataaaaaacctttaacagaagaagaagcaatagcagcagcagcagctggtacccctctctgagccagattaggggaggagacaggtcaccgaagtggaagaacaggacacacaaagcgcaggaggagagaggggagagaaggtggaggcttctggagaaggatgaggtcagagctgctgcactgaacagctccagaggacaaaggtc

SEQ ID NO: 3601 - DNA, 283 bp, Homo sapiens
  I.3601 (AI191992)
  misc_feature (246)..(246): n is a, c, g, or t
ttagtattagccccgaacatggttttattggtggcaaaaaaaaaatttttttaatgctataatgctgggaagggaccaactttcaagaccagaagcaggcttctgaggccaagagtcccagcttgaacataaaagccagagacaggcctcccgttgggctggtatttgaggcagctcctcttcaactgctgggctgctgggagatttctctcccatttccgaaactctgaaatgatgttccattantctccacgtgagagtcaacagcggcagaaaccgcaac

SEQ ID NO: 3602 - DNA, 277 bp, Homo sapiens
  I.3602 (AI191967)
tttcgttggcctcatgctgtgtttattaggttttattgtttgggaagctgaatctcctctctatcaaaaggtaaatgtttttgttttatcattttggctaaataaatgactattttatagtgacctgtggttctattttgtgataatcaagtatcttaacactgatatttggcaaactttctaagagcaaaatttcaagttctaaattcagtctttttgacctcaaactaacttttttgaatattaaattctctgaagcccaagagagacaatttag

SEQ ID NO: 3603 - DNA, 350 bp, Homo sapiens
  I.3603 (AI188072)
  misc_feature (290)..(290): n is a, c, g, or t
tttttctgagttagaagatctttaatgacccctcccattaaaaaaactttggtcagatgttgacctctttggctaacaatctagctttcttcctcttccaaacttcctgacagactgtctatataccctctgtttccttgaccctctttcactctcagggcagccagttgtttggggcagcactgcagaatcttggagacaaatcctggtttctctgtttactctgtatgtgatctgggaaaattcttcagtcactgagatgcctcagtttcctcttcataaagtagggntcagtggataaaaggaaggaatacatattaaatgtataaaatccctgcctgctcatagta

SEQ ID NO: 3604 - DNA, 319 bp, Homo sapiens
  I.3604 (AI188041)
tttatggatttatttttttattgatagaaaagtaagagcaatatatgctgagtggaaagaaaaatgtcttataatccttattcggtcattcattaggacatttacgtatggggaagaaccaccagactcggcaatgactgtaattacgtagaggtgtcatcttgtgaagaggtcagcatggctcctgcctctggtcgtcccatgactaccaaacaccacggcacatctgtatctatgtaagaaacctgcacgctctgcacatgtgtcccagaactgttggaggcaggcagtccttccaatcaaaatatcctgcataaat

SEQ ID NO: 3605 - DNA, 324 bp, Homo sapiens
  I.3605 (AI188025)
  misc_feature (288)..(288): n is a, c, g, or t
ttttgcatttggaaaggatactttatttcttacaaagggttacagcctacaaggtggtcattctgcaggctagaaagcgtaacctccagcaaagaccggaggcaggcacttctagggaaggaagagtaagacagaaatttaaattgaatgggttggccaagtatacatattcaacaggctacaggtggattcatgaatattcatgaaggcagtcctgatgcatgcatgttacaccttggggtggaggcttaacatttaaatgtattacagttaggccctatacatganaaggtgaagcagtaacacgaaggcacacaatgcacc

SEQ ID NO: 3606 - DNA, 316 bp, Homo sapiens
  I.3606 (AI187805)
tttgaacaacaaaaacttactgtctttatataattcatttggcactgttttatggcacgacatcattgatcaactatatttttgcttctatctcaaacctttctcaggccgtgtttttgtttttggcagtgttcttgttgcctagcacagtgccatctcacttatttgttgattctgtttccttaaaaacaaagatgagaccaattcaaatcctcattactgcgggcagcaacaaatcatccaaactctggcacttccagttctttcgagctttcctaccaggtcgagggggttgtcttaaaacttgagggagatg

SEQ ID NO: 3607 - DNA, 253 bp, Homo sapiens
  I.3607 (AI183820)
ttttgttttaatttaatatatttttatttcctgatacatttggtagaagaagagcttaaagaggaaagaaatattttttctcaagttaaatggtggggtagccaaggctggttcagagaatcctcaatgttttcagtaccacaggctccttctatctttctttgcatttcaacatgctttatgtagctccattgatcaagatcggctcctggttacaacaaggagtccttgtaacttcaaccaccatatcttc

SEQ ID NO: 3608 - DNA, 301 bp, Homo sapiens
  I.3608 (AI223256)
tttcggcctacaagaacttcctcttgttgctttcacagacccttagaacaaccttcagagagtagactggacagaacagcccactacacatctggactctatggtacagcccgttgcttctgggttacacacctgtacagcatcatactgtactgaatactgggggcaccttaaatttcagaaatgtatggcttttttcttttagaacgaattctcgtcattaatacatgacagttattttaagcggtttatagatgttaactgaatattgtaagtgatatgctatcgtgttccccattta

SEQ ID NO: 3609 - DNA, 248 bp, Homo sapiens
  I.3609 (AI223167)
ggttcacggtcacctcgctgccccccgcagggcccgccagaagccctgacccagagtcccgccggcattcggtcgcagacccccgccacctcccgggggaagacgtcaaaggagctaataatcagaggctgctgaggggcatggatatgactgcatccttgtctcttctatggaggcaagacgacttttataagttctatcaatgaagagagtcctaaactggagtaaagcatactggatgctagacc

SEQ ID NO: 3610 - DNA, 380 bp, Homo sapiens
  I.3610 (AI221293)
tatttattattagaaaccatccaacatgaaatatgaattattaaaatgtttttctccatgtttcaaaccagaaacagtaattcagaatgcaactagcatcctaatttttaaaatcaaaataagatgaccagattaataaaacttagcattcacagtattcaatctagaaaaaatataattaatagaatgttaaagccaaaagaacatttgaaagacagaaagagagaaggggaggagagaaagagagagggaaaagagaaagcaagaaagaggaggaggaggaggattgagagatggagagtttgagattgagacttcttatgaaatatattttaacggcaattactcattaacaactgtgcattgagaatatttgaaca

SEQ ID NO: 3611 - DNA, 435 bp, Homo sapiens
  I.3611 (AI204066)
ttttttccaggttcaggatctgcttctttggggtcatgacagaggcgagggaaggagtgaatctggatcagcagtgggtgctccctgctccctcctccccagtagcctctaggccagctgctggtccaactccgaaatccaccacccctcagccagccagccctcccaggagaagctgaagtcctttcctgtgtgtgtgagcgccaagctggagcccaaggatgacatggaggaggcgcttgggggggtcccccaagtctccatgctgctcgtcaacatcagagagatcctttgtagcagaaaatggagtcgcagggtgtgggtgcaagactcagcctgacttaatggggtcccagggcatcacactcaggtgcagcacagaggcgggagccagaaggtgaccagggtggcttggctcggtggcctgggacccct

SEQ ID NO: 3612 - DNA, 472 bp, Homo sapiens
  I.3612 (AI185721)
tggtaagactttattttttagtcagttttagattcacagcaaaattgagaggaatgtaccaagatttcccagatactccttttctccacacatgcataactttcccccattatcaatacccctaccaaagtagtacatttgttacaatcaatgagcccacaatgacatcattattacccaaagtctatagtttacattagagttcagttttgtattgtacattttacgggtttggacaaatgtgtaatgagctgtatccaccattatagtatcacatagaatagttccactgccttcaaagtcctctctgctctgtctattcgccacttcttcccccagccttctcgcaactagtgatcttattactgtctacatagttttttactttcccagaatgtcatatagttgatatcagccttccccaactttgttcttctccttcaatactgtgatagctacctattctaggtct

SEQ ID NO: 3613 - DNA, 268 bp, Homo sapiens
  I.3613 (AI185575)
cacttaaaatgagtgcattttattgtatctaaattattcttcagtaaagttgatttttaaaaaacatgcacacaaatataatttacaaactataacattagctcgtttatgtgtaccattcagtcacttttagtgtattcagagttgtgcaaacatcattatctaattcaagaagctttgcattaccccaaaaatgaaccctttagctattaccaatcactcacagttccccctaatcctgctagtcctaaaaaactctaacttactc

SEQ ID NO: 3614 - DNA, 129 bp, Homo sapiens
  I.3614 (AI185323)
agaatccctgaaaatgactttaatgaataatttcagagacagttatgactttgggtgattactgagcaagaatatgaaaaccagatttgcaaagcgaaggcgatggtcaaaaggcctggcagttacttt

SEQ ID NO: 3615 - DNA, 462 bp, Homo sapiens
  I.3615 (AI184987)
aaaattgtaagtaaacagatgtctttattctagagtaacatagcacatttgttatctcaccaaaaatagattcttttctgatgttgtagagtagagaatctgaaaccaacagtgtacgtgtaggagcttcaatccattcaactggtggcatcatatacttcacatccttaggactgcttatgtgatgtgcagtcaaggattgggcaggtcatatatcatgtcactccatccttcaatgccttttgatctgtttagcagctccttgtgacaaccttcagttctgcccagactccttcctgtggatggggagagttgctgacacaggaggcagagtagaaacgcagcagcttgtgctctgccctcctccttctccgggacaccctgcctcctctctccaggcctccatgggctccttggcctctgaattcctgtagacatgtgattaggatgcgtgggaggcgc

SEQ ID NO: 3616 - DNA, 487 bp, Homo sapiens
  I.3616 (AI148441)
tttttttttttttttaggaagtctaggcgaagtttatgtgagaattctttacactaattttgcaacattttaatgcaagtctgaaattatgtcaaaataagtaaaaatttttacaagttaagcagagaataacaatgattagtcagagaaataagtagcaaaatcttcttctcagtattgacttggttgcttttcaatctctgaggacacagcagtcttcgcttccaaatccacaagtcacatcagtgaggagactcagctgagactttggctaatgttggggggtccctcctgtgtctccccaggcgcagtgagcctgcaggccgacctcactcgtggcacacaactaaatagtaactatggtgagctccagtaggcctcaggggaatggggccgtcagcaccagaagtacagtattttcaaggctttgcttctgcacctcctccttcctcctctgcatcccagcctccagaggggcttaggcagg

SEQ ID NO: 3617 - DNA, 396 bp, Homo sapiens
  I.3617 (AI140679)
ttttattttataccacatttatttgcaatttggcccaattcactgctggaaccagtggcggttttatttttctgggttaccccccctactctgggctccagtattcatttggacaaatgtcgcattatgtaatcaaagtataactctgggccagttacttcttccctgagtcttggtttccttctctgtagaaagggaatggtaatagggatgtgtgaagtttcattattgtgccccatggtgcccaccacagcacaagcactttatgtcaacttttattagcattttctttgtgcaaatcttttctcactaacatttatattccctagtcaagtgtagcctgatgttacaaccatcacaacaatgtaatcgctatcaactcctcatcctttccat

SEQ ID NO: 3618 - DNA, 438 bp, Homo sapiens
  I.3618 (AI139893)
tttgaggcttagagagtatttattttattgatttcctaaatgctttaagcccaagcacggagtccccagaggaacacacacgcccaccacaatgcatttctcaggaggtgattcaggaacttagggcaacaaatatccggcacatccgctcggaggcggaggcgagcgccagagcccccggctaagtccagagctgtgggttcgagttctggtccgcggggaggtgctgcctgggtcctcctccccgtccgcgttccttcccagcctcagcccacggcaggggtgcagccccatctttctgctgtaggctgggctacagggacgaaaggatcatggagaaaggtccttgtcttctcatacagagctggccgattggtgggttcagaatcctttcaccaacaatgactccactgggaccttgaacttgggcccgagacc

SEQ ID NO: 3619 - DNA, 242 bp, Homo sapiens
  I.3619 (AI138826)
tagacatggggtcttgatatgttgcccatactggtctccagctcctagcctcaagtaatcttcctgtctcggctgcctaaattgctgggatcacaggtgtgagccaccacgcctggccaataggttgaatcctaaggttaagaaagaattagtagtgttttgaactagtaactttaataaatagaaactaattgtttactccagaaataaacttccaaatagtcttttctgtgactgaaaac

SEQ ID NO: 3620 - DNA, 605 bp, Homo sapiens
  I.3620 (AI125864)
  misc_feature (437)..(437): n is a, c, g, or t
tttttttttttttttaaggtgataagaatgtttaatttacttttcatagttcatattttctgaatttttataacagcatatatcactgacaaaatattgaaaccatactttaaaaaataaattcagaaattgttttaacaaaataagcaggaaatatataaaagcaggtaataaaagtcatcaacgtacacagtgtcttaataaaagtcagcagttggagtagaaattactattctaaggtttccagaaaaacctaaattagcttatgaattgctatatttagaaagaatatgaaacagaatatcagcaatgtcattgcaacattgtctgcaatacattaaatcagtttaattgttccttaggcatctgatctaagaaatttttcagaggtgctaagtcaactttaagttaaattatgaccaataagagaaacattntaactaatctttatatttttagaagacttatatataaatccatcttgtgatgtagagtatttcttgctttagagtattatttcaaattccttcaactaaaaataatgactataatttaagatgatcataggatgtgatctggcattgattcattttatcagtccattg

SEQ ID NO: 3621 - DNA, 350 bp, Homo sapiens
  I.3621 (AI125861)
gcggccgccaatttttttttttttttttttttttaaaaatggaagtttatttcttcttgaaaaagtctgagctgctgtagtggctttgttccacaaagtgttcagagtcccaggcttcttgtgtattgcttctcacactccacgaggtactgcccttaattgtggagtcccaggtgtctcaccaccatggatgcgtttcagccagcaaggcagaaacaacagggagaactctccctgtcccttgaagtgtgcaatccagaagttgaatgcagtacttccatgcaaatcctgttagctagagcttagtcacaggacaatacctcactgtaagggaggctcagaatgtcgtc

SEQ ID NO: 3622 - DNA, 352 bp, Homo sapiens
  I.3622 (AI218212)
tttttttttacattagaaaattttttatttaaatggtcaacattttgtagactaattatagtttgctcccatcccagaatacatcttgggagtagataacttatcaggcctgaccccacaaacaactgcaggggaattctgacggagagttaggtggtgaaccctgtgatcagagaatgcaaaatggacaccaggacactttccagccctgccgtgagtagaggtgctgagcaataccacctgcaagggtggggacatgatgaaatcacagagactatatgggagttagcctgggcaggcactataaggccagtgcacagcccatacaacagccctgaatggcccatgcaga

SEQ ID NO: 3623 - DNA, 361 bp, Homo sapiens
  I.3623 (AI217520)
aatatatattttcttcccccctttcccctgactctcctcctcccagcagcttaaaatgtaaatcatggttatatgaaaactctggaatgggtaagatgtgttactatcttagtacttttttccattatgagtcatcaaagtacagttttcttctcaaactgttttcatacccttattggcctaccacatgaggtggttgtattccacagtggattgtgcagttatagatgaagaactcagaaaagcactttgggatccttcatgatgaaaggcactgataaacatgaggtttgctaatgcagaaagagtgcctttaggagtctgtgtggggacagttttgtagcataaaccttacatgtct

SEQ ID NO: 3624 - DNA, 465 bp, Homo sapiens
  I.3624 (AI217376)
tttctccctcgctcttttatcgtcttctatcattggccagagccaactggaaaccaaagcagaaaggaaaaaagaaccagtaagggtagacagcaagacagggaaggcagagagtgagttcatggggcaaacagaaaacatccagcacctcattgtggataaaactcaagaacaagtgttctctcagctgcaagtgatggaaactcaagttacacttgctttagcaaaaatgagatgatttaccaactcatgccattggaaagtccagcagtagattgtgtaaggttcagtcgaggtgggatccagaagtggaagaactttctgggggaaacagccatcactgcaggccaagatgcacttcgctagacttgactggggctgctagctcctcccttctcctcaggctcctgcaggctacaggccatttccacacctgtgaatgggagagaactagcatccacattg

SEQ ID NO: 3625 - DNA, 422 bp, Homo sapiens
  I.3625 (AI204125)
tttttgatttttaaatttttatttttattttattgaattatttttggtgtgtctaggccaaggaaagaggagatcgtgggtggggaaacagactgagggaatcagaagcaccactgtccatccggaattaaatccacatcccagcatcttctgcaaatatttcactaattatttcctctcggaactcctcccctcgtgctccttcctctggtgaggccggcgctcccctcccaggccgcagcggacagacagggattgggttccgtgtgcctgccacaccaggcaggctcttgcggctcccaactaggcggccttgcactccgcgtgcattggccacacattctcgcctcctccacccgctccgacgccggttttcttggaagttaaatcttggaggattagtccacacccgctccctgggc

SEQ ID NO: 3626 - DNA, 332 bp, Homo sapiens
  I.3626 (AI204104)
ttttggaagaagtaacatgatttctttctttgctcacgacataaatgctgggtttgggggacaatcagatgtagaggtgccagtctcgtgtcgcccacttccagcctggggaagaaggctcacccctcagattccaccccatcctcccaggttatcccgataacctggtcccatgggtgggcctgtcctggggcattggtggcattctgggggcatgtctcttgctgtgccatctctgcctccccctggtaagagctctgtcttcctcttccttttcagtgcctctttcagcgacatgaagttaaacccaggtactgtgagtcctcgcctaa

SEQ ID NO: 3627 - DNA, 548 bp, Homo sapiens
  I.3627 (AI192170)
  misc_feature (409)..(409): n is a, c, g, or t
tttttttttatgccatcaacagtttattcttccgacacataaaaccacagcactctgacatgttcacagctacattctactcgagacttatgctaacaaatctgtccactgaaaactacactcgtggggagaaagagctctccaaatgagttacatttcacttggtttatggcaacgaccagagagtgtgccctttacacctacggacactgcactcgatgtgctcatccacacacacacttcccccgctcacacagtgtgcactgagcagcacggagagactggtcacaggaagctctctgcccaggcactctaaggcccacagcattgctctgccaggcaggcttgttgaagtggcccccatgctaacgacaggtgcacctcgtagctatcatgtcttcgtactctntgtaagcgatggagccgacgggttcaatggtcaacacactcagggggctgtactcgctccgcacacacgaaggccttggcactggaaggttcagcttctcataagatatactctggaccatggcgagcacaggagagcc

SEQ ID NO: 3628 - DNA, 447 bp, Homo sapiens
  I.3628 (AI191901)
ttgcagccaaacttttatttttaatgtgattaacattgttgcagaccaagaaggtaattagaataatggaattttaggactggaaaaacttcagtttttcccttttctgttttcttcttggcattcttgtttttcaacaaaacttcgtgatagttaatttagtaaacctgaaagaatttagcaggatttaatacctaatttgatgtctttatattcggattattttcctttgaaggaaactcctagtgcaagatttcttcctgttgcctgcccagcccatgatatctgtaaagtgctcttcatttcactttaaatctcactgtgtactgctgggagatgcagctcatgctatagtgccgttttttgggcaaggaatgaatgcggtaagttctttttccctaggtaagtccctcaaatacttctgggtcagtctcagctaacaagtct

SEQ ID NO: 3629 - DNA, 456 bp, Homo sapiens
  I.3629 (AI191886)
tttattcatacttgtatatttggcagattttattttttctcaaatgaatgaagtgagcttctaaaacagaaacaacttacagtgtttgttcccagtgataaaattcaagctttcatgggaaacttggaatttgggaaaacttgtatcaactacatgagcttcacaggtttctaattcttaatgattcatgttattaacaaatgtgatctttttgaatagtagaatgaaatatgtcaacgttgagaagatcttcacgactccgtgaaacaatattttcaaaatgaccaaagcataaggcatggataaaagctccattcaaagtatatgatgagactggtggattttcatgtaacaaagtacaaaaaggccattgagatggcactttaagtaactacttcttgtcaagtctgggtgcagtaagaaagaagaatgtccactattatctgtaaaggctat

SEQ ID NO: 3630 - DNA, 533 bp, Homo sapiens
  I.3630 (AI191762)
tttgtattaagattttaatagagagataatcatgggattggacaaaatccaagccactatgatgaaacacttaaaactcggaaagaatacattaacattgagagagaaagttggaaatcaaatagaacgatgagtggttgggaggaaagcaatgctgaatggaattccaaaatattgaccttagtcattatcacatctacttctagctacctctttttggaaagggatggtctggggatacattagaagccacatgttagaagtcaaaacaaaatagaattaaatacatatctttattgactaaaagggacatcatagtcttatcatattgtgggatatgtatgcagatttgtagaatgaaactgaacactaagaagctgtagggctaccagggatagaatcaagttgatggtgaatgaggcagtaaacaaggcaccagagcaacaaccctaagaaagaatatctggaattcatcaggataaaaaataagacttggcaatagcttagacgtgaaggaagtgctcacccaattt

SEQ ID NO: 3631 - DNA, 392 bp, Homo sapiens
  I.3631 (AI191603)
tttgaagcaatgaaagcacagatttattgaagcaaagtacactccacagagtggaagccggcttatgtaaagggctcaagagcgctgattacaatgttctttagggttttaagctattaataatttagcaacacccctaggtgccctttagaggcctccaattggttacaccctatgaaggacttacccaggatgaaacaaaaggctgaagtggaaacttctgttttgttataacaggagtgaggatgtggcctatatgctgtctagagctggctgcacctgctgttcttttgcttatgccttaaccgatgtttaccctaattccctattctcctgtctcaaaatgatttcagaggcactgtaagggaacaaaatggccttgcagagtgggc

SEQ ID NO: 3632 - DNA, 392 bp, Homo sapiens
  I.3632 (AI190760)
tttttttttttttttttttatttgggttaaaaaacacagataaggttttgtatactaacttttcacagaataatataaaactttcaatggttatgatgaaatctttgtaatatcacttaacaaacatggatatgacaaaatgtatagggagcgtatttgttgctgtacacttaggacatttccaattttctgctattgtaagtactactgaaatgtgcacagatgatttcctaaaatttattcttatgataggctgctaggagtgaaattatgatcttaaagaaatgaatgcatttaaggttttattaatattaccagtctgctttctgaaaacaacattataaaagaaatggaaactcttccaccagttctgacgtttgaagcctgttctg

SEQ ID NO: 3633 - DNA, 402 bp, Homo sapiens
  I.3633 (AI189827)
gaccattcttccatttattcagcaaacagttactgagtgcttactaggtgccagtcactcagctaagtgctggggctgtaacgggaaatcagacaaacacatccttgctctcatggagcttacattctagtagagaaatagacaaaaagccaacaaataaataaaatacagacttagaaaatgtctacaaaagaaatagggtgctgaggcagaaaatagtgtcacagggataggcggtagttagggttattagcaaatgcctcttggaaaggatgtaaaactcacacctgcagggatagcgacaatagtgtgctccaatgtgagcacccactatgtgccaggcactgtgctacacactttagaaacagtctatctcactgaatcctcacaacaactctatga

SEQ ID NO: 3634 - DNA, 422 bp, Homo sapiens
  I.3634 (AI189768)
attaagcaatcaggatttattttcttttctctctgtatcagccatggacacattcactgatgaagaaccaatcaacgttttgtgttcttatttatttttatttctgatgaggcaggttccaatcaaagagcaaagtcagagaaaataatcaaacagctcgcggtggccgctttgcctttgtttttattctagttttctttggtgggtcatttttaattctcttctttgttaaggggtagttaaatctgtatctttgtgctcagcaagagtggcccgtgtagttaagaaggcccagagagcttccttgccccagtgttcaatgggcagcttcccttctcactgaggaggagactttcagtggagaaagagaaatggaaaaactttccagcaaaatcagtcaatgcatggagaaacctgccttt

SEQ ID NO: 3635 - DNA, 489 bp, Homo sapiens
  I.3635 (AI188360)
ccaatgagaaataagtttgtttattcctgtagtgaaaaaaatctgtccttctagattcaagagcggttggagggcgttgtccgcatcctgctggttgtggaagcattttccctgcaaaaagttgtcgagatgcttgaaaaagtggtagtcggttggcaagaggtcaggtgaatatggcggatgaggcaaagcttcatagcccaatttgttcaacttttcaagcgttggttgggccaatggccagttgggtgttgtcggggagaaactggaccctttttcttgaccaatgctacctacaggcgttgttgtttggggtgcatctcattgatttgctgaccttccttctacaatgtaatgcttttcctggaattaaaaaggcttgttgtgttcaaaccagcacgcacccccccaagggggaccataacctttttttttttgtgaccaagttggcttttggaaagcgttggagctgttttttgtgccaaccca

SEQ ID NO: 3636 - DNA, 451 bp, Homo sapiens
  I.3636 (AI188224)
ttttccaataaaattttatttataaaaacaagcaatagcctagatttggcccacaggtcgtattttgccaacctctagagttcagaacagagctactcacaggagccagtccatgaactgtttattactagtccatgatgattaaacagtttgtaccagaatgtaaatctactctgtagctaagtacactgattagtttagttgctatttattttgtaccaagactttctcaatgaaggaagcagtgcattgataaacattctggtgcaaactgcttaatcatcatggaccagtaacagtttgcagactggcacagatccatggaccacactgtggagtatttctccagaacttttcctctgcaacccatccattcaggagctggatgacaactaattcagcagctcaattcgacacatttgatttagcttctaattgatgccaggccctg

SEQ ID NO: 3637 - DNA, 511 bp, Homo sapiens
  I.3637 (AI188108)
  misc_feature (441)..(441): n is a, c, g, or t
tttttttttttttttatattaatctatgcagttatctttactagagatctttatttcttcatatggcttcaatttgctgtccagtgtcctctcatttcagcccccaaggactcccattagcatttcttgtgagagcaggtctactggcagtgaatgttctcagattttatctgtgaatgtcttaatttatccttcatttttgaaagatagttttgccagagagagaattcttccttgagttttttctttcagcactttttcattccactgcctgctggtctccatggtttctgatgagaaagcagctcttaatcttattgaggagtccttgtgtgtgactaatcatttctctttttctgttttcaagattctctttgtctctgacttttgacactttgattataatatgtcttggggtgaagctctttgagtttatcctangagtttgttgagtttatccttggaggtttgttgagtttctcggatctgtagattcatttctttcatcgaa

SEQ ID NO: 3638 - DNA, 424 bp, Homo sapiens
  I.3638 (AI184715)
tttttgattcaacagatatttattcatcaccaaatatattccaggagctggagacacatcagagaaaagagacacccatgcttgtcctcaatgcagcttatgttctaggggagctcaggtcaggagcacaggagagcagccagagatggacatctagatttggggttcatccacaggagtgagagaattgaaggtttgggtctgggtgggacaacctggaaacgtgtaggagggaagagaagagcagagggcctttgatggaacctggggcacacaggactcaaggaggaagaaaagctggcaaaggaggctgagaatgagtcgtcatctcccgcctgtgcccctcttagttctgcaagctgtggcctggatctgcttggaagtgtgttgaaggacaggcatgcaaaggtcccagggcatccag

SEQ ID NO: 3639 - DNA, 351 bp, Homo sapiens
  I.3639 (AI184585)
tttttttttttttttgggaattttgcttatttaatatatgtcttctggttagctattcactccatttgggttttcatatcttctcttctaaaaagttttagtatactaccatcaactctacatgcatggatatgtaatggtggcaacagagtgtagattaaaatagaaggaaaaggcagaacttcccaaaaacaggtcaaacgaaggccggcatgaagactacaggaggatgtgcagccagggagaacgaagacatcttggcacgttcatctgcttggtacagatcctggtcagaaaacaccataagaactggagcactttataaagtcgccatctcccatgttaagccag

SEQ ID NO: 3640 - DNA, 398 bp, Homo sapiens
  I.3640 (AI184282)
  misc_feature (329)..(329): n is a, c, g, or t
attttcgtcttttttattaacattatatataaagatgagtccagtaagaaagcagaaatgagaaggctaggagggggtgggagatggctttgcttcttcccccccgggtgggactcttggagacctaccacgtctctcttggcccctgcacctcccacaaaacccaaatccagccggagcccacatctctcagcttgaaacacacagggagatccgtccaggaggaacatggccacataaataggaaaccgcagcagggaggaggctgcttctctctgttgctcttaaaaaaaaaaaacttactatatatttatatatatagctacagncttctacctctccttttttttttttttcaatgttttactgcatcaggggtgggggaaagttagctttgg

SEQ ID NO: 3641 - DNA, 335 bp, Homo sapiens
  I.3641 (AI183352)
tttaagaggatgcaaagcatcaccatctttattaagcatcttacatgatgaaccatttgcacaattttcaccagattcatagtccagaactaaacagaaccaccgtggcagccaaacattttctaacattgcaaagtatgaacaatccatgcccctgggagttgctattctctcatcttttctgttggtcttccccaggttttacagcacctatttcagttactttcccagctcccatttgacttctacctccttttaattatttctctcaaggagaataaatcttttatcaatagtttgctattaaggcaagcatgatttttttctttgtcaag

SEQ ID NO: 3642 - DNA, 394 bp, Homo sapiens
  I.3642 (AI151460)
tttgagacaaaacaatggcaaatttatagaaattaagtaagagaaagcaagcctactccaatcaggtagaaaggagatgttattcagcaaaaaattggaggaagtaaacaaaatttcatcaattcttgtcatttttcaaaggatcacctgcaccaattctgccacatatatatgaagtaccctttctgatccttgactcctaggctacccagtcaccttctaactggtttcccaggtatttcagactcaggaaagagaaaccctggatcggtgacacaagtattccaatcactggaaaagactatgcctcactgtaaattacacttgcagcgtgacctacggtaactactatatgattaccacacagacctggtgaagagctaatctcgagcaa

SEQ ID NO: 3643 - DNA, 473 bp, Homo sapiens
  I.3643 (AI149303)
tttttttttttttttttatcagtatttttgctttaattcagatttttaaaagacatcctaaaactaggatggaaaccatatcaaaatcacgactgtacattgtgaaaaactgaaaacatctaaatgtccaataatatagattggttaaattacagtgtatttatataatggttatctatttaaaatcatgctttatagtagtattatacagacatggaaaaatgttcagctacaggtcaacttgtcacgttcggtgactactacctcctctaaccctttgggtgtgttgcagcttcccaaggtggtttaccgtacctattggctttctttaatcctacttttttggtaaatattcccttcattaaatgctgttcagtcaccccactttagtgaatcatctatttccggctaagatcctgaaaaaagttattaaccattaacacaggttaatggtgaaattagaccattactct

SEQ ID NO: 3644 - DNA, 478 bp, Homo sapiens
  I.3644 (AI149250)
atctttatttttttttaatgaaaagatttaatacttcactggcaagtatctagagcagagcaatagtttatccattcaattcctcatgaataaaaattgtaaccttgtaagtcagtagttataatgcaatgaatcagaatatttaagttcaatcctattaaaaaaattccatcagaattggttatatcagttggtgaaatgactccaatccctactgacaggcctctttgtggaaataaacaaacacaaagaccccaaagaacaaatacccaacaacagaaaaccaaaacttaatctacagaatgtgattgattgatctactccctaaaccccaaataaaagccaacagcaataagtagataattaagcatgctgtgtggtgacatccttacatataaagggaagcacaaggctgaggtgagaggattccatgaggccaggacgtcagtgcgcagtgagccatgatcgtgccagcctg

SEQ ID NO: 3645 - DNA, 392 bp, Homo sapiens
  I.3645 (AI148670)
ttgtatttgaaataagattttatttttacttgattttcaatgttttcttcattttagataaagtttagtttaacaggttttgaataagactttattttttaaatgaatttttaattttagaatagttttagatttatagaaaaattgtgaaaatagtagagggttcccatatacctcacccagtttcccctactattaacattatatatgagtaggatacatttgttacaattaatgaaccaatagtgatacattattattagctaaagtccatgcttgatttgtttctacttaatgtcttttttttttttttttttttttttggagagggagtctcgctctgttgcccagactggagtgcagtggcaccatttcagctcactgcaagctcc

SEQ ID NO: 3646 - DNA, 324 bp, Homo sapiens
  I.3646 (AI138596)
tttccactgaattcatgacttttaatgggggaaacttacgtggcacactctcatcgagaccacggcagacatagtgaatgagaaaaaggtgagtaaatatccaagtgtactgtcctatcctctgaatctacttccaagtcgtaagacgctgtaagctccaggtccacgctgagccggcagaacgctccagccgctgctctgctctgcgaagatctgagctcgaggccccccaacagggcgggtttaaatagccttgggcgcagcgcatccttgtcaactgcaccagctgggtcctggggtggggtggggccctcaactgggatc

SEQ ID NO: 3647 - DNA, 355 bp, Homo sapiens
  I.3647 (AI138303)
tttttgctcaaaatcagagtttaatctcttcctctaatattcgactatcttcggtagcattcatgtatttttagttaacataacgattggtttagttttggcttatttaaagcattttacacttgctgtttcagatgtcagatgtcccctgtgagcttcttccttgaggcagcctgctctataggacaggtgagcccagcgggagccagcccactgcagacccaaaccctctagtccttgtcacaaaaagaggctgggacctgatggtggttctcttcctgacttttcctggtggtccttctgacttggagtggcctggcaatttcggtggcgtgacagccggaatgctgccact

SEQ ID NO: 3648 - DNA, 576 bp, Homo sapiens
  I.3648 (AI126628)
tttttatatgtaaagatattttattgtatgtaaatgttcacatgctctgtaatgtaacatgtataatatatcgtttaagtatgaaatagatacaagaagaaaaaattttttcagataggtttttttttgcttgctgcttgtactgaagtgagtcatcaggtaacacagctttagagaagccttgtctaagatgcatttggaaatgtagttgccatggcaactgtctctgaagtaacagacaaaattccccatagagcttccagagaacctccaatgtcttctttgcacttggatctgaaggaaagcctgcttaatggactcatgtacattttgtttaataaattatttttctccctttgtaacttttgtgcagtgggactgagacagggattgggatccattagggtcactccggggtgtggacaattctaagtgtataacgacagatgaggcaacctcattgctgagactgagctgagagtgagcatggcttgactgacatatgtgcacatcctcataaacacacaggcttgtgtgcggtggtttcacttggacttgcctgaagatggacttctg

SEQ ID NO: 3649 - DNA, 398 bp, Homo sapiens
  I.3649 (AI126300)
tttgcagagggaattaaagaattattgtatcctctgggctcctcagctggatcacgagctcctggggaagttactgggggcaacactctccgggctcccctcaacagctcacagttcgcaaacatttgactgagtgactgagtcagctcaggccctgcagtctctggctgattgcttccaatcggggtgaaagtcaccctataaggcagccctggggaggatagaaggcaacgccttcccgtcactgagcccatggcaatcagagcccaatgtcaccagcgactcctgtgaaattagcagtgacttcacgcgttgagggcatggggcaaatgccaccacctgtcggtatttccatcgggtctacacccaagaaagggggagatgctgcctttctgaag

SEQ ID NO: 3650 - DNA, 482 bp, Homo sapiens
  I.3650 (AI126289)
ttttacaaaatcatagcattaactatgagagaaagagaaaaagacagagagaaagagagatagagacaaagaggaaaaaatccgtccttccaaacccaccctggcccccaccaatgtctccacattcctcgggaccttaaatggcaagggagccagaagttgtctgccaggccctgctggtttatccgggccccttttcttcttactcagtgctttgtgggagaacaggccgcctatgcagcaaaattaatgcttgggtaaggcttacagtctttgtgaaaggaatggattgtctccagcaccaggtcccacctctgtcttcagaaagcactgggccaccattcagagtcaggggctctgggtgggcagtgggcttctgacagataggtgcagcccacgtgactcagaaatagagaagaagggagctgaggaaccaaatctgcgtgccctgaatggaaggctgccttaggccacctctacgg

SEQ ID NO: 3651 - DNA, 491 bp, Homo sapiens
  I.3651 (AI125661)
tttttgagagtcaaaatttctgttttattcatactaatgaagattcataagactggaggtcaagagtgaagctgagctaaatatacacatttaagtcatcagcacatagatggtattcatgttggtctgctcttgccatgtaacaaattacttcaattgaatggtgaacttgttcttagtcctctaggtcagaatgacacagtgtggctgagttttctgcttggggtttcataggttgaaatcaagttgtcatctgagcttagttcttgtcttggcggggaggttgggtaaaaatctgcttataaacccattcttgttgttgacaaaattcagttccccgtggttgtaagactgaggtcactatttccatgccactgtcagtaagaggatactttcaactcctggaggacacctgcagacctgccatatggcccctccaatcttcaagctagtgactgtgcatcaaatccctctcattcttcgtatctctg

SEQ ID NO: 3652 - DNA, 562 bp, Homo sapiens
  I.3652 (AI125496)
tttacaagggtttaccacacttttattgctttaagaattgaggtttggcctccacttccacccttgttgctactatctcaagtgaaataactcaaaaacaggaggtcaaatacttcacattctcacttataagtgggagctaaataatttgtacacatggacatagagagtgggataacagatactggagactcaaaagggtgggagggtgacagggcaagagggatgggaaatcacttaatgggtacaatgtactctaattgggtgatggctacactcaaagcccagacttcaccactgtgcaatgtagccatgtaacaaaaccatacttgtaccccctaaatctatataaagtaaaaaagaaaaaaaccccaaacacattggcttttattttatttttccatcaaagacaccacactggaaagaactgagtttatctaggattctgttttgctcacctgtcttatagtaatcataggctttcacaaaagcaggtttcagctttcttatggggttgtcttgcagaagagtgaaagaaaaggtcagtgttcaatccgtaacc

SEQ ID NO: 3653 - DNA, 525 bp, Homo sapiens
  I.3653 (AI125295)
atgaagatggagtccggatcgagggagcgctccgaaactacatccctcgggggatgccaagcagggggaggataattaggagatcttccgatgtcacgccagtgtcattcgctgcagatgacaggacacagcgctgcagtttcctcccgaaggctggctccattgctccctcaacaatggcagcatcacccacctggtgatccgacccaatggccgagtggcgctcaggaccctcagggacacggggttcatgctccctcacagcatcacccagtcctgagggccctccgcaagactctgccctcctcagctcaagacctggctctggcttttccttccctccgtcctcctgtacaggctgcattgcagttacgtgctgttctcgaggaggcaacagacaagtagaaatccctcaaatgctgcgtttgggtatttgtttctggcccgggcaaccacacaggtgaccgtaggcaggtgaggggtgaaatgagtctgcagaggtggtgtgagcttcgaccttcatgc

SEQ ID NO: 3654 - DNA, 289 bp, Homo sapiens
  I.3654 (AI160072)
aaaagaaaaatgttatatttagaatggtattttctttaatggtctccaatccaagattttttgttaaatggtgagttttttttgcatgttggaaaccaaacagctattgctgttgtagtttagatatttttagggtgcctgagtgaactagaagagcagttagtcatgtccatttcctgggcacccagacatgtgaatctacctgtaaagggtcagtttgcagaggcttactaccattccctcagtgtggccatttaatggactaatgtgtcccatatgggctcactgt

SEQ ID NO: 3655 - DNA, 427 bp, Homo sapiens
  I.3655 (AI143275)
gaagacagtaggatttattcgaaggattcttgacctgggaggcgccttgaaaccagggcgctcagggactgcagctccgttcctggcccagagtcaaccttccaggattggcttggcgaaaatagggcggagccgagcaggaggacgaggcgtggacactgcggcagggccacccggtgcagggagggatggtgtggtgcactgtgaccctcacaaatccaaagatccggcggccaaggtcagccgctctcggagagccgagattcttggtgctggctgggctgctggagacagcgggtaccccgttccttcgggaaggtgggggactaggtccctggctctctctaccccatcagagcctggtgcgacggaggagcgtagcgagagcccaggcaggttgtagggccagaccaggttctctgtcaag

SEQ ID NO: 3656 - DNA, 352 bp, Homo sapiens
  I.3656 (AI139532)
tagaaaaacaattttatttacagtatcttcaaaaagcataaaatactcatgaataaacaacaaaagatggacaagatctctatgttgaaaactaaacaattattgaaagaaattaaagaagacacacacacacacacacacacacacagtatcatgtttgcagattggaagactcaatgttgttgagatgtcagttctccacaaattgatctgtagagttattgcaatcccagtaataatgctagcaggaatctgctgtagaaatttacaaattgattctaaaatttatatagacatgcatagaatctagtgtatctataacaatcttgaattaggaaaataaatctggagt

SEQ ID NO: 3657 - DNA, 422 bp, Homo sapiens
  I.3657 (AI138444)
aaattgctacatatttactttatttatgttaacaatataaaaggtggatatgtctccaaattagtttaaatgtcaaatagaataataatacataattaagttacacagttttatcagatttttttctaatggtgagcaaatttgagtctataaggtgacaactataagtgaaaagcaatcgtccttaaatgcaagaccaaacacttttgttacacactcagaagtaaacaaaagataatggctattttttgagaatggttacattttcagctaagataatctaagttttattcaagttaaatatatcacctcttaacaattgcatccttatggttactacattcatgataacggctattttatgtaataacacaagttataaaataatgtgtagatgtgcttaaactttccaatctagaaga

SEQ ID NO: 3658 - DNA, 332 bp, Homo sapiens
  I.3658 (AI138216)
tggttttgtgaactgcttttatttcatttggttttatattggaatcaattcaccatgacatttaatagccttcaaaacaggatttttgtaatggctgcgtgttagtccatcatattaacatttatttatacattcctctattttggacgtaacagatactatttcggaagatttgttttttataatctctctaagatgaatatttttctcctagaatgtaaacactataaaggcagagagtttgtcttactgatcacaataccctcaaccccccagaagtgcctgacacatagttggagctcaacagggatggatggatggatggatggatg

SEQ ID NO: 3659 - DNA, 465 bp, Homo sapiens
  I.3659 (AI131455)
  misc_feature (11)..(11): n is a, c, g, or t
  misc_feature (18)..(18): n is a, c, g, or t
tttttctttgncatttgngtgtttattgcctgatactgtttattataatttgagctgctacacattattcttaatggcttggaagtgattctgatggatcacaagattagaccacatcccatgcatatcaccatctcagacagcacacacaatagtgattcactgcagttcccatccctgagggttggctgttgccatttccaatttaagactgtttcttggtacatttgcagatgctatctacagcctgggtactggatgtagaatccaccaaactgctactttccctgaaaaaatctgggaccacacatctccaccaaaccaagatttatcaggaggtagtctctttgggctgacttttggcactatagccttcaccatctatggaggctttaggcactgtgtgtgaaagaaagaatggctttgcgagaatggatttctctttggacacctgttctctgtata

SEQ ID NO: 3660 - DNA, 376 bp, Homo sapiens
  I.3660 (AI131415)
tttttttttttaagtgtcagtgttcataaaggccctttttctttttcaaggatgggtataaagtgttactcggccgaacgcggtggctcacacctgtaattccaacactttgggattacaggcgtgagcgaccgcgcccagccgaacttctgcctcttaaatccagggttctccctgtcagtacagtgaggtggtaactagcaaaagctatgagatatgactgcctgggtacatatcccagctctttcacttatctttgtggctttacgcaaattacttaacctctttatgattgtttcttcatttgtaaaaggaagataataacagtgcctatatatagggtttttatgaagaataaatgagatagtatatataa

SEQ ID NO: 3661 - DNA, 465 bp, Homo sapiens
  I.3661 (AI131137)
aaacaacagacgtttattgctgaacagttctggaggccagaagtctgagatcaaggtgttggcagggtttgttctgagggctctgggggagaatctgttccaggcccctcccttaacttctgggggtcactggcaatcctcaggttccttggcttatagaaacattgccgcagactctgccttcaccttcatatggtgccctccctgtgactgtgtccaaaattccccccttttaaaagccaccagtcatcctggatgagggctcacccttaatggcctcaccttaactggatcatctgcaaagaccccaattccaaataaggtcacgttcacagatactgggggtcaggacttcaacatctttgttgagggggacaaaattcaaccggtaactcctcaacctataataccactcctccggtaaagaaaaaaatattttaaaccaacttaaaattctcattgaaa

SEQ ID NO: 3662 - DNA, 432 bp, Homo sapiens
  I.3662 (AI130878)
tttttttaagaatggaactctactttattaaggaatactgagcatccatcctataagaactaagcccattctgagcacaggccccatgtgtaggaggaggcagtttcccatttcctggaaatgccttatctcctcttccttcacagcaaaccccttcacctgccgtcatgcccgtcttcactctccaggtgcgaggatcccgagaacaaagccctggtagcatcctgagatcaagggcgacacctgtaggacaaactcctgattcaagcccaaatatctccagggaacagatatgtcctcaaagttaacacttctttaaaaataatgttcttggccgggtgcgctggctcacgcctgtaatcccagcacttcgggaggccaaggcgggcagatcacgaggacaggagatcgaaaccatcctggctaacgcgg

SEQ ID NO: 3663 - DNA, 385 bp, Homo sapiens
  I.3663 (AI129679)
cattcaatagatatttattcaatgtctgctgtaagttagactcaatgttgaggcatatttgtttatccaaagaatatctattgattgcctactatgttttaggcactgttacaggagctatggacatagtgaacaaaagagcaaagcccaagccttgtggatcttacattctagtcaagttagagaaaccaaaaatagacaaaaaattgtaaatatgtcaaggaagataaatgctctgagggaaaatcgagcagactgccagtgctggccctatttgcctcagattcattccttgcccttccagggctgggaacagggtggtgggtgcttccgcctatggtagagtgcaagtctcagcatcagttccttcatctgaagggagaca

SEQ ID NO: 3664 - DNA, 500 bp, Homo sapiens
  I.3664 (AI128170)
gaatgattccatttaaaagaggtaccaagagtagtcaaattcacagagacagaaagtatggtgcttgtcatggctgaagggagagaaaatgggaattagtgtttattaggtacagagtttaagtctgggaagattaaaaaacttgtagagatggatagtgataatggttgcacaacaatgtgagtgtacttaatgtcactgaactgtacacttaaaaatggttaaaatggtacattttcttatgtatattttatcgcaattaaaaaaaatgttaccagtggttatctcagtgataagcccatggatgatggtattctttccacctctagactctaaatttcatgatgaacatagttgcttttataaatgacaaggtcaatttaaccttaaaacaaaaagaaaaacccttctaagtcactttaaagacactataaaagtgtcatgcacttgtatcccagctactctggagaataggcaggagacttgcttgagcccagaag

SEQ ID NO: 3665 - DNA, 287 bp, Homo sapiens
  I.3665 (AI159943)
gtttggtcatggagggaagtaaggaaattttaatgatattccttagataatacattttcttacctaaaagtggtacaataatgggttttactctacctcagtccactatgcagcatgcatactctacttaatactaggttgtgttcctacagttagttaaaaaaccaaccagctggtagtatttttttagatccaacctaagaaagacagtgtggtctagtgtagagggcactggctttggagtcagatgggtctaagttcgaatgctggctctgctgcttggaagg

SEQ ID NO: 3666 - DNA, 428 bp, Homo sapiens
  I.3666 (AI147932)
aaattcagatgaaaattttattcactaattctgcatttcacttgagatagccacaaacaaccaacccttccatctgcagaaatgggtaataaaagcacaggtgtcacattaacctttttggctgagattaggtgccattggttttagattccagctttgaggagtctgtctcaataaaaatgtgccgtgttcttgatatgtgccaggctctgtgcaaggttctgggacagacagtgaaatgcactgacagacaaggtctgtcctcagggggctgagagtctagttcctgccctgctatcatgtacagataatcagtaaataggtgctgtgggggatgggagaggttgagagagcttagggtgcatttctaatggagctcacatgattgtcggccaaattcatttctgtgaagctgcagaactcacagc

SEQ ID NO: 3667 - DNA, 443 bp, Homo sapiens
  I.3667 (AI127192)
aatcagaatgacaaaggtaaagcagtgtttaggaacataaatctgacaggtggctcgccaggtcacttggagccaggataggcaggagtagctggccagagacgagcagccctgaaaactgttcctgccctggcctcacctcgtcaccatgtctgctgtggaaagggctgcgacctggaggctgtgctgttgaacaggcacatcgaggaggtccaacacagcgtcagaactcccacgccctcttctcagctctgccccttggtcagctgtcgggtgactcccaggcagagtccgttttgaggctcctgggactggaatacgggaccagcctgagttgctgtcagtcacgtcgcaggagaaaggactggcaaaggctcatggccccttgaatctgttccttctaggccttttctaagaagcttgtggccttctcaacttggatt

SEQ ID NO: 3668 - DNA, 459 bp, Homo sapiens
  I.3668 (AI097494)
catggaaggttttattgataattgctaaaatttagaagcaatcaagatgttcttcaataggtaaaggaatgaacaaactgtggtacatctgtaccatggaatattattcagcaataatattgatatggaggagacttacatgcatattattaagtaaaaggtggttaaaaatctatatgctttctgattctaatcataagacattctggaaaaggctaaaatatcaagaaagtaaaaaaaaaattagtggttcttaggggtttggtggcaaggaggaagggatagaaaaagagctcatgaaagagagagggaagaccggtgtgcagagtacaaaggtggtcagtgagaaaggacattccagttggtggcaataatagaagccaaggcataataattgaaaatgcagaacctgattcaatcaggacaggtcaggctgtgttgcagaaactaaaatacaag

SEQ ID NO: 3669 - DNA, 466 bp, Homo sapiens
  I.3669 (AI097268)
atgatcaagtaggatttattccaggtatataaggctggtccaatatttaaaaataaatcaatacaatctaccatatcaacaggttaaagaagaaaaatataattatatcaattgatgcagaaaaagcttttgacaaaatccaataacaattcataagaagcaaaacctaagcaaactaggagcagagaggaactccctcaattcgctaaaaaaaatctgcaaaaaccctatagctaatactatacttaatggtgaaagactgaatgttttccctctgagtttgggaacaaggaaaagatatttgcatcaccactgttatttcacacagtactggatgttctagctactgtgatgaggcaaggaggaaaaaaagcagatagatcgtagaggaagaaatgaaactgttcccattgcagatgacatgattgtttatgtagaaaatccagaggaatcataagcaccatcc

SEQ ID NO: 3670 - DNA, 520 bp, Homo sapiens
  I.3670 (AI096713)
  misc_feature (402)..(402): n is a, c, g, or t
tcaatggtaattttttttttattttacccagttaaaacagactttgtcaggcaatgtggagacctctaaattcacatcttctaaggacatggagagaagggagtttgtgtctattttgacaagaaaaccaccagccagttccatggtgccactcatccaagctgcctaattagtggtatcaagccctctgtctgaaaagactgccttggatttacttagcacccatcttcctataaatgtctcccaaaagtcttgggagttcatctcctttgcattttcaccatatcacacagaccaccatggccacacattaatgcccctgccaccagcctccatcgtccaccagggataagcaagaaaacattgatttgggacttctgcagggtccttccttcacatggngtatgcttttgaaactgccacgtccccaatccaccaccatgggtggcctccttcaaagccctcagctctccacaggaaacctcctcctccaggacacctgtcatcagctccccagctg

SEQ ID NO: 3671 - DNA, 477 bp, Homo sapiens
  I.3671 (AI096576)
tgaatgctttttaaaaatgcaacttgtttgcattttgtttgtccaaatttggtgactggtcacagatcacttggtgtccaactggctttttcatagcctttcagtagagaatagaaccccctcacattaagcacaataacatgacctctaaaatgtcaagttctgctgcagtggtgccatcattattgtcactgaggacttttcaaccaccatgtctttgttagttggaattctgaattttccagtgggatctatggcattaaaaccaaagaggaaacaggtcaggcactctccaggaaggatatctgctcttactgttgtaatacagcatgaagagtgtgggactctagactgctggccggacacttctctctgttctccccagtggtatagttaataatgatgatgaacttggtgggggtggtaacaaaattcaatcttaaaaaacgaacaacaaaatccaatcacaaaattcag

SEQ ID NO: 3672 - DNA, 407 bp, Homo sapiens
  I.3672 (AI216751)
  misc_feature (343)..(343): n is a, c, g, or t
aaggcaagtttattaaaaaagtaaaggaataaagaatggctactctataagcagaacagctcaactagcatggtttctatcccctaactagactccaacgaatgcaagagggataatagcatctacctcctaatacaacactaatacttattatcattagtatattaggctacagaagccaaaagcagaaattaagaaatgttatggtcagtagaatcaaatatacaaggatattggattaggttattgttgttggtctttcagagcaaagttttaaaatctgatttgagaaaaacctcccagcatgcacacacagccggactctcagaaaatgtttcctttntagtcaattcctacatggatgccatgcaaaaccactccatctatcaagctgtcagaatgaactg

SEQ ID NO: 3673 - DNA, 431 bp, Homo sapiens
  I.3673 (AI216295)
tttccagccaagttcaaaatatttaattgcattcatgtttaaaggtacattttgaagatttctcttcatccactgtctgggtttctgagaagtgatgtccactaagctgtggggagaaaggggacatccatatcttttctaggttcctctgcatagctgctggtgcttagagatttggtctttcaaaagaagcacagacatcttcaatagcacagacgttggtcaatgaggactccatcatatggcatgagtttttcctgcagatgctccttgcttccccggtggcttccaaatatacatgatccttcgaagatttgaccagactataccagggactggcaagcgatgcccatggtcaaatatggcctacagcctgatttttgtatgacctaggaacattgaggccaatcctcattttttaagatggaggc

SEQ ID NO: 3674 - DNA, 508 bp, Homo sapiens
  I.3674 (AI216288)
  misc_feature (398)..(398): n is a, c, g, or t
  misc_feature (415)..(415): n is a, c, g, or t
gccttttggtttgagcttctgatgtctcctcctgcctctaggtcacagcaatattttgtattttgttatattcaattttatagctttacatttttacatttaggtctttagtcctgtgacactcacttctctatacggtattaagtagagatcaagtatttttctccataaagtgagacagttttcccaacaccgtctactacacagtctgtccatcctctttgatttgtgctactttactgtatattaagtccccaaatattcatgggtctgttcctgagctctttattaggttgactcactttctattcttgtgccaatacaatactgattttatttccatggttttgtaagatgtactaatatcaggtaggaagggccaaccccacccacacctnccacatttactcctctntattgaaggatgacttagctatttaggacctttattctttcataaacattcttgaatatgtttaccatattcctcaaatatccaaatgaactt

SEQ ID NO: 3675 - DNA, 304 bp, Homo sapiens
  I.3675 (AI167460)
caaacggcgcattcacctcaccctccactagccccactccacgccaatgacacttttttttttttaaagcataggtccaagtgccaaaagtccaaatcggcgcagttcccggggacgtaattaaactgccgtccgacccaccccgccccttttcggtccccacgccgcagccgagcctggacattgagagcgtcagattcaacatggaataaggccttagggacagcgtcagtaggcgctaagggaaacatccccaaccctccacattgggaattagcggactttcgaacacaaataaaataca

SEQ ID NO: 3676 - DNA, 447 bp, Homo sapiens
  I.3676 (AI148246)
tggacggcacgtgtgcctgcgagccgggctaccgcggcaagtactgtcgcgagccgtgccccgccggcttctacggcttgggctgtcgccgccggtgtggccagtgcaagggccagcagccgtgcacggtggccgagggccgctgcttgacgtgcgagcccggctggaacggaaccaagtgcgaccagccttgcgccaccggtttctatggcgagggctgcagccaccgctgtccgccatgccgcgacgggcatgcctgtaaccatgtcaccggcaagtgtacgcgctgcaacgcgggctggatcggcgaccggtgcgagaccaagtgtagcaatggcacttacggcgaggactgcgccttcgtgtgcgccgactgcggcagcggacactgcgacttccagtcggggcgctgcctgtgcagccctggcgtccacgggccccactgta

SEQ ID NO: 3677 - DNA, 309 bp, Homo sapiens
  I.3677 (AI147111)
ttttgattgagagcccgtgtttatttatttatgcaccattccatcatcaagcaccacaatctgaccaatattatgccaggtgctttcatatatatcactttcatcagacccatttgataaatgaggcaggaggttaaggagcttactgaattcatgtcctctcatttcccatctactgtacctctctagaaacacctcctgacacactgtggatctcagccacttcagtgaagttgttactagctctctggaatcttcaggcctctactctttcaccttactggcctcgtccaatcctgggaaatgtca

SEQ ID NO: 3678 - DNA, 360 bp, Homo sapiens
  I.3678 (AI143013)
tttttttttttttttttttttttttttttttttttttttttttttttttttttttttttttttttggggggggggccccaaccggggttaaagaaaaagggggggaccccagggccggagggaggaaaaaaaaaaaaagctttgggggccccccccttttaaggaaaaaaccccccccccccaccccaaaaaaaaggggaaaaagggcccgggaaaacccccaaacccccgggggggcggggcccaaaaataccagggaaagggggggggggccaaaaaaaaaaaaaaccggggggggcccaacccccccccggggaaaaaatccccccctgaaaaaggggggccctgtgggaacccccc

SEQ ID NO: 3679 - DNA, 310 bp, Homo sapiens
  I.3679 (AA975122)
tatgctccaactctttttaatttctttttttttacattttttctttttttaaattattatactttaagttctgagatacatgtgcagaacttgcaggtttgttatataggtataaacgtgccatgtaacaaacctacacattctgtacatgtatcctggtacttaaagtaaaaaaaaaattttttaaagaaaaatattttctctcaaaagaaactgttgcgtacctggattacctcatttaaacaaaccaaaatgcctttgagaaaattattattagccctattttacaaatgaggaaatctttaaagtt

SEQ ID NO: 3680 - DNA, 314 bp, Homo sapiens
  I.3680 (AI214381)
ttttttttacagtaaaagttattttattagagaagtgggatttaaggtgaagtagttcttaaattaaaaaaaaaaaaaaggacactttccattgaattcacagtcttccccacaaacttggatccaaattctaatgaaaggaagcttaaagacgcaaagcttctggtgaaagcaggaacggaacagttggtgccagaatcgcatccatacttcatgatgcgttgtgtacgctatgccgtcctagggacatagcaaaactcgctagagttacttcaagtaaggcacacggaggttgctctgattatcaagaaacc

SEQ ID NO: 3681 - DNA, 345 bp, Homo sapiens
  I.3681 (AI208894)
ttttaccatagtggccatttatttagcttgttgggcctgtacaaaactcagataagtctggagaataactgtacattatcacctacttaatcaggtgaggatgacaactgtagctttggttccagatgtggtaatttactgagaaaatcagtacagccactggctacaggtatgcaactattaacacagcaaatgccatttcttcgatttcagtctccagtttatggaggggttttcagggtgtaaaatccactaggagtggccttcaaagagtggtgaagggaaatcctcatttgggcagactttgggtagtacagtcagatggctgcctatttcacatgccct

SEQ ID NO: 3682 - DNA, 487 bp, Homo sapiens
  I.3682 (AI203870)
taacattttatgtgtttatttagatacacacttatttaaaatagtacagaaagtaatgcattaatttaaaaatgcattttttacactctcaaacattatgaaactatattcaaacttttcacttgtgtgtttgccactggaacctttactatcactagagtcccttgtgaggccatctaaccatcatcatcaacttcactcctatctctgctgacaggcaacacttggatcattccacaatgacatcactgggaaattttgtaccaaatcagagaaactatgcatataataatgagactgttctttcccctttttatattaaaaaaccctgaagatgtgtattcttaacaactgccacatgaacactttttatattgctttctaccatgatttaaaaaaatccacatttaaagtaatgtctagtgataatacttgctattgtaaaatctttaccccagaaatagttaccaaattttcctttgttaaa

SEQ ID NO: 3683 - DNA, 421 bp, Homo sapiens
  I.3683 (AI203697)
  misc_feature (307)..(307): n is a, c, g, or t
ttttttttttccgagctgtcactgggctcctgacctgcccctgaactccaccctgccaggcagccaacagacaagctctctctaattgacccaggcaagagaggggagggattggaggagaaagctgggataggcaggccctggaaaggtcacctacctgctggctccaggccagtcttgaaggtgccaggggttctggcccagtgcagcccacaggcccccagcagcccatgcactccaggctctgaccacaaggccagtctagagggatgtgtgtgggcagagtgaaggggcaggggtggagcanagcatggatgcatagaacaagaaagaacaaggacactgcagtcccattgccctgggagtcagccccagcttcatggctcctggggacctcagagaacattgatagaagatccta

SEQ ID NO: 3684 - DNA, 458 bp, Homo sapiens
  I.3684 (AI203665)
  misc_feature (425)..(425): n is a, c, g, or t
ttttttaaaagactgaggaatttattcttagtttcctcagagtgtaaattcattgttaatcagcctgtgccagggactagataattctgcagatgtgcctggcattgtaagagggcttacactcttcagtgctcgctcttgaacattctctcccacttcattctcagaataatctgtaaggttggtaggatgcaaactgtcatcccatttcctgtggatgaggaaagtgaggcagagtttagcttgtgctttggggaagttactccatggtgaagctaaagctgaatcttggaccttctctggaagaagagggcaagtctgtattgggattatgttattacaatctcaatattagcaacttctgactttagaaaactccagaacagctgcaatgagatgttcattaacaggggaggcactacggngcttcatggaattctagaaactgtctcttcttg

SEQ ID NO: 3685 - DNA, 447 bp, Homo sapiens
  I.3685 (AI201382)
ttttagcagcaactagtctttatttgcctcatctagtccttcagtaagggcacgccgctccatttagaatacaacctatgaacatggttcttgccttgaaataaacctgtgatttgacaggcgggtgataacaaatggcagcatggcaggggcacacctctcctggtccccccgctccttggctctggctcatagttacatagaaacacaggctgtcatggccagttcttacgtgttttcaagagaagctagacatatgggttgtgaagttgaatctccttttaaatatttttgactaatgcagaaacttttaaaacatgagtgtgggtcacaggtgttagctccagatagtgcaataccatacaactataatcaagaataaggaacaagctccaagatacatcaagtgaggaaagcaaggggaaggctggtgtcttataagcttat

SEQ ID NO: 3686 - DNA, 439 bp, Homo sapiens
  I.3686 (AI201374)
tttttttttttttttgtaagttattttttattttaaattaaaatcctctacaatgaaattgtgtccagactttgcaggttcttggtctcactgatttcaagactaaagctgtggaccctgacggtgtgtgttacagttcttgaagacggtgtatctgaagtttgttccttctgatgttcggacccgtccggagtttcttccaccagtagaagaaactcctagtggtgggttcgtggactcactgacttcaggagtgaagttgcagaccctcgctgtgagtgttacagctcttacaggcggtgcatctgaagttgctcattccttccagtgggtttatggtctcaccggctttgggagtgaagccgcagaccttcacaatgagcgttacatcttacaaacgcagcatggacccaaaaagtgagcagcagcaagttttatt

SEQ ID NO: 3687 - DNA, 462 bp, Homo sapiens
  I.3687 (AI201175)
ttttttttttttttttcaagtgaaggtttgcttttgttattgttctttgattacatgaaaaattaaacatctgatttttttttcatacaaactcaatgtaaaatatgagtttgaccttggtagaaatgatccgctcaaagggaaagacattttcctctggattgcagagagtggcatcttctacaagctcctcccaggtatctttagctgaggctgtttgtaaaaggtgagggtgggtgttaacctttatatgcagtaacttcctgtctttctgaatctccatgactttttttaatctctagagctggctacagttcagtctcctcattcagtcatctgtccaacaattcctactggagttgtactatgggtcaggtcagtggatatgcagtgagcaaggctatacctttgtgtttctcgtgaagcctgctagtcccagcttctcctcctcaactgtgaaac

SEQ ID NO: 3688 - DNA, 426 bp, Homo sapiens
  I.3688 (AI201045)
ttagaaggtccatggaaaatttattgtattatcaatatttaatatctccagagaggtgacatcagcaaaattgcctggcctggcccagccatctagatggacagtgggacaggcccttcatctccccagacaccttatcctccccacatgggggacaggtacaatttatgggcttctggaagtggagggtggcatgttcctccagcactgtgtgtgctggggtgaatggctcattccttaggattgaaacttggggtctctggctgttctgaaatgccagtgaagggtgagatgctttggaggtactgtgtggttccctgcaccagggtcccagaccacgcagctgtgatcccctgcccagcacatgtacccagggcgctgatgtcaccaaagcctgagaaaaacttggcaggtggcagaagacat

SEQ ID NO: 3689 - DNA, 373 bp, Homo sapiens
  I.3689 (AI200885)
ttttttttttttttttaatgctcaatttggttttaatcagatagttgcacacatttaacaggagacatgtatgtttgtaaaaaattcctatgttaaacttgagcttgtacttgtggacactttcaacttcttcagatgcctgcaggctggcctctccctgttggtttgccccacacacagcctctccagcacaagcagatgaaggaaatgttgtctgtgacccactgctgtattcagctttattacttgaaattgatatgagcttatcaacagttcatatcagtttcatgggtaagaggaatagagaggcaggtgaacttagaacttctcaccattcatagtcatgctattccggaatccaatgtttgattct

SEQ ID NO: 3690 - DNA, 331 bp, Homo sapiens
  I.3690 (AI190883)
ttttcacttaattcttttattttgcaggtattattacttggcattcacagcacatcaaacacctcttgctagcaaagagagctgtgtggctatcttggaaaagtccagattagatcactgggtgctgggaaaaacaaaggtagttcgttctttattgttcaaattgtcccgtatgatttctttgtctcttgtcagtgatgtcactggcatgaatggctctgtaagttgtgtagcttagcaaacaagactccaacctaacaatggtctttgctggtattaagtcaagaggttggggacgttagggagtagaggaggagggttgcctcctgtt

SEQ ID NO: 3691 - DNA, 461 bp, Homo sapiens
  I.3691 (AI188139)
tttttttttcatttgataccattgctctttattggcaaatgtgtagtagaatcaaatccattgatttgtagtctggaataggaatcttctaattatgtttccaaatcataaaaatgactgttaatgaaaaaaaaatcaaaagcatgctccagtaatggttgctgttcattattatggccaggtatagaacatacatctgaaatgaaatacttttgatttggggaattcaggatcaaacttggctttgggtatccttgaatccagctgcaatcaaatcaaagctttgagacgtttttgaaacggaagcagcaacattgtgaaagatcaaataaaaaaaaaatcagtgcaactaagaatcgtcttgtgaatttttagccatggtggtaccttgcataacagcagggtctgcagtgaatacacagtacaaaagctgatgaaatggctccctgaaagcaggaagg

SEQ ID NO: 3692 - DNA, 269 bp, Homo sapiens
  I.3692 (AI188010)
aatagtttcatgcttataaaagtcaccctaggtcaacttgggacaaagaaaacaatgtacagtagaaataaaccaagtattaaatagaatatataggtaaggaaaaaatattataaagcagttacatttttgacacacacacacacacaaataaatacacttttctattatttgaaggcaattcacaatcatttccaggaattccgtgagaatttaaggccatttgttctaaagaaatgctttaatttagacacaacttcacaaaactg

SEQ ID NO: 3693 - DNA, 291 bp, Homo sapiens
  I.3693 (AI185901)
gcggccgctctgcaggaagcagtaaccgagaccctgtctgactacgaggtggctgagaagatctggtctaatcgggccaaccggcagtgtgcggactgtgggtcctcccgcccagattgggctgctgtcaatttgggggtggtcatctgcaagcagtgtgcaggtcagcaccgggccctgggttctgggatctccaaggtgcagagcctgaagctggacacgagtgtctggagtaatgagatagtacagttattcattgtcctgggaaatgatcgtgccaaccgcttctgg

SEQ ID NO: 3694 - DNA, 388 bp, Homo sapiens
  I.3694 (AI185553)
  misc_feature (333)..(333): n is a, c, g, or t
ttttttttttttttttttttttttttttttttttttagaggaaaaaaacctgctttattttattttcaccatttttgggggggctatgggggaagcgaggggcccccttcgagggtgttcggagccatcaagtttcaacgctgggaaaagggggcttccccgtcccaggcagggtcggcgtggcagccgtccgggctgcaaaaaaggcccaaaaccgcgcaggggcccccgctcccgcacgccttttggccggactggcagggcgacgcagggtagttctcctcctggcagcgcagcgcttggggggggcccaccaagcagcccagctctttncgcagaaatattgggcccgaagcacgggctttgccccgggccgaggggaaggact

SEQ ID NO: 3695 - DNA, 468 bp, Homo sapiens
  I.3695 (AI168339)
ttttgagactgcatagggctcggcgtgggaatacagtggtaagatggccagagcctgctctcagggagctacaacagtctagcactaattaggttgattcatttgtgggggactgaatggttttaggtgcagacataaaatccagcctggccctaactctggcttccagtaggaaataaacagtatactctagttccagaactccacagtctagcatgacttggagcctccttcatccagagaacaagtgacatgctgtggatgagtgagaagatgctacaaaaactccagataaaccaaccaaagaggcagctcagagactaataaaacaagagaagtcctgagaggtagtcctgtttggtagctttccaaatgtactgcctggagcttcctcaagggagtaggtgggtgtgggaggaggcccactatctacttccacggagttcatgtttgacaacttctacacat

SEQ ID NO: 3696 - DNA, 396 bp, Homo sapiens
  I.3696 (AI159796)
atgggcgccgccattttgtgaggcggcggcggcgcggcggcaggagcccggggtgtgtataatggttgaatagaatgaccccctccagggaatccccggcactgacggttacgtaaggggctgtgcgcaagtgcggcgtttagggaatccgcacagcccgggccacgcagctccgaggcccacatctccacttcccctaagaggaccgatgggggaagggacagctgaccgggtcttcctcgcagcagcctcacccctagtcttccgcggccggcgagcttctccacctccccgggccgggtctccgcccctcacaggcttccgagacactcactggccctgggttgtcaggaacttcctagccacaaccttattccgaccccacttaagagacaa

SEQ ID NO: 3697 - DNA, 471 bp, Homo sapiens
  I.3697 (AI128770)
  misc_feature (447)..(447): n is a, c, g, or t
tcacacaattatttttattttccagtacctataaaagttatgtttaatctatattatagtctattaagtttgcaatagcattatatctgacaatgtacatactttaatttaaaaatattttattgctaaaagatgctaacgataatctaagtcttcagtgagtctttgttgctggaagacagtcttgcctcactgttgatggctgctgaatgatcggtgtggtggttgctgaaggttagtgtggctctagagatttctttaaatgagacaacaaggaaggctgcaacatcaactgactcttcctttccgaaagatttatctgtagcatgtgttgctgttggatagccttttacccacagtggaacattcttcaaaattgaagtcaatcctctcaaactctgctgctgttttatcaactaagtttatgtaatattctacgtcgtttgntgtcatttcaacaatggtcacagg

SEQ ID NO: 3698 - DNA, 479 bp, Homo sapiens
  I.3698 (AI123108)
aaagtgaaagcaagtttattagagaatagcagccctttcgcatgctaatgagttataatgagcatataatgagcagtggggacgaacagaggtcccttttatcaccatcttagtgttggtgggtcttggccagtggtgtctttgtgacctgtatcttgtgccaacctcttatctcatcctttgactaagaatgcctagcctcctaggaatggagcccagtaggtctcagccttattttacccagcccccattcaagatggagttgctctggttcaaatacttctgacagtttccctctgttaacagcctaccttatgtcaccacaagggaggaaatagttgtcctgaccccattctcctcatcctctctgatctcctgcctgggtttccactggccaaacccacctggaaaccagacgtgatgagctcttagatgtagaacagcttggagaacatgcaggaaccaagggaattctgggg

SEQ ID NO: 3699 - DNA, 277 bp, Homo sapiens
  I.3699 (AI091867)
ccttctggtacaagctgttcccgtgcagaggatctgggggccctgcaaaagctgcagcttcctggatgaaggcagagttgcgtttgaggatgagcaggaagaaggaggagccgtggtgcacagatagagcaggatcttcagcaccttgagcttcccgtggccggagctgctgtgagcggctcaggaggtactcagcaggcactggctgctgcccggagactcgtgggagattttagcaatctcttcaaacaggtagcccggacacgtacatcatcat

SEQ ID NO: 3700 - DNA, 492 bp, Homo sapiens
  I.3700 (AI090079)
atcttttctaagactttattcagaatcaaaaaagaatgcagtccatttagtctttgcaggacattttcagatgctgtttcgcccttgaactgatgtttaagtttcatgtcaggaagaaggtagaaatcaaaagggaattgtcaaagcaaaggcaaagatatggtcaaactatcataccacaactgttgtggcttatctgagatactctgattttgtaccttagcagagagccttttcccatcttgccagaacatatgcaatttggcagaagaactctgcagaactgcaaagaaaaaaaaagccttactttcaaacactgatttcataaaaaaaatcttccgtgcctctagtttggactcattgctttttcaatgcaataaaaaaatcctgtccttaattaaaaatcaataaagttaataaacatttaaagttcaaacctgactttcatgaacttaattctcctgaatccactcctttcaagcatgttaaagg

SEQ ID NO: 3701 - DNA, 502 bp, Homo sapiens
  I.3701 (AI148036)
tgggagaataatgtcagtttactgaatgaatacatggctcgagtccattcagggtggagtgaggcctggcaggtgccctcagcagtgggaccccaggccactggacctggcagggcttctgggctaagggggcagcaccaggccagcctgccaggggctccacagtcccacgctgcttgacctgtgctgtctgggactagactggtcgctgtggctgcccatagatgctcaagccagaccccaaaagagagtggcacaaggtgaaaatctaactgtgaacgctttggtttcagtttcagtaaagaggaggagggagggaggcacttggggacgtagaaagaagggctggcgggagaggtctccgccgagctccacagttggcttccttgctagacgacctggctttgagaaatgctgccttcatttccatctcccaactccgaatctccggcaacccatattaacaaagtgctgccaaccaggcgagtcatgccaggatgcc

SEQ ID NO: 3702 - DNA, 465 bp, Homo sapiens
  I.3702 (AI148033)
  misc_feature (271)..(271): n is a, c, g, or t
tttaatgagacaggagtttattctcttctgtcacattccagaggtgagcaaggcaaggctggtggggtggctcctgtttatccatctccctgtggttccaagcgaactgctccaggttgtcaccatgtttccagtcaccaggtagaggaaagaggaaatggagggcaagcgcctgctttttaaggatgtatccaggggttgctcaaatcatttctcctcatatgtgttggccagaatgtagtcctgtggccacacttcctggctctgcggngttccagatggctctcattttattctctttgggcagggctcacttggggtagcagtcactatggatattcatgaaacacccaaagttacctggtgaaggactttctttctacctgaagggaagcaatgttctcgtgtttgtgtgtatgctcaacattaaaaactattcagctcctaaagcagatacagtctttt

SEQ ID NO: 3703 - DNA, 327 bp, Homo sapiens
  I.3703 (AI147997)
tttcatctgatagtttatttaatccttgcaacaattctgtaagatgaacagtgtcattattctctttttctgattgagcaaactaaatttcatagaggctaagggactttctaaagtcacacagctagaatgcggtggtgtcaggattcaactccaagcggtctgactctgcggtcttaaccagtcttaacccacctctctgggtgatagtccagaaatgccaccaagatcacatgtacagccaaggcagacataatgatcagccagggcagggattccctaccaaacacttactccatcttcaccacttttaggatctttcaaata

SEQ ID NO: 3704 - DNA, 323 bp, Homo sapiens
  I.3704 (AI147412)
tttggtttaaaatattaggaatattttaatgtttaccttaatatatatggtatttgcaatattatttatgcaactttctgtacatttaatttttttccaaataaaaaattaaaaaattgtttcctttttgtagaaacaaaatcattcttattgaaacttgaataataatattgggcattttaaaaaatctacaaaaacaaccacccagcacatacattttataaaaggcagtagattcatgtgtttaacacaagtaagtgacatcaggatctagacatgtcgtttgtcccgtttcctcaccttgactcttcacatggtacgta

SEQ ID NO: 3705 - DNA, 414 bp, Homo sapiens
  I.3705 (AI147341)
tttctttgtcatttgtatttattttttttttgcagatgaatttgcagagccccatccactcctcaccagattgtatcctcacccatatctgaatttctccctgctcatattctatgtcccaggatgatatcccaagacaaaggaggagtgccccatcatgacatgaagaaccgctcagctgggagccaaattcgatgtaaattcaggggtttctgcagaggactgctagtgtttctttctgggtgggacacaggacaatgaaacactgggagatgtctgttttttggtgtggtgtgcttctcttctttacagaagtgtggttttctttgcaggggcaggtgatttggacattggcaggtctctgcccacctctcaatttgctgcagactcatgatccacacaaaaataaataac

SEQ ID NO: 3706 - DNA, 281 bp, Homo sapiens
  I.3706 (AI147315)
ttgctttttaatcacactttatttaaatgcacaaatgaaggctgtgaggctggcttctctgccttccttctccctaggtttccctctgggatggtaattaggaaatacaacccaatataggaaatgagcattgttgcttttatgaggattttaaaccaaatggctttgctacggtagcggaaggagcttctcgccctcagaaacccagcaggttgttccaggttacttggtacttcttgccttttggaaaatggctccttggcctcctgcaaggcattcct

SEQ ID NO: 3707 - DNA, 594 bp, Homo sapiens
  I.3707 (AI123529)
ccttctgaaagcttagcagagatacaattagctaaaaatttctgcagagtcggctgcagattcatcaagactttattccatgtagtttcatttgtaccactggctcttggctgtttttcatgtttcaaacctcttattgcatatttcttattgaaatgctaaagtaactactctcatttctgttctttcctgtatcttgcctaggaaatttgcattatttaaacatatctccttaaatatacaactgtagatcagtctgcttagcatttggattctcgtataactcagtgagcacttggcttctgatgtggtgcagacgttacatctcaggcctatgtggtggttgctaaatttgctaatcactatttatttacttatattgagatatcaatttaaaatttcatgactctcaataataagaacaaaatctatagtatctatctgtacagtttttatttatatcagattttaagaagacaaaattatagcattaatttgcaaatatactgtatttttaggacagtaacttatttttggcaaccaagtgctgacaactagaaataagtctgaaatcatgaggatactaaaataaca

SEQ ID NO: 3708 - DNA, 435 bp, Homo sapiens
  I.3708 (AI123502)
ggcatgagccactgcgcctggcctaaaaaattgtattttataaatatatgtgcttagcaaaaagtgtggaaagatagataccacagttctgcacagtggataacaagtgacttattactatttttatttcttttctgtatctaaggaattttctataatgagaaattaatcatgagtcttttttagttcaaaatacagagccatttagaaagttaagtgctttaagtgtgatgcaagctgcatcataagttcaagggaatttagagctttttttttttttttcttcatcagagatacagcttcaacaaccaccaaaaaatggagctgttcatcatagcatcagatacttcaacacatttctggaaatcagaagccacctgtctggcacaaatctgaaaaggaagatggggtacgggtgtcctttttgcctgcaca

SEQ ID NO: 3709 - DNA, 415 bp, Homo sapiens
  I.3709 (AI097067)
tttttcatagatataaaaagatttattttgggaattggaaatggaggtcaagaagtcccactgtctgttgtctgaaggtgaaaaaccaaaaaggctggtggtatataaccaggggagctgatggtgtaagtccgggtccaagttcaaaggcctgagaaccaggagtaccagtgtccaagggcaggaattagtgtcctggatgagaccagctctctctgccgtcctagacagattgttttgttttttccaatttccaggatctccaaatctccttgctggtatcccccaaagtaattccctggttgttcatatgcccttgggtagctgggagaccaggtagtgaagtagaacgtgttctcaactgaggcatcaggagagcgagttcttggacctcgtctgccacagacttgctctt

SEQ ID NO: 3710 - DNA, 447 bp, Homo sapiens
  I.3710 (AI093876)
ttttttttttttccattatttcattttaattgactttaatttaccatgcactataaaactataaaataccatgaaaagatgttttaatattataaaataggactcaaaattaatattttataggttccttatcttcaattccaaaaatccaaaaaacttctgaaacccaaaataactcatcttgtggtaaaccttacccaaactgatatgaagctatttacagtctttatcctatttagtgcgaacattcatacattttgttgcagaaacagtaacacttttgaagggggatattgcactggactctattggaaggctacacattactaccttgcccatataaaaaaaaaaattcctaattccataacctattagaccctaagagtttgaatggtggactgtgatcctataattgctaacatttattgagctattaactgttatgtt

SEQ ID NO: 3711 - DNA, 414 bp, Homo sapiens
  I.3711 (AI093704)
cctttccgatacttcatttattgtctaaatatttttgcgtctcagcgggcccctgtcgctcttggctgataggtcccagttctctccccgacccctccctgaggaggacgttgcctcctgcccggatcgccccagctgctgccagtttttcttctctctttgtagaaggagaagggggaggggtgcagatgcgatgctgtgaccctccccgctggcctccacaggcctggggcttgctcacaggctgggatgaacagggacagggtggcttccccctcggttccccacctctggacatggggggcgggcaccacagaggaaaatgagtgcacaagtccccggccgagtcaggagcgtggactctggcaccgacttgccgtgtgacctggggcaggtcgcttccctgatgcagca

SEQ ID NO: 3712 - DNA, 206 bp, Homo sapiens
  I.3712 (AI093653)
tgagacagtgtcttactcagttgggactacaagtgtgtgccaccatgcccggctatcttatctacctatcgacctgagacagggtctccccttctgttgcctgggctggagtgcaccggtgtgatctcggctccctatagcctccacctcttgggcccaagtgatcctccaacctcagtctcacgagtagctgggattacagctgc

SEQ ID NO: 3713 - DNA, 200 bp, Homo sapiens
  I.3713 (AI090934)
  misc_feature (200)..(200): n is a, c, g, or t
catgtttctactgatttattttagggcatgagagacggcatttgctcattaattatataaaatttttatatggctgtagacttttagatatccaatatgtgcattaaagtgtccaaatagcattttaaactttgcttagtcagtctcttatctattactcagactagaaaactgactatttttagggcatatgtcccctn

SEQ ID NO: 3714 - DNA, 519 bp, Homo sapiens
  I.3714 (AI082087)
tttttgagcactagtgtgtctttattatcagctacaataaatgtcaagtccttcctcgcctgcatgctctagcaattgtgtgaggtggatgttttgtctccatggtacaaagcaagctaaggaagttcactaacttaatcagaattacccaacaaaaaaatggtgagatggagaattgatcctacagccatctgcctgattcaaccataccaccctgcatctgcatctggttggcagacccagtcatgctcattcctcggggcctgtctgccatgtgggagcagatgggaccctaccatgctctcagtgttggggtcattgctttcctcatgggggctcatactgtgagtgagcatcacgtggtgtacttgatgctgtggctgagatgaccttccagaaacccataaaaggtgcttggctgcccacgtgttttcagcccttctccagtttgaacagtcaagggtggtggtaggggggtcatatgtcatacacagatgctctgctggctctcctgggtga

SEQ ID NO: 3715 - DNA, 451 bp, Homo sapiens
  I.3715 (AI081439)
tttttaacattcaactaattctcaagtatttaataaaaggtttatcttctcctatcctttctgtacatcccaccatagatatccttaccaccagcccccaaattaagagtcttgctactctaagtttcaagctgctgtcaataaagtgattcaccttttaaaaacaatagggaattgtagtacaggaggaaatgttcagtcatcaaacatgacctgcatatcacaatgtttatgtttgctgggtgtgaccctatcctgtatgactcttcactgcatttactggggtgtgtgtatgtggggggcggggcagggatgaatgataggagtgtgcaggctgggatgccctagatccctggagggtgggtggaaatgcaggtgtaattgccagtccatctcagggtttagctaccaaatactgaagggaggatctctaaagtgctcttttcctgct

SEQ ID NO: 3716 - DNA, 438 bp, Homo sapiens
  I.3716 (AI078779)
ccagatttgcagtatatttaacatttatcacattttacatagaacacacacaagtatggccgcaagtttccctcacttggggagtgtgatgaaaatctacatcaaggctgtgtgaacagtcctccagggccaagccatacatgcagtgataaatcagggccctgacccagactccaaatataagacacttggcacagagccctgctgaccgctggcactctccaaatgttatcctccacctcccacggccccacagaatccaagtgttctttcttacatgggcctgggccagcacccagtggtcagcgttgggaagagcgttggaggtgctggcacaacggctcagagaagggtttgtacttggtcgtttatatccagcaaagggctggaggtggttcacaggtttcccacaatagtgcgagatgagatcgggtggga

SEQ ID NO: 3717 - DNA, 447 bp, Homo sapiens
  I.3717 (AI077451)
ctcttcttgtctgcatgtcttatttcagtaaggcagtcttcatcttttctgaatgtcttatttcagtaaggtggtcttcacactctgatatcctttcttccacttggtcaattcagctgttgatacttgtgtgtgcttcatgaagttctcatgctgtgtttttcaggtccaccaggtcatttgtgttcttctctaaactggttattctagttagcaattccttttgtagcaggaggagccacagacaaaactcctcagacaccgggttaaagagggaaggagctttattcagctgggaacttcagcagacttgcgtctcaaaagccaagctccctgagtgagcaattccgtcccttttaagggctcacaactctaagggggtctgcgtgagaaggtcgtgattgattgagcaagcagggggtatgtgactgggggctgcatgcactg

SEQ ID NO: 3718 - DNA, 488 bp, Homo sapiens
  I.3718 (AI056284)
ttttttttttttagagatatgtgtatttatttaaggtatgtaaattatgtcacatgactctgcaagtacatttctggggtccctcccagggccctgagaaagggcgtgaaggtcagggtccctgactctcaaacctcaccagcctcacggccctacatggctggcctccgggcacctcggcccctggtctactccctgacccctgcctgcacctctaaatgagttcgaaggagagagctccagtttctgcaggccccacccagggcgttctcgccccaggcctgccaccctgcctgcctccttactagtttggtgcctgctgctctcatgggctcccacattcggaaatacccaaaggtggtgggcatcgtctccacgttcatctggacagcccaccttcggggacaataagcccagccccaaggatcgctctgctcccagggagacagcaggactgtctgcagggaatgtagcttggctggctccca

SEQ ID NO: 3719 - DNA, 406 bp, Homo sapiens
  I.3719 (AI052789)
aaaattataatttatatttaatgttacaagtatttaaaaaaacgtatatttaaaacaccataaaaagtattaattcgctgtttttaccttcttttgcctgtaccaagtcttcaagagccagtgtgcattttacttccagcacctctccctttggaccagctgcattcccagcagccagtagccacatgctgccagcaggcttgtattggctagcacagccccagcctttagcaaacagggaaatgtaatattcaacatgcacagctgctcttagtaagagaaatccttctagactgtataaagcccttccctttgtcatccctgggcaatttttactacagcaaacccaaaaggtgaagaagtgcttactttttggtaagaggattttgaagagccttcttgggga

SEQ ID NO: 3720 - DNA, 625 bp, Homo sapiens
  I.3720 (AI052508)
tttttttttttttttcacttactttgtaaatggtaggtaatatctgttttattttcagcctgtgaaagacaaagacatcataaactgctgaaactgcgagaacagtcactccttgttccttccacaacatgctgcatcctgcgcacagtcctgaccccaggaaccagccccaggttctggctgagtagcctcttgtagaacagtgtttaatgtagcagagcaaggagaggagaaagaaaagactggccccgacatcggctcgtcccacgattcctgccactgcctccgtgtgaatggggtgagaagcaaacatcaagccagccatgaatgtccagtttccatcaccaaggaggatcttggagaagcttgtgaagagaccagtgactgctgcatgcaacaggacattgacaagatggtagctccagggattcaaccctccaatggcatggttcaggcgaaaagaaagagtgcagagtggccggtaggacttgtggctgccactgtgggttagaagagtcccccaaaaatcattgtagaaaatgtgcgtccatggagtttctgggagaaggtcctgattagtcttgatagcaccgctgtcatcatagcaaaaatccgccctcagggt

SEQ ID NO: 3721 - DNA, 351 bp, Homo sapiens
  I.3721 (AI142413)
ggagaaatcgcaagggcaaagttaaaatgattgaatacgtaccatgtgaagagtcaaggtgaggaaacgggacaaacgacatgtctagatcctgatgtcacttacttgtgttaaacacatgaatctactgccttttataaaatgtatgtgctgggtggttgtttttgtagattttttaaaatgcccaatattattattcaagtttcaataagaatgattttgtttctacaaaaaggaaacaattttttaattttttatttggaaaaaaattaaatgtacagaaagttgcataaataatattgcaaataccatatatataaaggtaaacattaaaatattcctaatatatta

SEQ ID NO: 3722 - DNA, 485 bp, Homo sapiens
  I.3722 (AI142349)
ctcttgaggaaggagacctccctgtaggtatgtcggctgtggactcttgcctgtcttctctgtgggatccaagagatagtcccatgatcctacgagagagtagatgtgagccagccaaaagaaacatcaaacagaggcccaggaataaattgcaaaatccctaaggatccaaaagatctgcaggattcctcaggcctgcctagatgttgtaggggtgagtctttttcaaacttgttccattgtgatttctagttacagcctgcatgttccctgggttgctgtctcccaaaaggggatctagcaaaaccatgcagcgtcagaagctaacaagcagtgtgtttcttcaggattcttgcaagtgttggatgtctgcctgtgtgtgtggtattttgtgtgtgtgtgtgtgtgtgtgtgtgtgcgcctgtaagtcacttctgcttaaaggaatgtggcaaacacactccagggcttcatcttttttgagt

SEQ ID NO: 3723 - DNA, 306 bp, Homo sapiens
  I.3723 (AI142323)
taggacctcaatggggccttcccaccttcctctcaggaatgccttgcaggaggccaaggagccattttccaaaaggcaagaagtaccaagtaacctggaacaacctgctgggtttctgagggcgagaagctccttccgctaccgtagcaaagccatttggtttaaaatcctcataaaagcaacaatgctcatttcctatattgggttgtatttcctaattaccatcccagaggaaacctagggagaaggaaggcagagaagccagcctcacagccttcatttgtgcatttaaataaagtgtgatta

SEQ ID NO: 3724 - DNA, 497 bp, Homo sapiens
  I.3724 (AI142320)
ggtagccattggcagagcagtgggcacccagcctcccccataggccacactcccttggtcccctggcatcctggcatgactcgcctggttggcagcactttgttaatatgggttgccggagattcggagttgggagatggaaatgaaggcagcatttctcaaagccaggtcgtctagcaaggaagccaactgtggagctcggcgaagacctctcccgccagcccttctttctacgtccccaagtgcctccctccctcctcctctttactgaaactgaaaccaaagcgttcacagttagattttcaccttgtgccactctcttttggggtctggcttgagcatctatgggcagccacagcgaccagtctagtcccagacagcacaggtcaagcagcgtgggactgtggagcccctggcaggctggcctggtgctgcccccttagcccagaagccctgccaggtccagtggcctggggtcccactgctgagggcacctc

SEQ ID NO: 3725 - DNA, 501 bp, Homo sapiens
  I.3725 (AI142317)
gtacaatgtcctactgtgattatttcaggaaaccagcaacatggggacagataaaagtaagaagcaggttaccttcgctctctggttttggaaccacacctggacgacacggacactcagccctgtctctgcagccagagtctctctcaccttggaaaaattgaacgagaaatgtagacacactggcatctcagggtaggaggtagaacatctcctatataatacatgaggaggccaaaagactgtatctgctttaggagctgaatagtttttaatgttgagcatacacacaaacacgagaacattgcttcccttcaggtagaaagaaagtccttcaccaggtaactttgggtgtttcatgaatatccatagtgactgctaccccaagtgagccctgcccaaagagaataaaatgagagccatctggaacccggcagagcagcgaagtgtggccacaggactacattctggccaacacatatgaggagaaatgatttgagc

SEQ ID NO: 3726 - DNA, 477 bp, Homo sapiens
  I.3726 (AI142285)
aggttttggatctgagagagttggccatgcagcagcgtttcggatccgagagctggccatgcagcagccattaaggatccaagagtcggtcatgtgggagccatttcggatctgagagagtcggccatgcagcagccgtttgggatctgagagtcggccatgcagcagccgtttgggatctgagagagtcggccatgcagcagccatttgtgcatgcttcccttctcccagccccacaggagactgactctgcatcctgcctcctttcaaatgcatcctgtgccaacagtttctgaaaacggataaacaaattgacaacctcaaatgcaaagatgaaacatttctccagatcatcaggcacatggtttactcaggcccagaggagtgagctgatataaagaagctgtgccacacagtcggatggggtccgaagaaacaatagggctgagtgatgagtattgaagaagaaatctaaag

SEQ ID NO: 3727 - DNA, 443 bp, Homo sapiens
  I.3727 (AI141692)
ttttgctgttattcatattatattgattattctgccccagcctgtgagccgtgtcaactcttagaggaacagcaatagagcacaggaatggcacatagaacatgggctctgagcacaaaaacgagctgtgtaactcaagttatttaaactctctctgcctcatttgcctcatctgcatactggggttactaacagaccctacctcatggagtttgggaggattaaatgagttcatccgtataaagctgttagtacggcgtctggcacctggtaagggcccagatgtccactgctgtagtgtattgcagtagattgtttccaaaggtggctgcaacaatttgtcccattgaaatatgaagagacagagtctgtttccttccccttgaatcttggctggccctatgacttgtggaagaagtgacgttctgggacttctgggccat

SEQ ID NO: 3728 - DNA, 468 bp, Homo sapiens
  I.3728 (AI140949)
ttttataaatacagcatttatattttctgactgaatctcaaaattagttggggcattgggaaagaatttaatttgacttttgagtgtaaaccaaggatgtatttctttgaaaagataaaacaagagggctaatcatcctaaacatgaatgtctgcacagattgaaattcccaagatgcccaggagcccagcctttgcacagcctccagcaccgacattatgtgtgttttcaaccacttcccccttatacaaagggatatgtttgcagagtttctcaatgggtgaccaagcaggaaccaatccacgtctttgatcagagactccagagggttgtacttgacccaggtgtatttgctggagaacatgttgtccagagcctgtttctcatagatgtaccattggagattgttcagaggagggatgttctgatggtccatcttcaggataaagcaggctcttcgggagagca

SEQ ID NO: 3729 - DNA, 490 bp, Homo sapiens
  I.3729 (AI140065)
cattctctatgacagttttattctcccataggagttccgcccaaacaaaagataaacgcaaataagtgcacagcctgcatcacagggaaggtgtgctggggaggagcacaaataaagtatcatagataacacaaaatatttatttcctaagaaataatccagtactgtgcagtcaaaatatgtccataagaaacaaaatccacctctctcacattttatttattcttctctattctcacccattttttatggaagcactttccagcaattaataatccagaaacagaatatgctattttgatgagagtatgctgttcccttccaggactaaggatgtaaacaaaagtaataggtaaagagtgtgcccagtggttcttctctcagcccaagtctgctggaaaagtgaggagattctggggcatatattaaaactgcttcccagggaactggcaatcaatcaatattgaatgatcattgagctgagcatgaa

SEQ ID NO: 3730 - DNA, 517 bp, Homo sapiens
  I.3730 (AI138521)
ttttttttttttttcctgcttccaattctttaatttgacaaagttacacattactggatgacagttcacagaacaattaggaggaaaaccacagctcttatctgcttgctgtaaacaacagatttcccagagcctggaacaacttctgtacctttatgcacttccaaaatgttcctggatttctgacttgtgttatgactcaggagcacataaaatggtctctgatcacagatttgatgggcatttctgcgtcagtatacaaagaccagtttacatctatcccacaaatggactctgactcctaggacacatcagtgcattcacaaagtccagggcccctcacagtcagctccacattcttccaacacacccctgccacactcaaacagcctccaccttcccactgtccagtgatgggcgtttggcatgtttgctcctaggcacaagagaattcaactcaactagactcaacatttatttccaaacatttattcagtactgacctgttcaataaatg

SEQ ID NO: 3731 - DNA, 364 bp, Homo sapiens
  I.3731 (AI123448)
tttaaaatctgaaacgggagcttccgcatttattatttgcacgtggttttgaggcgcactcctggccacatcacagctatgttctcttgcctctgggaaatacataaaatgcctagcaacagttcctggtggcggctggtccccataaacgccgctggtcggcccccaccccacctctataccacgacccctctcccagcccggggactgtggtatggaggccgagagaggcccattttaaggaagaagcaagacatatgcaccatcccatccaaggagtaaacaggcgggggggaggtgggcgtggcctcgatcaatcacatcccctgaagctgcaccacatgcacattttaggctggaaata

SEQ ID NO: 3732 - DNA, 493 bp, Homo sapiens
  I.3732 (AI084482)
tgaaaatacatagatctttattggtcttgtcagaggcgtttgaaccagagcaactccatcttgaataggggctgggtaaaataaggctgagagctactgcgctgcattcccaggaggttaggcatcctgtcacaggatgagacagggggttggcacaagatacaggtcataaaaaccttgttaaaacaggctgttataaagaagccagccaaaacccaccaaaaccaacatggctacaagagtaacttctggttcccctcactgctcattatgtgctaattataatgcattatcatgttaaaagacactcccaccggtgtcttgacagtttgcagatgccatggcaacgtcaggaaagtaccgtatatggtctagaaaggggaggaaccctcagttccgggaattgtccactcctttccctgaaaactcatgcataatccacccctcgtttagcatataatcaagaagtaacaataaaaatgggcaaccagca

SEQ ID NO: 3733 - DNA, 421 bp, Homo sapiens
  I.3733 (AI083525)
taaagatactaagtgaacatatttattttttaaagtgttaaagtgattaaacaatgtagacgtgaatgaaataaaaagcgtaagttccccatcttcatttccactccgtagagctgatcagtatttttacttgcagacattagtggagccgtagagaaagaaaccttttctcccaaagaaggcattactttacacactccattctgcaacttgttttgttcacttgctatttcacgtcagcccatgcagatgacttaaaacaaattcaaatggagaaaagccttaggcatgtttttctctgcactaaagaggccctgcaggtggctgtgggcaacttatgcagtggcttcgagtgaacgaacgtaattagtaattaagcaaagcgggcatccaggacattcagtttcatcttcctggcact

SEQ ID NO: 3734 - DNA, 488 bp, Homo sapiens
  I.3734 (AI081784)
ttttttctgcatattgctcttttattttgcatatttctttgacttgtatattgaaatatttagttcaacattcatttgccataattttactttagaaatcgtttgtgattataagaaataatgtcagcttttaccttattggaaactgataacatacaatttaaagttcaccaggcccaagatcatgttgatttgctgatgtataataatctgctttcagagttataagcaaaatcacttagttcacaattccaattggatggcatcccaagggcttagattcaagaacaaatgtgatattgggagtccccaatttagtatgttatcaaatgaattagggcttgatagtctaatcggtcttgaccaaaacttcattttttgaagataacaacaaaggcggtgattacagtatgaattaggaaagccataatagaaagaaaacaatttagctgaggaagaaaagcaatcagaattaggatttagagatt

SEQ ID NO: 3735 - DNA, 440 bp, Homo sapiens
  I.3735 (AI080364)
tttgtcataattaaaattttatttcacattaagtcagtatctcatacaatagacaagacattgagtcatgatgatggtcagagaatctacagacactaaacaatgaagttggtcaaatgacaagaaagccattttaagtcaacattataaattggcaagcaagacaaatcaaagttgggccttacagttcttgcacatgcagtagtccagcaagactataagtccaaaatgtatccaaaagaaccatcacagtttagagatttgatgtattttaatgccatgaaatatggccttctccatcacctctacatactttattcttgtaagttccaaagcgagtttagctcttccctgttgcaaatctaagatatccagtaactttgccaactagtaatatcactacaaaagaaaaacaactacctttacaggttaggttgtac

SEQ ID NO: 3736 - DNA, 472 bp, Homo sapiens
  I.3736 (AI077580)
  misc_feature (459)..(459): n is a, c, g, or t
ttttttttttttccccaaaagtagctgacatttattgaatgtttgatttctcagtacaagacactttaccaaatgctttccatgtagtcttttgtataatccctaggaggtaggttccataaaaattcctattttacagatgaggaaattaatgttcagggaggtggaatagcttactctaagcccagagcgataggttttggatttgaaccccggcaatccgaccccccagaacttaacaatgtcatcctttgttgaatctctggcacagtgtccaccaatgtcttccgggggacccagtgtttattgagaatatttattgattgccattaagtaccaggcattacccccaatgctagttatattaactcatttaactctcgaaagcactctgtaaggcagatattattatcccactttatagaggaggaaactgtggctcagagttttcttaataantgcctgccaaaaa

SEQ ID NO: 3737 - DNA, 336 bp, Homo sapiens
  I.3737 (AI039866)
ttttttttccgagcttgtgctaagcctttattgagcactactgagggtcaagctctgggcttgactttgtaatcccaagaggggcaaaaaccggctgctttcacgacactcaggaaaacacgggcggagaaagctcactgatcacttggacctaccaagcgagcgccccctggagaaaacgctgggatcaacacgcatttgccaagcccaaacggtatagggggcactgctggaaaggccgggaaccttccctcttaacctcccacccaaacccatccctcttttgggaacttggcaggcaatgaggagtagtggccctcttaaaatttttaaaaa

SEQ ID NO: 3738 - DNA, 388 bp, Homo sapiens
  I.3738 (AA938869)
attgtttttatttttttgttttatttttagtgggaggactggagatgggggggaaaagaaattaacttcatagaaaatgcttttcttttgctggattttcaagttaaaaataaccatttttatgaaaagaggagaaaggagagtattaatttttagaagcatcctaatgcatgtaaattccaattccctaaaaaagagacagtccaaaacagtagataacttctgtttttgaataaattttctcgagtagctactatctgagagtaaagtgaagaaggaaacatgataggtaccgaaaagtcaacatgaaattaaaaattagctatgaaaaaaatctaccaaatggatagcttgctggtataatcaactgtttattctacgtatttca

SEQ ID NO: 3739 - DNA, 283 bp, Homo sapiens
  I.3739 (AA913044)
cattatctcatttaatcttcatgacaattacacaggtttgtttctgttttcaaatgaggaaactgaggcagagagattaagcaacttacccatggtcatgcagctagaaaatggcctagctggtatataacagattttatactttcaaggaaacatgttaaaccatactggttatctccagatgacttgcaggaatccaagaccattcactcctcttctcccatgctttcaggttgtgggttaccagcaggagggtagagcgaagaaaggtggggcccagcat

SEQ ID NO: 3740 - DNA, 1134 bp, Homo sapiens
  I.3740 (U80770)
gatgctttatcctttgacattaagaatgctgtttgcagaagtaacattcctttgaacactcagctttctgaaatggtgtcccaccgcaaggactggagaaggacacaaagcaaattcgagcgattttcttatttgagttcaaaatgggctgtaaagcagtggagacaactcgcaacatcaacaatccatttggcccaggaactgctaatgaatgtacagtggagtggtggttcaagaagtctggcaaaggagatgagagccttgaagatgaggagtgtagtggctgaccattggaaattgacaacaaccaattaagagcggtcatcaaagctgatcctcttacaatgacacaagaagttgccaaagaactcaatgttgaccattctttggtcattcagcatttgaagcaaattgggaaggtgaaaaagcttgatgagtgggtgcctcatgagctgagcgaaaatttttttaaaaatcattgttttgaagcgttgtcttctcttattctacgcaacaacagtgaaccatttctctatcagattgtgatgtgcaaggaaaagtggattttatatgacaattggtgatgcccagctcagtggttggacagagaagaaactccaaagcacttcccaaaaccaaacttgcaccaaaaaaaggtcatggtcaccatttggtggtctgctgccggtgtaatcgactacagctttctgaaccccaacaaatcattacgtctgaaaagtatgctcagcaaattgatgagatgtactgaaaactgcaatgcctgcagccggcattggtcaacagaaagggcccaactctttacaacaactctcgaccacatgtcgcacaaccaacacttcaaaagttgaatgaattgggctatgaagttttgactcatctgtcattcacctgacctcctgccaactgactaccacatcttcaatcatctcgacagatttttgcagggaaaaagcttctacgatcatcaggatgcagaaaatgctttccaagaattcatcaaatcccaaagcatggatttttatgttacaggaataaacaaacttatttctcattggtaaaaatatgttgattgtaatggttcctattttgattaataaagatgtgtttgagcct

SEQ ID NO: 3741 - DNA, 1576 bp, Homo sapiens
  I.3741 (U80766)
agcctaattcattcaacttttgaagcattggttgtgcgacatgcagttgggtgttgttgtggagaagaattgggccctttctgttgatgaatgtcagctgcaggccttgcagttttcagtgcatcacattgatttgctgggcatactactcagatgtaatggtttcacagggattcagaaagctgtagtggatcagaccgtcagcagactaccaaacagtgaccatgatcttcttttcgtgcaagtttggccttggggagtgctttgaagcttcttctcaatgcaaccactgagctggtagtcaccagttttcatataaaatccacttttcatcacatgtcacaatctgatagagaaatggtttgttgttgttgcatagaataagacaagatgccatttcaaaatgatattttttaaaaatttttcactcagctcatgaggcacccacttatcaagctttttcacctttccaatttgcttcaaatgccaaaggaccatagagtggtcaacgttgagttccttggcaacttcttgtatagttgtaaggggacaacttagatgattgctctcatttagtcattgtcaacttctgatggccagccactatgttcatcaccttcaaggctcttgtctcctttgcaaagcttcttgaaccaccactgcactgtatgttcattagcagtttctcagccaaatgcattgttgatgatgcaagttgtctctgctgatttataacccattttgaacttgaataagaaaattgcttgaatttgctttttgtctaacataatttctgtagtctaaaataaacataaaataaacagaaagtaataagtcattagcaaaataacataaagtgagaaatgtccattaaaatgatgtataacaaaccacatttatttaagaatgtattccaatatcaaacagcaaattccaccaatacaaaaaaaatgcaatgagtttgcaccaactaataagactaacaactgacttcacgtcagaaaccaaggaagctggaaagcgtgagatgacatagttaaagttgtggcagaaaagggtgtcaactgagaactccatctacctcaactcatattcaacaacaaaaagaaaattaaacattccagaaaacaaaaactgagagactaatacaattaatattaaagtgaatctttcaaactgaaatgcaaggacagtatatggtttctcaaatacaaactaagaaataaagaacaccaggaaaatgttactacattgtccttaggtcaatatctttctgtttgttactcatttcttgttctatctcttttaaatacaattgtataagcaataattataaaattatttgatagcttaacaaaaaatatagaaagagaaaaagggaattttaaaactatgttagaaaataatctatttaacaatcacaaaagacaggaatggatgaataaagaaatttttaaaaataaggcacatagaaaataaatagcaaataacagatgcaaatcctacttcatctgtaaataaactaaattgaataattaaacatcccaaattgaaggtggatattgaaagaatggat

SEQ ID NO: 3742 - DNA, 1323 bp, Homo sapiens
  I.3742 (U92019)
aattcggcacgaggctcctatgctgaatgcttccttccctcgaacatcagactctgggttcttcagttttgggactcagactgctttcagctttgcagacagcctactgtggaaccttgtgatcgtgatctatttggaggtactaagaaaaataagacatcagtctgaaaagagctcctatcaaaacaccataaattctgctaaaaggcaagcaaggagaaacatcaaatttatggtgaagcttggggggaagaatgatgaaatcattgatactctatgaaaagtttatagggacaatggccccaaagaaatcagcagtttacaaatggataactctttttaggaagggactagaaaactgttgaaaatgaagcctgaagcagcagaccatccatgttaattttcaaggaaaaaattaatcttgctcattccctaaataaagaggactgataattgacagcaaagacaatagccaacaccatagccaactcaatggttcgacttacacaattctgactgaaaagttaaagttgagcatttccactcaaaggtacaaaaatttatgtgtccagatcagctgcagacaagagcagagctttcagtggaaatttcaaacaagtagaattgagatcctaaagcatttcttcaaagagttgcaacagaaggtgaaacatggctttaccagtaccatcctgaagacaaagcacaatcaaagcaatggctaccaagaggggcaagtggtccagtcaaagtaaaagcagactggtcaagagcaaaggtcatggcaacagttttttggaatgctcaaggtatttttcttgttgactttctggaaggccaaagaatgacatctgcttattatgagagtgttttgagaaagttagccaatgctttggcagaaaaatgcccaggaaagattcactagaaagtccttctccaccacgacaatgctcctgctcatttctctcatcaaacaaaggcaatcttaagttcctatgggaaatcattaggcatccaccttaccatcctgcttcggttccttctgacttgcttttgtttcctaatcttaaaaaatatttcaagggcactcatttttcttcagttaataatgtgaaaaagattacattagcatggttaaattccctggagcctcagttctttggggatagacaaaatggctggtatcatgtcttacaaaagtatcttaatcttgaatgagtttatgttttaaaaaaaaagtatattttttaaatttttatcttttatttccatttttcataaaatgtttgaaattccctcatgtacaatttaaacccgcaagct

SEQ ID NO: 3743 - DNA, 446 bp, Homo sapiens
  I.3743 (AI126650)
tttctttcatattattttattagtacttataaaaacaatttatgaaaatattttccttttcaagatatagaaactacgctctgcaaaatatacatacccatagttgttacaatacatatccttgtatacaccttggacattgtgtttaagaatcacaccctgtaagggctagaagaaacattttctctaacctcagttatatagtgtgacattcaagtacttaaactacattgttcaaacaaaacatgtctctagtgtatgggcctaaagggatttaactttctaggtgccattgattctttcactgtgcaaggtaaagaactggaagagggttccctgagagttaattcaccttaggtagctcaagtagtggtttactgtccatactttatcatgaaactaaggaagggaggaaggccatggaaattcaacttgggcaggtctcc

SEQ ID NO: 3744 - DNA, 403 bp, Homo sapiens
  I.3744 (AI123944)
ctttagaaaactggctttaatatggcatgtacaattcctgtgaattgccagatttatgtaaagattgacagggagaaattcttcagtcttctatcaggatagagctctgctccagggaacgcttatgcaaatcttgcagattttcttgctggagtgttagatgaaaagaaactagtaaagagtttgaacctgggaaacgcaaagaattttgggaaggaggactgattgtggttttgatttgaatttgacacacgtgacttttcttcaacaacttctctgagaaggatgaaaatcacgttaaatgaggctatataagtgaaagggtttataaataggattgatttatgtgaagggaaggcacgcacaaacaatagttactttatgtttcaatgtaaaatagtca

SEQ ID NO: 3745 - DNA, 657 bp, Homo sapiens
  I.3745 (AF088043)
tcctgcagccgctcctggattggagcagtgtgctctggcgggaagggcccatcccgttggtcgaggcctgacaggcgcttagcgggcgactccctccccattggccgagttatggagcgctccgaccagacagcgtctcattggccaaagatgggagggttccgcttaaagaccgcctcttactggccaggagtggacttggttagggctaccttctcattggttgcagccagaggcacttctgcccgggctgcctctcccccgctagggcctggtgcctctggctggaggctccctcccttggccgtcccaatagagcccggggctacttccactggccaggctcccgggcatctggttgaccccagcctggggaggagggctggtctccgctcctcaggggcttagtccgtcccaccccttcccttccctggcgccccgggcccaggcccctcagctgtcagctggttttgatggcctcccactgccccacacgccgcgggacctccaggggcgactctagtggcctgaggagatgtatttataggcccccagcagggctgctcccccctcggccggtgccccaggatgggctcctcccggcgggggcttggccaaagctttcttaataaaatgcctttcccctcaaaaaaaaaa

SEQ ID NO: 3746 - DNA, 480 bp, Homo sapiens
  I.3746 (AF086527)
gaaactcccaattccgtcccattaggatgccctcaaggggccatgcagggatcttcccatacttcctgcttccctgatctgaaccaagattggaaagaggcaggcagcagagaagatgcccaagaaactctgacatatccacagcttggctctgccccttgggcttcactggggtttgggcctccctcttggttgagctgagtgtgcctgagtgggtggggacagggaggattctccaggtctatcttgatttcataggtccttctcaatccaaggtcaaaaactgagaatcttattttctgcaccaggaactcagggttatccccaacctatgccgctggcacatgatggtcatccaacctgtgtttttgtgagtgagtgaatgtgtgactggttggcctctgagtggatgactggatgcgtgaatgtgtgagtgaatgggggagttaatgaatccctacctaactgtgaaaaaaaaaa

SEQ ID NO: 3747 - DNA, 432 bp, Homo sapiens
  I.3747 (AF086525)
gacgcggcgaggtgaaaaatcaccttgggggcccaggttccccacgaacagctaattctcaggtacggaatgggctctggagggccgcgaggtgagcgtgcactgtcaggaaggtgcagcacgagtcttcgggcttcagggacaggggaatctgccccctacacccctgctcggccatttacctagaaccaaacagcagccaacctcgagactgattctgacagcaccaggagtaatgaagttctctaaattcgataaactattgaaatttcccttcttcctttcccataatgcccaaacgacgctgaatcggcagcagaatgcaggactttggcctataatcaatgcaaaattcattttgctaagctacgtaaaagctataaatatcactcccctacacagataataaaccttggtagcctaaaaaaaaaa

SEQ ID NO: 3748 - DNA, 681 bp, Homo sapiens
  I.3748 (AF086331)
gacaaatgacaatagttggaccccacagcaatcattacttttgtagacagcaaagttatgctccttggcttcaggtgaagacccccagatccaggccagtggatttacaagtgagagtcagcagcactgggcatttcaggcaatagctctgaacaagccctttaccatgcgggtaggtaaaccccagaatatacagatgccccttacgatacatgggtggggagggtatgtggccgagagagcataagcttaggagacagagtggatttgaattccactgagcttttggctgtggacccatggggacgtggcatatgtctcgctgagccttagtttcctcctgcatggaatagggagagcaatagtacctgcctcattcagctaacgtgaggatctagagcagcatttgcataaatgacgcgtggggcacagagcagactcaacacagagcagcttacgttatgaggcttggcaggctgggagctcctgtcggcctctctcctcagctctgtgcccactgagctcggcacaagggttggcccatgacaggtgtttattatgtggaaataaatgagagggacaagacatttgctgatttcttcactgtttccaactgggaattcaaatgtatctcacgttcccataccctcacaataaatctgttcaggagaaaaaaaaaaa

SEQ ID NO: 3749 - DNA, 521 bp, Homo sapiens
  I.3749 (AF086292)
ggtgtgccatcacagcaaaggtagggtgtggccagtcctgggagaagctaagggttatgacctccagatccttactggtccagtcctcattccctccaccccatctccacttctgattcatgctgcccctccttggtggccacaatttagccatgtcatctggtggtgaccagctccaccaagcccctttctgagcccttcctcttgactaccaggatcaccagaatctaataagttagcctttctctattgcattccagattagggttagggtagggaggactgggtgttctgaggcagcctagaaagtcattctcctttgtgaagaaggctcctgccccctcgtctcctcctctgagtggaggatggaaaacaactgcctgcactgccctgtccccggatcctgccgaacatctgggcatcaggagctggagcctgtgggccttgctttattcctattattgtcctaaagtctctctgggctcttggatcatgattaaacctttgacttaaaaaaaaaa

SEQ ID NO: 3750 - DNA, 421 bp, Homo sapiens
  I.3750 (AF086217)
gtgaaatcactaagactcttgttccagggaagagaagaaacaaaaaactgaaggaataaaaagtttaagccacaaagcattaataggaacacttggacctgtacaagagatatgctgaggggcatggggaaggaattccttccttctcaagctgtaggtgtcaggctttggccgtgaaaatgacagtggattttctactccttcagcaaactttctggaaaccccatcacctgccacgtgtgtgtggaggtgctgtgtgggtatacaaaggcgaattaagatgtgatcctgggtcagggacagtggctgccacctgtaatcccagcactttggaagaccaaggtggaaggctcacttgagcccagaagtttgagaccaacctgagaaacagagtgagatccccatctttacaaaaaaaaaa

SEQ ID NO: 3751 - DNA, 440 bp, Homo sapiens
  I.3751 (AF086141)
cattgtccgcctggtgtggagaatgcattgacaggttctttgcggagccgagataccatgcagacattttgcttgttcaaaccaacaagacccagcaccgcggtctcctggtgccattattatgcagccagcggttctcttgtggagggggcaggtgacgtttcagaagacaccgagctggatgggactacctttctgttcatcaccacacagcagaatttctaatggaagtttgttgtgaatgtaaaggagggagcattctttgctttttaatatacaaaccatggttttttggagcaggattttgtgtaagaatggtgtttacatgcagtgtgttttccccctcaccttcaataaggtttttcaaaaaggaaatggaaactttttaaccaatttgtgaataacttttgtattaaaattttaagaacctaaaaaaaaaa

SEQ ID NO: 3752 - DNA, 547 bp, Homo sapiens
  I.3752 (AF086134)
ggaggagaagaaatagaagaaagttctgcaacaaccatgtctgagaacttccagtattaatgtcagacaccaaaccaaagatccaggaagctccgagaacaccaggcagaataaatgccaacaacctacacttggacatataattttcaaactatatgaaataaaagataaaggaaaactctgaaagaaaccagaggtggggcagaaaacaccttacctacagagacacaaagataagaactgcattcaacattgcagaaactgtgaaagcaagaagacagtgaaatgaaaaattcaaaatgttgacagaaaaaaacccaccaacctaagtttctgtacccactgaaaacacccttcaaaagtgaaggagaattaaggccttcctcagaaaaataaaaattcaagaaacttgttgccaggagacctgtcttgcaagaaattttaaatgaaattctttagggaaacaaaagatatgtaactgaaacctggatcaacatttttttaaaaagagcattaaagaaagaattgtggtacaataaaaaaaaaa

SEQ ID NO: 3753 - DNA, 512 bp, Homo sapiens
  I.3753 (AF086124)
aaaaaaggaaaaggccagggcaagtctcatgggaagaaacagaagaaaccagaagtggacattctcagccccgcggccatgctgaacctctactacatcgcccacaacgtcgctgactgcctgcatctgcgaggcttccattggccgggtgctcccaaaggaaagaaagggagaagcaagtgacagcatttcacaacacatctctgttacagacaacaggacctggggaagagaagtcaggataacacaactgttgccagcaacatagactttactccagacgacttgagatgcaaattaagtgtgcttttctgtgatggtggaagatcaggaaatgcaccttacttcctctgttatgccagatatggttagccactttggttttttaggagctataggatgggaaaagcctgagtaattcctacacagtgtgctgaaattaatagaactttcagaaattattataattctgggtcaggattaaactttgctctcagaaggcaaaaaaaaaa

SEQ ID NO: 3754 - DNA, 608 bp, Homo sapiens
  I.3754 (AF085936)
ttgaacctaatttattattcctttttctttttaattcagtctttgatctgaaggtaaaagtctttcgctattcaagtcaacgttgtaaacattaaggcacaataggacatttgtaaaagtatttttaatttctatagatgaataaaaatattttatggtaacttatttctccccctcttcccaccccctaaaaggatagcacagcagaaacaatcgcttgtttgtgcttttgctataggttagagaaagtgaggacatgtcatttccctcttaatcaaatataagccctcatactgttctccactagccttgtgctttgaggcttggtgtcaccctgttaaaatttgctagaatgaggaacagaggagactctccctccccaagtctgtgccttcagtctctgctacttacatccacccagtgttggcaaaatcaccagcagctccccgagcttctgttttttttttttgaaaaaattataaaatatgaaactgtgtgtaaaaaaatgcgcatgtacataaatttttttttttaccatttcccaaaagattgaaaattaaaggatttaattcaggaagtgagcaaggaaacaaattgtaaaaaaaaaa

SEQ ID NO: 3755 - DNA, 498 bp, Homo sapiens
  I.3755 (AF085926)
atcctaaattaaataagttactcatagtcgaataatttgaaaaactgaattataaaggaagaaaaaaagttttcaatttttaacagcaaaaattctacttaatatgggattatggtttggggtaaatgaaatctacaaatgttcaaaaccaaaagcctaaaaagatctaaaatagtctcatttctctgcttcaaagatcagtgaaattgctacctgagttcatccatttcacagttgatctgcatgggaaattatatgtgcttctctgatttttctttggatgtgtcgcttttattctaactgctggaactatttgttgtacctctttctgaagatcagtttggggctaaattacaagctccatcagcgcaggggccatggctgcctcctgactgctgtaggctgagcacttggtagagcatcagcccacagatagcagcccagtgaaccaatgaacaggtggaagcaagaatcaaagtgttaaatgagagttaacct

SEQ ID NO: 3756 - DNA, 574 bp, Homo sapiens
  I.3756 (AF085868)
acttttttcacttaaaggctaatctgattagctttaaaacatttgttcatcttttaattcagtatttgtatgatgcctatggaagacatatggatttaaatagaacttggctaaccatctgccaataagagaaagtgagatgctaaatcagagaggcaggaaagtctatttcagtaaaagctattttgatctgaaatactgtaggcagtcttacagagtattttaattgggaggatattgatgcatgctagtaaaagaagtgtatttgctgatatggttgaagttatgtaatcattaaatttctatataagtttagagatgtggaactatgtgaaattttgatcctgttaattataattttttttcctaaaaaagccatttgtggaaaaaaattttctgatatattttttagagcagtggcacgttttatatctcatgccagaaactagagcataaaatatcaacttttcaaataaattaactagaaataaagaacaatttattcagtgctaatttgttgatacttttttatagtaaactatgttttaaaaatttaactttgggaaaaaaaaaa

SEQ ID NO: 3757 - DNA, 249 bp, Homo sapiens
  I.3757 (AI081725)
ggctgttacatcaatttttattaaactaagagactaagatggctaggcttctactttatcaaacatgggacaattgaagttcactttagtcttctgtgagaggcttgcattttttaaagaaaaaaggacaaagtcaggagagggacaattgcaaacgtcgtttttcaggaattctcattggtctacagaaataacagtctggcgattagattgttgtttgaaccacagggtatgagctgtggtgtccag

SEQ ID NO: 3758 - DNA, 433 bp, Homo sapiens
  I.3758 (AI056040)
ttttttttatcataaaatagcatttaatagaagccaaattgcacattagacgtaatcaataacttcagagcttgcaaactagagtgaagactgatgagaatacgtcaaaaagagtaagacccaaaacattgaataaacagtataagtgtatacaataaatagaattctgaggtatccaaaggaactggagattacagcacattcttacgtttacacagaagaatatttatattgtattccccccctacagacttaatgcaaagaggactgtcaattttaaaagacaaaacacctgtactacttagatgggccttggaaagatgggtaatggttatctttgaatcagatcaatagctcttctaaattacaaaactaaaccagatgaatacatacacttctaatgtaatgaacatcattttgttaaacagatggt

SEQ ID NO: 3759 - DNA, 415 bp, Homo sapiens
  I.3759 (AI033361)
tgagacaaggtcactctgtcgccggaggagatggcatgatcataggtcactgtaacctggaactcctgggttcaggcaatcttcccgcttcagcttcctgagtagctggaattacaggtgtgtgctaccattctggcagttttttttttttagagactatatctctatgggatataaatttctctctaagcaactcactttattccttcaagtgttaataactgtattttcactattattcacttataaataattcacttttgtatttaaaaagaataagtattctttcttgtttgggagtatagagttccatataatgcctattcaaatttgctgattatattgtttaaatcttttaaatcaaaggtattttatctacttattctattagttattgatagtatgttgaaatatt

SEQ ID NO: 3760 - DNA, 314 bp, Homo sapiens
  I.3760 (AI023463)
gacagagtctcgcgctggcgcacagtctggagtgcaatggcgtgatctcggcccactaaaacccccacctcctgaatccaagcaattctcctgtctcagcctcctgagtagctgggactacaggctcacaccaccatgcccggccaacttttgtactcccagcagggacgaggttttgccatattggtcaggctggtctcgaagtcctggcctcaggtgatccaccagcctcagccccccaaaatgctgggattacaggcatgagtcaccatgcccagcctaaacttggcaagataataaatcacctttttaag

SEQ ID NO: 3761 - DNA, 529 bp, Homo sapiens
  I.3761 (AI023336)
  misc_feature (484)..(484): n is a, c, g, or t
ctcccaggaatttcctagacggatcctgtaataactttcattcttagttctaagcctagatataacagacccctctgtcatcgcaatggtgttttccccaagatgagacattctttttaaggtatgtgactctaagaatgggaaagtgaggggaacaggtacagtcatgtgccacataatgacgttttggtcaataagagaccacatatacaacagtagtcccataacattaataacacaaagctgaaaaatttctatcacctagtaatgtcacagtggaagcattactcacgtttgtagtgatgctggtgtaaacaaacctgcacagccagttgtataaaagtattgcacatacaatacatgaaatacataatacttgaaaatgataacaaatgaatatgttagtggtttattgtccacgaagacctttcagtgggacggcatggggaggggaaagccagtgataatgacgatcctaaccctncacaggcctagactaacatgtgtttttgtgtcttaatgtttaaca

SEQ ID NO: 3762 - DNA, 478 bp, Homo sapiens
  I.3762 (AI023785)
  misc_feature (459)..(459): n is a, c, g, or t
tttcctggctgccttccttgtcggttgactttcccagataatcttgaacattccctttcccttcacacttgccagaagcattacccactgtagagaaaacagggataacaaatccagttttccatttatgaactgggtcctcagctctgctgcatccccttgatgggaaaccatcacctgtaacaatctatatgcccttgactaatgatgtgggcacagctccgacctgtggcctccccccattcaagagaacagtctggaaagtagaagtagccgctgcatcgaagtagaggcttcagtggcctgacttttcccacttcctgctcccctgtgagctgaacgtcagtccaaggatgcggtcttgggctgcccatggtgggagacagggcagtttgggggaaggaagttccctttattgctttttctgcatggccctaaaagaatgcagatgagcatccncacctcggcaaaaaggctg

SEQ ID NO: 3763 - DNA, 452 bp, Homo sapiens
  I.3763 (AI090873)
tttgtaacagagaaagagtttaattcacacagctggttgtacaggagactgccgttttattattgctcagatcagtctccctgaaaattcggagactggggtttttaaggataatctcatggatggggggcaggtagtggggagtgctgactggtcccccaggaatggggagtcaaagctgtcctcttgtgctgagtcagttcctgagtggaagccacaagaccatcagtctgggtgggagcagctgatccatccagggaggggtctgaaaataccttgagcaccaatcgtaggttttataatagtgatgttatccctccggctactattcagtgttgcactggattcttgggaaaagccaaaattgttctttacagataaattcttacctgaaaaacaaagggagaactggatttattttaaaaaattaggccacatggctggccggaaat

SEQ ID NO: 3764 - DNA, 198 bp, Homo sapiens
  I.3764 (AI084520)
aaaagtcatgccgcaaacgccactctcagacattgtagacattataggtctataaaagtgaatatgaaagacaatcatacagtttccgtttcctcccaccccagagaaaggccttaagaagcagcgaggcctgcacctgcagaggtgggaaagctcctagcggaacctggcagtgtaaacaggactggtgggaagtgc

SEQ ID NO: 3765 - DNA, 533 bp, Homo sapiens
  I.3765 (AI041544)
tttttttttttttttcaaatataactttatcatttatttccagtaattatttttacaactttcctgtcttctgttatctgttgccatctgagtttacagggtgccataactggagcttaatccctttttacagccaacatgattctcagtcacataaaattggttcagtctgttgactactccttcagcagctgcatatcacctcattctttccacttgcacatgacgcactggataaacccagcgagaagctgagagttcatttgtccttttggagagaggctagagtcagatgcttcatctagagattccagtcagctcttcttggttggcaattcctcttaccatcaatctagtgttgactttgggtaaactacttaatctctttagcatctgcatcctcacttgtaaaatgagaggtttaaattacagtttccttccagcgtgacttgtcatagcctcttgcctcagctgccctcgcctcgatccaggcggggtcaggatgcttcttggtgttccactgtgggctcggc

SEQ ID NO: 3766 - DNA, 457 bp, Homo sapiens
  I.3766 (AI027278)
  misc_feature (456)..(456): n is a, c, g, or t
tttagctctattttgttcattttaattgctttgaatgtgtatgaatctcacaaatatagtattgaacaaaatgcaatcatacagaatttaatataatatcccttataaagtttaaatacatcaaagtgctattgtgtatcactttcatagcatacaagtataaaagaggagacatcatctaaagtccattaagagagctgtgattgcgaagaagtgactgaaaatcatcattttttttcctagaacagatactgtagttaggaatagcataaaagagatcaggagaggaaaattatccccagacagtcacgtatcatttattctaataatctgccacactcacatatggatgggttgatatgagcatgttacatcttctaatgggggctataaatcagcaaggagtgaacacacacgtgcacacacacaaacacacccatattaatttactgattnt

SEQ ID NO: 3767 - DNA, 537 bp, Homo sapiens
  I.3767 (AI026939)
  misc_feature (517)..(517): n is a, c, g, or t
tttgtgttggttctaatttattctattgagcgccagccatatgccaatgctgagtcctaggaatgggagcccagacaggtgatgggaacttgccacccccgcccgggagctcacactctggcaaggacactgggtcacaccaggaacagtgatgaattctgtttggccgtagcaggaaagacttcacaggagagcaggcgatggagcagggagctgggaagctgatggggactcatggagggaaggaggaggggaaaagcatctgcagacaggccgtcctggccatctggagctaagcggtgcacagtccagagctcagtggtacatagactggactcagaggagggaagagcatctggagacaggctggcctggccgttcacatggagattaaaatgcccactgattgaagagagctgagtcagagacaaggactctagaggtgtcaatttcaagtagtggttggaagtgaatgaggtcaccccaggagggcatgaaattcaaggaaagaccctangggacaccaagattttagtg

SEQ ID NO: 3768 - DNA, 362 bp, Homo sapiens
  I.3768 (AI025999)
tttttttttttttaaaatgtcatgagtttatttgagctttaaatgattcaggaatcaggcagcaccagaccacaagcagcctggcgctccgaggggaggagaggagggggcttttataaggtgctcatggaagcaagacaaagaaaatatttggttaaagcagaaagtccctggtgagaggtcagtttctgattggtaaagtctctagttagaagttagctggcagtttctgattggttacgctggtttcattttactgtttacattgagttggttttccatttgcttaggtagcaaccaaaggtgctgaaggtgactcatgtaaatgtcctcctgattaattattttaacagttcccatct

SEQ ID NO: 3769 - DNA, 381 bp, Homo sapiens
  I.3769 (AI025039)
tttttctagctcactgttctattctcagagccactggcaggcacttaatacatatttgaatgaatgtgtctccttcgactttaaaaatgcccccaccgggaagtgcgtgggggatgtgggaaggccggaaaccatttctgcagctgccagtccccttccaggccctgtcatgggatggagcagggcatcactgtgcggcgccttggcctgtggatcccctccccacgtttcttgcccggtgcaggccggaaggcaggcaggtacaagcaaggagtcggctctacgcgcagagccccaggggagcggcccgtgctgggcatggcagtcccagcagtgcatttgtctagctgccggcccggggtccggggccacttcctctct

SEQ ID NO: 3770 - DNA, 511 bp, Homo sapiens
  I.3770 (AI024879)
tttttttttttttttttttatagggggagtatacaatttttattttattatactttgatactcttcttgaccttactatactcttaggtacacagcaacataccgtttgtaaacaataaaacatttcattaaaaataatccattaaaacttcaagtttcctttgtacactagagatactggattaaatgccttcttagaaatgccatgttaaccatttattttaaagtttccaaaatgcatgttttccaggggtttggtcttactgattttacttaatggaactatctatgatgctctgggatgtgaaaatcatcttatgtccccgacttccacaagtaagtaacaatgctttcacctctaatcttcatattgctgatttttgtttgaagtttgtgggcaagatttagctccataggtaaggacggaaacgcaggtctgacaagttacattaacatcaggactaaaagtcgcaggactacaaaccacacaacagctagcgcaattactgtg

SEQ ID NO: 3771 - DNA, 290 bp, Homo sapiens
  I.3771 (AI024712)
tttaatttaactgaagtttaattttgacatctttggctgatccaaccactcagtcttggtctctttcccttctcttatggacagggagttaggtaataaaaatcagccaaagattctcaaagttctgcagaggtagacatgggctggtcttgctgccagagctggttagtactttgggtctttctagaatatttggtgttaggcctagataactcagctacatctgtagtgcttctctgtggctgctcagtttataattcaggtcttgctcggacccctagtcccaagga

SEQ ID NO: 3772 - DNA, 399 bp, Homo sapiens
  I.3772 (AI024532)
tttaatatttcttgtgtctttcttgtcaaattcttttcagtgctttaaagaattaggatgggaactcaggttagctgggaaaagttgcttgacaggacgggcaggtgactgtggcggtcagtgcctactcctaggacgtgactctgcttgggttttcagctctccgatttggaaaagaagccatatacacccttctgtgtctctcagacagaagcctatttgctgccatgttgtgcggagctcattttaatggtgtagtaattcagttagaaaactggggtacttaacccttttacaaatgctctcctcgccgagtttataaatccccccagatagcactggaaagttgatcagaattgactgtgttgttcattcagcggctctgtgaaacatctcctg

SEQ ID NO: 3773 - DNA, 302 bp, Homo sapiens
  I.3773 (AI023558)
tttttatacatatgctgtgatttattaagcatgttacgggaactttaaaacacctcattcagcagaaaggaggcagaggattataatcctcatttgacagatgggacactgaggcccaagtcctcatgttccttcagtctagaaagtgaagagaacttgcactgtgtgacaagggccaggcgaaagacacaggagaggaagatagattcctgtagaccttgtttgtcagggaagatcccttgggaaaggtcagtggttgaattggaccttgagggacagagaagtttttttttttttaagca

SEQ ID NO: 3774 - DNA, 309 bp, Homo sapiens
  I.3774 (AI018273)
tttaaaaatcacatatttaatcagaaacttagaaaaggctgaaaatagattcaattatgagatcagcacatttgttcccaagcattacattttcatctgcgttcaacacatgcctcttctacttaagggtcccttccatcaccttcggtttagtctgcaatatgatcatcctatacttaagataaaggcatttatacagtatatgttgtaaataattattttttcactctccccttagcaggtatttgcatctaagttcaagtcaaactgaggaggaggactggggttagaagattcaagcaaggcacg

SEQ ID NO: 3775 - DNA, 401 bp, Homo sapiens
  I.3775 (AI017866)
ttgtcaaaaaatgtccgtattttattttgtgaatgccttataagcattatgaaacaatgcttatttgccatttagcaggagatactctagatgtacaagcttgaagagaatttgaaagaaagaactgataacaccgcaggatctttcccaagagctgttgcatcactgtttcctggggtttaactggatgatatcacaacaaatccttctacatgattttgtcatactgctcctttgaatctctgggacattgtcacaggactgtggggcgtttaagcccagaaagaattgtctgagattattaaaggaaggagtcccgcattcatggtgactcaacctgttagcagttcctttcttctgggatccagcctgttgcggcctctttagtatcagcagtggct

SEQ ID NO: 3776 - DNA, 431 bp, Homo sapiens
  I.3776 (AI017829)
ctctccttcttgtcttattttggatttatcactaatttttattattctattttccccctctatttgcttgttagttgcacattccttaactattcttttagttattactccagccattaaaacatgcatctttgactaatataaatccaatctaaattcatatttttactacttcttagacaatgcatggaacatagaacacttttcctccatttaaccccctcccaaattatgaactatttttgttgtgtattttaatgttgcatatattttgaattatttttggatagccaacaatcatttaactttacctacatatttacactttttattgctcttcgtcctttcctgtatctctgagcctccatctgagagcttgaacatattaatcatagttattttaaagactatatctgataactccattcatt

SEQ ID NO: 3777 - DNA, 453 bp, Homo sapiens
  I.3777 (AI017741)
tttaatgtcatacactgtgtattaactgcagagcatacagaaagttatggatgataatattttcttccagagagaaattttctttgctgtgagaagaatattgtagaaggaacatggcatcttaatgcattatgagactcagctgatttgaaactgggcttcagtccttgtgatgtctgatttccatgtttcagccatttcagaatccaaaataaaagcccagagtcttgtgacagattctattttccaacgataatctgcctttaaccatgtctatttcccttgatcctgagtgtatgctcaggatctgtgacaactctgtcgatggagaatgacagaaatccagacatgtgatttttgaggttagatcacaaaaatgccttgtacttctgcttttttaaagtgatattctcagccttaaagcccatgctgtgaggaatcccaaataagaca

SEQ ID NO: 3778 - DNA, 507 bp, Homo sapiens
  I.3778 (AI017471)
ttttcacagcttaaaggtataaattctgtgttgtagtaaggatacaacatttttcattactttttatctgtccccccttttcaaccatcttactttcttctcagttcttccagacaagcacagaataaagaataagtcttgttctctcctccctgctaggcctgagcaaggtatcaggtgtttcgattgcagaaggtggaggctgccagctcttgcaggttgaaaatgaggagctaagtagattttttttgtttgtttcaaaagaccattacttgaaccttgggagcagtggtcctcaaggtgtggtcttgggaccggcagcatcagtaacacatgaatggatctgttgagcgtttgagaaaattcaaacgtgatcattgcttggtgtgcagcttgggttaagcagcggcgtggcaggcctggcccaaatcctagcaccatggactctggaagtggggataaggacagaaacttgtcagataagtggagcctctttggaccgagatc

SEQ ID NO: 3779 - DNA, 448 bp, Homo sapiens
  I.3779 (AI017237)
tttttttttttcttgggcgtaacgatactttcttgttttatttctcatgattccgtttctaggtcctaggcccgtgcctgatccaggatccaagctcccggaagctggcactgggcccgccctgggtaggcagcagtgagcaaggcgggcggacagcgctgggctcgcggggtcctgcgtcctccgcgggagtgttggcggcgggggtcgctctgcgcggggacactgggcagagggggcgtgcggcctctctaggaagctttctcggagccccagacactggcgaggcgccgcgccccctcttctggattccggcgcgccccctgaacccgggagctacgagcggagtcgcttctccctgcagccgtcctgggtctggcgcggacgcaccccccggccgaccccgagccgctgcagccggcgcccctgcggcttccaacccgcgctg

SEQ ID NO: 3780 - DNA, 391 bp, Homo sapiens
  I.3780 (AI016806)
tttgcctgtggtgagttgtttattttgttgaagtttgcggtgggcccgggggacgtggggggcgagcggcaggcagcggccgggactgttttgtttaggtctccatccacctgtgtggtataaatctgccagcctcaaggcggcgggggaccggagtgagaaagctctgacgctcccaaaagccccttttcgcaacttacagatctaggaccacatttgattctccacgcctggaaccggctagatcctagtttacgctcaccccgccctccagcctcccatcaacgcttcccgcacccgctgtgtgcagggctggcgctccgcagagcaaacagcgcccacgacccagggacagctggccaccgaagtccctccccggcgcccttccccg

SEQ ID NO: 3781 - DNA, 505 bp, Homo sapiens
  I.3781 (AI016631)
  misc_feature (436)..(436): n is a, c, g, or t
agagaaaaattaacaatttagtttcttatttaaatatgccacagagataagcgggccagatgatcaatgtcttagtcaacatctcctctcagtctggataacagctttgagaaacctccaaggctgtctggtatctacagctgagtccaaggtgggtggggctcctaccattcctcttgattgggtgggacaggtcttgcctgtcccagttacctccagctgcaggcggtgccaaccagctcaggtccagattcaccatgcagtgttaggagagaacatgttcatcctactcttgtctccacagaggggaatgaattcccagtccatgctccagaggaccaagtaccagtggcacacatttttccagtctctctctgacccttaactctctccctaccttggaggaagagtgacttgtccaaagggcatttgtggngaaataacttggcatacttagctcagccccaacccaccttgcacccccttaacttacccagcaagcctt

SEQ ID NO: 3782 - DNA, 446 bp, Homo sapiens
  I.3782 (AI016342)
ttttcagataataaaaagcaggctttaattcttttttaaaatttagaatagttttagatttgcagaaatgttgcaaagatagtgcagaattcacatacaccacatacctagtttcccctattttaaaaatcttacattagtgtgggacatttatcacaattaatgaaactatattgatattattaactgaagtccatacttattccaatttccttcatttttacctgctgtttccttacaggtgacattcaggaaaccacattccatttagtcaccatgtatccttaggctactccagactgtgacagtttttcagactttccttgtttttgatgactttgacagctttgaggagtactcactaggtattttgcaaaacgtttttcaattgggatcttctgatttttttttgtcatgataaaactgggattattgttttttggagg

SEQ ID NO: 3783 - DNA, 482 bp, Homo sapiens
  I.3783 (AI015974)
tttaatgtaggaagactaagtcacgatgcctttaggaactaacacagcgttggcatcaccaggtaaggggctgtggaaaatctccactccccgtaagtcttcccgagcaggccccacacactgcaggacacacacagttcatgtgaaaagcaatcccatttagaaaaatagctctgaggggtgaaaggaaagcaaaatacctactggaggagaagcaagtttcaagctgtgctgagaaaattactagtgactgagtggaatgtcccataataatgggctcaatttgaaggaagctttgaagaaaaaccatgcatattctctaagctttaacagaggccagggggactgcaatgggccagaacaccaccgggattggtcacccatctcagactaatgtgctttaaagatgttgcaatttcatgtattcatttgttcatcatgcattcatatattccacaaatatttactaagaacgtcccgac

SEQ ID NO: 3784 - DNA, 487 bp, Homo sapiens
  I.3784 (AI015955)
tttggtctttctctcaagggtatgtgtttacttattttaaggggcgtgacagagactgtagaaaaggagagggactttcctttcgtgtgcagaagatggagccatgtgtttgcaatcctcttctgtggtgtgtgtgtgtgtgtgtgattttttttagaaagtcattgtgaagaggctgaggcaacaacctcacccagaaattggagtcacagaagaaccattaacttctaaaggtcttcattgcacaggtcatggctcctgcagcacctgaagttcaccaaatagacactccaccttatgcctttcacatcagcacagttctttaggcagcccatgaaggttaaccagggattaccatcccttttgaacatccttccaaccatgcaggcctcttctgttgttgctgtgcatattcctctttctctggagcacttttctcctgggaactggaggtggcacatcctacaccgaacaatttctatcactt

SEQ ID NO: 3785 - DNA, 453 bp, Homo sapiens
  I.3785 (AI015484)
ttttgccaaagccgagattttaatctttaatccatgagcaatcagcgagcagcggcgatatggcacattacagatgttttactgtcgcgggcgctcgcagctttcgcgctcggcacaggcggccgggcgccccgctccgcccgccccctcttctccccctctggttcttcttcctctcccctccccaggtccccgtttaacactatccccctcacctgcacgctcctggcccgcagcggaggtgggactggggagcagggcctgggactccgctggtgggggtacacgcaggggcactggcgggggcggggggcgacggcactcagaattgcgctgaggcaaattccccgccaggtccagattggggggcgcgaggacaggagcatcgagtgcccggatagctgagcccccccactccccatccccttcctggaccccacgtctagggccgct

SEQ ID NO: 3786 - DNA, 335 bp, Homo sapiens
  I.3786 (AI015380)
tttggaaggacatacatttattttgtcaggaactatctaatcacatgggtgccacaactaatgtgccagtttcaaagacaaggtagagattctgcagcttaaaaatcattacaaaataataggttactgatcaggtagaggtcctgacctggaaagccaaaggtagaaacaaaaataggatgttttacaaaggtggaaatgtttaattccaaggtaaggccacagctcagagctgtcagttttttgtgttttagtacattcaagagggaaactgtggtaccaaaaattcagtataggtccaacagctttattacatagacataactttaaaaagt

SEQ ID NO: 3787 - DNA, 408 bp, Homo sapiens
  I.3787 (AI015335)
tttgaacagacaggatgaaagtaacagtaaagtgagctaagtgcagaagaaaattcaaacatagtcacacatttactaaactgatcagtgagaacagcagaaatgttctggtagtcatcaaaaggttttaacaataaactctgtcaaaaatatgaaacttccaggagcaatcagaccctgaagaattaaaaaaaaaaacaactgcacccacccctctttttaatagatatttggccttctctctgagttaagcaaagagaggaagaatggcaaatagtttgagtcttcccaaatctttttagcatttgagaaaaggcttactgtgggaaaagtcatggccctttttccccctttttaatctatttaatttacaaaattgatccagttccataacagatggattattac

SEQ ID NO: 3788 - DNA, 394 bp, Homo sapiens
  I.3788 (AI015324)
tttgtggtgccatgaagtttactaggaagtgattgtgaataagtaaaagatctaacattcgcgtcatagaggaggtgttgggacaccacagaatcttgtttgaatttatgaattgagtccagttccccagtactttcagtgtctccaatcctcctgcacacctgtgtggtttgtcttaggactcagtggtctttgaggatgtggctgtggacttcaccctggaggagtgggctttgctggattctgctcagagggacctctacagagatgtgatgctggagaccttccggaacctggcctcagtaggtgaggatggcatcattccttcccccggtttttaatgaactcatttctttctcatcagttcctgcacaagaaagtttctgctggagaa

SEQ ID NO: 3789 - DNA, 432 bp, Homo sapiens
  I.3789 (AI015069)
tttttaacattagaccagattattttattggtttcagcatttatgtttggatctgtcaagatcaggtcaggagacagaaaccacagaccagagattttctactgaatatttactgtaaagttaaactagctcttgaactaaaaggcttttgtagttatatactgctttgtatccaactatgttttcatttagttgcttaagacaatcatgacatattatttctcaggattcttatgattctgggctgactggaatcatctgggatgtccttctattccaaatggtccaatttatgcagctccattgccctgggagttcagctgggcatgaggatggaaaatccaaatggctcacccacatgtctagtgccttaattatggtagctgagacatctgggtgaggctcaacttcactagaagcagcatagttata

SEQ ID NO: 3790 - DNA, 325 bp, Homo sapiens
  I.3790 (AI014877)
ttcttgtctctaatacttttgtctttgtctgccttgtgtgttcttttctgaatttcatttcagcaatttatgctgctaaatagaatcccgcatgtctgcattcatttacattcaacttattgtaaattttgagattttatttagaaatgaattgtctaattaatttatgtagagtccttttttccaaagagctcaaaacactacatccacattattgacttttggaaaccaaccaaattacttaagaaatggaaaagtagtcacagagaaatttagtaatttgcaaaagccacaacagtagtggaagaattaaaattcataaagt

SEQ ID NO: 3791 - DNA, 435 bp, Homo sapiens
  I.3791 (AI005655)
tttgagatggagtctggctacgttgcccaagcttgcctggaactcctggccttgagcagtcctccatcctcctacctcagcttcccaaggcaccgggactacagacataagccactgtgcctggccgtgatagttcttattagaaggctaagatgtttcaaatgctaacaaatatgtaagtaatttctgctgactttcctcctttcatcactggctacaaagtacatcccagaatattaagctcagataatgctagtgaaactttgataaaagaatggcttctgaatacaaagccatgcagaacttcataaaaaccctgaacaaaaaagcataaaaacaccccaattaaagaccacttttgttaataaatgtaaagctcaaatagtcatacctcataatttagccaaggataactgaacctatgaaatgtcagag

SEQ ID NO: 3792 - DNA, 634 bp, Homo sapiens
  I.3792 (AI005407)
  misc_feature (437)..(437): n is a, c, g, or t
  misc_feature (441)..(441): n is a, c, g, or t
  misc_feature (483)..(483): n is a, c, g, or t
  misc_feature (484)..(484): n is a, c, g, or t
  misc_feature (597)..(597): n is a, c, g, or t
  misc_feature (599)..(599): n is a, c, g, or t
tttgagaggttaatgaaaaaacaactttattcacagaggctgagagtttgggatagcaaaatatccagtgacagccctttcgctacattttcagtgaatcacagtgagcctggatctcagcaatggctcctcctggaagttcttccaatcaaggctggcctgaagtttcccagagtcttcccactggcctgggtagaacccagtcgtggaagcctggttcagcatggataggagaatgaattttccaaaagtcacctctatgcctgtgaattatccaattactctgccggcctgaaatgtcctttccaacacattgaccaacaggccctctggattcaaagtttgtcatcatttttagacaagtcctggaaactattttaaaaacgatcttaaagacctccctcccaacctatttccaataatgcgtgactacctgngctntatcacatgacataaaattaaagtgactttaaggttcagaannatgcatttcagggcctcgaagattaccagctagagatggcctataagtcgtgcattcccggaagctgagctgaacctgtgtgacatctatgtctaaatggaatcgtgagactntntcctccaaatgcataccctttaagtggtaatcacc

SEQ ID NO: 3793 - DNA, 414 bp, Homo sapiens
  I.3793 (AI004631)
tttttttttttttttggtatcaactctattttattaacagttgatgtaactggagtacacagaaaagggaaaggcagttatctttataaaatcagctttgttgaggtataacttatatgcaaaaaatccatcaacttcaagggtttgataagtgcgaacaaatatgtccagtcaagcaaccaacactacaatcaagacacaaaacatttccataacccaaaaaagctctctgatgttcccttgtaatcaatcccgctcccacacctttaaagctggacaaccactaatcacagtcaacatttaataaacattacacattgtacgaattcatgatgtattattaaatctaccttctaaagttgtaagaatagattccatcgtccccacattatggatgcgaaaactcactcaggt

SEQ ID NO: 3794 - DNA, 441 bp, Homo sapiens
  I.3794 (AI004626)
aatctattagttgaagtgcccaaccgacctgtctccaattagagagagagtagcccggtaaacaaatgctcttttaaaaatgcagacggctgtatgaatattaagaagtttgttcacaccttgatgagcctaaattacttcagctagattactttcttcctaacacccatctgacactgatctactcaggaacaggaagtctggcgtaaaagtaagaagaggcactggagcatggaggatttccgggtggagtaccatgcagtgggctacatccacattgcggggcagtatgagagctgcaagaatttggggaacgatcaaagctatttgactataacttgcaagaaatgtctctgtctggcgatggctcagagtcagtgtacttgtgtcactcataggacaaagagcagagcctaacctcacctatgctctctctagtat

SEQ ID NO: 3795 - DNA, 431 bp, Homo sapiens
  I.3795 (AI004490)
tttcatttcaggaggtttatttgccaaagttaaggatgtgtgcgtgggagacaggactatgcctttctccaaagatgattttgagggctccaaattcaaaagggaaatcgatgagagtccttttccagccatacacatatgaagggcttgcctcgttccattgggcacggtggcctgaacaccaggatatttttgggatatatatagctaggtagggaacacacactccaaaactcaattccctaaaacaaggaccatttcactgtgctcaggatcctgtgggaggggcacagcaggggctgcctgagcctgttccacaactctcccgccccagcgaggtgtgacttccctggctggaggtgactgagatggccccacagggtcccatgacctctccaggccatccctgtctcctgggctggaagatgtga

SEQ ID NO: 3796 - DNA, 450 bp, Homo sapiens
  I.3796 (AI003843)
tttttttttaagttactaaatacgtttattcagttactcaaccaatatttacggggcacctacaatgtgtcaggcttcatgttgttcattgacgttgcctgagatcctgctcgcagtgaatcttactttccaatattcagctgaaaatatctcttctgcatttcctttgtttggtttactgtgattctcatcttcttctgtacaatgcctttcacatcttgagaaggagaatgtggttgtcaggctcctctctggaacagtgaaaaggtttgcactcagagtaatcagcaacatccatgtgattaacaagagcagcctagtccaggagggttgccaacagcaggcagaagtgtggcatatctggataggcagttattgttttaacagggtcaagattaatgggcaggtgttccgcgataatcatggtacccagcctcggtagtggtggtc

SEQ ID NO: 3797 - DNA, 468 bp, Homo sapiens
  I.3797 (AI003774)
tttttattggtattttgtacagtcaaattgctgtgcttaaagtcacatatatgtggttaagtcactaagccaacacagttaggttcatttgtttcattttcctttcagttttaaagaattaattttcattttctttttgactttttatcattgtaaaagaaacttacatgattcccgagtcaaatctataaaatgatatattttcagatgttagtatttttaaatatgtcatccatatctctcagactgctttttattgtctagaaaacgttaggttttacctaccaatgaagagaaataagactgtcattcagactattagaaatgatgaggtatttttatgaaaagaaacatattcaaccttgaaattagaaaccatttttgtttcccctaacaagggcctgtctctcaatttcccacagtttcaaagccccactgcacaaccgaatgaaaacacaatgtcattat

SEQ ID NO: 3798 - DNA, 485 bp, Homo sapiens
  I.3798 (AI000983)
ttttttttttggtgaaaatcttttattgtatatatttaaggtgtacaaatgatgttttgacatccattacatagtgaaatgattgctacagtcatgcaaattaaatatgcatttcctcacataattaccctcttttgcagtaagagcacctgaaatctactcttagaaaatttccagtattcaatacagcattattaactatagaacttatgctgtacatgagatctctagatttatacatcttatgtagctgcaactttgtagctttgaccaacatcctcatttcttccacctccatccccctgtgtgtttgacttttttagcttccacatatgagattacgcagagtttttctttctgtgtctggtttgtttcacttagcataataccctccgggttcatccattttgtcataaatagcaggcttttatcaaaaaggcaagggataacaaatgttgatgagggtatggaggaaaggaaacctg

SEQ ID NO: 3799 - DNA, 424 bp, Homo sapiens
  I.3799 (AA995218)
gtctagcatctaaaagatttttaggggttgtcaactctttaataatatatttataaaaagtagttgattccaaccacctccataaacaccatatattaggggataaattctagggagggatataaagtttaaaaagatactttccatctggacgcagtggctcatgactgtaatcccagcattttctttctatttttttcaaagagacaaggtcttgctatgctgcccaggctggcctcaagcaatcctcctgcttcagactcccaagtagctaggactgtgggtatatacctctcaccagcttatattgcctcttataatgagggactaactaatgttgccttggatggcagttaagactaaagagaaaagagcgtagaagatatatttgagacagaccactgaagaatcaccaggaattcac

SEQ ID NO: 3800 - DNA, 361 bp, Homo sapiens
  I.3800 (AA995114)
ttttgatgtttaacctcattagtatgtaaagtttattacataatatctgacactaagtgttcaatagtgtcagctatgatttttgtagaaagtgctcaataagttatcatcatcatcactaatatcatgaacgctgttctttgatgcttttctcttccctccatccatcttcatcatggcaattccacatggtctgtattcactcctctcttctcttcctaataaaatttctcctttagcaagagcacccatcgcaatagcatcaagacactgctctgcccgtcattcccctttgttaactcatgctatggtagtatgccactgttaaattattgatgatgaattggttgatcccccttga

SEQ ID NO: 3801 - DNA, 287 bp, Homo sapiens
  I.3801 (AA994325)
ttttttataaacaacaggaatttatttctcacagttccagaggccgggaagtccaaaatcaaggtgctggcacattcagtatctggtgaggaccggctttttgttgtgtcctcatatggcagaaggagtaaagatgtgcttttgaagccacttctataagtgcactaattgcccccacaaaggctccacatcctaataccctcataattagggactcagtatcaacatatgaatttagggaggcagaggacataaacattcaatctatagtaccaaacctgtctctc

SEQ ID NO: 3802 - DNA, 420 bp, Homo sapiens
  I.3802 (AA993698)
ttttttaacattttatcattttttattgatctacaacatatcatttaagtaataaccatgtgcttttctgtatagcaacttcaaaaaaaaatcccctagtgccccttatcggccagatcactgcctcacatgttcctaatgcattcccatatagaaactctgctaaagagtgtagaatgtgaaagagattaaagaaacgccccacagtggaatccccacccaatctgttttctgcaggagctatcgtggttcctctacagctgtgtatctagaaccaggctcacctggagggcttgggaaactcagatcctggggcccacctccagagttcctgattcactgggtatggggtggggcctgagaatgtgcatttttcacaagcttctcccaggggaagctgacactgttggtcctggaaac

SEQ ID NO: 3803 - DNA, 408 bp, Homo sapiens
  I.3803 (AA993597)
tttaaagctagttttactttggtttttatttttaattcaattctgttcaggatgctgattagaaaacctccatatatgagaaacagtgagaggcaaactcttttgtgccgtagaatgttctcgacatcaaaaaagagcactggaagccttcaacatttcctgtttatgttgcacagatcagaggttcacacagaaaccacctgcccacgtggcccctgctgctggtttcccaagccccagctttcctctgcagtcccctcttgcactgctttcttctgatgaagtctggcgaagtccattccaaggtttgttacactgcgtgtcctgccttcttctttcgtttttgcctcacaggttctgaaagaagtaattgcctagagtctctgaatttaaccagtttttaaaagg

SEQ ID NO: 3804 - DNA, 486 bp, Homo sapiens
  I.3804 (AA993487)
ttttaagatgtgcaatggttctttattctctccaccatcattaaggcaggggcagaagtagggataaagtttctccatgaaagtgttactgaaggtgtaaatgtgagtcatggttttagcattgtagaaggacaactgtcctccttcataatccaggtatatgcccaccttgtcgaggttgttagtcagtgtcagactgaaagaaggcaaatccagagcctttagatcagtttggttccttagtcttaaaagccagaatccttgctcaggagttagaggacagctgcccttccgaatgatggattctctgacaactccaactgtccattttgtcttctttgctacttctacttcccagtaccactttccagaggtgaagcctcttgagcccagtacagccacacttgagtcaaacctctcaggatcatcaggaattatcttcttaatgtcaccatgccagacgctggtttggcttttggagagcac

SEQ ID NO: 3805 - DNA, 159 bp, Homo sapiens
  I.3805 (AA992539)
caaatttaaatccattttattgagaaattagctctcctgctttaacagagaaatatacatacatacatacatatacaggtacattttgactcacacaaatatgtttgttgttacctaagatctataatatagatataacatagtgcatatacagatgtg

SEQ ID NO: 3806 - DNA, 365 bp, Homo sapiens
  I.3806 (AA992531)
gcgtagcatcgctgctcatgacggtcagcgtgaagatgctggcgtgcatggtcaggaagtccaggccgaagagcacgcggcacccacgtccccgaagtgccactccttggtgacgtaggtggccacgatgaaggggatgctgagcaggtacagcaggtcggccagcgccagcatactaaattttcaaaatatttgtaggccaccgcacgcagggagcggcaggtgaccaccagcgtgtaggcgttgccaccacgcccaccacgcccatggccgacagcagagtcccaatggtgcacgtggcaccaggtcctccagggagctgggctcggtcgggctggccaggagctgttgagggttgcgttggg

SEQ ID NO: 3807 - DNA, 413 bp, Homo sapiens
  I.3807 (AA994578)
tttcacttctacagtttccaattttattcatgacattttaagagacatctggaaattctttttttttttttgtttttgtttttgtttttttttttaagacagagtctcgctctgtcgccaggctggagtgcagtggcagagtctcggctcactgccccttctgcctcctgggttccagcgattctcctgcctcagcctcccaagtagctgggactacaggcacgtgccaccatgcccagctaatttttgtatttttagtagagacggagtttcaccatgttggccaggatgatctcaatctcttgaccttgtgatccgccctcctcggcctcccaaagtgctgggattacaggcatgagcaccgcgcccagcctggaaattctttacagtgtagcactgccccccaaccctgc

SEQ ID NO: 3808 - DNA, 442 bp, Homo sapiens
  I.3808 (AA969129)
ttttaatttcaataacaatgcaacttgatttttttattcaaaattgcatatacaataagagttaaagaattcttctcctttgagatgatggcaatgataactataggcattctcaaaggcatggtaacaatgactttcaagtctgtgatgttcagaatgaatttatccagttttcttgaaacaataataaaaagtattgaagactgtggggcatgtaccctgttctgtagctcctcatcttaaaatgtcttggctgtttttgaagaatttccttgaaggtatgcagacttcaaaagctgaaaaatctcctccttccattcttaattgggcactacaggcagagatccaggagaggtgacctgctaacaatgcaggttgaatagattggctataagttggtgtaggggtgttttctgtgatcctcgtaagtttgtgggtgttt

SEQ ID NO: 3809 - DNA, 458 bp, Homo sapiens
  I.3809 (AA968449)
  misc_feature (429)..(429): n is a, c, g, or t
tttgttaactcagcaaatatttattgagctcctataatgtgccagtctctaggccccaggttgatagctgagagcaaagctggacgaattctcatgagcataatgtagaatcagtggcagccctgagcttgttttcctgcaactggatggtcccatctgggggtgatgggagacagtgacaggtcatcaggcattagattctcataaggagctcacaacctatatccctcactgacgcagttcacagtagggtccgtgcttctatgggaatctaacaccactgctgatctgacaggaggaggggctcaggccgtaatgctcgccccgctgctcacctcccgctgtgcagccccattcctaacaggccacggaccagtatcaggaactggggacctctgatgtatataggatgtcacgtggtagtgatgnaaatgaatcaggaaaagagcactagagat

SEQ ID NO: 3810 - DNA, 306 bp, Homo sapiens
  I.3810 (AA933890)
tttggaattctacaacatcattttattaacaatattattttaatagttacttgcattcttcctgacatatttaagtatagctatatatcacaaaatatcctgtgttttattagtataacaatcgaaagcatcatattcctcatcgattttaccgtactttataaatagcattgaaaaacatatgactgctcatcaatagcacaaagcgattatgagaactgcagattacctggttaggtgaagaaaaggtttttttcattcagtggcaatagtggcaacccaagaaacacagctagcaatatcaga

SEQ ID NO: 3811 - DNA, 394 bp, Homo sapiens
  I.3811 (AA923316)
ttttttggagacggagtcgtccccgtcacccaagctggaacgcatggtgtggatctcggctcactgcaaactctgcctcccaggtttaagtgattctcctgccccagcctcccaagtagctgggattacagaagcgcgccactacacccagctaatttttgtatttttagtagagacagggtttcagtatgttggtcaggctggtctcgaactcttgacctagtgatccacccgcctcggcctcccaaagtgctgggattacaggcgtgcgactgcgtccggcctgattcacatatattttaagagactaaacataggaaagctaggagatcttgtgtggtggcaggtttcttctgccactcaggggtaggacactggggcagggggagtggcc

SEQ ID NO: 3812 - DNA, 531 bp, Homo sapiens
  I.3812 (AA917062)
ttttgtcttttctagcttattgttggtagaaaaacaggctaacactttgaataaacatctcacaaactgctgctcctagattacaaaaagtcaaagccaattatctttgacactgagcccttgaatcctgacatttaagtcacaataatagaaaccggagctgctgtaccttacattctggaagatgcctcaacaaaagcacgttaaggactgtttaaaacttctattatttaaaaagatccacctttcctcccattgcctatggaaaataataaaaggagaatctcagagatctgctattgagtttgagaaggccaagtttaatgattccaaaatgtagccttaaaaacttctggagagactcagataaatgacctccccctcctctcctctcccactggcctcttcaagtacagatgatgcatgtatttccggaacccaggtaggactagtcaaacagtctcatgcttctctaaaaggcttctggtgtaagcagttttaatttattttagtttttgccaatcttcagtc

SEQ ID NO: 3813 - DNA, 397 bp, Homo sapiens
  I.3813 (AA917061)
tttaggcaagattgctgtatagttggtgctatgtactttccagtatatctcattgggagagacatagtatctgtctgtcccaacttcagtgagttaagattggtcagaagatttagctgtatacctggtccaccatttataaggttcctcatcagccatacattaccttaagtaatggtttttgcaatggacttctctagaagtcacaaactggaaattttttaattccatcattctttctgcatttattagttggaattctttagtagggatcaatttttcatcattatgtatttgatatcttgaaatatagtttgaaaagaaaaagcaagatccatttgtcattattttctgttattgatccattttctgaataatgaattggggtcctgatccc

SEQ ID NO: 3814 - DNA, 416 bp, Homo sapiens
  I.3814 (AA906662)
aagctgtttttcattttattttcacaactctatgtcataggcactattattcacatctctgttttcaggagacatcagaggctcagaaggctgtcacattggcagtcacacagctaaaaagtggcagaatttaagattttaatcattgggtcatgttgttggggagaaagagaccacatcacacacagagagaacaagtctgtattagttgcttttgctacataacaaaccactccaaaatttagtggtttagaacaatcacctatttagttaatgattctctgggttgcaactcggtctgggatcagctgggcagttcttttgctggtctcagctgggttcagctgcctatcagctagggagctctgtttcagaggttggttggctatgggtggcagggatcaaggatgacggag

SEQ ID NO: 3815 - DNA, 386 bp, Homo sapiens
  I.3815 (AA947967)
tttttttttagaaggcattacatcgctttaatatgcaacagtctaacataacattaaatcatttttaaaagtttcatctagttgagcctgagccaaggtattcttgggttgggtttgcacatccacccttttgttttttatatagttaaaaagaaacacacggcaaaatacctatcaagtgatctcacccttgctggtgtccaagagtgatatcttggctaagtgggtctctttgatttctaggggccccaaaagatggcttcattttcaagaccagcaagtgttctatgtgtgcccaccacacacaccagactgcagtgtgcgggggtgggaggaggtgcctgggctggctgcagaatggaaaaatcatggttttccagggatgc

SEQ ID NO: 3816 - DNA, 324 bp, Homo sapiens
  I.3816 (AA947566)
tttattcctggcataatacagagactagtacagtatttattatacataaggtaattggtaattttttactcatcatgctttagtttacaaaggaaatttaatggctctagatgccaatctaaagattcatatttaactgaaaactattgtattcctcaaatttggaattcagatgatcacccttctatcaaaacactgattaattcaatggtgttggtatcaccccaaactctattgcacatggtaactctgtcatacatctataaagcctagtagctgtattgggtgagatgaaaaaaactgcttatattccacagcaacata

SEQ ID NO: 3817 - DNA, 345 bp, Homo sapiens
  I.3817 (AA911571)
ttttttttttagctttgtcagtcctttattctctctagaggaggtgctcagtatatcacagcagtggctgatgtcgggtgcttgccacagctcagcactgctctaataactcatcctaaccacaccaagccttgctgagacctctgagcaatcccaccaggagatacagtgaggtccagccactcaggccacacagcgaacaggaggcagggctggtatgggtgcaggtgccaaccccgactgtgccgcctctcggctaagcacctgtgcagtgactgagtgggctcgcaaacagagggctctgcaggtggagcaccccaggcaagtccccaccatcagccccat

SEQ ID NO: 3818 - DNA, 345 bp, Homo sapiens
  I.3818 (AA903373)
tttttccagaatgccttccacattttatttctgataacttcctttttttccatactatttcatccattacatatatttttcccatttccattatcacactgtgttcccacttctgtgaactctgtattctctgctccatttgagcactgttcagaaatcattgaaatatttcagttgtcagaactatgtgttttctgggggcttcatttctaatccagttctcctaattccaatttagaagtttcttttcaaatagttaaaaaaaaacaaaacagtgctttgcttttttgatgtatttcagattgggaatcaagatgggaaaacaaggaattatcaacaaagaag

SEQ ID NO: 3819 - DNA, 398 bp, Homo sapiens
  I.3819 (AA873341)
tttcgcatttggtatacttttattacggcatttgaaatgtatggaatagtcctagagtatccaaatctgcttggctctccggaggaatcagcttggctctctggaggaacagagctggccgagggtgtgcttgctccactatctcctctgccagggacctatggcccccccccagtgcctctcacagcttttacaggacctctgcacgctatttaatgctgagaacaactgatgagaaatgagaaagtttgtttggcttgaatttggcaacatggagagtcccattccacagcgctgggtgtcacagccgcatttctcagcatggagcagccgatggtggccccaagggcagatgcaggggaggctgggagagggaaggtggagcaaagcagtttgta

SEQ ID NO: 3820 - DNA, 389 bp, Homo sapiens
  I.3820 (AI091071)
gtaaaccaagtcattctttaatcagttcttatcctcttcaacaccaaatattatcttccatttatcattaacaaataaccaaaatacaatggcttaaaatgtagtgagtgttttacattactaattatttcaatagaatgaggtctcaaaattttattcatgccctaacattcacagtgtatatgccagttattcatttattgtctcttgattccatatcactcttcaattctctgccttgtgatgctggggcacgatatttcccagacttcattgccagctggcttcctgtcaggttctttgtttttactgagtcacttgagatcaggtgtagaattttctacttctggcatcatatcggcactcaaaacattttagattttggagca

SEQ ID NO: 3821 - DNA, 419 bp, Homo sapiens
  I.3821 (AI083799)
ttttttttttttttttgagacagggtctcactgtgttgcccaggctggacactggtggaagaaaaaaaattcagatgggtagaggaaagggacctccctccaagaaaagagtccaggcaaggcaatgcaagtgggggagtggactgctctgggaacagccagcccctccacgggaccaacacagcccttcccaaactgtttctcacaacagctgtcccatgaaatgctcctcacaaaaacgggttctctgaccaaagaaatgtgggaaatacgtaatcataccctgtcctgaagagttacagtaaatgttagtatagttaaagctccaagaaatcctacagaaatgtttgagtttaacactacgtttgttccaacaaattagatcatagaaacaccaccactttttgtttctagcccta

SEQ ID NO: 3822 - DNA, 297 bp, Homo sapiens
  I.3822 (AI082164)
tttatctcagtagatttagggatttattttgctgaggttgaagacaagccagggaaaaagagacacaagttacagtaggatctgtgtcctgtgctttttccaaagagggttttgggaactttaatatttaaaggggaatgtgcaagcaggaggggaagaaaaaaggaaggaaaaaggagagagggtaggcagtgaggcagtggttacattcctgtgaggcaccggtgagtgtgaatctactttacatgtggaaagaaaggaattgcaggaaagtcaatcatgcattcttctccagct

SEQ ID NO: 3823 - DNA, 400 bp, Homo sapiens
  I.3823 (AI076508)
ttttgtgtttgaaaaaataaagttttattagaataatccattttcccaagcaaccttgtgtactacagtgtcttcttcccttccccacaaagacaaggaagaagcagggtagaaggccacctaactgttccagccccttcatctaagatgtgggtcaacctttcaaaaaggggcagtatttggaccctaggccctttgccggccatggcaggatgttatactgtggcccaggcttctgctaaggccttggttatttttggcagtctggtttggtctctctttccctggcagttatacttgtctcctcctgcctgctgtcactctcacttccagcaagttgaagtcaagtatgaatgcattccagctccctgagaaatggtttatggtacagtcaggaact

SEQ ID NO: 3824 - DNA, 191 bp, Homo sapiens
  I.3824 (AI075921)
tttttttttttgagcagtagcaagatttattgcaaagagcaaaagaacaaagcttccacagtgtggaaggggacccaagcgggttgccactgctggctggggcagcctggtttcattcttttatctggccccacccacgtccggctgattggtacagcccagtggtctgttttgacagggcgcttattggt

SEQ ID NO: 3825 - DNA, 1583 bp, Homo sapiens
  I.3825 (AF070579)
gctggaatttgctttgtactagtgatttgaaaaataattttctggataacgaatttccatactaaagcatcagtcaccaccaattccttattaagttaattctccttagtaactttggtgttaaagtggtaactatctgaacccaaaataaatttgtgaagagtaatttattcattctaaaaagaaattttcttacattgctagaaaagaatagtatctactaatcttattcccatactttatgaagggtgattatttagagagttttaaaagaaattaacagaacatttaaaagtgtgttctttgttgtttgtttttaaataggcaaatgaatctaacctgacatcttttttccccttgctagaaatattgagctgaatgaattacattccgaaaatgtaatgaatagtacacattttgaatgaaaactcaaagttttctagtttttaatatcttgtctggagagtgtatccactacttgaaaaatactgcagttgaattattgatattttcacctttactcttcaaagtaaagctgaaatcagaaattggaatcatattcagcaaatgtaatttctggtgggtaattttcttttttctttttaaggctattcaccatgctcttctgaattttggttggctaaaatttgagaatacagaattcccacgtttcctgcctaccctgttcattcttggttatgtccagagtggcattatttgtctttttctgtttttcattttcttttataagagaggcccaggcagatctcaaactcctgggctcaagtaatccacctgcctcagcctcccaaagtgctgggattacagtcatgagccaccactcccggccttattcatctttttttaaatacattatttctgaaattatattctatggctgattactgttatctttacaactcatcttatttgggttttcagaaagtttcaaaagattaaagttttcccaactaacaaggtaagttgccatgaactaaacatgtccccctcaaaattcatatgttcaaatcctaatccccagtgtgatgatatcagaagatggggcctttggtatatgattaggtcaggaaagtggagccctcatgaatgggattagtgccgttagaaaagggatcccagagagcgctcacctgttttccatgtgaggatacaatgagaagtcagcagtctgcaacctggaagagagcctcaccagaacctaaccatactggcaccttgatctcggacttccagcctccagaactgtgagaaatttctgttgtttataagccactcagtctatggtacattgttatagtagcctatattgactaagatagagtagatttgttttgattcttccttccgtctgttctccaaactcttaaaataagttactcccttcatgccatatcccacatcacttgcttgtataccgtgtaaatattttatatatacctgcctggcatcagtttgtgctgattttgtaaattttgaatgtgtttgttttagattttaagcataacattatggcacatatcttaataactttttatggttacaataaaaaaaaaaaaaaaaaa

SEQ ID NO: 3826 - DNA, 575 bp, Homo sapiens
  I.3826 (AF075116)
tccaagtctttgctattgtgaataatgccgcaataaacatacttgtgcatgtgtctttatagcagcatgatttataatcctttgggtatatacccagtaatgggatggctgggtcaaatggtatttctaattctagatccctgaggaatcgccacactgacttccacaaaggttgaactagtttacagtcccaccaacagtgtaaaagtgttcctatttctccacatcctctctagcacctgttgtttcctgactttttaatgattgccattctaactggtgtgagatggtatctcattgtggttttgatttgcatttctctgatggccagtgatggtgagcattttttcatgtgttttttggctgcataaatgtcttcttttgagaagtgtctgttcatgtccttcgcccactttttgatggggttgtttctttttttcttgtaaatttgtttgctcactcctttcttaaagcaacagccgatcattcgtggaatatttggaatctcattattcttttaatggatagttctttctctgtcagtctcttaaaaagacagtgtcttaaaaaaaaaa

SEQ ID NO: 3827 - DNA, 217 bp, Homo sapiens
  I.3827 (AA996370)
gaaaaggaatgtgatgtttattgctgttttcccccaggaacaaagaaatctggcaggacacacacaggtacagcatggacctgctttcggagttatgcataatgattttttaagttggagtgtgtttggatgaggagggacaagaaaactgcttctgcaggggaggtggtccccactgcagcttcatctgtccctaggccacctccctgcagccacc

SEQ ID NO: 3828 - DNA, 288 bp, Homo sapiens
  I.3828 (AA995901)
ttttagagaaaagatactcaacctctttaataatgaggaaaatatagaaacaaatcaataataagatgccttggaaggatttgaaagacaggaatgataggttcagaatggtttcaaaacttgtccaacttttctaacatggtgatatctgtgtaaaaaaaaaaaaaaacttgtccagctttgatttgaaattgtaatgcagtcttctggatgtatctcctccatcactttctacctctgtagccttcatcttccagtgcctcagtttcctcagtttgtcacttccag

SEQ ID NO: 3829 - DNA, 274 bp, Homo sapiens
  I.3829 (AA987601)
tttaatttataaacaatagaaatttatttctcatgaatctggaggctggaaagtccaatatcacaggaggtgctggcatctggtgagggccgtcttgcttccttggtttgtgacctcttccctccatcttcaaagctggcaatgtagcatctttctgcctttgcttctgttttctcatctgcagcagcctcattaagaatgactcccgggcgaaccagcatctaatgggttaatgaggctgggcagcctcagcctgctagcagctgcttaagca

SEQ ID NO: 3830 - DNA, 457 bp, Homo sapiens
  I.3830 (AA985673)
tatttaataaatgaagttattgttctgactttggcaaacatgatagggtagagaatttctatatactctaaaaattataaaacatgtaactttaataaatggaagatgaccatatcttaataaacatgtaatgcttttctactgtgtaccacgaactattctgtttagctttccattacatagatccgttccacctgtttctttcttttaatctcaataatctctgtactgcctccatactggcctcaataagtgccactctccagttactgcttggccccagaatgaacacatatctgtgtcttaataaaccacagcaaagttgaggccgtaaacagcttttctaatgtcacgccgttcagaagagatccctgtttgttactcgtactctgttactgatacactatcaagaccaaaaagacaaccatatgagaacacaacagcacaccagaataaa

SEQ ID NO: 3831 - DNA, 392 bp, Homo sapiens
  I.3831 (AA975717)
tttaatcacaaaaggatgttgaatctcataaaatgcttttttggcatctattgaaatgatcatatggattttatctgttgatgtggcaaatcacattgtttaattattttgtatctgaaaagaaaattaggaaaacaatcccatttacaacagcaccaaaaataataaaatacttaggaataaacttaattaaggaggtaaaagacatacactgaaaactataaaacattgatgaaataaagaagacatacataaatggaatgatactgtattcatggactggaaggtttaaaattgttaaaatattcatactatacaaaacaattcagatttaatgcaatccctgtcaaaatcccaatggcattttttttttacagaaatagaaaaaaaat

SEQ ID NO: 3832 - DNA, 581 bp, Homo sapiens
  I.3832 (AI057616)
ttttttaatagagacacggtctatgttgcccatgctggtctcaaactcctgggctcaagcaatcctcctgcttcagtctcctaaagtgagccaccatgcctggccggaactcttgttgcaagaacaataagcatccactactgcagctgaaaacatccctgacagacccatctccctggtattcagggagggatggactaggcaatgattcagaagtcatactgaaaagctgcccttttcctactggtgcccctgcagtctgagcccaagcagacacatacttcagaggtgctacatttgtgctacaaagcacagatccttcttgacctggaggccagccttacccactgagaccaggttcctgtagttctccagcatcacttccctgtacagggacttctgtttgaggtccagcagtccccactcttccggggtaaaacccagtgttacatcttcaaaggtcactggttcctaaaaatccagattcttgttcagccacaggccatccgcatccacgacaaaagaaagacaggggaggctgaccaggccagtgaaagcacagaatggtctacaagatgacc

SEQ ID NO: 3833 - DNA, 457 bp, Homo sapiens
  I.3833 (AA978138)
ataaggcagcatcccgcgcaccaccttcacctctttgagctccacccggctcagaagtcctctccagatgtgcccccacccaggttccccacgggtgcgttcccctctcagctggaccagcagcacccacctggtcttccacctaatggtctcccctccctgcaagcccaggaattactcacacaagccacatcctcccttggaaaccaggggcaccgcaccctctctgttactacaaggcctgccttccccagggctgctggcttcctctgtgcctgagcgcacccctacgtggccctgagtggcaggtggcaccttctccctggcaggagcacacgtggctcgtaggtcaccatccacctcgtctgtccagtgtcagaggccgtgtatttggggatcttgaactttttagggcaggggatgctccacaggacaccatcaagaggggagtaaggca

SEQ ID NO: 3834 - DNA, 373 bp, Homo sapiens
  I.3834 (AA977137)
atgttaaccagcttgatttaattattccacactgcattcatagattataacacaactttgcatgctataaatctgcgcaattataaattgccagtttatcattataaaaagaaaaaaaaataccttcacagcaacattcagactggtattttaccaaatatctgggtaatgtggcctacccaagatgacacatgaagttaaccatcgcagggtccaactttgttctttttttttttttttccaactttgttcttttgcatgtggttatccagttgctccaggaacattcactgaagagactgttctttccttattgaatgatcttggcccccttgtcaataatcagttcaccatagatgtttgggtttattta

SEQ ID NO: 3835 - DNA, 269 bp, Homo sapiens
  I.3835 (AA972807)
tttaaccgttgaatgtttaatcactattgttttgacatctagaagtattgtcataggttacaatttaaacatcagaagatgggggtgtatgagaatatcacatttagggagatgtcagttgtccagaagttttgcagagaatttcacacccagattgagtttcccatgaacatgactcgttctcctgagggagaacccctctttggaaagcatgttcacccaggcatgtttgacacaaggaagactcgaagtctggctcccctggaggg

SEQ ID NO: 3836 - DNA, 412 bp, Homo sapiens
  I.3836 (AA972291)
agaaaaatggactgtgtttaataaatgcattcctagaactgtgtttctagaaggctttgagtggctagcccaggtggaaccatatggtaatcctcttttgctgtgggcttcggcagtgacaatccccatgcttctccctgtgactatcccgcttccccaggggaggtttcgggcccaggacgtgaatcagagaggggctaaatgcaggagtgagaccctctgtgccaaagccacacatgcacgtgtttgctatgtgccactcgtggaaggacaggggccctgagccgcatcacaagcccagatctccaggaataggacccaggtgtgttcaagtggacagtagagttcagccgtcacctgtgagctcctactgtatgttagaccatttgtatactaagagcactaaggtcat

SEQ ID NO: 3837 - DNA, 289 bp, Homo sapiens
  I.3837 (AA972273)
ttttgccttaaagcacagaactttattttctcacaattctagaggcaaaatatgcaaggtcatgatttcagcaggattagttcatcccaaggcttctctctttggcttgtagatggctgccttttgctggtatcttcatacagtcttctccctgtgtgtgtacacagccagccctccacatctgtgagatctatatccacacattcaatcaactgcagatcaaaatgttcaaaaaagataacaaataacaataaaataatacaataagttttacaaagaaatagcaacg

SEQ ID NO: 3838 - DNA, 498 bp, Homo sapiens
  I.3838 (AA971848)
  misc_feature (463)..(463): n is a, c, g, or t
tgtggggtttttgtttgtttatttcatcctatagcaagtccctaagataaaaacatctgagcagcaaatattccccacaagagaatgaccactatgccagagggctgtctttttgtttggatctgtagggagaggggagatgtaattgtcaagctcaaggtcccctacccgccttccttacaggaccctataccctaaagctattagacgttcacagtaaaatataaatgactagaaataatgtaaaccttattctatgctcctcaatagcacaaagtcttaacccaagaaagaataccataacagcagattttaggcatctcttggtatatgggggaatttatgttttggatagtcggatttctcagcccattactcccttgccaaaagcataccacaaggaggatcacctacctggctctcacatacgtgaagacctatacaaccccattgtaaaatggcnctctgtttaaaagataaactttgaagaactagtgt

SEQ ID NO: 3839 - DNA, 119 bp, Homo sapiens
  I.3839 (AA971827)
tcagtttctaaatttatttattttctagaatgggacttagcaggtggtcttagatgaaactactttgcaataatttctttgaacattttcaaacaagaaatataaaaacttgaactcac

SEQ ID NO: 3840 - DNA, 346 bp, Homo sapiens
  I.3840 (AA971091)
tttgaatgttttctctttttattgagtactaggtctttgatgtcacaaggtaatttcttcattagcttacaggaatcaaatcaatatggacaaacaatcatttgtatctgtcccctgagtttctgcacaatgttacccagtttttagtaagtggctataatgttttgcattttgccagatcacaggatcggattgtctgaatgcattttgttgtatcccaactcggccacctgtaccaatttaaaggcttttgacctcaggtaagtgcaggacttagaagagatatgatcgtgcctggaagcctgtgaatcttcagagatcaggcagagcattctcacagtggggg

SEQ ID NO: 3841 - DNA, 336 bp, Homo sapiens
  I.3841 (AA971087)
tttgaatttttgattatgctttaatagggaggtaaggaaaatgtatacaggatttgggaactagacaacgtgagtttgcatttgggctctagcattatgatctctctgaccttgggcaagtcacttcacctctgagtgtgtttcctcttctataaaatggggttgataagttgcccaacccgccctcacagagctgttgttggaattgaatgagataaagtatgtgaacacgtttcacctatgtaactatgtgcagatgctcattactgccatggctagggagagaggtgccggagcagaggtgagcagctgcctagaggaacttgagcaggtttc

SEQ ID NO: 3842 - DNA, 284 bp, Homo sapiens
  I.3842 (AA970008)
tttagcattttcttttctctggtttattttataatacagtatctaatatatacaacattccaaatacatgttaatcaactgtttatgttatccgtaagcttccagtcaacagtaggctattagtagttaagtctttggagagtccaaagttatatgaagattttcaactgtgcgaaaggttggcttccctaaccccgtgttgttcaagggtcagctgcatatgattgtatttctgtgaaatgttcagaatgggcaaacacatagagacagaaaatagattagtg

SEQ ID NO: 3843 - DNA, 397 bp, Homo sapiens
  I.3843 (AA969989)
tttttttttgcttccagaacctattttaatcttcagaccttggaaggtattcatatctcataagagtaatgtaatatatgggggcaaagatgcagccaagtagctcagcactgaaagctaagatgaagaagaaccccatggcttccaggaccttccccttgatgctgtggtcggcaaggagggaggtgactgcagaaaaccagcatgctgaacatcaagaacttgacttattgaaggtgtcaggcaaacccatggccaggaaaaccaaggttaagctccccagggtcaaggagccccggtatcctaggacatggtagaagacagtgctggaacctcactgcgtgtgtagaactacagatccaagcttagagagtgtgtctgtgtcaatgaagggagg

SEQ ID NO: 3844 - DNA, 397 bp, Homo sapiens
  I.3844 (AA969730)
tttaatcaacgcagccaccaaaacccagctttgcaaagataaggcagtgctgtctgacgctgggatgtctgttaccagagcaaatcatgcgtggtgtgtggcaggggttcaggattgtcgtgtttccttgagtatttaaagcctccagagggacccctgtgagttcacacaggccccgagcacttgggtgcatgtctgggaccccgggatcaggggcagccctgggccaaaatggagaggtaggttcgttgatctcaggcttcaccatggcggtgcatcaggtcatcatggctgttgtggcccaggcacccactgtggaactggctcagcacaagaacacttattcaagtttcaacatctaccccagggcaagagttcttcttaaacaaccctttca

SEQ ID NO: 3845 - DNA, 255 bp, Homo sapiens
  I.3845 (AA969665)
atgtatcaaatatatttatctcacttatatagctgcttcaaataacaaaatgttttctgaagataaaataatttccttgaacccaatcagtgacaactggatgttgagagcaatcagattggttttgttcccccaaataagctgaagcacaggccaagactagaggcattaggacaaattctcacaactacagccctggatctcaggagctcgtacagagccgtgttctgacatcctggcagttctgagcagatc

SEQ ID NO: 3846 - DNA, 413 bp, Homo sapiens
  I.3846 (AA969083)
ttttagaaataagtctcatatggaaggccatctttattactatcatttcactgacttgtttacttacttttttacagtatgaagtatttttttatccatatccacagtgggaaattagactatgagagactattagagagaatgccatgtagtagacgaactttgagtaatactaaatatttcatacaggcatacttcattttattgcacttcacagatacgtgttttttacaggttcatggtttgtggcaccctgcattgagggtctatcagtaccatttttccaaaaccatatgctctctttgtatctgtgtcacattttggtaattctcacaatagttcacactttttcactattatatctgatactgtgacctgtgatcagtgacctttgatgttgctattgtaattgt

SEQ ID NO: 3847 - DNA, 386 bp, Homo sapiens
  I.3847 (AA969039)
acatattatatgattccatttataggaaatattcagagtcagaaagcccattgagacagaaagattagtggttgccaggggaagggaatgggggaaaatgggcagtgactggttactggaatgggatttcctttggtggtgatgaaaatgttctagaactagttagtcgtgatggctgtacaacattctgaatgtactcaatgtcactaatagctttcatattacatgtattttctccacaatttaaaatacaaatatacatttttttaaaattccctcaaaccagtgggcaggattgaatggagctatctttccttgtttagggacaagatccctgtctcctccatgagaaagcataagaaaataaattcaaattttctaatgta

SEQ ID NO: 3848 - DNA, 397 bp, Homo sapiens
  I.3848 (AA969024)
cacaaaagaccacacactgtttaattccatttatatgaaatatataaaccaggtaaatccatagagatacaaatagatcagtggttgccaagggtgtaggtaggggagaatgtcaagtgactgccaatatgtacagcattttttggggaggtgataaacatgttataaaatgtgattatggtaatgactgcacaaattattgaatttttatttcaaaattggtgaattttatggtacataaattatacctccaaaatatgcaaaaaatgaaatacaagaaaaatttgttggagaaaatttgctatttgagattgagtaaagaatattaatgaagaatgttaaatgaattcccctagattctctgctactataatattaacactataatttaactcta

SEQ ID NO: 3849 - DNA, 427 bp, Homo sapiens
  I.3849 (AA968926)
tttgcggtcaccgtcttttgcaagtttattcaaccagtgttcattgagtgggtgccttgtgccacatcctgtgcttcacagattacagtagcccacttatccttgaggagtgggcatagtaccccagtctagagatgggagcactgaggttcaatgaagatctgaaataggtctcaggctgactccagagcttgtcctctttactgtatatcctcttgacgttatagtccaagggatctccctttatagtccaaaggaatctttcttggcatgtaacaagcacaatcttaaacttcttaagcttcagatgtacctggggtgttgattaacaggcagattcctgggccctacttcaagtgaatctgattctagaagtctggagttggagccccagaaactgcatgttcaatcctaacccccaatttag

SEQ ID NO: 3850 - DNA, 382 bp, Homo sapiens
  I.3850 (AA961175)
gttctctatcaacttgtatttgccaatctggaagggagttttacaaacaggtcactcattaaaagtttataggatgaattcaggaaggctgatcctgagaacaacagtgaaggttttatagagcattctgggtgggcataagcattgagcagaatccaacgcctacagaaaccatttttttttttagatattcatctagccactcagtaagcattcagttagtgcttacccttaagtaaacacatgtaatctctgtttcttcttcttaggaatcaagagaagaaaaacttggtgacacaataattaatgaagtcatttctccctcataccccttctgcagatgtgtgaatgctgatgaatgccagacctcatcactgaaggt

SEQ ID NO: 3851 - DNA, 431 bp, Homo sapiens
  I.3851 (AA935872)
tgcatcttgagaagatcgtgtggttttggtcttcttttaatatggtgtattacattaattgattttataaagcatgttgaaccagtcttggattgctgggataaatcttacttggtcatggtgtataatccttttagtatgttgctgattctgtcaatggcttttatttctatagtcatatgaaatattgctgtacaatcttcttttctcgtaatgtattttacttgttttagtatcaggtaatactggccacatagaatgagttggtaaatatttctctcccattttttgctagagttaatgaaagattaatgcaaattcttctgtaaatttttggtagaattcaccagtgaagccatttgatcatgaggctgagtagctgggattacaggcagaatggcacttttatcattataaaatgttaattgttt

SEQ ID NO: 3852 - DNA, 286 bp, Homo sapiens
  I.3852 (AA935135)
tttggttagaaactatatttagaatttcaatagaagaggccagaaacacagctgcccacatctgaaagaacctcagcagtaacagtgggggattaccaagcaaccaaggaaaatagaaactctccccactctgagctgctgatggtgactcctgtgactgagggcaaaatgacggctgaaagtgagggctaggaaatttaaggaaaagaaaggtgtggcaaagatgtgacagaagggttttctagttaggtgaggtggaaccaagttgagtggaatgagcacatgc

SEQ ID NO: 3853 - DNA, 338 bp, Homo sapiens
  I.3853 (AA934661)
ggtttttggaaacacaattattttattagtttcattaaaagctcttgatcaagttatatgctattcaacaaaatgcactccaaaatagttacaagttttaaggtttccttttcagcttgtgtgaaaacactagaaagcacccacagaaaacagctacttctttctccagaggtttcactgggatctctcaatatgtgcattcataataaaatatcacaatttacatgagtagcccatagttaattaaagagaacacattttctcatgcaattcaaatctcactgtggggagtctactttttagaaagacacagaaacaagtagttcaaatgaagaaat

SEQ ID NO: 3854 - DNA, 433 bp, Homo sapiens
  I.3854 (AA935045)
gtataattcattttattaatattttgtatccaccatgctagattactgtgaggcaaaagcaaataataataattacctatacttacaatgtgctgtgtgccaggcaccattctaaacattccatgtgtatttcctcatttaaccctcacaacattactatgagatagatattgttatgattcccatcttatagataaggaagctgagaccgagagagggtaagtcatttgcccaggggtcacacagctaattagcagtaggagaggagtctggtggtacagctcgtaaatctgtttagcttctaaacggcttctgtactagtctgagatgagccttacctaagcagctcaggcagggacagagccttgtgatcattgttataacagagaggtgctcagaggtcactgggctcagaggaatgcagcatctcaca

SEQ ID NO: 3855 - DNA, 531 bp, Homo sapiens
  I.3855 (AA927777)
gaagctgtattaggcatcaaaccagcagaaacattcacccctggactgcaaaaacatttggtataaactagctggccaatatttcattatttaaatactaatataaacacttatctaactcaacatactgatttaacattaaaagtcctactggtatgataaaacagtataatgaatcacctttattaaataaacttcaaaaaaccattatcaacttatagttacttcaaaaaaccattatcaacttatagtacagaaaaatatccaattaaaccaaattattaaaaaataacatttgaaatactgtttcacaataaacattcatcttatgcatcaataatttcctgtttcattaactgcaacatttatatgtgtgtgtgtatattacagaccaaatttttaaatcctgtaccttccaaaaactcaactatgttctttagtgtaaaataagccaagggtgtgacaatgactataaaatcattatttagaaacattatggtgtttctaggaatggaagaaaagaaattaggt

SEQ ID NO: 3856 - DNA, 1481 bp, Homo sapiens
  I.3856 (AF070633)
gttagaattaaggatgacttcattaaagcacctctagtggtggaagatgtcccatcctatcccccacccatagctgggagctatgtttggctcattcttcctgactcactggattacactgtgactcagttcaatttcacacatgctgctgctaaattagggtcttggtgagcctttgggaggacagctctgaggaatgaattgtagcactgcagccctgcctgaggaacatgatagaaacaggtggtaggcccagctcttgccttccacctactaagcagtttttctgtggttagctgtgtgacataaactatcggtgtattaatttgctttcactagattcccccccccccaacaacttagtccaagaacatacctgaattctttgcatttccttgccttagttgcttttgtagggtggacagcaggactgcatgagaatagctgtgcttctggaccctatggtgaaagctctagtgaactgcaattaggcccagggtcccggaggaagaaggggagagaaaaaggggggtagttttccaaaagataagtaggggacaaaaaagtccacggggcctatgagcggtgagactcctgccctgattgtggcaaagcacctggagatgatagaacttcctagggaaaaggctgcatggagtccccagggatgctgggccctggtcaccaaggctccctgggaaggtctcttgtacctggggcacacagaccaacacttctgaatttgcaagcttaagagcatgtatgagcagaacctgtgcagaccaaggcttagagggctcacctcaatgttttgcactgtgtgagaccccaggaccttttcgtgattctggagaggggaacaaaccataataacaacaaaccaggtagcaggatagagactcattctcatctattttggttaaaagaaaataaatgtatttcttccacacctgattttgtgattgcaaattcataactaatatccctcgtcagctccgctgactcatccctgccacagggaggttcacagcaagagcacagaaactagggccagtgcccggttgtgtgaccttgagtaagttctttttcccttgaacagggagagagacacaatggatcagagtgtctctgccagttctaacttggggattctagtgggttgaaccgaacggtagtccgtttccaaaagaggaagccaagaccagagggggagtggttccttcaagtttgcagaaccagtaagtggcagagcaggactcatatctagttagtggttcagagcatgggctccggagctagactgcctggatttgaaccctggctttgccacttgcctgttgggtgactttggacaagctgcttaaattatgtctccatttcctaatccacagaacaagtgtaatactagttatctgtttcatggagtgattgtgaggattaaataaagttaatataacacaaaaaaaaaaaaaaaaaaaaaa

SEQ ID NO: 3857 - DNA, 415 bp, Homo sapiens
  I.3857 (AI039792)
tttaatgcagtagctggggtcttgctttgtgcccaggcctcccaaagtgctaggattacaggcatgagctgccgctcctggcctaggaggtcactgtgataccctgtttgaaggggacagggcctggacagggcagaggctgtgataggagccccctcttcccttcccatctatgactctcagtgtccttgcccagttttctccacttccattttattttttatttttagagacagggtctcactctgttgtccaggctggaatgcaggggtgtgatcatagctcaccgcagtctcaattcctaggcgcaaatgatcctctcacctcagccttacaagcagctgagaccatatgcatgggccaccatgctgggctagttattttattactgggtagagatggggtctccctgtgt

SEQ ID NO: 3858 - DNA, 432 bp, Homo sapiens
  I.3858 (AI039298)
ttttttctcaatcaatttagaagtttattttgtcaacattaaggacatcccctgaagaaaggaacacagaaatcacagaaacagtctgtcctgtgtgcctttctccaaagagaaaaaggcttcagtatttaaaggggaaacgcagtttggaggggaaagagagaaggtgtggtcacattactgaatccacgtgttgcacgagaaaaggagcaggtaggggaaaagccaattatgtatttgtctggtgctcagtaaatcagcactttacataagataaggtgaacatagagtagctacctgtggagatatctggcctttttatctgcagccgtgtgcttagggacaaaaggaagagcagtttcttgcatgacttagatttcagctgaatttttcccttttggcatagtgattttcatagtgaaattttatttt

SEQ ID NO: 3859 - DNA, 253 bp, Homo sapiens
  I.3859 (AI039186)
ttttcaggcaggcaaatttaacaaaggccaaaatcaaatggctcctcttttatttacatgattaaacacttcaaaaatttaaacacttactaatttactcccaacaggcgaccagcataaatactgaattggacgaggaagctcatttcctcttacaaattctctagaaggaaggagggaaagaaaaacaacaaaccttgctgtttaatgcaaaaaaataataatctgtatgaccagaaaaaataaacaaaca

SEQ ID NO: 3860 - DNA, 457 bp, Homo sapiens
  I.3860 (AI038636)
ttttaaacgtttatacttttatttattaaaactagataatgcatatccacaataaacccacagtctcaaatatagagacattaaaaaaaaaaaaggaatcttttccactgagcctttttgtctttgggaactaaagacagcttgagtaaggtgtccttctgaggctccacctctcaccagaacttaggggtactcctgctgtctcggtcatgcccatcaacactgagactaccacactataagtcaccatccatcaagcatggggtccctacacttcctgtcatgttcctgtcaaataataggttcccgcactactgcagtcgcccacttatcaggcccaaggtcctaaaaaaagcctggtctcgcccgcaactcaaaccacacgtcttaggatgccggaccgcgtcacgctccacgtcccgctgttgactttatccaaacagccgccgccgcctca

SEQ ID NO: 3861 - DNA, 456 bp, Homo sapiens
  I.3861 (AI033968)
ccattgttttgattattttattaccattactttaattacattgaactgctgtatttcagtatcttcattttaaaaatgatgatagcaggattattataaaaattcattgtgtgacataatatttaaaaaggctttttatggcattatgactatcataaaaacattgaacgtgattcacaggaagttttactatcttcatattaaaaatgttcctggaacactattatcttagatttttatctctaacctttcctcctaccctaagaagataactatcttatcatggtggtgattgaatcaattctgtgcccaccttccaaccataccaggcaccagagcactaattttcagtgagattttgtgcctttgtaaactccagtgtcacctgaatttggaatgtagttgggggatttctgtgtaggacttcagagtttatacccaccatctgctagctca

SEQ ID NO: 3862 - DNA, 400 bp, Homo sapiens
  I.3862 (AI033953)
gccaactatgtcagagggttattcaatgtctttttcaggggacatagtttcacccataacaatacataagcagaagatactaacacagaacaacaaagacctaaaggtgcctttgcaaaaatcatgacctgtgaatgtgaccttatttggaaatagtctttacagatgtatttagttaagagcaggtaattagggtggaccctaatccagcatgactggggtccttagaagaggaaaatttggaaaaagacacagggagagcatcatgtgatgacagaggcagatcatggagtgatgtggctgcaagccaaggaactccaaagatcaagtgccaccaacagaagctaggaagaggcaaggaaggattctcccctgcgagttttggaggaagtatggccca

SEQ ID NO: 3863 - DNA, 175 bp, Homo sapiens
  I.3863 (AI027259)
tttttttttttttttgtgtgtatgaatgagaaaataactttatttcattttggggagcaggcagacattcagcctcagaacttctggaattgcttcttgatgtctgcgaccttggtgaccttgagcacattgaagtacaccgtcttgttcagggactggcacttatccaacgtga

SEQ ID NO: 3864 - DNA, 172 bp, Homo sapiens
  I.3864 (AA983642)
tctttcctcaaatctttattgtcagtctatcacctatatatctatagttagggaagctttcatatagagcaagggtgcactccagatatatgattcatctactaattaataatgaataacttgcgatgtgccaggtgctcttttaaaagcatttagatgttttaacttattt

SEQ ID NO: 3865 - DNA, 366 bp, Homo sapiens
  I.3865 (AA960982)
caatcaacttagaaagtttattttgccaaggttgagcacacactcatgacatgatacagcctcaggaggttctgacaacacgtgctaaaggtggtcggtgcacagcttggttttatacattttggggagacatgagacatcaatcaatacgtgtaaggtgtacactggttcagtctggaaaggcgggacaactcgaagtgggggcttccaggtcataggtagataagagacaaaaggctgcatttttgggggtctttgatcagcctttcactgaatacacaatttacatggagtggggaataaaggaatagtcacactgatgccttagtctggctcagtggatctgcatttttgcataaatagggc

SEQ ID NO: 3866 - DNA, 396 bp, Homo sapiens
  I.3866 (AA960963)
ctcttagtatattaggacctgcagagcaaggcataatagtagtagtaaagataggcaacttcatcttgttcctcagtctaatagaaaggtgtctagtattttcctactaactactacaatgatttagtttgtcatcagatacaaccttatggcattaagggcaatccattctaaggtggcgatgagtcccccacttttataaggaatgaggactggcttttatcaaatactttttgttcatctatagagatcaaatggttttctccttaaaatggtgcctggcaattaggcaactgcttgtttttacaattattacaatatcttaataacgatcttttcaaaaagttttcctatgctgacctttctttgtattctagggataaatcctttttgaac

SEQ ID NO: 3867 - DNA, 398 bp, Homo sapiens
  I.3867 (AA960802)
acggtaggcatctacgaagtccctttggaatcagtcacacttgtgttgattactaaagtgcatctctttcaatggggtatttttaaataagctgtaactttggatggatattactggaggaatggagctgtgatccctgtcaaactgagaaaaacaagggtatgggaagactcctttggctacttagtgctttgtgacttttgaggagactttgcagcacgtaattctaagaaaattgtaggaaacagcaaagaagagccggggtcttcgtgggggaggggagcgaagtctgtgctcatgcagcttcagtaatgtctgacttgatcctaaacactgcggttgaaatgttcctttagaatgatcttgtgcattccacaaaggcataaaatagtaaaatc

SEQ ID NO: 3868 - DNA, 357 bp, Homo sapiens
  I.3868 (AA954592)
ctaggtattgtaatttaattgactcctagctaacagcataattaaaatatacactcacagagaagtcctttttatcaactgaagacaattccacagggtacaagttaatgtccttcttcatttctgattgcctgtgatgatatgcctgtctctagagtgtgatcagggccaacaaccccattcaggcatcctcaatggattcctaaattcccctgctctcactcacgttctttcggtccttagtgttccagaagcctgggacacaaatgttgtgccctgtggtttccatggtgacccttgacacacttttggaacatatgttttctgatgcctagtcctgtgtagaaactcctaaaa

SEQ ID NO: 3869 - DNA, 304 bp, Homo sapiens
  I.3869 (AA954484)
aagattccgctggagagtctctttttattgtgttacggggtctcctagccctctcctttctcctacccacggcagcccatctctctcctccaggaccccttctttttggtatttcctggagtacggatgaaaatgaataggtgagcagcctctgggctaggccaggcacacaagggtcccgagtgaccttgggagacttgcgggcttctggaaggaaggctcgggcggccaagcaggagtcgccgcagcgaggaagcgccaggaggcggcgggggcgaccccgggggaagggcgggcggggatg

SEQ ID NO: 3870 - DNA, 357 bp, Homo sapiens
  I.3870 (AA954319)
tttgcactggccacaggttctttatttgtaaaatgggaatcatcatttttacctcgtcgcagtggtactgaggattgagttacagtacgcagcacaaggggctcagtaaaccccacacctctcccctttgatagtataggccatgagtgggaaaaagtcattcgcggaacatcctttatatcaactgcctcaatacgaacgtggtttgcaccccgacagcaccaccgccccttccaagggacaccctctgctttggggttcacatagccccctggtttggcctggcaaaagtgcaactcccagggggcccaagcacactggcttccttacctcttatagatctgggaggggggaaac

SEQ ID NO: 3871 - DNA, 241 bp, Homo sapiens
  I.3871 (AA954316)
tttcaaatatacattatttaatagctacaggaggagtcataaatatttatgaaagcggaaactgagcttcatgcctcttcatggaagcctggaggcatgggtggagttttctgccctctgatgtcaaaaggtgaagcagaggacactaaggtactcagtgtgcatcctttgtagactggccagagccactccaaggtcagtggtctattatcaggaaggaatgctggttagttgttgtgtc

SEQ ID NO: 3872 - DNA, 361 bp, Homo sapiens
  I.3872 (AA953650)
tttgacaaatgatttcctttattccccctgcttgagtatgagtatgacctatcacttccttctaaccaacagaatatggcaaaggtgacagcgtatgtatgattacattccacaagaatataatgtccttcttaccagaagaccctctcttccttactggctttgaagaagctgtcatgaatgtgaactacctataaagaaggctatgtgaaagcaactaaatctgtcaacaatcacatgggcttggaagcagatccttccctaattgagcttctgataagaccttggccctaaccaacaccttgattacagcgccttgcaaaggacccagctaaatgtgactggactcctcacccaaaga

SEQ ID NO: 3873 - DNA, 530 bp, Homo sapiens
  I.3873 (AA947111)
  misc_feature (530)..(530): n is a, c, g, or t
ttcttctcctatttgttacttctcctaagttgtcttccttcttgtgtgttgtgtgtgtttcaccatgcttcctctttttttcttctgctttcccagaagatcttgccagtagaaattaataaggactgtgtactttcagtcattacaattatgtattcagccagtacatttatctggtacaaaaatgaagctctattgcatcacatactctcagcttctttttgtgaatttagattttataaaaaatacattccaaagaggtaatactaagaactgatgatttttttttcttccccctaggagacttctcagttggggtcatactactttctgtctcagcccattttctgctgctataacagaatacaacagactgggtaatttataaagaaaataaatttatttctcacagttgtggagcgtgggaagtcaaagagcacggtgcatgcatatggggagggtcactcatggtgaaaggccaagacagcatgagagacagagaggcaagatgggagccacttcgtgccgan

SEQ ID NO: 3874 - DNA, 131 bp, Homo sapiens
  I.3874 (AA935354)
agtggtggtttgtttttttacatgaagtggcccacttcttgtattaaattatttattctttctgaaaatgttcaatcagaatgtaataacacctttaaaaatgatttaaaaatgtattcccataggtggga

SEQ ID NO: 3875 - DNA, 447 bp, Homo sapiens
  I.3875 (AA928730)
  misc_feature (1)..(1): n is a, c, g, or t
  misc_feature (2)..(2): n is a, c, g, or t
nnccgctgagtccagcccacgggccccagatcgcgcagaccttaagcaactgcaggcacttgaggtagcaggcacctggagctgcccgttcctgcagccaactcagcagcttctgctcctggcgtgctgtgttcacaccccacagtgcctccgcagcaggccctcagggagctccaacaggggcgcgctgggcaagggtggcggtggtggcgcacaaggaagaccccatctcccagatggacagcggggatgagacgcacagccatagaaaggcggcagagccgtagtcagtgcggcagggcaagatgtgtaaggtggggggctgttccaggccacctggggtcaaggtgacccgacagcgcccctccaggctgtaacgcacagtggccaaggagcgctgcagatgcgactggaaccagcgcacaccagagtagcagagaggtgacg

SEQ ID NO: 3876 - DNA, 399 bp, Homo sapiens
  I.3876 (AA928277)
tttcagtaaattttttttaatggaaatcttgaaaatatttgtcacagatggggtgaagctaggggcactccatgagtgacactgtccagcaagctttgtcctggctctgcctgggctccttcctccaccctcgtctgccctgcctgtcttccaccgtgggcactgctggtgcgcagaacttgctggacctgtgcaccatgtccacagcttcagaaactccactcccctccagcttcacctgggtgggtgtaaaagtttatcaccttcttctgaagtgttatgttcaggtgacattaaagtgcgtctttttaaccctagaactagtcgcatcatgctgtctcaaaattccatcagatggtcaaagcccagcagggacgattctgaaatgttgagttccta

SEQ ID NO: 3877 - DNA, 106 bp, Homo sapiens
  I.3877 (AA928263)
agaagaaagaattatttatttagaaaatgtgggaaaatacagatcagcttaaggaataaaccaaaacttgtccacaatctcacaaactctgttaacattttggata

SEQ ID NO: 3878 - DNA, 346 bp, Homo sapiens
  I.3878 (AA928170)
ctgacataacaaaaaaagttaatatacaaaaccaacaaactctggtactcttaaagcttcatgcttttattagcagtctctgtacatgttgcatattagccctgtgatcaactatgtaggaaaagactaaaagcagcagtagcaaataaataggaatcttgatcttatgatgatagaaatggtaaggatgtaaatacttgtttaaaaatgaaaatggttattcctttctatgcctagaggttctgatgcctttgtttgccttatcagcttgcccaacagaaggtggaaaaaatcactgaaagtaaaaataaactggcctatgaaaacggaaaactccaggtatgag

SEQ ID NO: 3879 - DNA, 481 bp, Homo sapiens
  I.3879 (AA923246)
ttttttttggaaacccgggtttcttttttcctgagtgtttcctcaacctcagcaaaataaacctctaagttgactgagatctgtctcagacactttttggtttacagaagtaaggaagaaggaattgcatgacttccaggatccagcttggtgagggcgtggacgcagagcctgagatgggatcacgtgaagacgagcagggaacgtcaacaagggaggagaccttggcaatgcctgcacagcccgctcagccgcgtagagagccctcacagtcgctggcttcatgcggtgtagagaaagctggttaaattcatctaactgcaatttgccttccatgtctagtctccttttggccatgaggaagataatccagccggctaggtatagcactgtggagaggacaaagtctcacttcctgatcagcagtggccaagggaggcttttctctgcatttgtgaggctgtgatatctttcatgcact

SEQ ID NO: 3880 - DNA, 426 bp, Homo sapiens
  I.3880 (AA923213)
tttgtggtttaaagcaacagaaatttatttccttgtgttctgcaagccaggagtctaaaaccaaagtgccagcagggccatgcaccctctgaaggttctagggaagaaccttccttgcctcttccagcctctggtggttgccagcaatccttggcctttcttggcttacagctccatcactccaacctctgacttcactgttacatggccttcctcttgtgtgtgtctctgggtcttctcatggcataaggccttgaaatttgggcccatcctaatccattaggacttcatcttgactaactatatctgcaaagacatatctcacaatttctgtggacaggaattcaggagcagtttagctgggtgattctggctcagagtctcttaggaggttacagtcaagatgtcctccagggctgcagtcat

SEQ ID NO: 3881 - DNA, 602 bp, Homo sapiens
  I.3881 (AA923169)
gaaaaaaatgtcttattttgtaaagcagtttgaaattttaatgaattttatggtattaaacagttgcaaaaataatggaattatattcaacctatttattcctttagtgagcatgggtggatatttcagtaccatcaaccattttgcagttttcataaggtctcttcgagcaaaaattatgccctttcaagcaaactctttttaatgaagttaatccaaaggttcctagattaaatatttcaaatacatttcacttatgtgacattcttctccagggctccagtgtaccctcctattgttgtcggttccaaacccattttgaggtctctgctttttccatgagaacgtcaaaactggaggcctttcaaagtagctgctgtgaacacggaggccccacagccagcctgacagtccctccagttgctctcagagacttgcttcacatggatacacagagcaattctccagacacagacgcatctgatgccctttcccgaaaacaacatttccagaaaatatgctgaccatgaagaaacagcaggggtgagagaagtggccaaagcacttgaaacatcttaacaagcactaattaaatgtcgtgc

SEQ ID NO: 3882 - DNA, 496 bp, Homo sapiens
  I.3882 (AA922285)
tttgtgttctaataaaactttatttacaaacgggcggcaggctcatttcagctccgtcagtttgctgacgcctgattttaagcatagggtgaccagtcgtcccagtttgcccggaactttcttgattttagcactgaaagtcccatattccgtgaaactcagccccagtaaaccaggttggccctgctatttaagcaacacttgcattatcccattcaaaactcacactaccttgtgggggtcaggtcaccgcccagtggatccaccttgcctgctgcctagacagagccgatttatcaagacaggggaattgcaagggagacagagtaattcatgcagagcaggctgtacaggagacggggatcagagtttttaacgacaatttggcgggtaaggacttgggaagttgggagtgctgattggtcaggttggagatacagtcatagggggttgcagtgaggttttcttcatgtcttctgttcccggctgcgatggc

SEQ ID NO: 3883 - DNA, 322 bp, Homo sapiens
  I.3883 (AA917991)
tgtgtgtttttatcttcattttacagatgaggaacccgaagcgtagagggttaagtaatttgcttgaggggacccagagtgggagatgatgggctcggattcaggcccaaggcatccccctcccagtgcctgctcaactccacagcatgtgctgagtccacacaccaggattcaaatccctgctccacttcccagctgtgaacctgagcaagttacttcactgcctcctgcctcagtttccacacctgaaaactggggacaggaagggctgtgtggagcaggccaaattttgcgatgaagcatctgggtctgtgggttgcac

SEQ ID NO: 3884 - DNA, 307 bp, Homo sapiens
  I.3884 (AA917324)
  misc_feature (60)..(60): n is a, c, g, or t
taattggtccaatcatctatttattagagtgagtgcaatacagttcctgcccgcatgggnggaaacaggctgggaggagggccaggggacagtaagtgctaggaggggaaatgggagggggctgggcgggcactgtggggaggggcaggggttcccaaggcaacgtcgaaatctccaaatacagtgggcctgacggggatgacagagaggctgaagagacagagccgtcctgcacagtccaggcaccaccctgccctgccactgcctggcgggcatcttgagctccagacccttagcctctccgggc

SEQ ID NO: 3885 - DNA, 398 bp, Homo sapiens
  I.3885 (AA917003)
tgaatgggcatttcaaaactttatttacaacaacaggtgggaaagacaggattttgctcatgggtcatagtttgctgagtctgcttctagagacttgaaaaagcaaaacgtattgcattggccaagacaaaagtgaggttcaggtggctggagaggaggcaagaaatgagttgggtttggggttaaaaagtgacttaagctctgagtagaggaaggaaaggagagaggacattgttggcagagggacagaggcccagaggggagactgagagccttctagccacaatggaatgaccagaatgtgggtaattagactatattagcttcaaagtgacccacttaaactctttccccttacaccttccctgcaccaaattaatagacatttatcagaacag

SEQ ID NO: 3886 - DNA, 459 bp, Homo sapiens
  I.3886 (AI025789)
tttaagatcatgaaagttcacagtttttattggggataatacgttccctgtgtacatatactccaactatggaatggcacaaaatgtcctgtcaggaaatggcatgtatcagtcactctcattttcagacaggattgagacttttaaaataaatgtaaaatatttcagacatgaagtaataagtattattagaataaaagcattgcactcttggtaggaacacaatcactgactctacagacagtaatgatgttttcttctggatccagaggcacagcgtcaccctttcaatctacgtcggtatctcctgtcttcttttgtgcaaattcccagccatgtagtctttctttgttctcttggaccaaccatattgaagcttaataaatagaagtcaaagtttaactgtatgtgtatttgaaaagcaacatatggctgagaggcatgagtagagacagagtg

SEQ ID NO: 3887 - DNA, 164 bp, Homo sapiens
  I.3887 (AI017667)
ttttttaacacaatcaaattttatttcagaattgtactatgcagagaggctgtgtgagatgagttaatagttgtgaaaggagtgatcataggcatgagaataggcgggaggcaaatgcaactgtcctcatgaggctgactcacattcaagtgaaggaattgagg

SEQ ID NO: 3888 - DNA, 144 bp, Homo sapiens
  I.3888 (AI016721)
ttggtaagatggaaagttttggagatgtgtgatggttatggttgcgcaacaatgggaaggtacttagtactgcttaactgtgcacacttaaaaatggtaaaaatgataaattttgtgtatgtcttaaaacaataaaagaagttt

SEQ ID NO: 3889 - DNA, 372 bp, Homo sapiens
  I.3889 (AA931225)
tgtgcgagggtcaacaaggtataaaggtaatgtgggcaagggtctgttggtctggtgaaaaagcagctagtcttagactaagagaagagaagcaagaagaggggagaaagaaagccgcacatccaggcacaaggctgaatttccccctttgccccataggctcagcacctgtctcctccagaggaaggcatgggtcctgattggcactgacactctttacaaagcctatggacttctagccatacacatgtcttttcagtttccagcacacaaacattgtgcaaacgcacaagggcctgcaggtttaaggaggctggtagactaggtaaggtaaggaagggaaaattcacctcattcttattgccatctgga

SEQ ID NO: 3890 - DNA, 452 bp, Homo sapiens
  I.3890 (AA927036)
gtgaacaaaagatatgtatttaatttgcagccatataatttgcaagcatttgcccatcctttgcagtgatggtttgaaagcagctacagaacaagaaaacactgaaagcagagtggaaaaggaacagagcccataccttggtcgcccatcatcaggtgcgccagaccttggctgcagtccttgccgcggaacacggttcgcgagcagtcgcacacggcctggtcgtccaccacggagcacacacctccgttgaggcacaccccgccctcgccctcctcgcccgcctcgcacgggcttcccccgccgctgttgggcgtaacatcgtccagcttcacctcgccgctgtccacgggcaggacctgcgaggagttgaccctcacgtcacgaatccaccccttgaagggctcccgctccctcaccgaggccagggtgagcttgagcgccgcctcgtg

SEQ ID NO: 3891 - DNA, 240 bp, Homo sapiens
  I.3891 (AA909944)
tttgcgtttaactgtgggttttggcttgaggatctcagcataaaagcagctctctatctctttgacaggcaaaaactcaactaagaggaacaatgacatacagagagaactataaaactaaacacaaaggaaagctctatcaatttcaagtggctacacgttttgctgaggctcaactctggttttgccgggccaggtctcaggacctcagcatcacctcctgcctcagcctggttgtta

SEQ ID NO: 3892 - DNA, 455 bp, Homo sapiens
  I.3892 (AI005668)
tttcatggtttcatttcagttttattgctcctaatgcaatttgttttcattaatgagaacccacatgtatgcatgaatcagggttttgcactgatacctcctgtgtggggtatttctttttccaggttaggtttcattctccatatttaagatctattgtgtgtatattgatatttgcctataaatattaaagatgcacctgtggttcagagaatatgttaaaattcaagaaaagctaccgatctacctaaagtagcatcaactcgttttttaaatttgtagatatttccatttgtacatggaaatttagagggaatcttaagtgacggtgaaaaataaaatggattttataatgaaccctttaacatgcttgaaaggagtggattcaggagaattaagttcatgaaagtcaggtttgaactttaaatgtttattaactttattgatttttaatt

SEQ ID NO: 3893 - DNA, 436 bp, Homo sapiens
  I.3893 (AI005466)
ttttttataagcaatataggattgtctgaatttctttatttaacatatcaagggctaagaaaaagggtttctcccaaacccccatttacctttaaggctcagccagaaagccagagtcagcctggtacgagatattctggaactacaatacactgtatctcttacagagttatcaaggaaggttgcatagttacttcaggagacttaaaggaaaaaggtagatcacttcctctgaatgccatggagggatgtattatatgaccccaaacagaagacaagtgtagcatatgagcaactaaaaattctgaggctctaagaggctgacactcattttgagtttggagtgcagggagccaaagaagtggaatcacaaacagaaacaggttctataaaacatagctgagttacttgcctgctcatggtctcaataaagaga

SEQ ID NO: 3894 - DNA, 424 bp, Homo sapiens
  I.3894 (AI003757)
gcggataatatttacttagaggatacagatgtctagaaagaaagtagcagaagcaatgaaaagtcagtggtgttaatatcatggtgatgattaattagaggctgccagcgtttcataccgactcaagaaccaaggagcggaaataatttttatcattaatcactcaatatgactttcaccgccagtttcttccacatccagattttttttttcccccaaagttgctttttctgattttgagcaaatcctaaacttctgagccaaggaagttaaagccaggaaagagcggtctttcttagaacatagggatctaagcagccttcatgcttctgccacctcctcctctctctgggaacagttcctgtttggcacttggattctgtccagacgggtctgtttccgtttctactctcctttccagtgg

SEQ ID NO: 3895 - DNA, 147 bp, Homo sapiens
  I.3895 (AI003750)
tttttatttttttttttttttaacccaaaatgtccataaaaggctccttattcctaaataactggtatgcagtaatttacgtccggacatttaacctgaaaagtctgcaaccatccagtttttttttttttttttttttttgcaaac

SEQ ID NO: 3896 - DNA, 429 bp, Homo sapiens
  I.3896 (AI003560)
tttttttacatttttaagggagatttatttgagaaccatataaaaactgacagagcacttcagaggccaatttacacaataaaattggcaataataacatatatatctttgcaaacataagcactcagctattctaacaacagtcacatgattacaacaattacaagcagatgaactgtattcataaggcaatatgccaaaaacaaagtgtataaacatgtatcatgatggttggtagttgtgtgtacctagctttataactccagtcatccgaaatactgtgatggacaacctgtcttttgacaagatcaatcaaaaacctctataggtcaccactgcatatgcagtgcccaaaaaggcaagatctcaagaaattttggtctttcacaaatgcagatacacaaacaggaaatctgttcatttattgag

SEQ ID NO: 3897 - DNA, 370 bp, Homo sapiens
  I.3897 (AA917436)
actcccacctggagaccctgcagctgctgaggactgcacagctcccagaacaggtgagctggccttgggggcaggtggcaaatgggaaggggaaccaaaggaacatggggtccccccaaccctccctcctggcgtttgaaagaaacctggaactccagattatgggtcttgggtattccctattgatggggaaactgaggcctagggtggcaaaggacacctaagggtacacagggactcaaccccttcacctctaaccctcaaggattagcatttgtgaagctgaaattctttgatctggtcctcaaatgccgggaaggacctgaacaaatgagatgaggttgtcttcaggttcccaccaccctgctct

SEQ ID NO: 3898 - DNA, 394 bp, Homo sapiens
  I.3898 (AA913821)
tttttttttttttagaaggaggaggaaaagaggagaccttttttattgtgccaggcatgtgcaatatgtagtttagcccttgaaatgaccctgaggcatgactggtattatctagtgtctcgtattatctctactgcaggcaaggaaaccacagttcacaagcaggtcagggaaggaaccaccattccagctcaagtctccccaactccaccattgtgaccatctttcaggtggctccatttgcacagaagtaacaggcatgtgagctttatagtacttacaagtccagtgttcctagaaacctcaggggcaaataacactgaaatattcccaaggcaatgctttgtttttctgtaaaattgttctgggcagaagaggaagaagagaccgagcg

SEQ ID NO: 3899 - DNA, 433 bp, Homo sapiens
  I.3899 (AA913451)
tttgattgaataaaacttttatttcagataatgaatgcattgatttaataaaggatttgtactacatagtattatagttccctaaatgaacactgaaatcctaaaatgggaaaacttaccattggtccaagttaaatcataggcacttcttttactggaaaccctaataagataacaacccatttgatacttaaaacaaaaaaatgtgttatataagtacttaacattttctagctatttttaagccgcctgtttttcctatcataagtacatctggcatcaggcaaacagattacagccatggacatctgactaatttataatatttttatattttcatatttttggcagactaatccattaacctagctttcaaagatgaatcttgaaatcttgcactcttgcaacctttttgcctttttctcttccaaac

SEQ ID NO: 3900 - DNA, 410 bp, Homo sapiens
  I.3900 (AA909292)
tttattttcatttcagttttaattaaaatatggaaaaaggcataatcattcagtttttagtattgctctgtggcaaaatttcatgaaattcacggtggccattcttatgttagttttgctagattaacatatcttaaaattcttttctttttctgttttatcttcagtttccaaaagggcaaaatatctgtatctgctttttacttttcttcccccttttagctcatatcaaatcaagttttcttagagtcgtccatgcttcttctttccttctcacaccataaaaaagttcaaatagatttaccctcacaatatacccataatctaccacatattttcacttctgctgttactggccgacgtcatcatctgttaccagaattgctacagtagactccaaactggttatc

SEQ ID NO: 3901 - DNA, 564 bp, Homo sapiens
  I.3901 (AA910923)
tgaggtttctcactgtgtatgctgtttcttagcctaggagagccttttcgttcttctcctaagactaacattttactaatttgtcaaggagctagagctcctaaacacgccatcttgaattcttccctgcgaccccagtcgggctgaaagctccttccttgtcgctccccactgaacagatttttcttggggcggggagagggggacggagtatcgctgagtcgccaggctggagtgcaatggcgcgatctcggctcaccgcaacctccgcctcccgggttcaagcgattcttctgcctcatcctcccaagtagctgggacttccggcgcgcgccaccacgcccagctaatttttgtatttttagtagagccggggtttcaccttgttggccaggatggtcttgatctcctgacttcgtgatctgctcgcctcagcctcccaaagtgctgggaatacaggcgtgacgactgcgcccggtcagaacagttttaacctccagcaatgaccactgcttccttctgcctgcagttggaagtcagtttcagttttcttattccctataa

SEQ ID NO: 3902 - DNA, 313 bp, Homo sapiens
  I.3902 (AA910846)
aattgtgcatttctgattattttctcaaaaacatttaaagacaagtcaatgtgaactaaggagtgggaggaggtttcaaggaaaaggtagaacattttaagggtttttctgcagaggaaaaagtgagcaaaaaaaaaaaaaaggaaaaggaatttaagttgaaaaatactccaacaaacgaaccaacatgttttcagaactttttgaagttccagtatggtgctgtcatggttggtgagctgtctgtcccttgatcagtagacaatgcgagtttcttccgtcattcgccacgctgaccacttcccctctgctg

SEQ ID NO: 3903 - DNA, 570 bp, Homo sapiens
  I.3903 (AA910310)
tatggaaagtataggattttttatttattcttaatggccgcatgatattccactgtgcggctgaaccaaaaatcatttaaccagttccaagttgttgggcatacagcttgttttcaatcagtcgctttatacataccagtgaaataaacatcactgctgttgctgctaaaggattctctggtcaccgactaggggtagacgtaactggggtgggccgcatggctctcagactccaaaatgtgagtttcatctgccttccactgttgttcttctcagtagaggtctgcctgcgccacctgtgcttctgagcccatctgatgcactagattcatctggaggagcaggtttctggcaaggaactgaatttgtgggttccctaggaatctcttgcaacttttctagtgtgttggcttctgatttctcccaaacacaccgacttggcaataataccgagtctgaattggaaaggcttcatgaatattaggcccagggcaaatttctctctggctacgtgactttgatcttcatgctgctggactgttgcagcagatgggtttgtactattttctg

SEQ ID NO: 3904 - DNA, 336 bp, Homo sapiens
  I.3904 (AA906962)
tattgacttatgtctgttcaaataactggtgtggtttctctctcctgactcaaccccgaatgacacattcccttgaaggggcagaacatcccgagacaagatgcaacggtacacctaaataaagacataaaatcttcaaagaaagataatgtccttcagaaaagggtttgtcagccataggcgcctggcccagggagggtcagagaataaaccccaggatgacatcctcagcagtgacaagagaacagaccaccaccatccatagcctggatgactgtaaagactcctgctatagactggataactgcttcatgtgccccctaccctccaccccac

SEQ ID NO: 3905 - DNA, 410 bp, Homo sapiens
  I.3905 (AA906511)
tttagagcaaacattttcgatttttattttacattaccatttatatttatttgaaaaaccttaggatatgatgaccattaagcagaactaaactacctcagagtatctaaaactttcctatctatatacacgttagtgcattactgagtgaggccagtatttctttctgctttgctaaaatttctaataccaagtactcattagcagagaataaaagacccaattaagaagggcttcaaaatcaggattacttctaccacagcaaatttcttttgactaaagcaccatgagatttaggcctgggttctaatcctgcctctaactgtaactagatccgtaactggaaaagccactaaacagcaagttcttctggtaggaaatgagattagcccatggaataacctaatacc

SEQ ID NO: 3906 - DNA, 460 bp, Homo sapiens
  I.3906 (AA906222)
ataattttaaaaatcatatttaataggatccatttattattaaatgaacattaaattacttaatgtataataaatccttaacacaatgaaaactcttaatgcagagtgagaccaaaatgaaggtattaactgttttcttcctaatccttgctttagttgttctttccaccagatcgtcactttatttgaaggatattgtaatagcacaaagccatcagctttaccattagagagatcttcattaaattatctttgttgtaataaaggtcatctggaggaaatactggtctgaatacaataataaatgttaagctttctagtattttccacttttagacacaaattgaaagaatcatttataatgtcaaaaacacttttttctaactaatctattctatgactaagacactattagcaattaaagtagatagatcaaatctaaatgtggagagaaaaagta

SEQ ID NO: 3907 - DNA, 393 bp, Homo sapiens
  I.3907 (AA905513)
ttttttgattttgaacatttatttataatcatctaaaggacccaagcattttatagaaaagacaatatactttccaaagaccctggttaactgacatacaaatccaccaactaagaactgtatttctattagttaaggcttctgtggctcaactttaactgagccaaaaaatacactaatgggccaatggggacacagatgggttagggaactacccctgaacccaaagttcatatatagccaagaagttcaatgacttcaagctacacgaagttagcacttaacctatccacggttcttcatctgtacaacaagcatgtctgggttatatgacctcctgggtccggcttataaatctaacatctacaactgcaagtcaagagtaccaaatac

SEQ ID NO: 3908 - DNA, 406 bp, Homo sapiens
  I.3908 (AA905020)
ttttccatccacagtaattttattttaaagttgtaggatgctaatatttttacatctgtcacataaaattaacatttttaagcaatgtcacattttaaattgtattacaagtcaagaaaacatgttattattttaacacatgatattttgatattatcccaaatagatacagttgtgatattttcatagtttaattataaacatatcttaaagtgccatttatttgagcactagtgtctacaacatttttctgtaactttaagcacatttcttaccacaagctgaactcttccaccattaagtacatctggatctaactcaggcaaaaagtgattgcatttcatatttctggaactagtcgtttcatgaaccccaacctgtgtgtgaagccattggtatgtatatt

SEQ ID NO: 3909 - DNA, 351 bp, Homo sapiens
  I.3909 (AA904461)
tttttttttttttcagtattgaaaatctattcagtagataagctgccattagaaatgaattgcctgaatcctcaagcaggaccctctgcagatctctggagttctctttctatgcagcaatctcgtctcttgtgctctgccctctgaactctagctgccatggtctgcctggaaacatttcagcagtctgtcttctcaactcaggaaacccaccagtcccctcctgggttcttccttcctatgtcacatcctgaaaactctctgaaggcagtaaactgcaccacaagcccaacaccgcagttactgcttcgtgtttgtgttgaatcacaaaatgctcaaacttcagggggc

SEQ ID NO: 3910 - DNA, 183 bp, Homo sapiens
  I.3910 (AA904428)
ttttaatgggaaagtcaaatatttattaattagtggggaaggccctgagcagttgagacccacaggctgctggcccaggggtaggcaggttcctttgtttttctgcaggtcacttttcccagtcacctaggacaggccacgacagcctgccgccccaactcctggacccacagctcattgcaa

SEQ ID NO: 3911 - DNA, 383 bp, Homo sapiens
  I.3911 (AA904418)
tttatttcatctagagtttacaatacacatctttaacttatcacagctctatgtagagtataaagaatgtacagcaggagaagtcagtttttctcttctgtctttgcactaccgttatcatacattttacttcaaatgcatacatttaacatgtgccacaaatcctataacactttattgtttttgctttaaataatcaattatcttttaaggagaaaaaacaaaaaaattttacataatttttatatatttctgggactcttaatttctttttttatagatcaaattttccttctggtattatatttcttttactaaagaaattttctttaacacttatgtagtgcaaatgtgctaataatgaatcagctcagtatttgttc

SEQ ID NO: 3912 - DNA, 189 bp, Homo sapiens
  I.3912 (AA897716)
aatgatatctttcccttgtattgccttttcctgtccatgaacacaattgcttgcttcattcattccgtttctcatatcttttagtaaacttttataattttctccataaattcttggcatcagtttattgaaacctctcactagacaagaagttgacttgcggccatgctcctgcttctccattctttg

SEQ ID NO: 3913 - DNA, 382 bp, Homo sapiens
  I.3913 (AA894672)
ttgggaggggaatattttctttattcttaagtatacaaaaattatttatctatatctggaatccaataaaaagataaaatattgcatttcattatttacataatacatgcaagtacaagttgtgtgcatcagcatctcaatatttaagttgaaaaatgaatttgaaaagaagacctaagaaaaaaatgtacatagttataacaatttaaatataaaaattaggcttcatccacaaatagcatgagttagatttttcatatgataacaataaaatatacaactttttaatttaattttaagtcaaatttatgcttaaaatgtttatataatttttctcaaatcaagaaaggttaagatgaatgggatagtataatctcatgtc

SEQ ID NO: 3914 - DNA, 358 bp, Homo sapiens
  I.3914 (AA894523)
ttttttttttttttttgatggacaaactgcgtcttagtttattcagacagaagaacactgctcacaattaaaaacgaaggaacagacagcaaggagctacggacacacacaacagcacggatgaagctctaagtcataggatgaagaagccagacatcaaaggctccaactgcaggattctgactcctcgaaggtcgtgagccggagaggtcaatccacggtccttaagtcagagccacatatggtgagatgcatgctcttcagtggagacccagcccctagaaggtccctccagcccttcctgtcggcgtccctccccatctgtggctctgacttaagcaccggagaggtcaatcca

SEQ ID NO: 3915 - DNA, 257 bp, Homo sapiens
  I.3915 (AA858371)
tttttttttttcattcaggtttctatttttattcaactacaagcaaacagcacagaatgaagcaaaagcaaaaaaaaaaaaaaaaaaagccaaactaaaaaaaggaaaacaggaaacatttagaagggcctttctctgcaaagacgggatcccttgaaattgaacttgaatcaatagatggccactcatattctgtattgaacaggagttcattaaaaaaatcagtgacctgcaccaatcaataagacttcagggac

SEQ ID NO: 3916 - DNA, 311 bp, Homo sapiens
  I.3916 (AA856755)
ttttttttttttgagacggatctgtactccagcctgggcgacagaccaaggctctgtctcaaaaaaaaaaaaaaaaaaaaaaaaaaaagggaatcccaaccagatactggtgcaaggtcagagatgcagccaatggggagatttgtagaaagctcatagatgataaaaacatgggtctttaggaaaattagaattcagctgagcctcctttcatttggacaatgttcagaagctcttacagggggctatggcaatcttttgatgcttcttatagctttctgaggttaacgcttttgtggtgggcatcggta

SEQ ID NO: 3917 - DNA, 428 bp, Homo sapiens
  I.3917 (AA825968)
tttttttttttgatttataaagaaaatagatttatttgactcaacattctgaaggctgtacacaaagcatagtgcttgcatcagcctctggtgagggcctcagaagcttataatcatggcagaaggtgaaggggagccagcatgtcacatggtgagagagggagcaagacagagggaggaggtgccagtcttttttaaacaaccagatcttgtgtgaacccatagagcaacaactcattcattaccttgaggacaacaccaggccattcatgagagatctgccccaatgacccaaacacctcccactaggcccacctccagtatcagagattacatttcaacatgatatttggaggggacaaaacatccaaaccatatcacctgagaatagctaaatacttttaaactgtggctttaaaaacagcaag

SEQ ID NO: 3918 - DNA, 1416 bp, Homo sapiens
  I.3918 (AF007137)
cagtgaactgcctgctagatgccaggcaagtttaaaggaaaggtcaatgagaaataaagtgctcaagggcagattcaaggaaaacatggggagcattgcagagcaaccaggtcttaaaagagaagttaaggagaacagcaagaagcaagcacacaggagcaggcagaggcacactggttgagaaagtaggatgcccagcagcctggtctgattaaatcagaaattccctctgtaggaggacaagcaaagcatattatcataggctgggcagaattccaaaggtcatttcatccaacactcctcagacgctgaaactcaaggtttcgaaggcaaaagtggaagtgtagacaattgctacagaattgaagcccaacattctgtcctttgcctttcataatttgagacaaaattaaaaccatctgaaatatctcccttggctgcttttttcaaactttaatttccctgcaagtatatgataattgagtttctttagagcacaaggctggatatattggaccttaatgtgcacaagttcatcctagaaattgtctttagagtaccaagtctttcctccccaagagttccaaaactaattcaatatttagaatgctcccctggacctcccagttccagtggctgaatgtcagggctcaggcattagaggattctttttgttctttggccctcttggggactaaatgccatgtatgtcaccatgtcagtgactacagccttggtttcatcccctgatgacccacaaccatcatctcccttatgctgaacatctctctgaatcttggaattttcagatgactctaactttgccaaattagaatcatgcctgattctttttttgtttgattgtttgctttatgtttgtttactttgctcagtgccaagcacaggatttagcataagaaaagttccactagaggttgtttattcaagtaagtaattattatagccatccgtatatgaatgctttacaaaattttggctgatggtcctcgcaggtctgttttattagtcaatttataaactcaagtttatgtcttcaacttgaccatctcctttgacttccagattcgcctcttcccacaaaactgactctccacttggacatctaacaggcatcttaaatttaatgcatccactttggggggctgaggtgggcagatcacgagatcaggagatcaagaccatcctggctggcacggtgaaaccccgtctctgctgaaaatacaaaaaattggccaggcgtggtggcaggcgcctgtggtcccggctactcgggaggctgaggcaggaaaatggcatgaacccaggaggcgtagcttgcagtgagctgagatcgtgccactgcactccagcctgggcgacagagcaagactccttctcaaaaaaaaaaaaaaaaaa

SEQ ID NO: 3919 - DNA, 247 bp, Homo sapiens
  I.3919 (AA996163)
agctattatgagtaattctaccatgaatatttgtgtatagggttttatgtgacgaggcataatattttttaaaaagctcccctagtaattctgatgtgcattcaggttttgtgaaccattagtctcaaagatgacagatgactaaacagtatttttaattgagttgacaatcatttggtctgtttgtccactgctttatctgtcacttagggcagattgtagcatactgtagaccctaattaatatt

SEQ ID NO: 3920 - DNA, 432 bp, Homo sapiens
  I.3920 (AA992381)
tttttcttttcgagagctgtttatttttctttatcagccaaaaagtatgattactatgttaatgcaggttttgcttcatcaagagattttccagttattgaacttaaataacattgttctaaaccccaaatcctctaaattcctgttgtcagtgaaagaggtaccttctaatttggaaagaatatctagttcagttctgatttcaaaccagcagagaaaaataagaaaaatgttgctcctgccatatggagaatgaccatcatttaaggaaagaaaagttggttgagagtttttgggaagtaactgttttgtacttcctttaatgtactcagtgtccagagcaggaactgggtggttagaacagctgcaatatgattccactggaaagcagtttgcagagaggcaatcaaaagctgcaacacttagattaag

SEQ ID NO: 3921 - DNA, 413 bp, Homo sapiens
  I.3921 (AA985316)
gagtgaatctcctgaaaccatatgcaagctctcacagacaggagcatttttccagagcggggggctgtaggttccatcagattctcaaaggtattagaaactaaaaaaagaactaaagaacccactgctataaagtcaagtttaactaaataccaaagactacaaagtctctactacttcataactctagcttctgaaacactttacagctttttaaaagaactctactttgccacaattacatcatcaaaaagcagtgtcgtcccataaagattacgaaatagccctctgtttggagagcagtgtttctccaacagtgttccagagaactgtagactgaggaaatataaacaggtacttggccagagaggtgggggaaattctgcccactcccccaggggattctaggtaga

SEQ ID NO: 3922 - DNA, 323 bp, Homo sapiens
  I.3922 (AA985146)
gcctggctccaaatcctaaccattatgctattccacctccttaaggcagaactgtaatgtgactagattctagggtaagaatggaaacatgtattttgaatgctgtcattgtgtcactgggcacggatagtattggcaaactttggcaataaatattaacataccttcccactcaaccattgtttgcttaacacagcatacaacaaaaccactcccaataaatcagaactgtctggaggtggaaattatgttatatgctgctagacactattatctctcagtatagaataaatggaaggattagagctgcagagtgaagaata

SEQ ID NO: 3923 - DNA, 389 bp, Homo sapiens
  I.3923 (AA983987)
caaaggaaaaagatttaatatattcgagtcacatcatgacaaatgatacaaacttgtgaaatatcatttcttcctctttttgtatttttttgtagacactttcgccacattgcccaggatggccttgaactcttgggctcaagtgacccaccttccttggccccctaaactgctgggattacaggtatgaggaactgagcacttttctattttaactaaccttgccatcttttcccgtgcttttctgttactgtcccctcctgttttcctactacattgacaggttatcttgacaggtgcagccctcccccaacagtatagaagtttattcttagacaagctagcacaatatacttttttttgagacggagtgtcgctctgtggctccg

SEQ ID NO: 3924 - DNA, 379 bp, Homo sapiens
  I.3924 (AA977250)
cagtttaaaggagcacagatttattattttacagttctgtaggtcagaagtctgatacaagtctcactgtgatgatatcacagcataggcaaggctgtgtttttttctggagtatctaggggaaaatctttccttgccttttctagcttctagaggctcccagcattccttgctttgtggctccccttcgtccatcttcaaagccagcaatatcacatctctgtgacccttcttctgttttcacatatgtctgactgcagccaggaaaagttgtcaccttttaaggactcatatgattagactgggatcatcttaacctcaatcacatctctaaagtctcttttgctaagtaagacaacgtattcacaggctccaggaa

SEQ ID NO: 3925 - DNA, 325 bp, Homo sapiens
  I.3925 (AA976555)
tataatcttcagtttaatgcatatatcatgagaagagtctaaactgcttaacaagtataattatttttgagattgcatttgatcaaccaaaatcctgtgtaagtcttcacaaatcctttcacaaatgtctgttgcagaacagtttctttattcagaaagtgactgaaagagaatttcatgacacactgaaagcaagtatctctataatattttagactttcccaataccaagagtgattacaagtcagaagatcattacctaacaccaaatagcctattgcaaaacaggtctcagatacagaataggttttctggtgtttggtta

SEQ ID NO: 3926 - DNA, 414 bp, Homo sapiens
  I.3926 (AA978335)
ttgcaaaaaaaaaacatgctatgtttggtcactcgctgggtcggccctgagggtcgcgttgcatcaaaccgccagcgcatggcttctcagtaccgtccgctggatgcagcgaggaccctgcgcaggccgaacgtctggaactgtggcctggaggggaggctttgtagggtggccccgggtgcctgtacccgagagtccaccgtggagccccatcccggagttccctactcagcgtcaccgaggaaggctactcaaagccctgtgacaccgtgccgcttagctgaatgggcttaacagattctttcccaaaagctggtttgatggaggcacttgtagaggctctggagacgctggacgccttcattgatgctgacacagccttgcacagccttcctcggccttccagccctgcac

SEQ ID NO: 3927 - DNA, 300 bp, Homo sapiens
  I.3927 (AA972285)
ttttccaaatattttcaatccagtgttggctgactccatggatatggaacccagacatgaagggcaggctgtatactagaaaccactaatttgtatacttaaatgatacatcatatggtatgtgaattatctcttaataaagctgcttaaaaccaaaaagattaagtgacaaatccacagtcacctggtcagtgagtgtgctggaactagctgactcacatcagctgaagagagttgactgctaaatgttcagaagtttttgtaagctggttgtgaaaaaatcatcaataaaaattaaat

SEQ ID NO: 3928 - DNA, 349 bp, Homo sapiens
  I.3928 (AA968431)
tcttttggtatcatgaatgacgattatgatgaaatccacgtcttgatggagttctgtgtgcctttattccatcttttgcattgaggatgaagtttactaagttggaaggcatggttttttcaattattgatggggacaattttcctctcatttctgtctggacaaacatcactagtttggaatatgctgggtttaactgataatgttcatatttccttcgtagcgcttgatgtacactaagtcgataaagtctcgaggggaaatggagcccacgcgaaaactttgtgtaatggtatgacatatgaatgtgtctgaatcaatcctgtgtaccatattatacacttgcaat

SEQ ID NO: 3929 - DNA, 321 bp, Homo sapiens
  I.3929 (AA937226)
tttttttttttttttttcaggttatgctgatatatttatctatgtccaaagctatttttgtggcccaccacacagtatgtcttgctatcaggcccaattctgagctaaagtacaacgttattacagaggagtttgccacaaatataaaatcatgtattttaaagcagacagagttagttttcaatatagtacgagtatttattagtaatttaggtatttgcatattagttaacttattgctttggcttattcttttcaatgaattgttaaaatgttatacaataaaatgctctgataaattatattaaatagttatgttaa

SEQ ID NO: 3930 - DNA, 384 bp, Homo sapiens
  I.3930 (AA922397)
gcagcagaacagtctttatttatcacaaagaaaatagcatgaactttaatatgtagaacagatcagaccagttatactgtaattgaagtttcccttctgctaccctccacaggaacctgagctccacaggactcaatgaaaaagcaactgctcaaggttggatccaacttttgtggggcctgaggttacataccttcagggtcaggttggtttcctgaggcagtgagcagggaaggaggactgatggtgatgttgcctcatttggatactccatgagcctacgcaagtttcacaaaagctccgtagatgtggccaacaaaattgctccataaattggacactgcacaaagaagtctttaacgccattcctgggttctttgtcaa

SEQ ID NO: 3931 - DNA, 337 bp, Homo sapiens
  I.3931 (AA910448)
tttttggaattcactgatttattattgaaactgggcaagattcacagctaattctttagcttacagttgttaaaataggattcctaccacacttcatttaagaagaaagtttgaaattctaaaataatgaatttcatttatggcagactgacatattttcattttactcaggaaccattcctaataattaaagactaattattaatgatctccaagatggtagcttgttgctagcaaaatgctaagaaaaaaatatcaatctcaaattacagtgcatttctagaatattaaaaaaaaaaaagtcagagaactggaaaccctcatacatggctggtgg

SEQ ID NO: 3932 - DNA, 475 bp, Homo sapiens
  I.3932 (AA906278)
ttttgttttttaaaaaaatattttttaatgtacaagtcagtagtaaaatatggacatgtgaattttttagacatcaccttttccatgtatagaataaatgaacatcactgtgttaacaatgcctcaaattagagtccaagaaagaagttgtttgcttgttcctattggactcattttatatgtcttcatggatggacaaagtaggaaatcaagatgaaactagatttgatttttttttcagtgattttatccatttataatgtaacatcaaattatttttagtaattttatgaaaataattgtcttaaaacaaggtcattaaggactctaaacataggaaggtgtatgcatatatctaatatgttttctttaatcacattgtggcctctggaggaaacagttctttgtgtctacttgttttctcacctctcacgaaactactacaaggatgaggagagttatggatgtggtttgt

SEQ ID NO: 3933 - DNA, 184 bp, Homo sapiens
  I.3933 (AA906116)
tttgcaaattgatccacactcaatttattgtttctttcagctgtgaccacggaaggaaagacagaattttcatttcttagcgagactctcgatgttatccgttgccttctgaaggaatcactagttactactgctttgtgtttgggtactgtcctgtgatttggatctgctagtatatgcttca

SEQ ID NO: 3934 - DNA, 504 bp, Homo sapiens
  I.3934 (AA948040)
  misc_feature (404)..(404): n is a, c, g, or t
agctgttccagtttaataaaatatataaaataacaagagttatactagatctagatcatagacatgattatatatgaatattattaatcattagcttgtagcaattactctttattccaatattataataatccttgctctacaattataacctaggaaaaaccaggccatacagagataggagctgaggggacatagtgagaagtgaccagaagacaagagtgcgagccttctgttacgccggacagggccaccagagggctccttggtctagtggtgacgccagcgtctgggaagacaccggttgccaagcggaccgtgatctagcagtagcgtcagtgtcaagggaaaacacctgctacttagcagacagggaaagggagtctccctttccccgggggagncttagagaggactctactcctccacctcctgtggatggcctgacatcagtcagacctgcccgcagttatccagaggcctaaccgtctcccctgtgatgct

SEQ ID NO: 3935 - DNA, 216 bp, Homo sapiens
  I.3935 (AA916875)
tttttttttggcttaatacacatttattctctgatagttctagaagtcagaagtctgacacaggtctcaatggacataagtcaaagtattggcagggctgtgctcttttctggaggctccaggggaaaacccatttcctctccttttccagctttcagagactgctgcgttccttaagttcatggccccttcctccattgtcaaaggcagcagtag

SEQ ID NO: 3936 - DNA, 287 bp, Homo sapiens
  I.3936 (AA864865)
taagattactactgtagaatttatttctagagatggaattgctaggtcaaatgttatcagcattcaaaatttttatacttcttgttcagctgccctcagaagaagctgaaagaatttatactcctaccccattgccatacagagaagttgtacaaacattttagaaaccattccatttttttaaagtcagttttctcactgccccaggaaatcccaagctatgttcctgtctccttgcctgtaaccttgtactcctagcctagaattccccttctcaattgaatcta

SEQ ID NO: 3937 - DNA, 362 bp, Homo sapiens
  I.3937 (AA961252)
aatatgtatttctttcaaagtaaaatttaattttatatgtccaaaatcaatcaggtacttgacaatgaagaaaaattcacacaattttaaaataaagatttttacaggccatgttttctgctcataatccaataaaactagatatacaaagttaaaaaaatcaaaagattcctaaatgctagaaattaagaaacccattattaaataatcctcaaacaaccaaagaggaataaaaattaaaattacaaactattttaaaaatgataaatgtagactcctttattctaaaacctatagtatccagctaaagctgtactcaggagaaaattaatagctgtaaatggctttgttgttagaaagac

SEQ ID NO: 3938 - DNA, 403 bp, Homo sapiens
  I.3938 (AA938971)
tttgcttctgctttatactttaataaactttgcatgaccttcttgtggttcttgtatcatggaatgaatagcatatatcagataacactgccaagagttctagatgcgtccaaaacacatggaataaagtagaaaatccagtcaaagtaggtttgagatcttgtattccttacattcgtgcccagtttctaagttctgcattttttgcttacacatatcttcccctttataatctatgcctccttttcatttcaaactgtgttctctactaaagggatttgggtgggggacagggtgggaggggcgttcaaatgcatttgttttgtcacatgtgaaagaaaaaaaatgagaataaggaaaaagaaggctgagcttgaccagtgagatagaatgattcggactg

SEQ ID NO: 3939 - DNA, 684 bp, Homo sapiens
  I.3939 (AA937519)
tataaagaaaagaggtttatttggctcagagttctacaggctgtacatgaagcgtggtgctggagcagtaggtgaagggtagccggtgtgtgcatatcacatggtaagagaggaggagagggagcggatgatgctgctagactctttttagcaaccagatcgctcaggaactagtagataaagaacttgctcattaccacaaggatggcaccaagatggccataagggatccaatcccacaatccaaacacctcccaccggtccccacctccaacactgggaatctagtttcaacatgagatttggaggggtcaaacatccaaactatatcagatattcagtgtcttcagccagtaatcagcactacagggtgtcttgggtgagcgtctgcatctgcatgccacggtacccaagagagctgaccgcatgtacatgggcaaacagcaaggcctgtgctgccttatctggaattctggtggaagtactatcaggactataagtttcttgagtcaagatcatgctaacttcagaccagtattctccaggtactccatatagtgcctgatatataatggctgctcgattggaagatgtgagaacggcatccctggccaggcgcaggggctcacacctataatctcagcactttgggagagcgaggcaggttgactgattgagcccaga

SEQ ID NO: 3940 - DNA, 481 bp, Homo sapiens
  I.3940 (AA873475)
accttttattttaaaaattgggtgaggaaatcataatttcaactgaagggatcatttttttttggagcttaagcttggaagcaggaaggcaaaccccggaagacaatggcaatgtgacacttggtgtctagtttcctatgaaagagttaacacttaaaacttttctagatttttctttcagtgcaacagttaccaaatgtctgctatggaaaaggtattaggctgggcagtatgaggtgtagagacaagggatggttcacccatatcctccttataaaacactgaacgtcccactaaaaaactttcaggtgtcaccaaacaggagatttaatcaaacaggtcacaaagctcacacaggaatcagcagtggttgtggctagggaaacctgagagtgatctgctaagttttaaatccagtggcctaaacagcagagagaagaggcacccagactaggagctgggaattttacgtaaaatctct

SEQ ID NO: 3941 - DNA, 352 bp, Homo sapiens
  I.3941 (AA872372)
ttttcccctcccttattgcaaggctttatttattcataatttcaacttttattttagattcaggggatccacgtgcaggtttgtgacgtgggtagagtttctttggaatctggtatttggcacagggatagtcttgttgccctgtagccactaaaaaaacgggcatttaagtgcgctgatgaaatagtgaaatagcttgggcacagtggccaccttgtaatcccaacacttggggaggccgaggcaggtcgatcatttgcgcccaggagtttgagaccagcctggggaacacggcaaaaccctgtctctatataagataaaaaacaaaaattagctgggcgtgctagtgcgt

SEQ ID NO: 3942 - DNA, 352 bp, Homo sapiens
  I.3942 (AA872221)
tttttttttttttttgccttttggcagtccttttattaaaacaaaagtaccatattgatatgtataaaaagaaactaggaatacagcaaaattaacaatggttgataagattacagatatttcactttccttatgcttttcagttttctatgttgaccttatgttacatttagaataaagtaaagaaaatgtatttaaaaaatcaaacctatatatcaagggctgttttgttcatagaattatgggagcagaacttgtattacacagggttaacctatgagaggacggtgaggaactggatgctcagtgtataaacctaaaatgggtcttatagaattatagagtttaagtg

SEQ ID NO: 3943 - DNA, 534 bp, Homo sapiens
  I.3943 (AA863064)
tttaaagtctaaaaaaaaccctttaatttcttccagttttaatttcttctgttgcacactgtttatcttaacaccacaccctccgcccgacaaaaaaactttttgcaatgatttccagttagcattggtccatgcctatcaacggaaaattgtgcagtctctgggataaacagctcgactttgtcaagggaaccgtgtatttttactagaagtcagattcacgtccggcctccaggcaagaatgcaggaaatgccagacactggcgtctcaaaagcagctttcaaagttatccactcacacagccggcctctaagcaaatactcttgagagcacttgttgttttctccaaatatccaaacagaatataaactcaaagctgtttcagtacagttggttaaaaccacgcatttatagtagtgatcagcattatatattgttttaaggagcataaatccatagtttataaggattgatatggttgtgaaggaaaatgtatatagttcagcctgagatgtcagtgttaacctataaaa

SEQ ID NO: 3944 - DNA, 414 bp, Homo sapiens
  I.3944 (AA862344)
ttttttttttgagacaaggtctcactctgttacccgggccggaatggagtggctcaatcatagctcactgaagcttcaaattcctgggctcaaacgatactcctgcctcagcctcccaagtagctgggaccacaggcatgagccaccatgcgtgcgcaatttatgtatttatttatttttaagaaatggggtttcaccatgctgcccaggctgatcctgaactcctggcctcaagcaatcctcccgcctcagcctcccaaagtgttgggatgacagatgtgagccaccacactcacaattctttttttttaaattatttcttgtatctgtccctttcttttccacccccattgctacttcttcagttgagacctcacaaatgtcacctggatcactgtaaaacattaaacttga

SEQ ID NO: 3945 - DNA, 422 bp, Homo sapiens
  I.3945 (AA927949)
ggagagaaactacggaagtatgaggagggtggtatgtgcttcattcaggcctcaagtcttcaacttcagaatgtccacattggagagaagcctcagtaatgtgtgtaataaagtctttactcagttttcatgactacagtctcacctaagcattcacaaaggggagaaacattaaaatatgaggcacatagaaagcagttccttttgagtttgtatcttgtaatttatcacagaatccatgctgatgatacatttcattcagtcagggtcacagtccacattccccaccaggcgctcagagatatggaatacgttcccggtgtgcactgcggtgtgtgtagtcaaggaccaccgcggagtccaacgcttcccgctgaagagtgagattatagacattttcctttggcattggaggagtggag

SEQ ID NO: 3946 - DNA, 391 bp, Homo sapiens
  I.3946 (AA927562)
actcaagtgactcgattatgattctgacaattttccacaaaagctttcttccactcatttgtgtaactgcatatattttgagagtatgaattcctcataatttatttaagtggttccctattggcagacatttaggttatttctaatccttttccattacagacaatgtggaattggcagggcaccaggaatgcgcatttgcaattttagtagatattgtcagttatcctccacggaggtgggtagcaattcacatgcaggaggcaaactcttttatctttttccttttatatggggaaaaatgcattgattttaatcaattttatgtaataaaaatgtcccattttaaatgtatatctcaacgagttttgacaaatttacacatttgtgc

SEQ ID NO: 3947 - DNA, 359 bp, Homo sapiens
  I.3947 (AA927331)
tttaatttaaacctatttattccacaaacagcacctcccctaagcatacattcttagcttacaaaaaaacaaaaattcaccaaacatgaatatccagtcatgataaggaatgcataattgggagaaaagattctgtgatgacttaattttatgaagggcacagagatgtccattgttgagttgtggcagagggaggtggggagttttgcatctgcaacaatccctcaatgctaccctgactgacagtttactgtccctggagatattctgtcactgtgccagttctggctatatctgaacagacctcttgcccatccaaaaggcagtctaacatagaaacaagcctttggagtcgggtg

SEQ ID NO: 3948 - DNA, 1450 bp, Homo sapiens
  I.3948 (U69201)
cgtgaatgaggtggattactgcctgtacccggcgcgggagacccagctgcagtggctgcactactacctgcaggcacaaaaggggatggccgtgacccccagggaggtgcaaaggctctacgtgcaagtcaacaagtttgccctggcgtctcacttcttctgggctctctgggccctcatccagaaccagtactccaccatcgactttgatttcctcaggtacgcagtgatccgattcaaccagtacttcaaggtgaagcctcaagcgtcagcttggagatgccaaagtgaccagccaccccatccctcccctacccatctgtctggccagacctgttctccagagctcaattctgcactctgggatccacacccttggacagggtgggagaggggacacatgggtgtccagggagaaggctctgtccctgccgccagaccccagtggttgccactgaagacctcattctcctgtctggaggggctgataggacccccttccgggggtccccttcaccccaccaggcttgggaggaagtgcctgcagccaggtcctgaaccataaccacccctgggaaacacatcattcccagcctcaggccctgctggaattggggctgccttatatgtgtgtttaccccttcctggcctggggaaggaggcggggagggctcctttctacctccagtgccctgagcctccagtccgtctccccctgcatgccccatgtgggaggtgctgagctccaaaccagcatcacaccaactctgacacatggatgtacctatcttggtgatgggtgggggccaagaattgagcatgacatcttccccagcagccacctcctctgagatccctcaccttctccaaaccagatccaatcaaacctcagcccgaggaaacatgctccccaacgtgctctcctgtgcttctgttttgtccccctgctggggggacaggagagggagtggtgaggccctgggcctccagagcctggctctgctttgtgctgtggcttagccggaggggacgtggccaagggtgaggtggccaaaaccagaaccagcagtctcctgccttgttccctccctggccctcaggccctccttccagggatgtctctccagctctactttatgtcctgaagctgacccgaggtcttcctatctggaatgactagagggagccaagaggatggggtgggggccagggccccccagggcctatcgtgggagagcctgggcaggatcccatcagaaaggtgctgactaaactggttgcccggacactcaacagcctccacctccctttctaccctcacagctcctggggccttcctggctctggcccagaaagtgattcatttgtaaattatcatggttttctttctgcattaaaatgctcatttccggaaaaaaaaaaaaaaaaaaaaaaaaaaaaaaaaaattcg

SEQ ID NO: 3949 - DNA, 428 bp, Homo sapiens
  I.3949 (AA903875)
tgctgaatgtttatatagtccatccaatgtcttcttcagttcctaaaagaatgctggaaacagaataggcatttaataagtattcttgtgttttaaaaaattatttgaatttttacaatgggagcccttcatcacagctttgtagttacctcaactctggctgttgagtaatttgctcagttaaatctgtttgtgggtgtagtgaattacaacctcctctggttccctcgagatcaagtctaacctggtgattgcgtcatctggtgggagagcacggctacaacagcaggtggaaaccatgctcgggtcctggccactttgcctaggatgaaagctgttgtggcaaacaggggaaagagcttcaagctttgtagtaaaaggaatctgggcttaaattcctcttatcagcactgtgaccttggagaatt

SEQ ID NO: 3950 - DNA, 272 bp, Homo sapiens
  I.3950 (AA902679)
aatttacaaagataagaggtttaattggctcacggttccgcagctgtacaggaagcacagggcatcaacttcttgggaggcctcagggagcttttactcatggcaaaaggtgaagtggagcaggtgtcctacatggcaggggcgggaccaagagagggagtcaggggaggtgcaacacgctttcaaacaaccagatctcatgatagctcaccatcatgaggacatcaccgagggaatggtgctaaaccattagaatccactcccatgatctg

SEQ ID NO: 3951 - DNA, 457 bp, Homo sapiens
  I.3951 (AA878322)
aacttttttttttttttttttaaacagaagttaccttatattggctatttagaatgagctaattaacattgaaaatctcttggacacatctcaattttactatgtattccagtatgtgaactgtgatagaaattttgattactctaaaaaggggatgggcatatatcttaaacatgtgggaatttctaaatttaaacgaatatgtagacatacccccaaagacaagcaatttttaaaagtttttaattcaacttttgtaaaaattgattttgtcacatcagagattctcaattttaaaaacatgtactgagaagcaaattctattgtttctctttgaataagcgaacaggtaaaagggggctttgctcaataactagatgctctgtattttttctaactcagacttacagtaactgtagtaactcttcccttgctccacttgggtacttaagcagcc

SEQ ID NO: 3952 - DNA, 385 bp, Homo sapiens
  I.3952 (AA878269)
gatgcttgtggtttattgaagagagcaaggctggtgggcgtggactcaaagcatggcagcggcagaggctggagcagttggggatcttcagcttctaaatgctaattacacagtgagctttgggctattttttccatgagcttaatgatgctttctctgggcttttgggggagggtgtccaccagcttcttcaactgagcccctgcctccctcatgtcttgatcagggctgaaaagttccatggcagcctcataactggagggtgtgtccattaggagggtttcgaggacacgctgaaagctcgggcagatctctgcagaagcggacgggcatcagagagccagtgtgaccaaggtgagggtgacagcgagtgtcatgggtgagg

SEQ ID NO: 3953 - DNA, 404 bp, Homo sapiens
  I.3953 (AA878236)
taactcttacttaggcaattttaatttcttctaagtagtaaaataggtaagaccaacaaattaaatacttcttgcaaaaacaaaattgacaaaatgtatggctcatttacattgtaaatctacaattaagatgggaaataaaccaattctggacacctgaaccggtgagacgagttgaattgtgtcctccaaaattcatgtgttgaaattcaaactcccagcatcccagaatgtgacctgatttggagatggggccttggctgagacagtcaacttaaaatgaaatcattagggtgggccttaatccagtaggactggtgtccttataaagaggggaaatttggagacacacacacacagggagagcgccgcatgaagatgaaggcagaaactggggagatgct

SEQ ID NO: 3954 - DNA, 419 bp, Homo sapiens
  I.3954 (AA826514)
ttttttttttcaagaatatatctgcattcccatgtttattgaaacactagtcacaatagccaagatttggaagcaacctaagtgtccaccaacagacaaatcaataaggaaaatgtagtatatatacacaatgaataattatttatccataaaaaagaatgggattctgtcatttgtaacaacatggctgaaactggaggtcatattgttaagtgaaataagccaggcatagaaaggcaaacgttgcatgttttcacctatttctgggagctaaaagttaaaacaattgaattcatagagactaaaaggatggataccggggcctgggaagggtagtgggggttgggagaagtggggatggttaatgggaacaaaaatataattagacagaatgaataagttctagtatttgatatcac

SEQ ID NO: 3955 - DNA, 283 bp, Homo sapiens
  I.3955 (AA917510)
ccaaatacttaacagtttttaattatgaaatagcttcaggctgaagttattagtgggcagtttcaatcttagaaggtggtaaaatattacatagctcatgggaaagggttgattggagggccacagtgaaatggccatttccagtcattaagcaaggatgtggaagagaattcttagttatatgacattgcaggagagtcagtgaccaaattcataaggaatatgactcctccctacatgcaggttcttggactcttggacagtatgaatccgtttgtccatt

SEQ ID NO: 3956 - DNA, 159 bp, Homo sapiens
  I.3956 (AA878809)
cattcagttgatacatttttattgggcatctactatgagctaggtgctaaaatagttgctactgatataacagtaagccaacacagatccagtccttttttttttcttttcttttcttttttttttttttttgagacagggtcttgctctattgcccaa

SEQ ID NO: 3957 - DNA, 386 bp, Homo sapiens
  I.3957 (AA878786)
gatataattcatttattataaaagggaggcacgaaaattgtttacatgatgaaagatttcagaacttcagtggaatgcacgagctcatgttgatgctatttcaatagtgatctattttagtctacgtacttcccaagaatgtcaccatctctaaataagaaataattcctgtcacctagcaccactttggtgcctgcatattctgggagaagaactttatctccaactttcactacatattctggcaccaaagttggagaagaactttatcaccaactttcatgctaactggttgaatctcttcaaccttcactttagagcccaatccaacagctactactgttacttgcaatattttttcttgagatatttctggaagcatatgc

SEQ ID NO: 3958 - DNA, 426 bp, Homo sapiens
  I.3958 (AA873876)
ggaattttaaaaagatactaattttattacatgtcacttgtgttactaagcgtatttttttcctgacattttatttataaaatgctctcctttctaccagagtgtacagctaatcaactctggatgcttttgatatttcttactgtgccaagggcattgaatgaagttccctgtagtgagaaaagcgagcacatgggactcgtgactttatgtactccaacaatagagcttttatgacattggaggtggttaaaaaagctagaagtagctcttaaacatggcatctctgtgttgcctttttttttttttttttttttgtattctcagagctgccaggagtgcatcgagcctgtaatttcctgttctctgaatcccccatctttctgcagctccaagctttgtgtccacagcctgtgactctgtgct

SEQ ID NO: 3959 - DNA, 175 bp, Homo sapiens
  I.3959 (AA907779)
ttttttttttttgttgttgttgttgttttgtttttgtttctttttttgagatggagtctcgccgctgtctcccaggctggagtgcggtggcatgcgatctcagctcactgcaagctccgcctgggcgacaaaagcgaaactctgtcaccaaaaaaaaaaaaaaaaaaaaaaaaaa

SEQ ID NO: 3960 - DNA, 343 bp, Homo sapiens
  I.3960 (AA906277)
tttttaaatttctgaaatttatgagaaagtacaggaagatgaaacatactaaaggagagccaggtagatggagtccaggcttggaaggatttatcttctggatggattcttcatcttcaaagatgatgtcacagtggtagatgcaggaatcttcatcctcagagctttcagaggtcgtaggctgctggctgggcaatggttttctttcaagcttgaattcctgttctgttccaactattcatgattccctttgatctcctctgacagacatctcggctatgaactgctcacagccttccttggtgacttgcttgcagtacctcaggtcaatatgacagatgtt

SEQ ID NO: 3961 - DNA, 525 bp, Homo sapiens
  I.3961 (AA905695)
  misc_feature (487)..(487): n is a, c, g, or t
tttgagctgatgagtctcaccatcttattatttattctttattattaacaaagccagacatgcacgcaggactccccgtgaccattcccggggaagaaaggacgagctgaggttcgggacatatctagccccatatcctcgatgatcaagcccgtaggttccatgcagggagagaatccctcaggcccacccccacctctcctttgagacagcagagttgagagaaaagcagggatgcaggcgttcaatccatccacgcagagtgctggggcaaaaccaatactggtcctctactgctgacctcaggcccgtgttacatgaacggggtgtttgcaccgatgaccatgccagatgcttgggaatgctgcttgtccttttgcgtttctctggcagacttgcaatgaagccaggtcagtcccaagacctgcgttccagttccagcccccttaccagccttggaagccagcatgtatgggggtgggggggngaagcactctgtgactcagtttcctattctgtaatatg

SEQ ID NO: 3962 - DNA, 146 bp, Homo sapiens
  I.3962 (AA905127)
tttcacagaaaaaggggagtttattactttaagctaattccagtagccagtgtatcagcatatattttgcacctgttcccaggtccccatttctataaggagacactaggagggacagatgatacatgcacatttagtgggttgta

SEQ ID NO: 3963 - DNA, 339 bp, Homo sapiens
  I.3963 (AA903172)
tttgacaggaggaacgatctagtttattcaagtaacacaaggaataaaaagagaaagaggtgaaaattagattaaaagagacaagaggtaatcattaaaatacaacatatggattgtaagggattctgatttgatcaaattgttaaaaattatgagactgaaggaaaaaggaatagtctgaatatttgattatattaagaaattaatatcattatttttgtacaatgatggcatggttataacttaattttaaaaagaccttttaggaaaatatttacttcacaatgagggcaggggagaaataggtagggacatacctatcacacaagattggccatg

SEQ ID NO: 3964 - DNA, 404 bp, Homo sapiens
  I.3964 (AA889842)
cgttttattgtgcttcactttattgcactttgctgatattgcattttttacaaattaaaagtttgtggcaaccctgtgaccaacaagtctattggcaccatttttccaacagcatgtgctcacttcgtgtttgtgccagtaacatgttagcaataaagtattttaaaataaggtatgtacattgttttttagacataatgctattgcacatttaccagactacaggatagtgtaaacataaaattttatatgcactgggaaaccaaaaaaatttgtgtgacttgctttattgtaatatttgcttcattgcagtgatctggaaccaaatctgcattgtctccaaagtatgcctgtatgatgtgatgaaaatggcacttcttctccgtggtcctactttcaaaaac

SEQ ID NO: 3965 - DNA, 388 bp, Homo sapiens
  I.3965 (AA889427)
tttgtaacattgtgacaactttattaattgctctatttagcagtcacaggaaggacagtaacgtgtgaacaggttttgttgctttgatctttcttatttgcccagaattcctgagtaggcagttcaagtgtgagaaaccaggacctactagaaattggatggatgattcgtacttgactgatttcacaggcaaaatggtgacaagcctttcagcaattttactagcaaaataaggcaattatctttgatgggtgcaatgggagtgcacacctgtgtgtttgttatctggagaaggggtgggggctgcttctgtccacaggagaaggaaggtcagtgggcagtctggtcagctgagcaccccccagcctggctggcccctcatgcaacc

SEQ ID NO: 3966 - DNA, 358 bp, Homo sapiens
  I.3966 (AA888267)
ttttttttttttcagcgacttgcagcaaagtttgtaactgaccagtttgctgggtcatcttgaacagtgggcttatgggagtactaagcccacattctatcctaaggtaccactcttttatgacagaacaacacaaaaaaacacacaaagcacaccatatttattatagtttaagactagcctcacaaatcctttttctcattaatcaaaactttaaagagaaaataaacactgatttttgccattcattcaacaggtttgcacagagagagaaagtaaggggaagggagaaaagcattgcttacagcagaatgggggaagtgaggtgctcagagaggccagagaaagacccacccat

SEQ ID NO: 3967 - DNA, 378 bp, Homo sapiens
  I.3967 (AA887470)
agacacggggtctcactatgttgcccaggctggtctcaaactcctgggttcaagtgatcctcccacctcagcatcccaaagtgctgggattacaggcatgagccaccgcatccagccacacatctctttttgaacatggtcattctgaaacctattcagaagtggttaggttatgaccatgcccattttccaacctagggaactgctggcagcttgacagggaagtcacggtgactccagaggttactgcatctttcatttacgttacatcctgtagtgcttggctttttaaagcaaaagttgtgagctcctctgcatgtgcctccttccccaaaaggctgccacactaccgtataagaaaccgtataagttgctact

SEQ ID NO: 3968 - DNA, 269 bp, Homo sapiens
  I.3968 (AA886530)
tttttttttggtcactgtttactctgaacagatgggaatttcctcctcttaatctgatggcaaaaacttcaaatgggaagaactttctggcatggatttacgaagagtgcttacatctattccaacaacatggtgtgggagtatttcagcacaggctggaacagtttcaggttcatcattacctcctgagaatacctttgataaataaagactcatagaaaagtaaagctaaagtctcaactctttgaaaggcagcaatgattttcttg

SEQ ID NO: 3969 - DNA, 261 bp, Homo sapiens
  I.3969 (AA886057)
gttggaccggaaaaaaaaggaaggaaagggaagtattgaaggaaggaaaaggaaagaaaggaaggaaaggaaggaaagaaaggaaagaaaaaagaaaagataggaaaggaaaagaaaagaaaggaaaggaaagggaaggaaagggaagggtaggaagaaggaaaagaaaaattaaaatgaaatgataaattacttactgggagaaagtttttgtaacctcattaacaattaaaaggtttgtatccttagcctgtaaaaaaa

SEQ ID NO: 3970 - DNA, 424 bp, Homo sapiens
  I.3970 (AA885125)
tgcttaactttcactgaaatatatgctttatttagaatccgccctgattatttaaaacttttagattcctcttcctgatatttttggattacttttgttgttgtttttgttgttgtgcaggtcactgcttggactaaatcacttagcaaaagtttcttagctctgcaaagagaatagaggtttatctcatctttggagaatattgtaagatgatttttgtctccacatgatatatgcttgcattttggcatttgagaaatcagtatttggcaagaaagtgctctttttatatgggatgaagcaattttggggtgcgctgacttaacaaatggcagttttagatgtatgtgaaaagcataggcaggacctagttatttagaactagagttgaaaatttttgtacatttgatgacaggcctgagtc

SEQ ID NO: 3971 - DNA, 275 bp, Homo sapiens
  I.3971 (AA885052)
tctaattcttaggatttttattgtatacatattgaaagaccttttgattttaaaaatgtagttttatcatatatcactcataggtatatatacaaagtaaattatgagtgaaataaactagtttcactattctaattattttcccatttataatagtaatcttaattactattcaaaattcttgaataattttgatgatgacaacatatcttagtagaatgttctactactaataacagtatgcttctgagattttttcccctaagcctccagta

SEQ ID NO: 3972 - DNA, 386 bp, Homo sapiens
  I.3972 (AA884942)
tttcactttttaaacatttttattttgaaataattactgagtcataggaaattacccaaaaaatatacacggagtccatacgggttccatgaaggcagtcgctttcacccagcattcttcaacggtcacatcttgtatcactctactgtggttcagcagcatttcaaattctggtcttctcccccaatctgtgtgctgccatttccttctcagagtcctcaaatagctgctttgtgtgttgtgtccatgttttattgctctattcaatgggagaggcagaatcgagtgtgtttcttcatgttacgtaacttttagaggctttgtagttagctttccagctctctcacgttcatttcgtgctttgactttgatcttcagagcttggg

SEQ ID NO: 3973 - DNA, 504 bp, Homo sapiens
  I.3973 (AA885457)
tttaaaataatgcttttatttaaaataccctttttacaaatattaaaattttattgaattaatatgctaaaatcacatgaacacttggcaccatttgaaatgtaatcctatccatggaatagaatgcaaacattaactaaatgtaaaagggggacagatttaggactttaagaacatgttttaaaataaaagtttttaataaatttcagtactccttttgttttttgaggtttccactttataatttttaaaatactaagaactgccaaagagaagtataaaaacagggatgtattttatgtgctggatattctccactggcctctccagatgtccttcccacccttcttcagcctgctccacgctccaggaggctgacctttatggactacattaatgggctcccttgctctctggctttcagtggctttagtttgtgggaggaactggcagaagactgggcagcaggaggataaggaggtcagagtatttatttccttggtt

SEQ ID NO: 3974 - DNA, 483 bp, Homo sapiens
  I.3974 (AA885448)
tttttttttgtaggtgttcttagctaacttttaatatttatacatattatttattttagatgaagtgaaatcatttcccttaaaaaaagaaatggactgctggttgaagaacaggaattctaaaagaaaatatgacgatatctgcaatcaaagtgatggagctcaaggtgaaacatcaagtcaggctcaactggtacctattgattcttcaactcttgttgctgagtccactggcctctaggatttctctgcctcctcagaattcaggtctcatccacactctggcaagatagcaacagcccccatgcctggccttcccaccactgacccacagcctgggcctgccaggttagcatctgagccaaatgtttttggatagatttacttaggcatcattgttatccaaatgtctactcttctcacagtttttgaaaactgggctaagtgctgagagacagcaaagatttagcaaatggtccctgc

SEQ ID NO: 3975 - DNA, 335 bp, Homo sapiens
  I.3975 (AA883680)
gtccttcagttttattttatttttttcctggtatttagagaggagttcattcctactagcagaggactgtaataatactcatttttaaaaacagctcccccaaaattgagtacggaatgttctagatcctgactggggtgtggttgcatgggtgtatacatttgtcaatgctcatctgagcattttacctcaattataagggcatgagaggaggaaaaagcatgaaaactagatagaaaaaaagaagaagaatgagaatagttaattagagcacctgtctgaggctgggtaaactagaattactctctagtaatcacttctaatcttaagattct

SEQ ID NO: 3976 - DNA, 314 bp, Homo sapiens
  I.3976 (AA883660)
ttttttctgttttagtaaaggtttattttaaccacttgatttccaagaaagttaatgaaaattcaccataaaatattgctttcattcttgtttacacaactaaattgctcatttatgttactaaaagatagcagtattaaatattaaagcttaggacaaaggattgacaattggttgcagtttctaatcattggaaataatgtctaacaacgtatcccaagtaccatgaatatttatatagattattcccattatttaactttgaattattaatgtgtaaattatcacttaccagctgacatcaaggtagcgca

SEQ ID NO: 3977 - DNA, 344 bp, Homo sapiens
  I.3977 (AA883534)
tttgatggtagtttttattgtttaccgccatatacaacagctgcaactattattctatccattttttttactaactctctaagaagcaatgagatcaaaagctggtttatagtgatgtgaagagcaacttcaaggagaggaattggagaccaagcaaagatgaatttgttaaaatggttgactgaaaaaataccttcattgaaaaggtggtagtcagagaatcagtaaagtcaaaggaaggtatttgtcaatgatgaaggaatactggacatgtacatgggttgaagaagcgagtccaacctgaagatacaggtgtggagttggatcagttctccaagcaggag

SEQ ID NO: 3978 - DNA, 182 bp, Homo sapiens
  I.3978 (AA879215)
ggtcagacaaattggccaggcgtggtggcttgtagatgtggtgccagctactcaggaggctgagaccaggagaaccacttgaactcaggaggtggaggttgcagtgagctgagattgtgccatggcacttcagcctgggtgacagagtgagactccgtctcaaaaaaaaaaaaaagtcgacg

SEQ ID NO: 3979 - DNA, 293 bp, Homo sapiens
  I.3979 (AA875910)
tttatattcaataaatcatctttattataaagaacacaataataagagatagagactaggtcaggaggttcatcatgttataatcatcatgtactaggatttggtttaaatcaaccaacgagacatggtctggagttggtttacaatctgagaagacactctaaaaaatctaccattataggattggtatgaggatcaaatataataagttgtggtacaggatgtgtagcatgtggtacctagagtcagactacctggatgtgaatccctgctctgctagtcatcagctttac

SEQ ID NO: 3980 - DNA, 308 bp, Homo sapiens
  I.3980 (AA875890)
ttttaagtttttaaaattagtttatttaaagcaaaagactgagtacatgcaaatacagagggttcgttcatatggcaatgactatggtacacaattaggaagtttaggcaaacttctatgatcattgctacatagtcaacacttattagtgtaatgctgcaacccagacttcactgtctttaaattatccttagttcagacctttcctactgggatttgagaacagacatacagcgcaccacacaattaccacagttcacccagagaaagcattccaattgcaccttacagatttagtctgccttgtt

SEQ ID NO: 3981 - DNA, 316 bp, Homo sapiens
  I.3981 (AA810237)
tttttaatttaaagcataaacacattcattattctggagttttaaaaattcctgcattttctgtttttaaaaattagatgtataatggataatcaaatgcaaatgttatttgaaaaaattaaaaatagtaaaacaaaaatgagatgaagagaaataccctaattgttgaatgatgaataggagaaggtaaaagaagatatgtcagttttatctctggttgtaatcttactttttatcagaatatttatgctatgttgtcttttaataattccacatctgcatccacttttgtaaaagattgcagatatagttataa

SEQ ID NO: 3982 - DNA, 375 bp, Homo sapiens
  I.3982 (AA810014)
tttttttttttcaataacaaatgtcattttatttatacatatacacagtacttctctagcccttttgtgcaaaaggtgtggatgtatctaacattgctgtgtgtgaatgcacaagaaaaatattaaggccaaagtgatgaattacataccaggcaaagaatggatgaaggcccagacatcatcaactgtccatatagatggctctgtttgtgcaactggtagcaagtcactgttctcaggcattttccgaattctcacatcccgaagctcacgttctctttcccgctcgctctgcctgcgcagacgagttgtcatagcagatggcacagaatcttcatgagaagccaagtcttcttctgcagatggataagtaat

SEQ ID NO: 3983 - DNA, 463 bp, Homo sapiens
  I.3983 (AA806085)
tttttttttcattaaattgtttgaaattggagaaggcatctgaactatagtggaggctaagaaggaagattaaaaggaatatacattgaaaaagaatatatagtgaaaaaatacatttaattaataggatgagcagttataaaaagtatgaatatatcagttaataccagtaacaataataatagcagctttgtgtgtttactatacaccagacctgttctaagagctttatgtgtattagcatttaatctttacagcaattatatgaggcagatactactatttcatccattttacagatatgaaaagtagggcacaaagaaattaagatttataacagaaagaaaataaagggtacacatctcaaagttgtgaagcatattcatgccgaagcattattaagtacctacgattctaactgtacttgcctttatcaagaaggtggcaagagcaaaaaaaaaaa

SEQ ID NO: 3984 - DNA, 405 bp, Homo sapiens
  I.3984 (AA868328)
cctccaggcggaccatagcgcctgcacaacctccgggggcgggaaggaggcgacggcaggccggggagggcgacaggaaggttcctgctggccttgacgcaggaggccgccccagcgaagggtccgatcccgacgcggtgcagggtcctgccggagaccgcgtagatgtcgggctaaataaattgtttgccgcgtagttgcagtttgcagctaaaagctcacaggtcgtcagttaccgccaagctgtaggacagagacgcaagaagcgagacagatacagagagaaagtgagacacatgtagtggggcgaagaaaatgtgatacagggtgtatgtggataaaaagtttctgagtctcaaagggttattggagagatagagggagaatgagtagacacacacacgc

SEQ ID NO: 3985 - DNA, 440 bp, Homo sapiens
  I.3985 (AA635148)
tcttttatttcactgattctgctctatattactgccttcctttacattaggtttaatttgctcttcttttctcgtttattcaggtagaagcttagatcattattgtaaagcaattaattttcctctagtattgctttacctgcatcctacaaattgacatgttgttttttcatcttcattcacaatattttctaattttccataaaatttcgtattttacccatgagttatttagaagactattgtttaatttctaaatatctgggaattttccagatatctattatagtgaattctaatttaactctgttttcagtcagggaatacattctgtgatttcaaaacttttaaagtattgagactttaaaaatatcacccagcatatggttaatctaagtgaagttctatgtgcacttaaaaaaaagaatgtttactctgta

SEQ ID NO: 3986 - DNA, 446 bp, Homo sapiens
  I.3986 (AA633630)
  misc_feature (409)..(409): n is a, c, g, or t
ggctcaaggactgccgtacacctttgggagcctcactggatgaacaaagcagtagtacactcaagggtgtgcttgtgagaaatggaggaagttttgaagatgatttgtcattgggagctgaagccaaccacctccatgaaagtgatgctcaaattgaaaactgcaataatatcttggccaaagagagaagattacagtttcatcagaaagggagaagtatgaattccactggatctgggaaaagtagtgggacagtttcaagtgtttcagaattgttggaactttatgaggaagatcctgaagaaattctttataatcttggatttggacgtgatgaaccagatattgcttctaaaattccttccagattttttaattcatcatcctttgccaaagggatagatattanagtatttttgagtgctcagatgcaacggatggaagta

SEQ ID NO: 3987 - DNA, 543 bp, Homo sapiens
  I.3987 (AA846117)
  misc_feature (223)..(223): n is a, c, g, or t
ttttaatcttttgttattatttgtgtccagcttcctcacctgatagagcaggcactcaacaaatacatgatgacatatttttaacaaccaatatgtgcgtccctgcccctggctccatagatttgcaagatttgtgtgtccattcataagccttccaaacgcagggcctgcttgctgccctctttgctctgtggggcccagatggcagccccggaggcgctgngtgggaggctgtgtcctggggtccaccactgctccccggtaagccaagcccgactgcccctacatggaaaattcatccctcctccagatgggggattcagggcaccgccacttcccacaaccccgggaatctccctggccacagtcctggcgggaccccccccatccccagctcactgtgacagagtcccctgcacagtcctgggacggctccaggtcgaagtcctggaagacgagcctcacagcaaagccctctggagccttgatgtccgtgctgctctcctggcctttggcataaggctctgggtatccgggggatgt

SEQ ID NO: 3988 - DNA, 379 bp, Homo sapiens
  I.3988 (AA844020)
aggtctactgctttcctttccaggaaaatgttatgatttatcaccttaaaaaaaaaagaagaagagaactcgcactgcagacgttaggtgttgctacttggaaccctgaaaaaaaattacctaagaagatgcctttatatttttgctacagaaagaatttggtagaactgtaaagcttggagcaatctctgaacacagttagggttgggttggctctcctgtcagaatgaaggccagtgcggtcggtgcccaggagttattgatgcccaacgctgtctggcttctttgcagctcctctctcctgctctctggcactgcaccatcttcagatgactcaggtttcaccatgactacaccataaaagcagggaactgccaga

SEQ ID NO: 3989 - DNA, 542 bp, Homo sapiens
  I.3989 (AA843868)
ttttttaatgtgagtagataataaccattaccttcatgctctgttcaaccctgagaagagcttttcaagctgcattccagaaatgcaacattagagtcatgctgagagcttttccttttaaagcaggtaacagcttattatatagatgtggggagatatcatttagctacacgcccagctacactcctggcctgagtcgctctgacaagctttgcatgattttcaaataggagaaatgatcttactgacactttcttccaacccagaatgggctccttttaattaggaaactagaagatatgaaacctcattttttcccctaacttactgtaccatgtatctgctattgacatttttgaaaaaagacatcattttccacatgttgggaaattttgttatattcagttttataagttatacagcttaattatcccttatccaaaatgcttggaaccataagcatttcagatttcaattttattcagattttggaatatttgcattctatattttaccctggttaaacatcccaaatccaaaaa

SEQ ID NO: 3990 - DNA, 444 bp, Homo sapiens
  I.3990 (AA828268)
ttttttttttttttttgtttttgaattttgtactattatctgttcaacatacaagtaaagttagtaaaaatattttaaaaataaaaatttgtcatttggaagaacatagttttgacatttaaaagatacaagctggacaataatagaagctaggagttatcagagcctccaatgactatcctgtaagaaaatgttcaaagacagagctgacttagagtgagtacactctctggaggaaaagaaaaagcaattccatatggagagttttaattttagatggcttctcttgtcaacttcatttctgttcctccccttcgttgaaaatcgctgttctcagaaattgtgtaaagggttgagggtggagagagaattgtctgtgcttacattaaaaaaaaaaaaaaagtcatctcaaactgaagtcctcttctgaggcacttaagatag

SEQ ID NO: 3991 - DNA, 391 bp, Homo sapiens
  I.3991 (AA653141)
tgtattgaaatatgattttttaatttagggcttgaaaatcttacgaaagttgttttaagtcatcgaataattctatctggacagtgacattgcaaaactaataaaatgaaaacactagaaatattatttggaggtgcagggagatgaggcacattttggggcaaaggtagagaaaatgtagtatttggatagttagatgttttacttagatttttgtttcattagcaactaatggttgaggtgtctatttatttaatgaagtagaggtgtatttcatttaatacaaagaaagcttctccccctccccaagcaatgtagaaattggaacaaagatacaccaaagccctgttaggacattttccacaggattaaaaacaaatcccaaactgta

SEQ ID NO: 3992 - DNA, 434 bp, Homo sapiens
  I.3992 (AA600341)
cagatggagtctcgctctgttgctcaggctggagtgcaatggcacaatctcggctcactgcaacctctgcctcccgggttcaagtaattctcctgcctcagcctcctgagtagctgggattacaggtgcccgccaccatgcccaactaatttttgtatttttagtacagacagggtttcaccaggttggccaagctggtcttgaactcgtgacctcaggtgatccacctgcctcggcctctaagtgttaggattacaggcgtgacgaccgtgcccggccaggaaacttctactcatggtggaaggtaaagggtagcaggcatcatatggccagacagaaaggaagaaagagaggagaggaaggtgccaggttcttttttacagccagatctctcaagaactaagagtgagaactcactggatcctgccagaatg

SEQ ID NO: 3993 - DNA, 360 bp, Homo sapiens
  I.3993 (AA598803)
ttaccattatagctaattattttattacaatgttttcagaattagatctaggtgacataaaatacacaaaagcataaagccatctgaatagtacagtcaacaagcaacaaccagtacaatcagcaataatagagaacttttaactttgtatgtcacagagaatgtatatacctttttaataaaaagcctgaataaaccaataactattaaagaaatcacaaagctgattaaaaatctactattaaaagtgtcatcaggattagattgttttacactttgtcctagctaacttttaacaaacaaataattctaatgctatttaaattattccagaccacaggaaaaaaattgaaaactcac

SEQ ID NO: 3994 - DNA, 217 bp, Homo sapiens
  I.3994 (AA598530)
tcagaagtagctatctttaataaaagaattagatggtacctttctttaaaatagtatgtatgttttttggctcaatcctatagatgaaaaagtttacaaaaattagatttctgccatttttggaatatctgcttttttttcccaaaagacaggaaaatgtcagagagaatctagagtgctgaattcaacacaagctcatttgaaagtaagtctccat

SEQ ID NO: 3995 - DNA, 459 bp, Homo sapiens
  I.3995 (AA598520)
tttttactttaagttctgggacaaatgtgcagaacgtgcaggtttgttacataagtatacatgtatcacggtggtttgttgtacccttcaacccgtcatctaggttttaagccccaaatgcattaggtatttgtccaaatggaactcagcagtcagcaaaatatattaaatttgtcagttctagaataactcttgttgcctacctccacattcacattggtgatgtctactccctgtcctcactcctgagcacctgtcacctcagaccacaccactgaagctgaccaccccatgacccccaaccaagaaagggtaagccaacacagagaagccagggtgggcgctcagagagactcctgggtccggtcacttctgtgggtccactaagcctgttcctggtaccccatatcactaagtggcccaacttagaaatactagaatcaactcctctgccttccc

SEQ ID NO: 3996 - DNA, 258 bp, Homo sapiens
  I.3996 (AA497090)
actgaacagtgatggagatggtgctaagtttttacagttgtcttagccccagtggttctcaaggtggggctcctggcccagcagcagcaacttgtttgttagaatgcagacgcgcaggccccacctggcctcctgaatcaaaatggtgtgcggcagggtgcagcgagctgttttcacgaggcctccaggtgactggatgtaagcttgcttgagaactatgggttttagctattctggtgtctccctgattttctacag

SEQ ID NO: 3997 - DNA, 374 bp, Homo sapiens
  I.3997 (AA496927)
cttttgttctcaacttgtttaatatggaaaaaggtcatcaaaacggtaggcagggttgctgtttttaatacattcttgggatgttggccattcagacagcattatttcaaatatagatgagttatccaactttttttgactcaaagatagtttgcttagattttttttttttgagatggagtcttgctctgtcaccaggctggagtgtagtggcgtgatctcagctcaccgcaacctccgcctcccaggttcaagcaattctcctacctcagcctcccaagtagctgggactacaggcatgcaccaccacacccagctaatttttgtatttttagtagagacagggtttcaccatgttggccaggatggtctcg

SEQ ID NO: 3998 - DNA, 413 bp, Homo sapiens
  I.3998 (AA635195)
tttagattgaattttctttatttacaaaacaataaaggaagtacagaagcattaagtgatttgcttgaggctgcttcactaacaggtgccagagttaagattcagacctcgtccaattagtcctagagccagagcttcttgcactaccctgcactgccctctgttgcctctgtccttgggtcatctttgtatgagagctgaaacaaggaggcccagggtcaccttatttgaccttagcttggaacgtgcataaggagtgacagatttttcactactgtgtgtatgtccatgaatcaccttgaaagctccacaagtattaatttggagattacaaacacattttagcaagtaagcaaatttgcaaatataggatccacaaataatgaggatcaactgtatttgtaagtgactgc

SEQ ID NO: 3999 - DNA, 582 bp, Homo sapiens
  I.3999 (AA628539)
  misc_feature (449)..(449): n is a, c, g, or t
tttaatggggctagggtttcgctatgttgctcaggctagtctcaaactcctgggttcaagtgatttttctacctctgcctcctgaagtgctgggattacaagtgtgagccactgtgcctggcctaaagtgatttcaggtgtcaaggcaggccccaccgcagtgacatctgcacatacctggacacaggctgtgatcaacatatcctgattcgaatgcgaagatttctaactctagacacttgcagtaacatttgggaagttgatattcctacaaattctctatctcattaaacaaaattacccgcgtttggtttcacaggctctattggcatggactagttcaagtatcagtgcctccatcaatgtttttacaagtcactaaatactgaaagtccttgacaaacttaaccagcagttttggaatacgagttgtgggtaacgcggcactnggactcaaccactgaccccaaaacagatcttaatgtctgcggttatggaactctgttcagacttcaaaggaaacgactcctctctgcagacattctcactccttttcaggggtccctgggcccagggtaagac

SEQ ID NO: 4000 - DNA, 459 bp, Homo sapiens
  I.4000 (AA628488)
tttttttttttagattgtgaactgtccttacttcattttattttatagagcttaaaaatgactactgaaagcgaaatgtggcacatgcatacaatggaatattagccttaagaaattctgacacatgctataacatggatgaactgtgagaacattatactcagtgaaataagccagtcacaaaaggacaaatactgaatgattccacttatatgagatagggtagtcaggatcatagagacagaaagtagaatggtgggtgtcaggacaaaaggaaacggagaagttattgtttataataagtacagatttgctgggtgcagtggctcacgcctgtaatcccaacacttcgggaggctgcggcagtggattgcctgaggccaggagttcaagaccagcctggcacaacatggtgaaacccagtctctactaaaaacacaaaaatgagccacgcatggt

SEQ ID NO: 4001 - DNA, 388 bp, Homo sapiens
  I.4001 (AA621075)
tttttttgttttttgacattttgatgatttatgatgacaacattcacgaaatggatttccacacagtttctccctgatggactcaaaagtgttctctgtggaagacactgagccagaccaagaagcatccaggcccgtcagaaacatggcagacagagcaagagggaggacagtgtagaggtcagagcccaggcgggatacagcacaatgccaccgccatgggcttccgggaaggagtgccaaacgggtgacttggccagaaaggcagcgttggagtgacagagatccttgccacatcccgttctcgacttcttctccaagcctgtgtcgcggtggggctccatttctcaatgggaagagagggcgggaggagttagaaccatcttct

SEQ ID NO: 4002 - DNA, 377 bp, Homo sapiens
  I.4002 (AA620836)
tttttaaactgtaaaatgttctttactttttttttttttttttaaaggaacaaatagcgaaggatttgctttcaggggaagaagaggaagagacgcaatcatctgctgacgacctcaccccgtccgtgacctcccacgaggcctccgacctcttccctaaccggagtggatgtaggtgactctgtccccatactccaccgcagccaggccccctgccaggcagtcgtgatgcttgatgaagggtccttgggctgatgcaggccaagaactcatcacagatgagggcgtctgcttggcgggaagcgtcagtagccctgggggtgctttgttctcctccacgctggccagtgagcctggactctcagagcgatttggtt

SEQ ID NO: 4003 - DNA, 468 bp, Homo sapiens
  I.4003 (AA609628)
tttctaattgtttataacagtattttaatgggaaaacatatcctgagacttttcttcaaagcctcaaaatatataatgggcccattccaatcctccatccttggcagcaaaaacaggcatctgcctattcctgctgagacttctgtacaaacaaggtcgattttctcctgtcactgaagattatactgcagttgtggggccaatggaggggaatgacagcttccaaggcaaagtgtgagatctgatagtactctagaacttttctgggacatctttaagatctttggaacctctggagctggctgtagtcacctgaagcatctgatgggccaggcgcggtggctcactgggattacagaatcccagcactttgggaggccaaggcaggtggatcacgaggtcaggagatcgagaccatcctggctaacacggagtaaccccgtctgttataaggttttctgccatcag

SEQ ID NO: 4004 - DNA, 413 bp, Homo sapiens
  I.4004 (AA609627)
tttcatgtcataaagcagtaatttattgtgatcatagattctgcagatcagggtttctagaagggcttggctgtacatttcccactcgaaggcttaggtgattgatgccagatgtgggggctgcagtcatctgaaggcctggctgagctgggagctatactttcaaagtggctcattcacatggctggcaagttgataccagttgttgactgagaacctcagtttttccatgtgtagctgtccacagggctacttccatgtcgtcatgagagggcttaaggcttcccccagtctaggtaatccaagggagccaggcagagtctgcaacactgtagccttgaaacccataaaccatcactagcactctagtgtttgtcacacaggcacagctgtgattacaggtgggaaggaag

SEQ ID NO: 4005 - DNA, 362 bp, Homo sapiens
  I.4005 (AA609154)
ttttgacaaggatttgttttattagttgtacatctatagcacaaaacagtgtgcacctgtgtgggatcctcagtcttctttatcaaaaagagatgaaactcctgtactgatcagtagtgggatcacgcctgtgaataaccactatgctccagcctgggcaacatagtgagatcctgtttctgagggtaggcaggcagaagtaggccttatcatagcagcagccctttgatttgaccactccagctctcgattggtgtgcattctaggtatttatctctgtcagtaactttatcctgttcctgaaaagcactagcttgctcctcaaatcccacggttcggaaataattgacgacatccatcac

SEQ ID NO: 4006 - DNA, 410 bp, Homo sapiens
  I.4006 (AA609111)
tttttttaaaattaacaaaaaacaagtttattccacacctacccaatttcacatagacttgaaaacactgatcatataatacgtggttttttctattgaatatttactgttcatctaaagtacctcagaaaacacaaatatgaatcttacactaggatttgttgacatgaccacaaattgtgaaatttcaaagtcctctcaatagccttccaatcctagtaactcaggtacacctggattcctgacaactctatttctttgttttctttcatcacttaggttcatttctatgggttctgttattggcattttttttttctcatatctttgcaaaaccatcctttatggtgaaagtcatgaaggattcttcacaaatgcaggaaaatgcattgctaacaaagtgctaagtc

SEQ ID NO: 4007 - DNA, 286 bp, Homo sapiens
  I.4007 (AA609103)
ttttataatcttatcgtttttatatacagagtaaagaggagaagtagggtaaaaaaatagatggaaggttggaatcccacttcgtccactgtcccagggtgttggatattgacagatgggaagaagcaaactactcacagagccaggaagaaatgaatgcgttggtattgccacgagaagaggccggcacggtaaaatacgctatgaccatagccaggagatacttgtctgacaccctcaggtctttgtcccaggccaggaatttttgaacgacaggatccccaag

SEQ ID NO: 4008 - DNA, 423 bp, Homo sapiens
  I.4008 (AA482392)
gctccgaggaggaccgggacgcctatgggatgcctggggccatggagtgaatgctcacgcacctgcgggggatggggcctcctactctctgaggcgctgctgagcacaagagctgtgaaggaagaaatatccgatacagaacatgcagtaatgtggactgcccaccagaagcaggtgatttccgagcacagcaatgctcagctcataatgatgtcaagcaccatggccagttttatgaatggcttcctgtgtctaatgaccctgacaacccatgttcactcaagtgccaagccaaaggaacaaccctggttgttgaactagcacctaaggtcttagatggtacgcgttgctatacagaatctttggatatgtgcatcagtggtttatgccaaattgttggctgcgatcaccagctgggaagca

SEQ ID NO: 4009 - DNA, 485 bp, Homo sapiens
  I.4009 (AA811216)
ttttttttttttccaagaggcttttattggctctattagtcaactttaattccttaaagaagtctgtttatatttgaaagcatgccactcgagtcaaacccttgttaaataaccagtttctccaattgtgtccggagcgtactttactcaattgttaaaagctgtaaatagctcaagaagggggggtttcttgactcgataaagggaagacttagctttccaaaaaaaactgtctcttttcgttcctttcttttttctatagccaaagtcagccaattggggctgtagtctatttcctttgggttgagggtgttttctggtatcgtcccttcgtggttcacaggttctggtgccagctcatttggctcccggccatgcaatgccccggagaagagcctcctgtccctctaggtgcagggagctggcaggagtcagagcagacaagagagaactctggaatattacacttcagtattttccctccc

SEQ ID NO: 4010 - DNA, 608 bp, Homo sapiens
  I.4010 (AA805531)
  misc_feature (509)..(509): n is a, c, g, or t
  misc_feature (511)..(511): n is a, c, g, or t
  misc_feature (593)..(593): n is a, c, g, or t
tttttttttttttttttttttagagaaaagctaatctctttaataaatggtgcagggccatttaaatatttatattcagaaaaataatactagacccttgtaccttgccatatatgataatcaactaaaactaaagacttaaatgtaatgccatcaattatgaaactattagagaaaaacataaaaaaatgctttataacattggacggtgaaaggattattaaaataagatttcaaaacatgggcaacaaaatcaagaataaacaaacaacattatgtcaaactaaaatgctttttcatattaaaaaaacaactaaaagtttgaagagacagcttaggcgatgacagaaaatgttttcatatacatgtgacaaaaggctaatattcagaatatataagaaactttaaaatctcaagataaaatacacttataatctaatttaaaaaatgcagaagatcttaatagatgtatgatcaagagagatacaaaaatggcgtactggaaccananagatgctctacattactaatcaccgaggagatgcgaatcgaactgctatgtagtacgacatcattcccatagaatggctatnatagaataagtaatt

SEQ ID NO: 4011 - DNA, 370 bp, Homo sapiens
  I.4011 (AA813307)
ttttcattgtcattctagttttattacacaactagtgaaggacatgttctagaataccccctttaattcttttcaaacatattaaaataaggagccaaactgtatgaatacaggtagcaaagtctacattcaagtggtgctgacatcggggaaatttccaaaaccagttgctagggcctaagagtgggtgccattgacaagagcgtgcggaaacctgtatttaccgagggatcctggcattgtgtcatgtcaaaattgggaccctttgcaataagtcagcaaggaataaggcagcggcaaatgcagaatgtgtgagtcatgaaacgtattagccagcgccagagcgtcacattatttcaccaagcgtgaa

SEQ ID NO: 4012 - DNA, 319 bp, Homo sapiens
  I.4012 (AA813145)
tttttcagtcagcacaaactagtttatttggcaattcataaagatagggactcttcagaggaggttgagagcattgtagggttatgtaaagacttccagaagctgtaaagacttccagaagcaagaagattcaaccatctaaaacgccatgcaggaaaatagccaaaccttctccatttaagtagagaataaatcttagtagcgttctctgcagaatataacaacgctgcaaaaaggccatttcacaggaatataatcaaaactgcagattctcagggtttcccgtaagacgacttctctgctcttctgtttgtggttt

SEQ ID NO: 4013 - DNA, 301 bp, Homo sapiens
  I.4013 (AA808788)
cgacggggtgacggtggctcatcctataatcctagcactttgggaggctgaggtgggtgaatcagctgaggtcaggagttcgacaccagcctggccaatttcgggaaaccccgtctctactaaaaacacaaatattagccaggtgtggtggcgggcgctgctaatctcggctactcgggaggctgaggcaggagaatcgctttaacccaggaggcagaggttgcagtgagctgagattgccgcattgcaccccagcctgggcacacaagagcaaaactccgtctaaaaaaaaaaaaaaggt

SEQ ID NO: 4014 - DNA, 267 bp, Homo sapiens
  I.4014 (AA806164)
ttttttttttttttttcaaattaggttatttattcttaaatatgaacaggaaactcagagttatctggtattcaaggaaagcccgccttatgaatggcaaagactcaaattcaaaacacaaaagtaattctgaaggaagagataatttaaagaaaccacacaaacacagactaatgagagttttcaaaaagtttcaagaaatcccacagttcacaaaataagaatatgattatttttaaaataacacttaaagagatcctgaaaatg

SEQ ID NO: 4015 - DNA, 259 bp, Homo sapiens
  I.4015 (AA805497)
tttttttttgaaactgtctctggtttaatttagtagggaaatagatgggaacacaagtcactaaaaagcatttcttggacttctctcacatcctaaacgtgcttctacaatactctatatttaccacattctgtatacagaggagaatacagtatctgtaatataatgggctctcaatgaatatttgtcaaatttaaaaatgatgacagttaaacaaggattaaaatagtggggtggatgctgtgataagcattggatg

SEQ ID NO: 4016 - DNA, 240 bp, Homo sapiens
  I.4016 (AA664973)
aagttgatctgtcacgcttctttctataatttttttatgtgtgtgcttgttttccatcatagccaattagtcttataagctttatgaggctatgttttattaatgtttatttgtccactacctagcacaatgcttgaaatattgaaggtcagcaattcccaattattttctcttttggacacagctttgaatactgaaatttttcatggtacacttgaatgtattttaaaaaaaaaaaaa

SEQ ID NO: 4017 - DNA, 330 bp, Homo sapiens
  I.4017 (AA788750)
ttttttaatcttgaaagtgaaaataatatagctatggtgggctgaataatggtctcccaccatgatgtccttatgctaatcaccagaacctgtgactgtattatatttaatcgttttgcaggtgtgattaaattaaggattttgagatgaggggattatcccaaattatgtgagaaggcccaaagtaatcaccaggatccttataaaagggaggcagaggaggatattaccacaaaaggagagaaggcaatgtgatgcgacgcagagatccaagtgacatgccctgagaatggaggaaagagccacaagtcaacgaatacaggtggtcac

SEQ ID NO: 4018 - DNA, 335 bp, Homo sapiens
  I.4018 (AA782853)
ttttttctacgtttttaatttttatttatttttttctttctgtcctcacaatctgttcccatagtatcatcttagtagtcagatttggaaggcagtttctcccagggagccctttagaagcccaaagagccccatgcataatggtctctaagcatagtagaccatcaggggcctagctttgcagagtcctcagggctcgagtcctgttgccccagaagggtagagcgatctggcagtaagcatacagctgctctggacaggttagaaggatggactgaagaagacctgctcttgcactttggggaataagttagaggagtctgtggccatgtcct

SEQ ID NO: 4019 - DNA, 277 bp, Homo sapiens
  I.4019 (AA780566)
ctggggccaagtttggagaggagttttattagcaggggatgtgctatctaaaaattattgtagatgttaataaaaattccaggatctaggctgctttgggacatcatttgaaacaggtatagaaaagttttctttagagagaccccagagaggagcttgtttaaaataggtgctatcaagattttgatgtcagatgaaccagtaaaacagtgaggtctgcctgccttttttccaagtccaagaaccattatgtataaagagatgagagaaaatgtgt

SEQ ID NO: 4020 - DNA, 518 bp, Homo sapiens
  I.4020 (AA780042)
aaaggcctagggtttagtggaatgggttgaagtgtgctggttattggcaggactccatagcgtgttatccactgagtcatttttgtctccagaggtctagcacctccaggagggctcaaagcatggaatgaccagctcctatattcatttcttggacaagccttttaaaactaattttgttggggattccctgtagggctgctgcacgttgctgggggtcaacccactagacactcccacttagcccctagtaatccaggggagcctttcagctgggagaagcaaaatgccctttagggagctgaggaaactcattctctcatttatctatgaaaatgagtttcagttcctcacgcaaatgcccagagaagccaatcaagattaattttgagaggaaaggcaatggagaagactctgtagaatgcacctctgaattagaattaggatcctaaacaacttcctaggtggaaaaaacaaaacagtgaagactgcttcctgtagactgtcctcagtcagct

SEQ ID NO: 4021 - DNA, 422 bp, Homo sapiens
  I.4021 (AA779815)
ttttcgtataacaattccagttagaaacacacatagaatgagtacttggagagcaaaagcacgggatgaatcctaaaagtgatatgaaaatgaaaagtaggttgtacatattcatattgaaagagcaatcagaaaaggttaaaattttcgtttcgagtgagaataaggaaattatgaaacttgcatagaatacagcagatgtgaacacaatgtgctgtatacaatgacattcaagacccactggatgagcacagacaagctgtgaggagcaagtggctatgaaatgtcacaaagcatgaggacatccagagatgactttgcaatgagatggaaaagcacatatgcttgacttcccattggggaacatttttacctatggtctcctttggtgactcagtactaagtgtaaccgattccagaac

SEQ ID NO: 4022 - DNA, 606 bp, Homo sapiens
  I.4022 (AA779712)
attgaaacaacaataaagagtttattctctctctcagtttctgtgggtcaagaattcaagagcagtttagcgacgagttctgccttgatgtctctcttgaagttgtagtcaagatgtcaactaggcttgtagttatctgaaagcttgactggggttgaccactctgtactgcaagctggttcactcacatggatagcaagttggtgctggcttttggtggaaggcctcagtttctctccacattggcctctccatagggctgcttggtggcccaatttcctccaccaaagtgacccgttcctctctgtttcaagcttgctttctctggccctccagtatctgggtcaacttgggcccaaaatatattccagctttggcccttctccaggtctgtttctccattccttttcttctctgtttccagctgttgccgctccagctgcttctgatgcttctcctcccgggcctgggcattcatctgctgcacctcgatggtgtcaggcttcctgcggcgcatatacaactcatggttgcccatgcagagctgcaggatccgcttgttgattctcagacgtggggcataaaacacaaagtcaggtgccttct

SEQ ID NO: 4023 - DNA, 528 bp, Homo sapiens
  I.4023 (AA779295)
agagacggggttttgccatgttggcgaggctggtcttgaattcctgacctcaggtgattcacctgcctcagcctcccaaagtgctgagattacaggcgtgacgactgtacctggctctgtttttatatattaagttttattataagtgccatacctgttcatttacatatggtctatggctgtttttgcattacaatggcagagttgagtggttacaataaaaaccatatctggccattaacaaaaaaattaactgacctgttttgaaaggatccctctggctgctgtgtgaaaatcagactatgaggacaagagaagtagaagccgggagatcaagggtatataaatattaggtctattctggagtaaagttagtatcacttactgagggagtcaatctgtgaacgatttaataagtgattgtgatctcaataggataacaggctttgcaaacccatgacagagaaatgataactatctgtgctaagatccagaggtataatgggaagaatgtcaagagataatgcg

SEQ ID NO: 4024 - DNA, 533 bp, Homo sapiens
  I.4024 (AA779279)
ctctgctggtttgaaagtcttatcatctatctctattctaccgttggttgcattttaattctcagtacgtaacttaaggttttattacaaagactaaagttaaagtctatctccccttctctctgttctccttcacacacatctgaaattttagatttttaatttttttaaaaagtgacaccttaacttcagcaaaacatgtcatgttgctggcagacgttgctttcaccctggatccctgggttcatctgccttcgtattgggatacatcctttaattactcagagggtcgcaaggtttctgttcttatagatgtctgaaaatatttgtattcacttcagtgcacctatctccgtatcatgacaagcagtgaacatatgtgaatgggactctggggtagacaggaatggctttctgtacacagaagtgatggaacagaactgcacacagaagtgatggggcagaactcctggccatcctggcccccacacggccagccgggggcctagaggaaaaatctctcagcacctgtg

SEQ ID NO: 4025 - DNA, 611 bp, Homo sapiens
  I.4025 (AA778733)
tttaaagcatcatgggtctttgaggctctgaaaaaactctggattgtctccccagacaagtagacatagatccagtgtctgccctacaactcccaagaatataagaatctgcttaaggcacatcttaagataatacaagaatctgagccttcagattttcctgcattggtggtggagtgagtagatataggaaaagcagaaataatctgtttcttttaacctgataccatcattacatgttaccattaatcctggatcagtttttctcttttattgctattgaaatttgttcagaatgtggtgaaggtgttacctgctataggtggtccagaaaggacagccatcccagcaaagaaactggcaagtcccaaaaacctgtttactgtagaattcctacacgggtccaaccggtacaggaggtatcaatgccaggtaaccaccagcaaagatggcaaagcagatggtgtaggtcataagtagtggaaatgtggtggctaaaggagcaagcaggttagtgatgccgcagaggatgaggtaagacttgtggtaatgatacttcttaatccagttttgatcagcaacccatccagaaataatctgactgaccgtct

SEQ ID NO: 4026 - DNA, 383 bp, Homo sapiens
  I.4026 (AA778603)
tttgttggaaaagacttttattctgcaaaggttgccaatctggtagtacgagatctggattgttggcagccatcttgccactaaaaggaggaggcccattttttactgaataatcttgctgtcttttgggtaggagtaccctcattattttggctggtatgctctttttccacagggttcatgctcacgagttttgatacttctctcaaggaacagagcctctagttcttcttctattttcttcaacgtttcctggtacttctttatgtagagggcttgatcttcacagagctgggtcacaaatgcatactccttcattaccttgagcagctccttctcttggcatgcataggaagcttccagctgttgtaacttaacctttg

SEQ ID NO: 4027 - DNA, 541 bp, Homo sapiens
  I.4027 (AA778363)
caacttttattttaagttcagaggtacatgtgcaagtttgttacataggtaaatgtgtgccacagtggtttgctgcacagatcatcccatcacctaagtactaagcccagcatccattagctgttcttcctgatgctctccctccctctacccccaccaacaggtgttcagtgtgtgttgttcctcaccatgtgtccatatgttctcaacattcagctcccacttacaagtgaaaacctgtgttgcttggttttctgttcctgggtcctgttggggggcaggggaaaggagagcatcaagataaacagctaatacatgtggggctcaaatcctaggtgataagttgatagatgcggcaaaccaccatggcacacgtttacctatgaaacaaacctgcacatccgcacatgtatcctgaaacttaaaattaaattaaattaaaattaaaaaataaagaggcctatttcacattcagttttcaccatattgcactgttgtttacctctcacaagcctcagaccataggatatgagaaaagtta

SEQ ID NO: 4028 - DNA, 458 bp, Homo sapiens
  I.4028 (AA777518)
caaaacacatgtaatgtattatgtattacacattatttcaaactgttcttttccatgcaagaatgtatcaaacacttcctcaacattccaactcttagatttcaaccagaggacattttgaatctatttcaaatttatttacttataggatagtgatctaaacagaacatcagaggccaataaaaaattttatacatcaaactttttggcttattttagaacccccaggaagagtccagtgtctttaagaggaacttttatatgtggtggggtatacttcaattaacaggtaaatgcaaaaatgctagaaaaagacagctgagtatatataagcaaattcaaaactttaaatatatatagactataccatctggaatgccaaaatcttctctcaatagacatatttttcagatatacttagggtactaacgaattagtagaaaccatgaaaagacctt

SEQ ID NO: 4029 - DNA, 544 bp, Homo sapiens
  I.4029 (AA777450)
ggtggaaaagtgaatatggaaatactgtgctgcagttacaagcaatgggttagatctagcgaaatggttcggtctttagaagagtgctaaatgagaaaggataaaaaaaatgaaacattgcccagtgcttcccaaacatcagtgtatacacaatcaccaggggtcttgttaaaatgcaggtgctgacccagcaggtctgggatgaggcctaagatctgcatttctaacaagctttctggtgatgcccgtgctgttggtccacagaacatactgagcagcaaggagctagatgaggaatcacacaattacaacccagtagccaaatctggccacagtgtttttgtatggtccacaagctacaaggggttttaaacagttggaaaaaatcaaaagaatattttgtgacatataaaaattacatgacattcaaatttcagtgtccataaatacagttttattagaacacagccatgctcactcatttgcatatgtcgttggctgcttttgtgctacaatgacacagtggagtagttgcaacagagtc

SEQ ID NO: 4030 - DNA, 398 bp, Homo sapiens
  I.4030 (AA776004)
ggatgaatagaaagatacagggaataatatcctagtgaagagaaaaagtagtgcaaatgtatggaggtggggaccagatgaggcatgaccatgtggctaataaacttatgatgcttgcagcaggggaagtatgctagggaacttcaggaaagtaaatgcctagatacaaaaagtaaatcaaggccctccataagctgggaagagaattcttactggatatggaagtcaattggatgccttctgctggagaacggcagatgaagaaagacatgtttggagagctggtctgacaacagtgtgaaaaaagaactggtgggaatagaaataagaggggaaagccatttagagtatgctacagggaagcagagaatacaggaaaaaataaatgactttgaagc

SEQ ID NO: 4031 - DNA, 318 bp, Homo sapiens
  I.4031 (AA775606)
taatgatttaacacaataagagtttatttctggctcacatcacagttcaatgcacgttggaagtagtgggaggagagaagagctctgtgcacctaatggttctgctgaatcctccggcagatgaaggaagaatgagagcacgaagaatggaaaggaaagttttatgggccagggctggaggtagtattgatcatttctttccatatttcaatggctagaacacagtaatgtggctgcacctaactgcaaaggaggccaggaaatatagtcctgtgtgctaaggagggaaaggaaaatgctttggtaaactgcttagcc

SEQ ID NO: 4032 - DNA, 373 bp, Homo sapiens
  I.4032 (AA769219)
tttttttttttttttttttgcttgcaaagagttgtgatatatttagcagtatttccaccctgattaggaagcaaggaagaggcagctggtcttccccgggtgatgtttcttatcagctctgggcagcacagtcaagttgtcaccaatgaggtaacgatccagttgcttctgagctggaaatggagagcagggctgcttgctaaccccacagacggggccagcacagaggcctgaggagtgggacccacttctgcgtgggaatatggcctgaagagagcaggtgggtcaatcctgagtcggccacacaggtgggctgtgcaagtgggcgagatgagcaaccaggacttacaaacacggcatctgtatgccagac

SEQ ID NO: 4033 - DNA, 448 bp, Homo sapiens
  I.4033 (AA768442)
ttttttttttggaaagggagaagtagaatttgctttattcagacaatgtggctatgtagaaaatactgatgtaatctacaaaaaagttatactaactagagccaataaattagtttatcaaggttataggatacaagagcaatatacaaaaatcaattgtatttctatatactagcaataaccagttggaaatagttaataaaacaatagcagtgagaatagcattagaaatatgaaattagatgtaaattgaaccaaaaaatgtgcaaaagctatacaccaaacactacagaaacattgctgagagagattaatgacataaataagtgaagagaaatatactgtgttcatgtaataaattagacaatatcatgggatactaatggtgagttgggagtggaggaataacacataaaatttagttaagaatttttattttatataaaaa

SEQ ID NO: 4034 - DNA, 314 bp, Homo sapiens
  I.4034 (AA743566)
tttttttttgtagatttgtagaaatatttattaaacagttaaaacatgagggatatccaaccaaataccaatctaggtgttgctgtgaagatattttgtagatgtgcagtgatgaacaagagacacattattgctaccgtacagtgtttgaaacagaggaaaccgggacactgggagagagtggaagatgctgaggtcagagaaggagtcaggggctaattcctataggatcttgcaggattttaatttcagtctaaatgtaatgagaaaacacggggtggtggggttaatagagggggcttgatctggggagc

SEQ ID NO: 4035 - DNA, 344 bp, Homo sapiens
  I.4035 (AA740907)
ttttttttttttttttcaatgagaaagtaggtttattttcctttaataaaattgtgctcctgggttcaaaatgccaggttacatacgctgccactcatttctacagagctatgctgtctccgcgcagacattctcatagacttgaaaacgtaaagtggccacaccacgtcaaacgtccctggcaaggttctgcttatcattagcaccacagatgtaaacattacgtcgacaaaacaatcggtgaatgtgatacacagtcctcatgtgtttaaatattagtgaaatctgataagtattacgattttaaaaacgtattttcttaattccaatttccaaattgatgt

SEQ ID NO: 4036 - DNA, 417 bp, Homo sapiens
  I.4036 (AA731239)
tttttttttgaaaaaataaatttaatgatgtatttttggactttgattaaaaataattcaattttatctgtaagcataaatattagaaatactcagagaaatttagcagaaggataagcatcattttgtaatgacaataattaagtagggctgcataagtggaagaatggacatataaatgccttttttgtttttttttgaaacggagtcttcgctctgtctcaaaaaaaaacgataataataaagtagctgttaactgttttcatttctattgtgtagctttcctcccactcctatttttccacttagcaaaacacggttcccaagccacaaagggttttctaattaacttatcaaacgcttcccgatgctaggcactggggaaaatgcaaactcggattagaaaggggtttctgg

SEQ ID NO: 4037 - DNA, 326 bp, Homo sapiens
  I.4037 (AA758477)
tacttctccaagaaagaaaaaaaacttctgatcttgcatcaagtcacagaatgcctttcagacaatatcataatgccactgaatattttaaatatatatagttaaaaattattttttccaattttccagagccgaaaaggaaacatctagaaaagcttgaattgccaaactttactaaaatacattagcagttaaaaagcagagccctgaactcactgaagggcagagggaggtattaaagagcaccctattctccccagagaactcggttgtgtggctgtatgttaagtgtgtggggaagcattggcaggaggaggaagtttgga

SEQ ID NO: 4038 - DNA, 411 bp, Homo sapiens
  I.4038 (AA758454)
gagacaaggtcttgttctgtcaccctggctagagtgcagtggtagtgcatggctcactgcagcctccatttcccaggctcaggtgatcctcctgcctcagcctcccgagtagctgggaccacaggcactcaccaccatgcctggccaatttttaaaaattttttgtaaagacaagggtctccgtaggttgcccaggctggtctcaaactcctggcctcaagtgatcctcctgccttggcctctcaaactgttgggattacaggtgtgagccagggcaccaggcctatatttcttgctatgtatctattatctaacatttattaattctgttatttaaatcctgtttcttttgtattttgttcgttcagactgagaatagtttgttaatctttagctcaattttagttttgt

SEQ ID NO: 4039 - DNA, 418 bp, Homo sapiens
  I.4039 (AA757717)
gcatagattttgtttttctttattttacaaatgagtttccttttaatgttgttccactttgcatttcaaatttcccttaagcatctaaaaatgttacaaaatagtgtcattacctttcaaattaaacatcaaattagccagagaagttgagttgtgagtactccaacaagcaaaatattaaaaaatgaatttcaacttggtgatcccacctagtgaactaatgggatataaggaacctcttacgtcccagacaccatgcttagcattatgcacagttatccatttaatctcacagccttgcaagggggtattatatccactgtttgagggcggagaaaacaggctcacacaaagtagtagcttccaggggtctcacagttaatattaatgaaaggcttgggcttatacataggtgttt

SEQ ID NO: 4040 - DNA, 277 bp, Homo sapiens
  I.4040 (AA757449)
atttggctacctaattgttttaataccattgattaaaaagcccatgtttcacccactgaacctagagtgcaacctgtgtcctattccagccatctatagatgtgtgaatttatttctaggctttccattttgttccattgatgaattggaatattctaatactcatatcacaccatcttaattatcatgtctctatcataattatgataggtcaaatcactcacttcattgttctgcaccagtaacttggctatttttggccttttcaggaagggtc

SEQ ID NO: 4041 - DNA, 436 bp, Homo sapiens
  I.4041 (AA747577)
tttttttttttttttttttgtggtgagaaaggctcagcagctgatagactcagcaacaggcagccaggagctctgaggctcacagctggcagtctagttctactcagtctctacttgagaaattctttctttggaagtacagcagaggccttagatgagtggcttgtctgctatggcagagattagaggtgctgccagactgccattaagtgttaggcagtaacagcagcagctgctctatatgcatgtgaacagctggggaattaatttggtatgcattctcaggagccgctcatctgctggcagaggtagccgaagaatgccctttagtgtaagtcctctacaaccatacaccaaatgtgctccctgcatttcaaattccattgtagaaagtctctgataatctcacttataccatgagccattcctcagtatc

SEQ ID NO: 4042 - DNA, 423 bp, Homo sapiens
  I.4042 (AA746495)
ttttttttttgttcttcaagtgctttattgggtagccagcctggccaactggcctcatgtatccaaccaccatatataaccttgtttctgggagaaaacatgctctaagttccaacttttgaaactatcttttggagcgcaactccctcatacactggagactgcgtgtgctaatctttctggaatgctggatattttttcccccagcagatttactttgctaatggtttttggctctggcgagctttagtacaggaacactcattgtattgtgggtgtcagagtgcaagaataacagccgaagctgaaggtggtgaggaaggactgctcccggaactcaagcagccactatggaaaaaggcaggaccacgcccaggtgccaggcctctgttctcctactttcagcttcctctcagacaggag

SEQ ID NO: 4043 - DNA, 449 bp, Homo sapiens
  I.4043 (AA742386)
tttttttttttttttttttggatgtatcagttgcattttttattatagcaaaatataacaaaattttaccactgtaaccatttctaggtgtacagttcagtttaagtatgttcacactgttgtacgaccagcaccaccatccatctgtagaacttctccatcttcccaaactgaaactccatactcattaaacaatatgtaatgattcattttaatgagcaaatagaagaattcagcacaagtcccggctcctgcctttggcacttactccatgctgctgctgctgttttacttttacttattcaatttctgatgctcttattttctttgtgtagatctgactttctgactatatcatattccttctgcctaaaaaattgcctccaacattacttgtagagtatgtccactagcaattaattccctcagtttttgtttgagaaagtatt

SEQ ID NO: 4044 - DNA, 431 bp, Homo sapiens
  I.4044 (AA742215)
ttttttttttttttcatttataattcttatttgttaaccctttctgtgtcacagttactcttctaattactaggaacacaatgatcagtttaggagctctttctaggaattgaaattacagagatgaccagagatttgagtcccaaattgcagaggtagaataaccgtgcacagacatgggatggggcattggttgcctcgcaggggaattttaccagagctatgaattaataaggcaagtttcttcttctggttggcttctgcttgctgtactgtcagtgggagacaatcctaggctttttaatggaattttattttataacccagtgcatcacatatatcctaggaatctttccaatttcacccttatcaaatttttgttataacttttatcattcctattccgtgatttgggtagatggaattatgga

SEQ ID NO: 4045 - DNA, 301 bp, Homo sapiens
  I.4045 (AA743377)
ttttttttagttttactttcaagctttatttggagtgtctcttataaagagtgcatcacagagtgaggcacgcgttacctccgtgcatctcagggagtgctgtgtggagaggctgccgcgccgatggctgtcaagagcagaggccgagcctctgtgtggctccgctcttcacccttcctctgctcttctgcctcagggagtggatcgcaaggaaagaatgcaaagtgcaggagagttttcattagacagatactcgtaatactaagaatcaaagcccagcaatccaacactagaagattgg

SEQ ID NO: 4046 - DNA, 402 bp, Homo sapiens
  I.4046 (AA742419)
aaagagaaaaatatgtattcgtactgtcttatgaaattacataattaccttaagaggcactctgtttttttcatgtgatttcaaattactgtctgaagtttcttgctcactgcctgaagaacttcctttagtattttttgtaaggtgggtcagctggcaacaaactctcagtttgtcggaaaaagtctttatttcaccttcattcttgaaagaaagctctgctgcgcataggatttgggattgataggtttccttcctccctccctgccttttcccattaaatccaatatctggtcattccccaggcagtttctgttgtctgctttttaaaaaatttaaatgtgggggtcatactcttgtgtttctttgcatgcctcctaatttgttggaaactgggcattt

SEQ ID NO: 4047 - DNA, 444 bp, Homo sapiens
  I.4047 (AA738417)
aaaccaccactgcataaaaaaatacagctgatctagccatatttccacactgaatggtgtgctttccttctgtatactgcaaagtctagacaggcatgcagcaaagacttcagaacgtaattacatgaaagtgaaggatgtaaacagttgtctactcacaagtggttacttgcaagtggtgagatgaaagcccatctccagtgagctgtttaggaatattcctgacagcttcgaaaagcaaagattcttctaaacgatacagacaatctgagaaagcagatttcttggccagcccactaggccagtacagatttgaccctcaaatggcaagagatcgctgactcacagaatgacgaatcaacgtgtgtgtgtgtgtgtgtgtgtgtgtgtgtgtgtgtgtattttaggttccatgtttatttggtgctccacataatcacgaat

SEQ ID NO: 4048 - DNA, 477 bp, Homo sapiens
  I.4048 (AA738241)
attttattttttatttgattttaataatatattttatttaatccaatatatccataatgttatcagttcaacatataatcaatgtaacaattattaaggagatatttggtattcttttttctcatacaaagtgctcaaaaagccgatgtggactttatactaacaacatatctcaattcagactggccacattttgagtgctcagcggccacatggagctagtggctttgtcatagacgaacttctcctatggatgaaaggctgttcccttcttctctcacacggtcctttcttcctctctgagtggagaggcgtgatacgaaggcgactcagctgggtgaaaacgtggttggagcataagagtcccagcatcaaacagtaatagaaacagcagtagcagcagtgtatttccacagcactcttaaactcggcttggattctctacaatggctttttgagagtgatgcttccagactg

SEQ ID NO: 4049 - DNA, 422 bp, Homo sapiens
  I.4049 (AA737768)
tttatttttaagcacccaattttattttgaccttttatttgggcatctttttttctgaaatatgacacgatttttctgccccacaaatggaggaattggaacacgatctaactgttgcttaatgatcacaaatcatggtgatttgctgtgtttctagaaattatgagctgccagcatgaaagcataccaacctcaggaagatatgccctgaaacatgctttcttgaatgtcagcttgctgctttatcatttgcatcttgcttatgaaaatagagtgaagaatgaggagctatgtagcttctgcagtccatacattcactgcttttctgtagtatgcattaccaaattcaagcttcgagctgtgttttccaccatgaaaacaaagcaacaccatcttctgtggcttatgagcttttgacttgt

SEQ ID NO: 4050 - DNA, 330 bp, Homo sapiens
  I.4050 (AA737176)
tttttttttttttttttttggtctctgtaccaaatacaagtccactccctcttagcaagggttccggcaagggatccaattctgaagtgctaaaacccaaccaatcttctaagctcattgccatcataatcccttggaaaatcagttccagctacatgtaaattcaactgcaccacagaagagtgaagaatcaactctccattccctgccccctctcccacaacaatcctatctagctctaaaattctccacttaggaaagctcaccaacttctgtgaaatcaaaggcatatataaacatgccacctgccctattctgtaactgcatggc

SEQ ID NO: 4051 - DNA, 292 bp, Homo sapiens
  I.4051 (AA732628)
tttttttttttttttgttacttaggcatccagtaatttttgtttcattccttagttttacaaagcaaatagctataaaatcaagatgtttgttcatttacagatggagcaggattgtcgtcgctgtttttttcctccttaatcctcatccacaaaaagaagacacagttcagagtctggctcccaacactcttagcttatgagccacatcacaaagaaaaacacatcctcttgactataatgtgaaatgctgaatattaattgctggtattatgcctatctttctagctggg

SEQ ID NO: 4052 - DNA, 301 bp, Homo sapiens
  I.4052 (AA730168)
ttaatatacattctagctcctgggactacagctattgaagacaagctacaggatggagttccagaaaccatttcaaaacttgcaaaagctgacattaagatctgggtgcttactggagacaaaaagggtaattcattgtgcagggaagcatatctgttaattcacaaatatttatagctgccgtttcctttgcccaagatgacctcctcagacttttcatcctgtacaaacactgtttctttggacggaagatgctttttctgagaaaccctcctctgtttttccagcacatccttctgca

SEQ ID NO: 4053 - DNA, 386 bp, Homo sapiens
  I.4053 (AA733157)
ttttttttttttttttttactttaactagaaattgttctttttaagtttcattaaagataatccaatgatcatgaaaacctttggacataaggaagctcattcaaacaagtgatcgcatcccaaaagcaatgtgaatcctgctattttgagacaaaagccaacacacaaagtctcaggaaaattaaagcagcttctaagaatatcatcaaaatcgacttccacatttaacagatacataagcatctggtacaagtaacacagtacaggacccaaaccatttggatctgacagaggctcttccttttaacagtttcgtctaaatgcaatagttggaggtactgtttccttcagtaaattttacagaacagtttcattaaatgttaac

SEQ ID NO: 4054 - DNA, 488 bp, Homo sapiens
  I.4054 (AA733018)
taatccaacaaaagtttattctcactgattgtgcatgtccaacatggacctgtggaggactcagctccactaagtcattcaggaatctaggctattgggaactctgtcatctcaacacatgcttccaagattacttctgcagggaaggagagagctggagggtattccattgacaatcaaatgcttcggcttagaagtgaaacatagtaactcttcacaacagacaaattacctgacctatccaactgcaaaggagcccagcaatgcaccgtttatatacctggaaggagagggtgctggactctttgtgacactagtagtgtccaccacaacactcaggatgatcgagtttgaaatgaagactatagaaaactccaaatgtccggctgatgtgcttgaaggacaagtgtagaagtggctgacctgtgatttgcagcaactggactctcacagtggctgttttgcagggtgtctctggctctacaacg

SEQ ID NO: 4055 - DNA, 385 bp, Homo sapiens
  I.4055 (AA693514)
gacgactggaatttaatccaacttaagagcttccacacagcaaacggaaccatcatcagagtgaacagacaaccatggaatactatacagccataaaaaggaatgagatcatctcctctgcagggacatggatggagttggaagccatcaccctcagcaaactaatgcaggaacagaaaacaaaataccacatgttctcacttattagtgggagcttgatgatgagaacacatggacacctagagggaagcaacacacactggggcctcttggagcagggagctgggggagggagagcttcaagaggaataactaatggatgctgggcttaatacctaggtaatgctatgatctttgcagcaaaccacgatggcacatgtttact

SEQ ID NO: 4056 - DNA, 491 bp, Homo sapiens
  I.4056 (AA731720)
tttttttttactaattttggatttggttttttcttcttttggtagatttgtatctttgtgcatcatcaggctgtttatttgaaatatttctagtgtcttcatgtaggcattgattgctataaatttgccatttaacacttcttttgctgtgccccataggttttggtatgttgtgtttctattttcatttgtttcaaggaatttttaaattcccttcctaatttattccttcactcattggtcattcagaagcatgttttctaactcccatgtatttgcatagttttaaatgttcctcttgtaattgatgtctagtttattccactgtggtcacataagatatttgacataattttgatgttttagtgttttgagacttggaatttccttgtctcaaggaaattccttgtgggcaaaggacagaattcaaagtcatccctctgaggttgacctgagacaaatggatatctgattgtttcctctgtcttatt

SEQ ID NO: 4057 - DNA, 395 bp, Homo sapiens
  I.4057 (AA731679)
tttttttttttttggcagtaattcaacaaacattttattaacctctactaaaccatatttattatttatggccaaatcacagaatcctgaagttagagactccaaggagaaaatgacactcctggctgagaatgacttctgtctcacagcgccagtgcatcctctcccatttcctccaattgataccagcgaagatgcacctaaagatggaaactcagtagtatcaatgcccaaaatacataatctggggggaaaacaccactagtacctcaaaaggcagactccaggtttgaattctggctctactacagaatagccggtgaccttaattttcttacctggaaaatagagataataagggatgatttcatagtcctgaggatttgaggaggtaa

SEQ ID NO: 4058 - DNA, 328 bp, Homo sapiens
  I.4058 (AA730310)
ttttttttttttttttctacaaagatggtactgtaattttctccattttgtaaatgaggaaacaggttaaggtcacagagtaggggggagaactgagattcaaatccctccaatttatgaagcctaaattggcttgttccagctctgttgtactgatttctgtggaggtgattaccgtaaaccccacctgcctggtcctcttctccagccaaatttgaagcatttgatgtccctgtgttagtctgctagggctggcgttacaaaataacacaggctgggtagcattaatgatagaagtttattttcttggctgggcgcggtggctcat

SEQ ID NO: 4059 - DNA, 477 bp, Homo sapiens
  I.4059 (AA709064)
ctaaatataaacccttaaaatgcacattattttttaaaataaaaactggcatgaatcctaatctttatacaatttcacagcaataatagcagcatgattttagcctcttaaaagatttcctcctttgctctaaataaaaattaatttcaagttctaaaaagccagagcagcaaccatccagtaattggaatgcaattctcctagtgtcttctacagaccgagcatttaaaatacgtgaatgtataaaacttgagtattattaagagttatggaatgaaatgacaatctaaactcgttttgtaaacataggactgccttgctagtctgatgtatttgggggggtggagggagctgagaacatagaatggagttgggctagagagttcctactctaataaggaatgcaactttcaaaactcgtgggtgttaaacatgttttacatgtctccagagttataaagagctatacctgaaatg

SEQ ID NO: 4060 - DNA, 240 bp, Homo sapiens
  I.4060 (AA708806)
tcctcatggtaagatttattattctccgctctgtacaagccgcgtctgccatcccgccccccatgcgcccaccccaaaaagcacccagcactcccttgtgccctcccaactctgctcatactccactgtccagccagattccaaaggttggggaggggcggtttatacccatctccgccaaaacttactgggggcagagtgctgctggggcgggggatgatgcgggtcaaaaacgagggt

SEQ ID NO: 4061 - DNA, 113 bp, Homo sapiens
  I.4061 (AA707802)
gtatcagtggtaatgtctccattttaatttctaattgagattatttgcatttgataggaagcaggttgaatatcaccttataaatattctcttgctataaaatatccattgac

SEQ ID NO: 4062 - DNA, 352 bp, Homo sapiens
  I.4062 (AA707013)
gaggacctttttctttttgatctaaactttttgaggcttcgtttgcctaaggagttgtctccttggccacattaaaacaggtctagcagtggctattacggatcccccaggattgaggcaaagacagagtgaagctgtcaggtactgcaaggtgtaaacaactgactccaggtcagcccagagaagggacaatgaagtctgattgaccgcacagaggtattcactcacgtctgggggctgctgattgaaaagcaccatgctggatgtctggcaggttttggctagcttgtgcttgaatctccttcccagatatgctgaggcaccatctgtatgagtcttgcaggaaaggtct

SEQ ID NO: 4063 - DNA, 391 bp, Homo sapiens
  I.4063 (AA706750)
aaaccctgtgtccagcctgaaagagcccaccagagaggcaagcaggaagggtcacgatctctaaggggggagagaggaaaggagaggaagaagtaaacactccaacctgtgcctttcggggacaggcattaatctcctaacaactcttggccaaagcagaaagcttgttcagggaacaaggtctgactcttcccaactcccaagatttcttgctgatgtggggaaagacctgccaagaacccttaggctattaggaaatatttttgagtggctaaaggctaaaggttagttataaatgatatactttctgtcctctccccgcggcctctgcattctcctgctttctcctgccctgaacctctccagctaagcctccatccctagagactgg

SEQ ID NO: 4064 - DNA, 134 bp, Homo sapiens
  I.4064 (AA705267)
ttactcaaatgtatgaattatttattatgtgaattacacattagtaaggcattttacttaattttcattctcttatcttaagtctgtgctatctgatctggtggaaaaaggacttggagacagcgttttatata

SEQ ID NO: 4065 - DNA, 234 bp, Homo sapiens
  I.4065 (AA704792)
gaagtgactgatgatttacttcctaatctgatgaagaccatagaggaattctctggatagagttaaattgatgagtgagggacatgatgtagacccagaaataaacacctggaaggaatatgcagccagcgccccagaactgttgcttccataagcatggagaggcttatgggtggtcattctctgtaataaacattggatggttccgtaactccagattccatgaaaatgaca

SEQ ID NO: 4066 - DNA, 496 bp, Homo sapiens
  I.4066 (AA704572)
tttttttttacatgtgaaagtctagttttttattagttttacacaaccagctattcatgaactgtagttaaaacattgtaaatctgtatatttactgctactcaattacaaaatcttcagatggcattgaaaaaacatatccaaagtaactcaagaaaaaagtaccatggcttcttaaacaaaaaatcaaatgaagtatgtcacttgataagaagtttaaaacacacatttaccatactttaaagtaggttttcccctacttgtagcacagttcaagtgcctggaaactaacataataatttactgttaaccatttcaaacttaacattttgcatttatcactttaaaacacatgctgtctaaacattttaatacatgatactttaaagcagaatacttgccagtcagtaccaatgagtctcaacaaataacctaaatatcagagttgtcttgggttaacttttgagatatacagctgttggcttgttttggacac

SEQ ID NO: 4067 - DNA, 301 bp, Homo sapiens
  I.4067 (AA704483)
  misc_feature (216)..(216): n is a, c, g, or t
tgtcaataaagttttattggaacacagtcatactcattcactttcagaaggtctatggtcactctgcagccacaatggcagagctgagtagtcgcggcagagaccatttggccagcaaagcctaaaacacatactgtctgccggggcttcctgggtagaaggggggtgaaccttcctggtcagatccctctgggttgagagctcttccccctccanggaagagcttgcccacctccgcatcgcagctcacttttacggagcactttctctctgttctgtgccacccgagcccatatccagg

SEQ ID NO: 4068 - DNA, 418 bp, Homo sapiens
  I.4068 (AA704293)
tctctacgttatcttttgtaacctcaatcccaaggtggaactagaaagacaaccactagctccacatgtaattactatttacttcctttggatgtgttttttcccattatcagatggggaagttcaggtcttaaccaaggaagcctaagtgggcttgtgttcaggctctgtgggactccctaccccactgggtcacattccagctgtgttcttggctcagttcacttttgtggtttcaagaatgtaaataatttgcacttttaccctcttctttttatctatttctgcacaaggtattggtgacctgaatatatttccttgaattcatcgacttcaaatattccatttctgtaactgacctcaatatgttttcctcctttgaaacaataaactcgctaacagatcaacacagtctact

SEQ ID NO: 4069 - DNA, 448 bp, Homo sapiens
  I.4069 (AA704279)
  misc_feature (425)..(425): n is a, c, g, or t
aaattatgaagtacaaaaactcccatattgggtttcttttctgttacatggaaaaaactttctttgtaaagtgaccacagccaggagtcaggcctcctgagtatgttaacaaaatgcaaaacactgctttccagctaaagaacagccacaaaagggacctgcatcttaagccaggtggcaatcccaattccatctggaggctgggaggcagcctgtctgttgggtgacaggaaaacctcaggaagggggtgccagcctacatctgagcacatcggcttccttgacattgaccaggttgctggggcaaaaaccactgctctccagccggctaagtcatggcttcaacccctgtatcactgcacagtggggtgagaaggtccacatttgccccaggtcctctcagcatggtgcagtgctctgctcanaagtcaccacctgagaatactac

SEQ ID NO: 4070 - DNA, 153 bp, Homo sapiens
  I.4070 (AA704202)
aaatacttttactgggatactcagtggtagaaaatggtacttggacagttgaactgatttttagcagtaaccaagatctgtcagctctgagcttggggaacatcattctgtttggtacccaaagcaacaagtgactattgagcaggggttacc

SEQ ID NO: 4071 - DNA, 271 bp, Homo sapiens
  I.4071 (AA687208)
gctcgacggaagaaatccaaaacctgaacagaccagtaaccagtaatgagattgaagccataataaagtctcctagtaaagaaaagcctgggacctgatggcttcactgctgaattgtaccaaacatttaaagaagaactaataccaatcctacttacagtattctggaaaatagactaggaagaaatacttctaaactcattctacaaggcctgtattaccctgataccaaaaccagataaagacccattaaaaaaaaaaaaagtcgacg

SEQ ID NO: 4072 - DNA, 482 bp, Homo sapiens
  I.4072 (AA703200)
  misc_feature (419)..(419): n is a, c, g, or t
  misc_feature (477)..(477): n is a, c, g, or t
ttgaggccacagcgattttatttggagaatgaagggcagaaccacagagatctcaggagggagggcaaaggtaactcatcgtcatccacagagaggggactcaggattacgctgtgcgtccaggccatcttccctcccagcccagccttggcacaagtcggccccaggatcatcatgtgatagagcctgaagcctgtctccccaagtccctggaaagtagacatctgtgacaatcctcccgaatcccagggcacagggagcatggctgagcacgccagactgcctgggctcaaattctgtcctgccatgaactgcctgggtgtctttggacaagtcatttgacagctctgagcctccgccttctcatctgaggacaacaggaataatgagggtacccacctcatggggatgtgatgagngctaaagaagaaaatgcatgcaaagttttagcacagtacctggcagtgagtatatgtngcata

SEQ ID NO: 4073 - DNA, 324 bp, Homo sapiens
  I.4073 (AA702731)
gactgcttactgtttattaagtacacattaaaacctaagtggtcatttaaataaaaataacaacgtattattaattttattacatatatgaacataaaatgtatgaaaacaactgcataaaattgggactggcaaaaaaggtatataattgtacagttcttacgcatgaagtagtatattacatctcttgaaaataactgtgtcacagcttgccaggagtaaagaataaaataaaaaaaaaaaaaaaaaactgtggtaagtcaagatgtacctctgctacccctgacacagcaagaccaacccttcctcctccaatacatttat

SEQ ID NO: 4074 - DNA, 463 bp, Homo sapiens
  I.4074 (AA702561)
cttccacaagaatatatcctgacactttttttttttttttgcaaagattgttagaaataatccttctcttgtacctagaaacataggtgcaaatttctgatatctttgttttatctgcattcctgcctttcatgaaagtccctcttgattgtgctggggctgtggctcagcgaagacactgaataaatacgatagccactgttgcttgttgcttgtccaagtcttcctggcttctgctgcaagagggggatatggagaaggtgggccagggtgtgtggacccgggcagaatctggggaagaagcctgccattcgtctttctttcccacaccaccgaacccactgcccttcccacccccacagcccttttatgaaatcagacaacgtggtaggtggaaaacagcagggcctttcctctgggttttcaaccagaagtgatattccacagttttaactggttactg

SEQ ID NO: 4075 - DNA, 510 bp, Homo sapiens
  I.4075 (AA702529)
acaatgaacatgtattgttttattgcctttaataataaacattttttaaaaaacaagttcttaaaataaataaataaataaataaattctaatgagaaaaaaagagggacctccatttccatgatcctcctccacccaacatcccaccatctccaccgtctccaccctatccccactcccgggggtcttacatttcagcaatagcgatcgctctggtgaggggctggttttcaacaaggtacctggcttggtgctggaagggtctgagagctggcagtttatgcctgtaaggaattgttgagaaatgagcgcccggagcttatgcaagcagacaaataagacgtgctaaaaataccacacaactggagattcgcataatctcgcccaagagctcatttaatcctcacagcagcccaggagaggcgactgcattatggtctccactttacagatgcagaaacagaggcatggaaaagggaggagccgtgtctaagatggcagggttcagca

SEQ ID NO: 4076 - DNA, 450 bp, Homo sapiens
  I.4076 (AA702492)
ctctcaagcgtttcagggagttctctagggagacagggcattgcacaattcctatcaactgagacagaagagctacaagagaggtacagatacagtctagggcggctgaggcagcatgggggtttcatggaggctttggcatctgggccatgtcattcttcagggacaggcaggttgagagcaggtggatatgggagagagaagggcaaagggccttttaggtagatggaactatctgactaaagacagataaaaggcttggagaatgcaagatgtctatagccaaccgcacctgcaagggaagagtggaaaatgaagaaggcaaggctagggtcaggctgtgggaacgcctgaaacaacagggtaagaagtttggtgccgctacgtgattgcaaaaaagcaaacatgtgctggctggtctcagtaggcctccgggagcggtaatcattg

SEQ ID NO: 4077 - DNA, 380 bp, Homo sapiens
  I.4077 (AA702399)
aacacaagtatgtttatttccatataataatttagatcaaattattcttaagaaatggatctttcttcaattatcaccaattccctgatgcaattactagaaaagtattatgatttttaaaagattgtcagttttagactcttaagaaaaacaacagggcttcttctcaggggtcctaatttataaattcactaaagaattatatatgttaacaaaattcaacttgttttgagaaaaatatatgtcaattgctacccaaaatcaaaacccaacatatatgttccatataaagtctagtcttgcatttgaaatctgacttttcagagtatgtgatgtgtttaaaatttttttggaggaggggctagaaattaaaaaattct

SEQ ID NO: 4078 - DNA, 398 bp, Homo sapiens
  I.4078 (AA702304)
taagcagcttactcaggcttgctctatttggtgctaaccaatggaagttcactgctcagtcttgagaattcagctagaataaagaatttcagaaacaaggagaaaacttactccttcacagaagagtagacacttcttgcttcgtagtaaagttctttctgataaagcagtaaattgggaataatcatgaaagtattgatctcggtcggctctccagtgtggaaatttgcatgtaaaatgttttctgattaacaaagaagtctttaaagatgtttgtgtgatcccttcagaagtcatggttaaagctttaaagtgcaacctttaaccttgaaaatgctgctttctaacttgccttatttgctaatttgttgtcctggtaataatatttaagtagtatc

SEQ ID NO: 4079 - DNA, 445 bp, Homo sapiens
  I.4079 (AA701923)
ctcttgtattgctatttattactatcacctgccaaagtcccagaggctgcgtaggtgataagcaggttttgttgtcctcacatcttttcaaagagcactaactctgtgcccaactagtgcacctgtgtgctggatgagaaatcacacaagtgaaacacagtccctatcctgtgtgagctgatctaccatgacatgtcactatgctctttgtgtgatccttcattcagaggaacagaaacagggttcagtgactaagaaaaagttttgaaatacaagagcacatctgcaaatttgaaaatcatttttgaagtcagaaattctgtagtgaactttaattgacattcacttggcccctacaacatgttctctaagatgcactttcactaacttcaagtctttttctagaggcaacacattcagagttcccagtgtttgattccagccc

SEQ ID NO: 4080 - DNA, 439 bp, Homo sapiens
  I.4080 (AA701319)
ggtagaggcaaagtttcgctatgttgcccaggctggtgtcgaattccaggcctcaggtgatcttcccaccttggcctcccaaagtgctgggattacaggcgtgaaccaccgtgccaaacctacatttttatatttattatttttttctgattaacaataaagctaggttattagctgcctgggaagaggaggaagtagatttttacattcacttttaaataaacttttaaattcacatgagaaattccaccttaccacaattgtctccctaacatgtctttggactacctctgtttctctaagtttttgtttttttctggtgtctgaattaagttggtgacagatttgggggatatttgagtagcactttatctagagttgcttgcacaaaagctgagtaggagcatagccctaatgagttcgcattaccgaaacaggt

SEQ ID NO: 4081 - DNA, 422 bp, Homo sapiens
  I.4081 (AA699648)
gaatgttcatagcagctttattcataatggccaaaaagtgaaaacaatccaaatgtccatcagctaactaaaggataaacaaaatgtaatacatccatacaatggattattattcagccataaaaggaatgaagtactgatgcatgctacaatatgaatgaactttgaaaatattatgctaataattcaatttacagtatataaaatatccagaataagcaaatccatagacagattagtagttgctaagggatgggagaagggggaaattgggactaactgctaatagtatggtttttttcggtgggggggcgcagttgatggaaatgttttgagagtaatggtgatggttacacaacatagggaattttctaaaaaccactgaagtgtgcgctttagaatagtgaattttatgttaggtg

SEQ ID NO: 4082 - DNA, 579 bp, Homo sapiens
  I.4082 (AA699591)
ggcagtaaactcagtttatatttaacacaatatagctacggaccaagcaaaacactgttgttcacaatttcttgacctagcaatagttatacatttatcaacaacagttcgggctcacattacaatatatctttgccattttccaaacactacagaaagcacattttaactcctattcaaagtgtgaaaaagaagcgaaatgtgaacggtatttcttgggaacggaggtattacaggacagcaactgctaaagcctctcaaagctccaagggtggaaccaggctccatcttgaaacagaaaaggaatcccaaccacacaggcgccctgcagtaggaaccaaggacagccctgcagaagtcatgacgtaacctgaagtttgatttaaacagaaaaaagaacagcagcccaaatgaaacatgactgagaaactcggaaacgtctcgattctgctgcagccattccctaagccaggcaggttccactgactaatagcgttcaagtttcacagcctcagcaaaccatcctcttaatgtcaataccttttctcttccttgtcctggccgctggtaaacatgtga

SEQ ID NO: 4083 - DNA, 427 bp, Homo sapiens
  I.4083 (AA700404)
taacgcttgccaacttttatttaacaagagtagcaacttaaaaataacattatttttactttgtgcaacatagtttaatatctgaaataactctgttccaataaaaatctattgaaatactctcaggcctaactctgccctgaaggtaaaagtgattaattgaaagattttggcagatctctgctcaccaccagggcagtttaatttagaacacattcaaccatttctcagtgtctctgtgttggtggagcataacttttgatcttcggggaggtgcctccaattcagaccctttggcttgcacttcctggaaggttttgatggcttgctctgctaagcattcaggtgagagagagctcttccctggccgctgcctctcaagtgagttcgtaaaagcaaattccaggcaccagacaaaatattctac

SEQ ID NO: 4084 - DNA, 424 bp, Homo sapiens
  I.4084 (AA700053)
ttttaccagattccaagaggctgagctatatctaaataatcatttgatgtaagctctgtgaaaaaaaaatcattattttagcacttatttttcttgtaactgcctaatttatccttctttattgttgttgacatttatggattttccaccttagtatcacagacattcatagatagcaattggccattttaccaattggtgttggccattttaccaacacccctgtctagagaggtaaagttttctgtgcctcacagcaagctagtggccagcagaattgactggaatccagacccccagatgcccgctgtagtcgccttatcaccacaccatggcaccagctcttcacgccttcaccttataatgccgccaaccacatctacctagagaaaggatgctcatgctccctttttcaagagtacat

SEQ ID NO: 4085 - DNA, 481 bp, Homo sapiens
  I.4085 (AA699706)
agatacattttaacagctttaagaatctccttcccaggctgtctggcttcttagaaggcatgtgataatctgtttcagtgagaggaaagagaaaaaccacagataagcgcataccacaattggtctcatccagtcctttagcagaagtggagaataggagtttttgaagaagcgaaacaaacagctctctgaggcctggacgcttgttccatcttcagcacctctgacacagcaaaagatgtctagccgatttttctgaggggacagagggaaacaaaggttatacccgctagctgcttcctctagattctagactcaaattaaatagactataatcctggcaccaacttacctcttgacgtttaatgtctaaccccaagagactcacgaaacaggtaatctgcagaagaaagtcaatgaagactgccaatcccgcaaagagagagaaggtgtgcacggctggcatcacggacaatgctcc

SEQ ID NO: 4086 - DNA, 337 bp, Homo sapiens
  I.4086 (AA699412)
acggaattaaaaaacaatttttatttttagttatggttacatttgcaattgtaagtggtaatcatttttactttagatattctggaaaatacatacaattaaagaagaaacatgaatcactcatgtaccttccattcttagaataatcagtgttaagactgtctgcagaaagtatccagtacaaagtagtggctgagcccactggtgatacagaatgtatcaggcactgtgattcttggatctctggccaaatgtagaatcatttactgagctaaaggccaatttgcttggaagagtgcatctaattaaagtgagattagaaaggacgaaaggtgtc

SEQ ID NO: 4087 - DNA, 401 bp, Homo sapiens
  I.4087 (AA699356)
tttttttttttttttagagagtacaagtgcaggtttcacattcattgtgtcgtggtgaagtctgggcttttagcatacccatcttctgaatagcgaacgttgtacccaacaggtaatttttttgagcctgaccctcctcttaccctcccaccttctgtaatcgccagtgtctattatttcactctgtaggaccacatgtacccattgtttagctcccacctataagtggaaacatgaagtatttgactttctgtttctgagatatttcagttaggataatggcctccagttccattaactaaaatatttgtatatatgttcatatgtttgacctcgctaactccttgggggaaattttgactgttttataatatattagaagttttttaacatctgaattt

SEQ ID NO: 4088 - DNA, 496 bp, Homo sapiens
  I.4088 (AA699346)
aaggaatgtgttttgtgattaagtgctataatttggaaataatatttaatgtactattactcaattctgataaatctcagagtgtaaaacagcacttaaaactacaagtttctgttgtgatgtatactgcacaactacaaatcccatgaacaaatttttaatttatatgaaacataaaatcatagatttttaaagaatggcataaaacactgattcacacatggaaaccagggccttaggttagaatcctagcttcaagacttatactgccactaactgttaatgggcttgcctcaccactgtacaactaaaaaactggacaaaatatataaagcaaccagtaaggtcaactctataccatcattctggctttctgcctggaagaaagtggctgcggggtgggaaagaaaaaccttccttcccaccctacatttggatgcagggtaggaaggaaaaacccaggtagagaactgtgataacagtgagttgaggaaaa

SEQ ID NO: 4089 - DNA, 173 bp, Homo sapiens
  I.4089 (AA682689)
ctaatgataacatctgaacatgcagaaactactgctcctcagcaataaacgggagggaaagtactccgttgctcttacctagcatcatatacacatacaggaactgccatctctcccctctcaacccaacagactcaattcacacattgtaagttcggaaaagcaagtgtttc

SEQ ID NO: 4090 - DNA, 386 bp, Homo sapiens
  I.4090 (AA682599)
agacagggtctcactctgtcgtctgggctggaatacagtggcacaaacatggctcactgctgcctccacctcccaggcccaagtaatcctcccacctctgcctcccaagtagctgggccacaggcatgcaccaccactcccagctaattttttttttttttccctagatatgaggtctgtctatgttgctcaggctggctttatattttacagctttcgtttcgcgacctttgtgatcaagctaacacttctagttatcttgtagcagtgccttctttctaatttagcaattgatttaaagaaccaagcaggctgaaattgtgcatagaagagtgaatagaatctgtttgagagaagtcaataaaataaaatatcaactaaaaaaa

SEQ ID NO: 4091 - DNA, 556 bp, Homo sapiens
  I.4091 (AA682521)
aaaagggccttcctagaaaaaaagacaaagactaccaaggatgtatgaagggaagaaagaagtgtgaggaactgtggcactaaggatggcctggtgagcaccaaatgatgtgtagctagaggaatgcaagaggagtgagagaactcagggccgcccacccctaatcagaccaccacccatggccacacaatgttcctttgttgtttcaattacagtgcatagaatttgttttaaaataacacttctgataccaaattttaaatatggtatcatctcaatggtgtaaataatgcattaaaaatgggctggcaggaaatatgccaacctggttactgcctctaggaagagcgggtaggaataatcatctttttgcttcttcattcttttccattttccagttttctgtaactatgtattatcaggggaaaaagcatacttttcaaaatgaatttcatattataggagaaataaagccagttatttcccccaaataatccctggccgaggaggaccctcgagtcaaataaacagatatataaaggattctctgttactg

SEQ ID NO: 4092 - DNA, 457 bp, Homo sapiens
  I.4092 (AA682479)
tgaccaggatctcactcagtcactcaggctagagtgcagtggcatgatcatggctcaccacagacttgacctcccagactcaggtgattctcccacctcagcctcccgagtagctacgactacaggcgtgcgccaccacgcctggactaatttttccatagaaacggggttttaccatgttgccccaggctggtctcgaactcttgtgcttaagagatcctcctgcctcacactcccaaagtgctgggattacaggtgtgagccacggtgcctggcctatactatctctttcaactctctcaataacttacaaatgaagaaactagggcttacagaggttaagggttaagtaggggcacatggtaggaaatcagaattctaacctacatctatgcaaccccgacatctgtgctccttccattccattaaaaacatgtaggctgcaaaaaaccacagg

SEQ ID NO: 4093 - DNA, 461 bp, Homo sapiens
  I.4093 (AA682407)
ttttttttttttctttttttccgggtccctccagccccaacagcctgtcctggtgcagtccttccctctgacctggcttgaaatttctcccaggccaaggcagtgagccatgatcccaattccatgtcaggggcaagagtgaattctgggttccgaggcctaactatctcgtctttccactagcccaggaaagtgaactgcaaaacttctttaaaagggtccaactaagcaagcccttcctatcttcagaggcagcctgtgaatgtgaatgtacgaaaggagatttgcttctgcggcatcccaggaggccataggggccatatcggttctcctctagataggccagtggttcccttatagacgctgaaggagaagctaatgtggggagaagaaaaggtgagcttctaacagctgagggtgggagttttcttaggggagagaaaaaattgtttgaaaaaaac

SEQ ID NO: 4094 - DNA, 414 bp, Homo sapiens
  I.4094 (AA682406)
ttttttttttttgtaacctcagagatttttatttttaataatggtcagttcctttctttttagataatttaataacagtgtagataagaaaagtcacaatcagaactcatggtaatctcgaactaaattaatataatctagcataggcttccatggtagccttggctccatgtttgttcttcaatatccggtagtgcatgaaaaaaagaactgtaacaaaaggggacagctttggatgttggtatttttaaagtcaaacaatcctggctcatttgagaatctagtgaacataagcattcaaggaaatttatttcaaattacctagaaattcaaatttcagtaacaacatttaaatatatggtactgtcaaggtaaaattacaaaacagcaacccaaaacaggagataaatgtat

SEQ ID NO: 4095 - DNA, 465 bp, Homo sapiens
  I.4095 (AA682856)
gttgactggaacatctgaaaagactaccagggttgatacttacagcgactttatatgcagcttctatgtaaaagacaagattctgtatgaaggccacctcatcgagagtgaaaatgatacgtaagcctagcaaagaaaaacaatgaggttatgaagccatgttgcagagagctgccagtcacaaattacaaatatcacactaggaaataaacccttttaccctcattttcatttttcttccaaaggcatcaaaaatgaagtcttaagtaaggcataacagtgagtgtctaatctccgaaaagggggaaggaaggagggaaggaaggaaaataaggagaaggaaaggaagggctccactttcctgtgtgtgcctatgagtagaaagggatgagagagatttgggcactctggtacaggttggattgatgcggggaaggttcaacagagcaggattttagtcagaag

SEQ ID NO: 4096 - DNA, 459 bp, Homo sapiens
  I.4096 (AA682790)
catacttttattcaagattcgtcttcccatgagacactctgggctgtcaggctgtaattagactttctcccaggctgtgtggagtgagagacagagccagattagccccctgtaaacaaatttggtcagttctctcctcaccagccttgttctggttgagcggatttcagcagctcctgggtgaatgttaatgccccccacgtacacagttgcaagaaaaacaataactgtgcatttgtgcctccatttcttgagaacgctctgggtttcacttttcacaggtctttgtgatgtagcactaggcagtggggggtggcatggcagggaagcagtgcaaagagactggaaaaaccttaaggcaggaggtagggcacctgggtttcaaggcaagctcagccactaattgtctttgtaaccttgcaaaagtcactttagctctctgagccttgggtatctcgc

SEQ ID NO: 4097 - DNA, 449 bp, Homo sapiens
  I.4097 (AA679067)
gagacagggtctcactttgtcccaggctccaggctggagtgcagtggcacaatgtcagctcaccacagcctcagcctcccaggctcaagtggatcctcccatctcagctcccaagtagctggggccacatacgcacatcaccatgcctggctaatttttgtatttttttgtagagacaggtttttgccatgctgcttaggctggtcttgaactcccaggctcaagcgacccacctgtctcggcctcccaaagtgctgggattataggcatgacccaccacacctgacccaacagtggttatctttgagtgatattattttcttttcttttccctataattcctaattttctacgatgaatgtcatcattttcttataagaaaaaacaaagttttgaaaactcaggagagttgtgataaataaaagtcctactataatactttacttttt

SEQ ID NO: 4098 - DNA, 338 bp, Homo sapiens
  I.4098 (AA679042)
ctttgtttatttttcccttcttttcttgtatcattttttggattgtcttttattggtgcttcgcattttcgctgtgtccctccctgattagtttattagctgtcctcctgtattctttttcaggtaaatcagggatttcttcttgatttggattcattgctggtaaactagtgtgattttgggggagtgttgaaaagccttgttttgtcatattaccagcgttggttttctcgttccttctcatttgggtaggctctgtcagagggaaggtccagggctgaaagctgctattcaggtctttttgtcccatggggtgttcccttgatgtaataatattc

SEQ ID NO: 4099 - DNA, 337 bp, Homo sapiens
  I.4099 (AA678162)
agctagtatgcagtaagcacgtatttattatctattcaggaaataagcattattatttagaaaaatgaaattaacctaatatatgaccagtgtccaaataattgggagaatacagggatgtaggggggaaaaaaagagaaagcaaagccccggtaagcatttggggtattttcctcccgactctccttggagagagacgtttggaggaggtgaaacgctatctcgtgctggggtcctgcactgtggaggtccgtgattacaaagcgtcatgggacttgggctcacgggccagctaccctctgccttgggcaaggagctcgccccacccgtaagcctg

SEQ ID NO: 4100 - DNA, 411 bp, Homo sapiens
  I.4100 (AA677830)
caatcctagaagatcatcatgtgcaaactgagaacgaagccgatacagcagcaggcagagtcaggaggagagaaactaagacctgatgatacaactggagccctgcattcaccagtgacctctggactttcccagtatgtgaaccaatccattcctctagtatttaatgtccaatttagctgagagcttttccataagatctcagaggaatgacctggagctgggaggtgaagcaggtgtttttagcagcaaaggtgagctgtccgcatttggagggcccagaaagatggcacccatgcagataaccatccttcttgctaggtgaaaggtggagtgttattttgaggaaacaaacggttacttaagaggccgctgttggtcacagaactggggttggtggagctgctgctc

SEQ ID NO: 4101 - DNA, 268 bp, Homo sapiens
  I.4101 (AA677811)
attacatctttttttattatcttcttggcattaggccctggtgattaaaagatgaactgtacatagtcttcaccctctgagttttgagccaagtgagatgtatgccaaccagttattacagctaaggggtagcccagcacagaagtaaatgcagtgagctgcttattgtctggagaggtcaaggaaggtgttttggaaataacgtgcttgaggctgcctcatattttaaccgttgataaagaggaaaagtaggtgaaatatctttaag

SEQ ID NO: 4102 - DNA, 484 bp, Homo sapiens
  I.4102 (AA677684)
tgttgttgttttttttttaataattgagacaaggtctcattatgttgcccagactggtcttcacctcacgggctcaagtgatcctcccacctcggccccccaaagtgctaggattacaggcataagccactctgcccaggctgtttcttgtttctttagcagctaaagtttaactgccaaatgagtaaaacaccaccggccatatctacttagtttccatgaaaataatatatagaactgtatcaaatgtaagatattattaatccacacatacaaaggttctaaatgttgcaaatgtgatattactctttgtacaggaacactaactttcaatactttgtttttcatagacacaaaatcacactagtgattagggtaaagcccattaaactggaatacaaatcacagctaagttcatgatataaatcttcatttttattttagaagatgaataaagtcttagaatggaattatcactgttaac

SEQ ID NO: 4103 - DNA, 446 bp, Homo sapiens
  I.4103 (AA677050)
ttcatcaccacacagataggaagccttccctggaaagagaagatagtatttcatgcatcaaaaaaacatgaaatgttgaaagttgggtgatagaaagtcgagtatttgaaaaaactattagtggtaccggtgttttgtcccttgtaaatcccaacctaccttctgttgaggtccaggtctctcttcactgacactgtatataactcctatatctacgcaacattttgttgctaaagtttgtgtttcaggtcttacataagccacaaaggggagggcatctttatatatctttttgaaatcacaaacatatcgctttttgttcacgtaaatgctgtagcatacccttggtttgtatgtggatcatatctcagtagagcaatagtcttttgaggttatttgaaagggtcactgaggtctgtctgcccacctcagtccccagggagtta

SEQ ID NO: 4104 - DNA, 422 bp, Homo sapiens
  I.4104 (AA676928)
ccctaatggaatgctctgtcctgcttgcaagttttggtgcagagaagccaacaaagatttataaatagggatgctcatgacatcatgatttacgacaggtaaaaacaggaagcattttagatttcaaacaaaaggtagttatcaaatatatcactacacatccaagtaactaaatagcacatttattaaaaactatgagtctaaagaataattaatatcatagggaaaacatttatgtaaaatgttaagcaaaaagttttaagaggttaaaaggaaaaaaaaaatcagggtgcaaaccacatacatagtgtaatctgaatgtccctggctccttgctacttagctggtctacggactagcatcatagcatcaccaggagcttgttggaaatgtaagattttaggctccaccctaaaacccac

SEQ ID NO: 4105 - DNA, 414 bp, Homo sapiens
  I.4105 (AA676866)
gagatggagtcttgctctttcgcccaggttggagacatcgcacccggctagtctcacccttctactcactcctccaataaagaagaaggaggttatctggctcatgaaaagcagacatttatttggccatgttttactagaaggtagaattactatgtcttgaaagtaagggccaaacttaaaacttccccttttactgcctaggcacaggcatagcaggcactcaaccaaccgaacactcttgtcacccttatttccatcaggccccctgttgtggcaaggcccccctccgaccccgttcatgaggggaggccaccattcttctctgttggtaggatgggcaaatttaccagagccctgcatcagagcttactgggtgcttgccctgccaagaataaagtgggtattttggtc

SEQ ID NO: 4106 - DNA, 412 bp, Homo sapiens
  I.4106 (AA676550)
ggtgcttttaagctaatgtggcatctttctcttttcaaagagtggcatctccaaggaatagctctgcctggaaggtgtttgtggctgtccacttaaaagctgaaattaggtcagtgttattttgtcttgagataacaaaaataagaccccaagggagtagtgacttgggatttcatttaagtacttaatttacaggaaaaaaaatacagtttccgatactgaataattattacactactgaataattatatattttttcttctcccggtgttcttatactttagaggcaatttttttttttttttttgtaaagatcacaaaaggtctgattagtcaaagaatgaaagaaatgcactgtggctccaaagtcccttatccaaaacctctgggacagatgtattttggaatttaa

SEQ ID NO: 4107 - DNA, 424 bp, Homo sapiens
  I.4107 (AA676521)
cggtgtaagtaagtaacccataccaagtatttcttaatgttgcaaagatattcctactactctgatgcaggaaaaatattaaaatcatcaaacataaaataaaaggtgagaagcatatgaaacttcagaaagcagtaatattcctatattgccatatttctagatgcaaggcttatggacaaataagtgattagtagaagcagctaatacatgcaaatatattacaaattaaaatcacttaaatgattcagtcagcaccacccttctccccaccccccagcccactagtggcctaataagactaaggagaaatgatttttttctggtcattaatattactttattgtctactattcctttacatacaatgcctggcattcaataaaaaaaattaagaaacatgcaaagaagcaagaaaatgtgg

SEQ ID NO: 4108 - DNA, 610 bp, Homo sapiens
  I.4108 (N21663)
  misc_feature (532)..(532): n is a, c, g, or t
  misc_feature (603)..(603): n is a, c, g, or t
taaaaagagaatgtttattatagactgaaaagtgcctatacaaagaataatataattccacattttttctggctagaaaattccatctccctacttccatgaggcctgttgtcatcattccaaacacagatgattcttcaattcctcagcaaacctgtgatatatagcttatatcactggtgtgaaactttaatcaactgtcttgttgtaaagacatttatgtttccttttcttccctattagtctatcagctacttgaagtcaagaactgtgtcttatatgccttcataactcacagtgctaggttcaccctgaaaatgtcacaagatttataaaaggattcataccactaaaatatatgaacagaattacaagaaatttttcttttcaggggtatttttaaagttctaaaattaagattgtgataattgttcaattttttcaatttactaaaaaccactcagctgtacactctaaatggggtaaatttaaagtgtgtaggctgtgccaggcgtggtggtttttaaatacntataccagtgtagagttttattttagtagaatgggcatcagccttatatgatttggaaaggcagattccantggaagc

SEQ ID NO: 4109 - DNA, 318 bp, Homo sapiens
  I.4109 (AA679492)
acttatgttttattgctgggctcgtttttttttaaaaatagaatggtcgtatattaagatgacttctttccgctctatgggccgtctccccaagaggtggcctgtctttgcacactcgccctgaacagcacgctgcacaagtcttctgcctgtcacatgtccacctggggtgtgttccctagtccatgctatctgtggaatgctgtgcgcaaagctccctggcatgcaccagggagaagagcatttggtggccataccagagtggcagatgctcacagaagacaaaaggcatgcaggatctgttctccacagccatga

SEQ ID NO: 4110 - DNA, 442 bp, Homo sapiens
  I.4110 (AA680055)
ttttgtatacaatagaaatttatttggctcatgcttctgaagactgggaagtccaagagtatggcaccagcatctggggggggtcttcatgctgtatcatcccatggtggaaggcagaagggcaagagagcactgctccctctcttctctctgctagagaccagaggccttgaaggaaggaagcccaagggtctctcctggctctgcttccccatcactgcctccacttccccgcatccctttccctggcagaggcttcttgccacagggctctgggcactcacaagacctggccacagtaaacgcccttgcatcctattgagtgagccaaggataagcgtggtccctggcagggtgcaggattctatcctgaaatacaccccctccactttctcctattccagtccaccggggcctctcctccaggcaggaaacatgatct

SEQ ID NO: 4111 - DNA, 531 bp, Homo sapiens
  I.4111 (AA669096)
tttttttttggtacagagtgttaatctagctttctggtgtatcacagtagtgtgcgatatgccacatttgtcatattcttaaattgaccatatagcccttgtataggatgaaaaatttgtagtggccaggtttgctggctcatgcctataatcctggcactttgggaggctgagatgggaggatcacttgagctcaggagttcaagactagcctgggcagcatagtgggaccttgtctctatttcttaaaaaaagaaaaagaaaaaaaaaaagaaaacatgtaaatgatcattatggacatgaccaaatatttatctgttaatagacagtttatccttccttccttccttgcttatctcccttacatccccacagattcttattctacctaagtggataagctggctctaaacctacttacatgattgatttgggaccattcctttaaaaattagagatgttgggagtttttgctttttgacccatactgtgtagatggtgcataattcttataacaaagcagcagggggc

SEQ ID NO: 4112 - DNA, 557 bp, Homo sapiens
  I.4112 (AA668792)
ttttttttttcactgtcatccatttatttattaagaatttactaggcactgtattaaacattttacatacttaatttcatttaatccttatcaaagctgtcattatggggcactgtcattctgttcactttatagatgagggtgcagaagcgtagaaagctcaagcaacttcttgcagctggaaggtgaggctaggacctggcccagggcaactgtctcctcaacagcatttgcgcctccattccatttagtttccaccctaaaatgctgttctagctcttgcgtggagcatagcctctgcagcatggaattctttaataccaggtgcttctgagtcagaggaaaaggcactttgaacctcctgtaacgatgctgaggtttggacattctgacccagcccctgaccccatccctgcacaggcactttcaccacttgtaagtttttcttgctgggcatagcgcctttcactccttggcctttgtctggccagaagacattgatgtttccaggcatagatgattccaggctgctaaagaaagaggcactctcctggtgc

SEQ ID NO: 4113 - DNA, 396 bp, Homo sapiens
  I.4113 (AA665968)
ctttttctgtaaatttagtttgtatggtcgtaggacactctcacagtaactggatacccaaaggataacagaaatagtctgaaaggaaaaattgcaaattcaccaataaggattacactaaaaatatctatcaggaaattagaggcaatggattcaacaaattctaacgcagttcttctatgtaaatcccttcaatttctcatgtgaatctccactctactttctgcaatcactctactgatccaggccttcatcatctcctgctcagaatactacaatggcctaactcttcagcatttcttctggctctcctagctcaaaatccatcctccacttcactccaattttctgtcacttccctgaagaagtggggactgatttaacatccttttcact

SEQ ID NO: 4114 - DNA, 277 bp, Homo sapiens
  I.4114 (AA653082)
cttttcttttcttttttttttttcggggatggagtctcactcagccgcccaggctggagtgcagcggcgctacctcggcccaccacagccatcatctcccgggctcaagcgactctcccacctcagcctcccgagtagctgggactagaggcacccgccatcatgcccagccaatttttatattttagcagaaacagggcttcaccatactggccaggccggccccgaactcccgaccccagatgatccgcccggctcggcctcccaaagtgctagg

SEQ ID NO: 4115 - DNA, 329 bp, Homo sapiens
  I.4115 (AA649610)
gctcgactgatttgcagctagagaaaatacagtaaaccctacattgcaatgaacagctttgtaagtaggaaaacagcaggccaaataaagctttccctctggtttttggcagaagtctacactttaatttcccctttctaaccaaaccattaatgaactcaacattataggaagctgtagaatggtgagattatctcaagaccctactctctttgacttcttatccaggtgttcaacaacgctcacttccatcttattcttgttacacatcttattcttgcttgtgagtggagcaatgaagtctataaaaaaaaaaaaaaaagtcgacg

SEQ ID NO: 4116 - DNA, 269 bp, Homo sapiens
  I.4116 (AA649225)
ttccaagaggaggcgcagtgaactcaaagctgggttgggtttcttccactcccctgaggaagagcagtaacattttttgcagcgttacatcattctggacttctttgccctttttctgagattcctggctagctcactgaagagaagacgaagaatcccactttagtcgtatgcttagccaatgcagatcgatacagaaatgagactcacaggtaggaactacggatctaaagaaagcaagttaaaggaatagtgtttgtacgtgtgtc

SEQ ID NO: 4117 - DNA, 468 bp, Homo sapiens
  I.4117 (AA648491)
tttttttttaaatatagctgtgtttggaaaagtaacagctaaaatgtggtacatttttaaggatcagcaattgtttcatatggatacattattattaacatccacagtttacattagggttcactctttgtgctgtacattgttgagttttgacaaatgcataatttaaccaccattatatagtgtcacacagaagaatttaactgccctgaaaaccccatgtgttctagctgttcatcccttctctctcctctggacccctggacttttgactgtcactatagtttcagccttttccaaaatgtcatgtagttggaatcacacaatatgcagccttttcaaactggcttctttcacacagcagatgcatgtagggttcctccgtgtgttttcctagattcattactcatttctttttaatcactgtataatatttcattatatgaatgtaccttttttaaaaatcca

SEQ ID NO: 4118 - DNA, 443 bp, Homo sapiens
  I.4118 (AA496085)
tcctgccctctaaacaacaagcgtttcgcatcttgggcaattttattcccaagtctctctcttttttatttttgaggaaaggaaagaagtattaggaagtgtgtctggataagtctcaaagtttagggaatgttcagggggcccagtgacgtcatgtaaactttacggagaaattttcccaagagtaaattttttgcttaatttttctcctgttttataggattgtgtaacttacaggttactgataagttgtgtggcttatttttgtgttttgctctcaaaatcagtatacgaagtctgcgtattgtatgttttggtaacaggtggaagattatatgcaaaaaatggtaaaaaacttgtgcgtcatttgttatttatctggtttttgtgtacttttttttttaatttaaaggtttcaactgttatctgtagtcagtatattc

SEQ ID NO: 4119 - DNA, 420 bp, Homo sapiens
  I.4119 (AA496067)
tacctgttcagttacactcgttgtggaacaacattagcttatataccagtaagttgtcgagaatggataaccatctgtcattatcactgaccttcaaagactcatcaagcagtccctgcataaggattggagtggtttgaagtttctcttccaagcactaacatgtccctatcccacagtcattttaatttggtatgtgactgtttctttcatttctttcacagataatattatatatacagttatataaatatatttcatattaaatgttatataacacaagagagagaaagtataagtagaaagagtgcctagcaccctaagaaatttaaattaaaatgctaattatccattggtgagtgcagtctcgaggataggtgagtagactgctctgtgttgaagtcacactgctgacctggt

SEQ ID NO: 4120 - DNA, 229 bp, Homo sapiens
  I.4120 (AA496059)
atcctcactcccttcaacccgagcacacgtggcccttgtctgagcttccctggaccccatatcgcttctcagcttgggtccctttctctgttccctgggtgttgcccacacccaccatctcccctgtacttcagctcactcctgtcaggctcccacccctctgctccacggaaaccctcctgctcaggcggctgaggcctgggggctggcaagttcccaaaccctgggg

SEQ ID NO: 4121 - DNA, 198 bp, Homo sapiens
  I.4121 (AA477932)
cttgctagtaagggaggaggtcacctactaagacactcataacagaataagtcatgccaagaactgagtgtagaagggcactggacccagatgaaacaacatctgaaagattgaaatcctcaagcaggaagaagatttgatgcctcaagcagagggaagccaggctagttctctgacccgtgagacagtgcataaata

SEQ ID NO: 4122 - DNA, 421 bp, Homo sapiens
  I.4122 (AA478996)
gttatgatatgttcatttatttttcaatgcatccaaattcctcagatttcaaaaagaagggatccttctaagtgttcatgctggatcttactggcttctagtttgagatctggttggtagtgtattaattaatttaatgcttacgtggagcttggtagggaaaggaggttggtgggcactctgagaggcacattgccagcttccaaggacctttgcaaggggcagctccagggcccctaccctttctctctctctctccctgaggcagggggctgaagatgtggccaaggagagcttcaggctgtgtctccattggtaactgcctttgttgcacatttccagaaaaccacaactggaaacctcttctgttgggacatgaattctttttcctttgggaagggcaacagaagcaagtggtgat

SEQ ID NO: 4123 - DNA, 531 bp, Homo sapiens
  I.4123 (AA470128)
  misc_feature (127)..(127): n is a, c, g, or t
ttttttttttatgtttaccggtttattataaaggatatcgcaaaggatacagatgaagagatgcacatagagcaaggaatgagggaaggggaaggagtgcagagcttccgtgccctccctgggcgcntcacactccaggaagtgccaggtgttcagctatccagaagctctctgaaccctgtcctcttgggtttttatggaaggttcatgacatcaacattccttcccctaggattgagaccctctcatgggaaggtctttaggacccattgtgaaaaaggtgggcgaacattagtgaaaggatacccagaggtcagaggcctgtcccaagccctaacatacccagtattctaacaaagactggaacaaggactatgagagttacgagtcaggaatgctggatgaaaaccaatatatatcataacaccacacccagcattggcactcagcacacaggtgttagaaacaagttactcctaagcactcttcctgcgtggcctccgcccacagccgcccctcacagggctttca

SEQ ID NO: 4124 - DNA, 451 bp, Homo sapiens
  I.4124 (AA470091)
ggacaacagccagcaagacagtaaggacttcagttgcacaaccacagggaaatgaattatgccgacaaccctaaggagtatgaagctgatctgttcctagcccagtgtctccatgaggatgcagtcagtgaacaacatgatttctgctttctgagaccctgaacaccggaccaactgacatacactggactcctggcctatgcaaaacgatctgagccccttttctcctgattaatccactgcaggcctagagccaagctgccctgtttattaaaacgggatacccactacagcgtccactgcagatgcacttcaagatttcaaagacttccagccacaagaagacggcaagtgaagaaaataggagaaagtgaatagatttcaaggcaaagtcttgagaacttcttaagaattgaaagagaccaatctgctgagcttatgaaaagaaagc

SEQ ID NO: 4125 - DNA, 283 bp, Homo sapiens
  I.4125 (AA469922)
tttaatcttcaaacatttaaaattactaaagtaaatgtttgctttttcttccttctttcctctttactcttctcaactgttttggcctttagaattggctattcagttttttgttgctttcttttcataagctcagcagattggtctctttcaattcttaagaagttctcaagactttgccttgaaatctattcactttctcctattttcttcacttgccgtcttcttgtggctggaagtctttgaaatcttgaagtgcatctgcagtggacgctgtagtggg

SEQ ID NO: 4126 - DNA, 407 bp, Homo sapiens
  I.4126 (AA469907)
gcaagatgagcaacaaaagaagaatcccaagataatcacgtaattatgttaggagagattctcagttcaatctaatcctgtctaaacaggctgaaagaaattagtcactcagaattatataaaaggctctattgaggacacagaaagaagaggcccatctgtaaaccaggaaaaggaccctcatcaaactgagctctgccaacacactgatcttggacttcccagcctccagaattcttctgatagttgcttttggggatcgatgaatcgcttgagaatctctgattgggcaaaaggcctaagtgtctataagaagctgaggagctggagtgggagcagaaacgtctggcagggtgaatgggggtgaggaagaggcagaggactgaaggaggatatagcaaaggatg

SEQ ID NO: 4127 - DNA, 430 bp, Homo sapiens
  I.4127 (AA469902)
cagaccactaccttccatacaccaccctggagtcccctgtgatggggcttcctgaccggcctgtctgagcatgaaagggctgagctccataggcgggcgtgctgacaggatgcacgtggtggaggacatctgctgcatttggctgtgtgacatctccccctcgccttctgaacaggtctctgcagaggccatgaaaaatgtgccattcagcttttctgctaattgttgaaggcccagctgccaccgctctggatctacaccccatttgcaatgaagccacacatctcgtgagccactcccagcccgtgactgggcacagcaggggccctaacgcaggatagctctgaggaggtgtgggacccttgacagtggaggacattggcccgagaactcttcatcgacctgatcaaacctctcttggaactgcaaa

SEQ ID NO: 4128 - DNA, 424 bp, Homo sapiens
  I.4128 (AA435889)
tttgagtgacagacacttattttattttacctaagactcttggcaagagttgaaaataaatcctcgtaccgtcagaggataaaaacagagatccacttaatagcatctgatgattaaacagtcaacttaaaaagacaatctttaaattgacaatgcggtatagagagataaccctgctctttgtaacattttgtacactttaagacaagaattagaaaatgtagcatttgtggcagcaaagagagtaattgccttagaagtttagtaatcagagaagatttgtttagtaacaaacctcagagaagcaatcccctctggctgtttctttgacctgtctctatgcggatagcgtctgattggtcaaacattactgaagagaaatagactttgctttctacagatttacatgaaaattgcagaaatc

SEQ ID NO: 4129 - DNA, 372 bp, Homo sapiens
  I.4129 (AA435869)
ttttaactgcctgcctgatcacccaagcagagactgtatttcccagattttctggcagccagagttggtcacagggctaattctggtccatggaatgtggctggaaatgatgtgtccaacttccgagtcacgccctgcaaaggaggttgtttcccctccattctgcttttccatcctcctgctggcttggaagtggacggtcctggatcagctgccctgccagctccaccctgccaggggcagcaggagggactgaggaagtgctctgtgtggcagagtccaaaggtcaggtacccaaggtctgccactctccagctggtgaccagagcaggcatcctctctatggaccagtgtccctcctgtgtgacgtga

SEQ ID NO: 4130 - DNA, 318 bp, Homo sapiens
  I.4130 (AA435856)
tttcacaacaaaatttattagaagaatagtggttttgaaaactctagcatccagtgagaactaccatacacaacattacagctgggaatgtttctccaaaatgtcatggtcaaataatacaatggaaccattaaatcttacacatgcacgaaagaacaagcgcttttgacatacaatgcaaaaaaaaaaaaaaggggggggaccacatggattaaaattttaagtactcatcacatacattaagacacagttttagtccagtcaaaaatcagaactgcattaaaaaatttaatgtagtgcaatcaaaccaaaaaactt

SEQ ID NO: 4131 - DNA, 346 bp, Homo sapiens
  I.4131 (AA435854)
ttttatttcatttaatgtttaattcagatctagtacagtgatggggaggagggtggtttggggtggtgaggagtggtggtaaggggaccctctggcatcctcagcatgtagaataggagacttgggagagaaatggaaagttcaggctgggcgcggtggctcacgcctgtaatcccagcactttgggaggctgaggcgggcggatcgcgaggtcaacagattgagaccatcctggccaacatggtgaaaccccgtctgtacttaaatgcagtatctgattaatgttgtaagtgacattgcatatcagcctcagagtcttggttcaactgttggcaaagattgggca

SEQ ID NO: 4132 - DNA, 391 bp, Homo sapiens
  I.4132 (AA435799)
acattttttaaaagtttattttattttatttttctatgtttatttttttattatactttaagttctagggtacatgacttggaagactacattttaagttttcttcatgcctctttgattctgcacatgctgttcctgctacctggagtgccttttccctctctttcatttgtctatctgacttctttgccttcaaaacgcattcaaacaccaaagtctaaacagggctggtggactcatcttaactgtggcacagtgggaagaatgcagttttggagatgcttgtgtcagggttcaaatgctggtgctgtcactttctgggggtgtgcactaaggcaagtcacttaactgcactggccataccccaacccttcctccaactcctcactcc

SEQ ID NO: 4133 - DNA, 295 bp, Homo sapiens
  I.4133 (AA435772)
accttcattcatttaatcaacaatcattttctcaatacttattatgtgtgaggcatggcacttagccaataggacaccaagataaataagatttggggccaatcttcaattaggtgactgtgtaatggagaaagcacaacactgtgtgtccctgggcaagtcccttgacattcagtgaattctattttctccatctcacagcctttggtctcctcttaacatcgcagccgttcaaaaactatgtgaaaaaaaaattaactcggccagcgtggtaagctgtcctgggctgatttgc

SEQ ID NO: 4134 - DNA, 343 bp, Homo sapiens
  I.4134 (AA427361)
attcggcacaagcctcgcggcacctgtcgcgcgcacagagaacgtctaagaggccatccaggaggtacgcggcccgcgcgtagggagatcgtgaagcaggtacgaccccgggcgcggaggcggggaggctcgctgaggacagcgcccgcaggagcctgggctcgaggagaccccactccgctcagcgtcgggcatgacgccacctctgtcggaagattcggatgagctccctctccccagccgcgaaacagtgcaggcccccatccctcatctgcaatttccaggctccaaagctccctggaagcccgaaagatttttcgtaatcaaattggtggcaaaattg

SEQ ID NO: 4135 - DNA, 165 bp, Homo sapiens
  I.4135 (AA430339)
tcagttcaagcgcaattttgccaccaatttgattacgaaaaatctttcgggcttccagggagctttggagcctggaaattgcagatgagggatgggggcctgcactgtttcgcggctggggagagggagctcatccgaagtcttccgacagaggtgggcgtcatg

SEQ ID NO: 4136 - DNA, 533 bp, Homo sapiens
  I.4136 (AA420970)
tttgacttaaaaaaacagaaatttattgtctcacagttctggagaccagaagtctgaaataaggtgtcagtagggccatgcttcctccaaaggctctggagaagaatccttctttgtctcttccagctccttgtggctccagcataccttggcttgtggctgtatacctcaaatccctgcctctgtcttcacatggtcttctcacttctctccaagtctctcctctgtgttgcttatcaggacacttgttactgaatttagggcccacccacttaatccaggataatctcaaattggcatccttaatataatcaaatctgcaaatactcgctttccaaaaaatgtcacattcacaggttctaagtgttaggcagtagacttatcttttggaggactatcattcaacctggggtaggaagtgggactggactctggaggcggtgctctgacaccagaccaaattgagggactagctaaaacaggtgcgtggcagaagcacctcccgctaaggcacgcccaacagtgtgctgtgt

SEQ ID NO: 4137 - DNA, 372 bp, Homo sapiens
  I.4137 (AA421127)
aaaagacattaattgtgacgtgatgattcacagagacgacaagaaagaagtgagggccccttctccatactggataatggtgaagcaagacaatgaaagctcttcctcctctacctcctctacctcagatgcattttggctggaagattgtgcccaagttgaagagggtaaagcccaactggtatcaaaggttggttagcaaatctgtggtcatatgagcatttatcttgcagacacccaagttttgtgcctcaccaggcacaagtttgctgtacttatcaaggactgtctgtagactcaccaattctcttctcttatgactgcgttataaagcctttagagatgttcttcaacaggattatctaaagactt

SEQ ID NO: 4138 - DNA, 401 bp, Homo sapiens
  I.4138 (AA421126)
cggcacgaggcccatttctgtgaaattcccaactttagagaagcagatttgccatggccttctgacaaccttgtacatctctcacataaaccgcataggcagggcttaactacaggctggcccgagtctgcactgagtctgaccctgaagttcctttggaacaggagaggccatcttgtgatgggctggaacaaggtaatttctcatccacctccctagtttcagttgagcaatggaacttcccacctgagcccctagggttcagctacaggctataagactgccgtcctgtggtttagtgttggttccttagcagcagagtgatgccacctctgctgccgtcatctgactcctctggatgggtgttatcctgtggcttaagagctaacaccatgctgatc

SEQ ID NO: 4139 - DNA, 380 bp, Homo sapiens
  I.4139 (AA416662)
atgtctcttagttattttaattatagtacttgaagtttaccaaaaaaaagagagaaactaaatatttaaagaaaaatgtagtgtttacataaagtgacattctctactatgttcagacattctgatattggatttctctacggcattttctaaaagaaagaaattcttctcaaaaaggagggtcttattctgaaaataagatttgtgaggcctgcaagaacccaaggaagtctttagataatcctgttgaagaacatctctaaaggctttataacgcagtcataagagaagagaattggtgagtctacagacagtccttgataagtacagcaaacttgtgcctggtgaggcacaaaacttgggtgtctgcaagataaatg

SEQ ID NO: 4140 - DNA, 414 bp, Homo sapiens
  I.4140 (AA416586)
tttttggatttaggcagtttattagttacacatatagcaaagcaagatcagcatggtgttagctcttaagccacaggataacacccatccagaggagtcagatgacgggcagcagaggtggcatcactctgctgctaaggaaccaacactaaaccacaggacggcagtcttatagcctgtagctgaaccctaggggctcaggtgggaagttccattgctcaactgaaactagggaggtggatgagaaattaccttgttccagcccatcacaagatggcctctcctgttccaaaggaacttcagggtcagactcagtgcagactcgggccagcctgtagttaagccctgcctatgcggtttatgtgagagatgtacaaggttgtcagaaggccatggcaaatctgcttctctaaa

SEQ ID NO: 4141 - DNA, 363 bp, Homo sapiens
  I.4141 (AA417348)
tttcatatcctccattttattttttgattaagttcacttattttgtgggggtaagaatttctttcgtttggatcttcagggtattggccctgtgaatgtgtgcccatttctccactatttgccagtcccactgagccaatcttctaccaagactgaaaatagaccatagttctcatttcttgaacagatatcatcaggagagccgagggggagaccattaggcagccccacattttccaactcaacaggtggaggacatgggatttttaccttctttggggattgaacccccacacaccaccaactcccttagcctttcaggataagtatttccaatccctcagagattttcttaggagagac

SEQ ID NO: 4142 - DNA, 450 bp, Homo sapiens
  I.4142 (AA417311)
aaacacatcatcactccatttaccagattagcttgaagaaagcagggtttgaaaggcagaggacctggggcaagaagtaggattgaaataaaaggatgctcggggctgcagtgaggttagagtgagcgttatcatagtttggaaatctggcattgaatacctgaattttacttgctattctgtttctcagcaactatatgacttggcttagtcagtgctcctctcacagctcagttttcttttctgtaagatacaggggtcctgggcagggagggaatagttgtccttcagggtagtggttcttgaacctggcctcagaatcactttggagaactgatttaaaatggctgccccatttcttctctgaatattctgattcaaatggactgcagtaggcccagaaatctttatttgttgttcgtcttatttttaatgtaaattagttatttt

SEQ ID NO: 4143 - DNA, 294 bp, Homo sapiens
  I.4143 (AA417285)
tttggaaggaaatcttcccatatatatgtacttttatttacttatttattttagaattcttaacctaatgcatgcagttagcaattttaaaataactaatttacattaaaaataagacgaacaacaaataaagatttctgggcctactgcagtccatttgaatcagaatattcagagaagaaatggggcagccattttaaatcagttctccaaagtgattctgaggccaggttcaagaaccactaccctgaaggacaactattccctccctgcccaggacccctgtatcttaca

SEQ ID NO: 4144 - DNA, 456 bp, Homo sapiens
  I.4144 (AA417166)
ccttccgtgtaaatgcataatgtctcgagaagcttgcagtaaaataccaatgtgttattttggagagagaacacatgaactctgagcattcacaaattgcctaagcatgaaccagtttatcaagtcatttaagttgagagaaaggtcctcaaggaaggaattacaaaattgtgctttttatgggacgtcgtgagaaggctcagggaagttatgagggtaagattagtggaaggaagaaaaatctgaagacacttgggaaggcgtgcccaggagcaaggcaagggtcacagtcacattcacagaacctcattagggtggatccacaggacatacttcccactgctcgcagaagtattaccaccctttggaataatcaatcaatcaaaccaactcaacaatctttcttttaatgctagtggcacatattgacataaaaataaaattttgcttcctggt

SEQ ID NO: 4145 - DNA, 472 bp, Homo sapiens
  I.4145 (AA417153)
cggcacgaggcagtgagccaaggagacgggaccctctgctttgtcctcctgctgtgctgttggcaagaaactgagctccggccgagaaccgtgattccaggtctcgaggttcccaaagttcctggatctgccagcaaatgaccttcttcactcacctgtgggatggggacccggtgagccaggtagcaggttcacctactgaaataccattcagttcaaaacaggaggatatgtctgaattattagatgaaattctggtccaggagattttggatctgaataaaacaacaccgagcgaaatgccaagtacagcatcaacattatcaacaccgttacatgctggtattgatgagaattatcaagctggtggttctgagaattaccatgaattattagagaatttacaattctctcctggcattgaggacaaaatttccaatgatgaagccaatgctaatgcaaatctccatgg

SEQ ID NO: 4146 - DNA, 444 bp, Homo sapiens
  I.4146 (AA417151)
cgggaatataaaccagcgtcctcaaggcaaaaattgccattgaaaagaaaaaagaaaagctgaaactcagatgtttactttaggaacaaggatctaatggggtcagcgattttagctgtggaacaccaataaagaaatatagacatagaaaagcaagtcctgaaatttatggtatatctataaagacaaagcgaaccagagacttcagctaattctactactacaggcagcaaatctggatggttttgcccttggtttttctatcttataaaaactacagtagcaggtttagaagaaattgaatggaatcatttttttttctttgcctttataaacaaaagggtgcttggcaggggaaaaggtagctgggaaaatattccgtaacagagagaactcctgtattgtgatatatccttccttcagtttttggacatagaaaaaggt

SEQ ID NO: 4147 - DNA, 253 bp, Homo sapiens
  I.4147 (AA417063)
tttattcatgttccaccaggaagcaaaattttaattttaaggccataaggtgcaactagcattaaaggaaagattgttgagttggtttgattgattgattattccaaagggtggtaatacttctgcgagcagtgggaagtatgtcctgtggatccaccctaatgaggttctgtgaatgtgactgtgacccttgccttgctcctgggcacgccttcccaagtgtcttcagatttttcttccttccactaatctt

SEQ ID NO: 4148 - DNA, 413 bp, Homo sapiens
  I.4148 (AA417031)
cgtgtgaataaacgattttcctttatgtggaatggttcagagaacgtgggcgtgtgcacacaagtgccctgttccggagtctggtgggtgggggttctagcaggctcctctcctgcgcagggggtctggggctgcggcctcactgactgccttggtcctcctctgtgcgctggtcctctgctgctctttatggaaaatgtttcctgaagatcttccaatattttgaaggatttggtccagaatggatagattttcatactgagtgttctttgaattcttttctttactggaaacactcttctcactgccaggagacacctgtggcccacgataattctcagaaggatcgccatggagatttgcattagcattggcttcatcattggaaattttgtcctcaatgccaggagaga

SEQ ID NO: 4149 - DNA, 372 bp, Homo sapiens
  I.4149 (AA417028)
gcattttctaaaacaactttaatttacgttctgccttttttctatagttacctttttctatgtccaaaaactgaaggaaggatatatcacaatacaggagttctctctgttacggaatattttcccagctaccttttcccctgccaagcacccttttgtttataaaggcaaagaaaaaaaaatgattccattcaatttcttctaaacctgctactgtagtttttataagatagaaaaaccaagggcaaaaccatccagatttgctgcctgtagtagtagaattagctgaagtctctggttcgctttgtctttatagatataccataaatttcaggacttgcttttctatgtctatatttctttattggtgtt

SEQ ID NO: 4150 - DNA, 412 bp, Homo sapiens
  I.4150 (AA416956)
ttttttggtttttcactcatttaatgagatactcatggggccctttaaatatgaaaactccttcagttgtttggctataggcatttatgttgtattgctctaattgttccttttattattttcctcctctttcagtgtttttctttcagaacttctcttaatagatattgactatatagtgttgagaaaacaaaaaatgatagagggagccctctccataagacacagtaaaaggagtttaactactgaataagcatatctaaagtacactgcatattgtaagcagtctgtaaaagaggctataaagtccagatagaattttcataaattaattcagtaaagcagaagaaagaaaaattaaaattaaacttttatctctttgagagataaattattgcaccttggaatagtc

SEQ ID NO: 4151 - DNA, 499 bp, Homo sapiens
  I.4151 (AA416944)
tttgataatcaaaattaatgactcttttccaatgagctacactatagatagttaatagggagataataaactgggagaagagtctcagactgctttgcagttccaagagaggtttgatcaggtcgatgaagagttctcgggccaatgtcctccactgtcaagggtcccacacctcctcagagctatcctgcgttagggcccctgctgtgcccagtcacgggctgggagtggctcacgagatgtgtggcttcattgcaaatggggtgtagatccagagcggtggcagctgggccttcaacaattagcagaaaagctgaatggcacatttttcatggcctctgcagagacctgttcagaaggcgagggggagatgtcacacagccaaatgcagcagatgtcctccaccacgtgcatcttgtcagcacgcccgcctatggagggctacagcctttcatgctcagacaggccggtcaggaagccccgtcacagggaggctcca

SEQ ID NO: 4152 - DNA, 400 bp, Homo sapiens
  I.4152 (AA406083)
ttttttttttttttttaaaccccagaacattttattagaaacggggagccagataatctaaaataaccatacataaatattaaccaagctaattttcaaaaaatccataagggagagtggagcaaataagaaagggaatatactgactacagataacagttgaaacctttaaattaaaaaaaaaagtacacaaaaaccagataaataacaaatgacgcacaagttttttaccattttttgcatataatcttccacctgttaccaaaacatacaatacgcagacttcgtatactgattttgagagcaaaacacaaaaataagccacacaacttatcagtaacctgtaagttacacaatcctataaaacaggagaaaaattaagccaaaaatttactcttgg

SEQ ID NO: 4153 - DNA, 327 bp, Homo sapiens
  I.4153 (AA406063)
tttgggaaatggcatcttaagtggtaatttattgacctcatggaattttaaatgaaccttttatcagtgtaaatccacctctttcctccaagttcttaatatttaatgaggcggcctctcttggtctttaaaaggtgctaccagcctgtcccgctctttccagtttcaacatgttcttgaatttcataggaaaataagtttactcttgacctgtatttgatgcaaacaccacagttttggttgctctgcccattttgttctctgcatttcctgtaattttgcatgctcaccagtctgtctcttcaagaacaggaacagaaactccgg

SEQ ID NO: 4154 - DNA, 454 bp, Homo sapiens
  I.4154 (AA406037)
  misc_feature (283)..(283): n is a, c, g, or t
  misc_feature (348)..(348): n is a, c, g, or t
  misc_feature (349)..(349): n is a, c, g, or t
  misc_feature (392)..(392): n is a, c, g, or t
tttgaatattgacataaacactgctaattaatctgcacagcttattgaagttctgtcagttgtcctaaagtccttgtcctggagcaggaaccaatccaagatggcactaacgtgacctcgtcctcctgtctccttactccccaccagcctgtgacggtcctcagtgtttcctcatcacctctgaagagctgaggccagttattctgtagaatctcactcactttgggtttgtctggtggccccagggtttgggaacttgcaggcccccaggcctcagccgccntgagcaggagggtttccgtggagcagaggggtgggagcctgacaggagtgagctgaagtacaggnnggagatggtgggtgtgggcaacacccaagggaacagagaaagnggaccccaagcttgagaagcgatatgggggtccagggaagctcagacaagggccacgtgtgc

SEQ ID NO: 4155 - DNA, 463 bp, Homo sapiens
  I.4155 (AA405424)
attcggaacgaggctcgggcacccctaaactattctccagtgttgtcaccagaggggtcagccatgtgatggcaagagtcacttcttaagcttttgctatccccagaaacttaaagcaacaccaaccacacccaaaagtcaagtgatatccagacagcaacagtagagcattaactgagtgcagggccgtggtgactcctcgacactccaggctctcctgctggtaacctcccattggcagagcaggcactcagcaaagccctggacagtcagcagcctcctgaacaggctctgctgtccccactcacgacttcagagcagctaggactcctgtgaccacccctgttccctgttcccgcccaccccgccccgccccgccaactgcctcatctctgtcccaagataactgctctccagaattttccatgatatggtcattttaaaagttttttttttttttgag

SEQ ID NO: 4156 - DNA, 198 bp, Homo sapiens
  I.4156 (AA405396)
ctgaaaccttaagtgttaacatgagcaccttaataaagtttggacagtatttcttttataaacaatattaattgatattgctaactattaacattagaaatgaaagtcgagaaagataattacctggaacgttagtacccagaaatacccaattgtgttggtatttgttttaagttttcaatttttatgcatctccac

SEQ ID NO: 4157 - DNA, 346 bp, Homo sapiens
  I.4157 (AA402934)
atgttagataaactttatttaggcatgtgttctagtcctgtgggctcgtgagttcaacggtaacaactcaaccatatatatatatacacatatatatatgaatctttaaacagaaatacacataaaacaagattacatattgatcagctgatgaaaatatcacgaccaaagctcacaggaacgcaaccctgtatttctcctaggagcaacggttcacgtatggtgctaagtcagtgtctcacagtggattttacagatacggcgccactgaagcccttccgcgctcctggggttcaagacgatatctcctggcctcagacctcccgcagttagctggggatttaca

SEQ ID NO: 4158 - DNA, 361 bp, Homo sapiens
  I.4158 (AA402902)
cctataggtatatacctataatcaagtttaatttataaatctggcacataacaaatgaacagcaataaccaataagaaaacggaacaatataccatacaaaagttatgtgaacatggtctcgctcattctcaaaatatctcatagtaccgtgctcacccttcttgtgttgaagtgagatgataaaacgcttataagataagataaagtgaatgacttaggaattctgatgtagctaatatcaaccttctgactatacctaagaagggggatcatcttagggtgatctgaatcactgagtcatgctgatgtccacagatggatgtcaaaagccgatgatgtcaatgactgaccaatgggagc

SEQ ID NO: 4159 - DNA, 432 bp, Homo sapiens
  I.4159 (AA400577)
ggaggctggagagcggtgagtggaggggccttccctacgagaagtcagagctgtgacgtggcaggcatggctccgctgttctgctccaaggattacatgtccttcaaacgtccctgcccctgtaagtttcctccccacatccttccaccacttggggccaggcaagggcagagcttggagtcgagctgcagagaacggcttgaggtgtttggccaaagaactgcaggggtccaaccagaggctaatgtggcatgctgggtggggagagggcaacacggaagacccctgacgtctgcaagatgctccctgagaactgaaaatcgcactttggcccattcttctgtatcagcccttcccgaagtgtggatcggagttcctctgagggatgttaatgggatgacacacacccacacacaaataaaagactacatg

SEQ ID NO: 4160 - DNA, 491 bp, Homo sapiens
  I.4160 (AA400542)
ggtttatatctcggaagaaaaaagtcgcaagcagctgaagcaccaaagcaaggaagacttgaatgcataaaagcagaataagtggaaaaatatgcaggaataataaaagcagatatctgataatcaggaaaactgagaccccacctctcaatctgcctggatctcctttccaagcaataagcccattccacagctgctgtgagtgttggctgacaactctcagctgctactttctctgctttatcacccccatatccagaccttggccaatgggtgattgaaatattttgattgaattaatatataatgttaggaaaagtaactttcattgtttcctcatccatgtgtaaatacctctcagctactggtcgcctagacgtcattatgacacaagcacattgctagatttttcaaactattttttgtaataaaaatgattcaaatctttcaaaagatagaattaattagcaaaagtataatctaaagaatac

SEQ ID NO: 4161 - DNA, 367 bp, Homo sapiens
  I.4161 (AA400470)
tttggccatgtagtcttttatttgtgtgtgggtgtgtgtcatcccattaacatccctcagaggaactccgatccacacttcgggaagggctgatacagaagaatgggccaaagtgcgattttcagttctcagggagcatcttgcagacgtcaggggtcttccgtgttgccctctccccacccagcatgccacattagcctctggttggacccctgcagttctttggccaaacacctcaagccgttctctgcagctcgactccaagctctgcccttgcctggccccaagtggtggaaggatgtggggaggaaacttacaggggcagggacgtttgaaggacatgtaatccttggagcagaacagcgga

SEQ ID NO: 4162 - DNA, 435 bp, Homo sapiens
  I.4162 (AA400434)
tttttgcaatgtaaatttaccttttattaggttattataattttaatgaggaagggtattctttagattatacttttgctaattaattctatcttttgaaagatttgaatcatttttattacaaaaaatagtttgaaaaatctagcaatgtgcttgtgtcataatgacgtctaggcgaccagtagctgagaggtatttacacatggatgaggaaacaatgaaagttacttttcctaacattatatattaattcaatcaaaatatttcaatcacccattggccaaggtctggatatgggggtgataaagcagagaaagtagcagctgagagttgtcagccaacactcacagcagctgtggaatgggcttattgcttggaaaggagatccaggcagattgagaggtggggtctcagttttcctgattatcagatatc

SEQ ID NO: 4163 - DNA, 451 bp, Homo sapiens
  I.4163 (AA400348)
ttcggcacaggcatccatacacttttgtgtcaaaggagggttttagagaattacttttggtcaaaggtgctcctgaaaaagctattcctttgctacctagactgattcctgtgctaaaggcagctctggtccattcggatgatgaagtgtttgaaagaggattgaatgctctagttcagctaagtgtcgttgttggtccttctctaaacgaccatctgaagcatctgcttacaagcctttccaagagattaatggacaagaaattcaaagagccaatcaccagcgcattacaaaagctagagcaacatggtggaagtgggagccttagcatcatcaaatctaaaattccaacatactgctccatatgctgttgaagaagggagccaacaaaaattgttttttctacctgttgacgtgtcaagcactaactgtgggtactcatttattttat

SEQ ID NO: 4164 - DNA, 484 bp, Homo sapiens
  I.4164 (AA400253)
ctctcgctcctccctttctagttaccattctgacatgcgcagtgcgccgtccctagaggcgggttaacggccgcggacctggcagttctcaggcttctccaagggagaagccccttgccagggtctcgatttcccgccaaccaacaaaggttcatttgcctcttatggcctgcgcgggagggttgccatgttttttagattaagtactgcacgactactcgcttctgaaactgtcataagaaactgcctcagctccctgcagggtggacacacaagagcagaatctccgtgggacatctctttggagcatcaatattactacagtatttggaagacacaaatttaaataatttctaaggtaaagaatggaacatttaagacaaggctggaaagtcatctgcctttaataactcatctgtgcctcacatgtcagactttctccaagaaaaaaactaaggagaacttatttccattcttataagta

SEQ ID NO: 4165 - DNA, 514 bp, Homo sapiens
  I.4165 (AA400243)
aacttatatatcttaaagcccaatataaccctcttgtaacaagtggggaatatgatatgctaccttgttttaacctgaattgagtctcccttagctgagagagccagacaaactccattttggctccttcacttgcagctccttgcccacccaattcctcaaggacttaacttgtgcaagctgactcccagcacatcagagtgcaattaactgataaggtcctgtggcaagttatgcccacagttcccaggaattcgctcgggtgatagtatcctaagcccctgcatttgtatccagtagatagcacccaaagcccttgcacccatcaccttgtgatggatttaaagcccctgcacctggaaccatttgttttcctgtaaccatttgtctaacttttttttgcctgttttacttctataagattgctatagctaggctccccttcccctctctaaaccaaagtataaaagaaaatctagccccttcttcagggctgagagaattttgagcgcta

SEQ ID NO: 4166 - DNA, 398 bp, Homo sapiens
  I.4166 (AA401557)
cgccgcccacactgcagccaccagcgctccagccaacgccgctgccggtcctcccccgctcaccccgggtctgggccacaaggagtcagccctggctcccaccgcagcccctgctctgcccccagccttagccgccgaccaggcccggcccatccccggctccagctcccaccgtggctgagcctcgccgcctgtgtccgcgcccgcacccgcgctgcgccatcaagacccgcacgcgcaggaacaagggttcccgtgcagcccgggggcgacccgtaaggatggcttgcatggagatggtcctcgcgaacgagctacagctaccgtgcctgacagcagtggtggagggggtggtggcagcggggcctctcagactggggcagctaacacccgcgctg

SEQ ID NO: 4167 - DNA, 424 bp, Homo sapiens
  I.4167 (AA400189)
ttttttcttatagaacttattttaataactttccattagtaactgttcttttttgttgatgaataactttgattcagtgtctattcatcttaacctagtaaataatgaatggtggctgtgatttacaaaagaataaaataaatgagtacccacagttagtgcttgacacgtcaacaggtagaaaaaacaatttttgttggctcccttcttcaacagcatatggagcagtatgttggaattttagatttgatgatgctaaggctcccacttccaccatgttgctctagcttttgtaatgcgctggtgattggctctttgaatttcttgtccattaatctcttggaaaggcttgtaagcagatgcttcagatggtcgtttagagaaggaccaacaacgacacttagctgaactagagcattcaatc

SEQ ID NO: 4168 - DNA, 287 bp, Homo sapiens
  I.4168 (AA400154)
tttctttatgtaaatcagaaatgaactttaattatagtaagtattcaagaaagtagagttgtacagtgaatgtttcagggaattctctccaaattgtctgagtcatgacccaagcatatctttctgcagaatccgtatagaagggtgcatatattcgcactttgactcttctatccatgagtatcagccttaaatagatgatgttctgcatcagcatttccccaaagctggcaaaactcagcttccagtgaaatcatcttgtcttgtaacatctccagttttgtaag

SEQ ID NO: 4169 - DNA, 438 bp, Homo sapiens
  I.4169 (AA401589)
ctggtgtcagtatggaagatcttacacatttatttaatactcaaatgtatgaagatgtttgtttgtagcataacaacagcacagtagccttgacttagtttcctttggttagtactgtacctatttttgccatggccagtgctccccatccctatgaagacattttatttatgtcactctgtaacctgaaatgaataggaacaagggttttaaaccatgttacattaacttatgtctgacattataaattagcctagaatattacaggaacatgattgttatataatttatatcagaacctttctataaatatgtgcttattacatttgagatgcttccaatgtacttcatttgctgtttgtaattccaaaaaggatatgcaatccagtctgtctatttcatggatattctaatagtgagatcttccatgttgaaggt

SEQ ID NO: 4170 - DNA, 467 bp, Homo sapiens
  I.4170 (AA401542)
ttttgacttgatatgatttattatttttactacttataagaatggaaataagttctccttagtttttttcttggagaaagtctgacatgtgaggcacagatgagttattaaaggcagatgactttccagccttgtcttaaatgttccattctttaccttagaaattatttaaatttgtgtcttccaaatactgtagtaatattgatgctccaaagagatgtcccacggagattctgctcttgtgtgtccaccctgcaggagctgaggcagtttcttatgacagtttcagaagcgagtagtcgtgcagtacttaatctaaaaaacatggcaaccctcccgcgcaggccataagaggcaaatgaacctttgttggttggcgggaaatcgagaccctggcaagggggcttctcccttggagaactccgagaactgccaggtccgcggccgttaacccgcctctagggacg

SEQ ID NO: 4171 - DNA, 541 bp, Homo sapiens
  I.4171 (AA401541)
tttactaattcaggagttctttattagccagcgatcgagagacggctagcgctcaaaattctctcagccctgaagaaggggctagattttcttttatactttggtttagagaggggaaggggagcctagctatagcaatcttatagaagtaaaacaggcaaaaaaaagttagacaaatggttacaggaaaacaaatggttccaggtgcaggggctttaaatccatcacaaggtgatgggtgcaagggctttgggtgctatctactggatacaaatgcaggggcttaggatactatcacccgagcgaattcctgggaactgtgggcataacttgccacaggaccttatcagttaattgcactctgatgtgctgggagtcagcttgcacaagttaagtccttgaggaattgggtgggcaaggagctgcaagtgaaggagccaaaatggagtttgtctggctctctcagctaagggagactcaattcaggttaaaacaaggtagcatatcatattccccacttgttacaagagggttatattgg

SEQ ID NO: 4172 - DNA, 285 bp, Homo sapiens
  I.4172 (AA400144)
ttttttttttctggattggttattttattggcatggaggggaaggtggagggtgttgagccgactacactcagttggaatgggtggcctgcaagtcgtagtgctccagcttggccaccagagagccggacagcttgatggtggcacccagggtggctcgcccaggtggttggtggatgtgctcagccaggcagagacgttgcgtggcaggcggcgatggcgtggctggtggtggcagtaacacttgcagggacaggagttaagcacctggaagggcagccagtgg

SEQ ID NO: 4173 - DNA, 495 bp, Homo sapiens
  I.4173 (AA400083)
cagcaatgtgtgtcctgacaagtccacgcgcgaccccagtgctggctagggttgcaaagccactgctctacggagcgagcgagatccatcatagtgggacaagcgagaggatgaggccatacagaccagggagagaggctccttacactgacattcaaagtcctcaatgacccggccccagcctacctctgcagccttatctccctacaaaccatcaaagcagaacaaaaacctgtccctccgatttaggttttagcaaaccacaagaagcacttcataaactggtgactcaagtagaaaagtactgttccacgcacttgacaccaatccacccatttcacctgcatgatcaccctgcctttgcatgagttgccggtgtggacagagcagggacacagtgagacagcggattccagctttgctcttacctagaacacactgcctctcaccaggaatcgtccttccattttatgcagttatcccagacaatgatgc

SEQ ID NO: 4174 - DNA, 204 bp, Homo sapiens
  I.4174 (AA400076)
tttttttttgcaagacaagcattattttaatataaatgttctgagacataccaataaggttggcaggtatatacatatactgatgcaaatgtaatttcactggacaagtaggcaaacatctaagcagtttatcccaaccccctccagcagagcacaaccaagtttcaaaatttcaattttaaaattaaaaagataaggttaaat

SEQ ID NO: 4175 - DNA, 390 bp, Homo sapiens
  I.4175 (AA401372)
tttgacagataacttgcctttattatgaagtacacctttggacttgtggggtttttttcccaaagcttgtgcatcattgtctgggataactgcataaaatggaaggacgattcctggtgagaggcagtgtgttctaggtaagagcaaagctggaatccgctgtctcactgtgtccctgctctgtccacaccggcaactcatgcaaaggcagggtgatcatgcaggtgaaatgggtggattggtgtcaagtgcgtggaacagtacttttctacttgagtcaccagtttatgaagtgcttcttgtggtttgctaaaacctaaatcggagggacaggtttttgttctgctttgatggtttgtagggagataaggctgcagaggtaggctgggg

SEQ ID NO: 4176 - DNA, 435 bp, Homo sapiens
  I.4176 (AA284248)
ggtgaaatcactaagactcttgttccagggaagagaagaaacaaaaaactgaaggaataaaaagtttaagccacaaagcattaataggaacacttggacctgtacaagagatatgctgaggggcatggggaaggaattccttccttctcaagctgtaggtgtcaggctttggcgatgaaaatgacagtggattttctactccttcagcaaactttctggaaaccccatcacctgccacgtgtgtgtggaggtgctgtgtgggtatacaaaggcgaattaagatgtgatcctgggtcagggacagtggctgccacctgtaatcccagcactttggaagaccaaggtggaaggctcacttgagccagaagtttgagaccaacctgagaaacagagtgagatccccatctttacaaaaaaaaaaaaaaaaaaagatgc

SEQ ID NO: 4177 - DNA, 397 bp, Homo sapiens
  I.4177 (AA659421)
tttttttttttttttgagacgtagtctttctctgtcacctaggttgaagtgcagtggtgcaatcttggctcactgcaacctccacctcccaggttgaagcgattctcctgcctcagcctcctgagtagctgggattacaggcatgcaccatcacacctgactttgtatttttagtagagacggggtttcgccatgttgccaggctggtctcaaactcctgagctcagccaatctgcccgccttggcctcccaaaatgctgggattacaggcgtgacactagtgcctggcctggtctttcagtaccatatacaagcctgcaataaatctgtttagacataatgtcatagaagtgagtgtatctgtgggacaaatccctagaattgctgggtcaaaggg

SEQ ID NO: 4178 - DNA, 353 bp, Homo sapiens
  I.4178 (AA648821)
tttttttttcaaagttgagcattaaaatatacttagaactctatagttggaaaaaagaaatggttaaatgtggaagccacttatttaatatgttcttttaagagagaaacaaggttttataaaaagcatgagaaatatataaatttaagcaaatcacttatgatctaaagatagcacaagtgaaggcctcacttctaggatgttgcaagcaaggtaccaatgctgccagacccaagaagagttttagcaggaaaggttacacttggtttgatttttaaagccaaagcaagaattatgagtcttaaaccaaatatactaacttgggccatggggcagagtaacttggataaaga

SEQ ID NO: 4179 - DNA, 313 bp, Homo sapiens
  I.4179 (AA631679)
ttttttgtgattttaacagtggaggtttaatacacagaattactagtttataacatgtttgaggaaatagaaattgccttgtaagaagtaaagacaacttttaagaatactgtaagagcagacttaataagtagccactaactctagggctgttcccatactggggctgagattcaggtctggttgaagaggggacagatgtcactggcagatgctgaagttgccggataccatgcttctggaacttattctccctctggcattctgaaccttggaatttgctgcagaagccacgtgaaggggttgagaaagc

SEQ ID NO: 4180 - DNA, 430 bp, Homo sapiens
  I.4180 (AA634538)
tttacagttgacttacttaaagtgatgtttaatgctgtttcatgtattcagagttgtacaaccatcacaatcaatttcagagcatcttcataagcgcccccaaaagaaaccctgtactcattagcagtgaatctccatttcctcgcaatcctcctcccagtcctaggcaagtactcatctactttctctctctcaaacagatttgcctattctggacatttcatataaacgaaatcatacaacgtgaaaccttttgtaattggcttctttaacttaacacgtcttcaagatgcacttaccttgtagatgtttaactacttctgtctgtgtatttgtttgtttgtttggttgtttgtttggaaacagggtttgctctgtcgcccaggctggagtgcagtggcaagtcatagctcactccagacttgaatac

SEQ ID NO: 4181 - DNA, 310 bp, Homo sapiens
  I.4181 (AA634482)
ttttttttacatgacgagatgggcttttattaacctctttgttagtttcatcaatcgagaagagaggggagggtatgcaaaataaaaatgttagaaaatgggccacactttacaaattgagattatgtctccagttaaatgagttcccctattgctgtgtaattcacaagaaattctccaagagggagttaccaattcaacacatatttacccatgacttccacggtggctcttctgtaaggaaatgcttgaacccaaagagagaacatgcagatcataatcagttcatatttataatcttgggctggag

SEQ ID NO: 4182 - DNA, 428 bp, Homo sapiens
  I.4182 (AA634479)
ttttttataagtgaaaaataatagtattttattttccattcttgagttatttcacttaaaataatggcctcatatcccttgccctgaaattaacagccagcaggggtgtcctcagtatcaaaacaagtcgaccacacaaagccgtcaaagactccaggaacccaggtccatggggtgcagcccttgtccgcgggcaggtgaggcggcggagttctcccaaaagccggtgaactggcgctctggctggagagcgcggagggcggcacgacaatggacagcgtctgggacctcaggccagttccacagcagcctaggaaagcaggcggctcctgtgctggaggaggcgtgatgctctggagggaaaccgagctgagcagcgagaggtggggtgaggctgagacccgcccgatttaggcaaagatgaggtg

SEQ ID NO: 4183 - DNA, 337 bp, Homo sapiens
  I.4183 (AA634463)
tttgaaggtctactctttattgcccttgtacacaaaggaagggggtgtttggttccaggtagtgagagaggagcaccccttcaaggctggtcgaggaggcatgtcccaaaggaagagttcaaggcggtttccagagaggaaggaacagccagggccttgcctcaacatgggaacggatttgggcctccacttgtaggactccagaaacagaaagggctgtttgacggagctggggacgcccctctgctgcagtggaaatgaggacacagctttggaagaccgtagaggccccgaagtgtccatggtggggggggcctacaggggatctcaccacagg

SEQ ID NO: 4184 - DNA, 386 bp, Homo sapiens
  I.4184 (AA634446)
tttgtggtttaagattgttttaatttttgcattttacattccttttggcacttttgaagaagggacattgtcttttatgttgtttggggaaagtggtaagcctcccccgtctctagctttaaatgtttggctttatgaaatccacaactctcccccagaatcttccatcattaaataatgcgagtggaaatttgccttcataagctggccattccaaccgtcttagaggctggtatccccagcttcggatttaggctgtttggtcactgccgtcaccggctctggtggtccctctcggcagaaaagtacaactggatttttgcgggcccacatggccacgtcccctgccactccgctggccgggttggaagaggacatcctgttgc

SEQ ID NO: 4185 - DNA, 454 bp, Homo sapiens
  I.4185 (AA634365)
tttttggcttacaaacaatagatatttattctcacagttctggaggctgggaagtctaggatcaagtcactagcagatttggtgtctggtgaggacccatttcctggttcatagatggccaccttcttcctgtgttctcgcataatgaaagcgacaagggagctctccagggtctcttttataagggcactaatcacattcattaggatacaaccctcttgacctaatcatcccctcgaagtcccacctcctaataaccctcacactgagggttagaattttaacatttgaattcggtgggtcggaggaaacaaacattcaggctatagcattccacccctggccacagcaaattcatgtccttctcacatgcaaaatatattaattacatcctaacagcccccaaaatcttaactcattccatagtatgatcttaaggtcaactctatagtct

SEQ ID NO: 4186 - DNA, 425 bp, Homo sapiens
  I.4186 (AA634285)
ttttttttttcctggccacagatacagttttattagaaagttcaaaccaacagcgacaatagccacagtaactgtgagcttctccccaggtgcctggggccaaggaatttctctcgctggaagactgaagctatctgaccccgtgaggtatgagctgggacgagacggtggtcgtggggcaaaggcagcttcggcagcagtgcttacatttcacttttttcttagtttcctctgggagagtgggaaagaaagcaagtcttcgactttagaaggcaaatcttggtttaggtggtgccccaatcagaaagccacgcttgccaatggcctctggccatcactccacttctctctccatggaagctacggctccatgaagctgtgataagatgagatagagaggccctggatagagccatacctgaagc

SEQ ID NO: 4187 - DNA, 405 bp, Homo sapiens
  I.4187 (AA630938)
ttttctccaaaatgctaatggcagaacttctgctactctgtactgtaccgcacctctgggtacatccagctgtgaccacaccacaactgtatcgcatccagcaacctaaagtactcttgtggttgctcatgtaaatacttggaaaatatctgcctcttccggactctcccttcacattatagaaatgctcaagtctcaaaaacaaaacaagaaacttccagagaacctattcacttcaaattacggagatcccctctctccttgattccccataaaccttccgggaaaaggttggcctacaggccttaaagaatcaccacggattttcctcccctatacaagcaaagcttttcagacaaaaatcttaacagtagaaatgtacccacataaacaagctggccctca

SEQ ID NO: 4188 - DNA, 435 bp, Homo sapiens
  I.4188 (AA629334)
ttttatgtatagaatatgtttatttggaaaacatctgttgtcagtgggagacaaacttagtatatttctgataaaggtttatattgaaaaatcccacaaaactgttacaaagtttttctaaagcatttcgtacaagcctagtatttgatcattagtcacaacttgaattttaagcaaatactacttaactctgcattatgtctgattgtccttaacaagttgtaaataggtttctatatatttttcaaatgactttaagttttagttacatataaattgttaagtattaaatttatcatattaaatcaaggaaatgcataaatacaattattaaaaaatgctttcaaactaactttttgatttgggtcttttgaaataagtcactaatgctaagctataaaaactaaaaagaagtaagactacctttcaaaaatt

SEQ ID NO: 4189 - DNA, 391 bp, Homo sapiens
  I.4189 (AA629306)
tttttagtttttattatggttattattgtaagcatcagactcagtcgtgggatcacctcctccaggaagccttccctgattgccccaggttcaagctgtcttctgggcttccctagtgctgtccgtgacttctttggatcatgtctggcccaagatgggggttctgaaagaacatgccctcaggtgttggactcttccctctcttccagatgtacaggtggatcatctgaatctccttgccatcctcttcccttcagatatcaacagtgatggtgtcctggatgagcaggagctggaggcactcttcaccaaggaggtgagcatcttggaagcctcgggcacctggagggacgcccaaatcagccacttgtttcctcctgcagtcccctta

SEQ ID NO: 4190 - DNA, 302 bp, Homo sapiens
  I.4190 (AA629062)
ttttaatcagtaaggtgatttatttgtgatactatcagtgaactcatcaatattgactaagcagcttgagaaccaagcttagaaaacaggcagaaactaaatgaggcataatagagtcaagatcatgccacagagataaactgcttagaaagctactacttgtgtcatgtcactggactcttgatatcactttattgttctccaccacttgtggtcactcactgatagactgctgcaactttgacagctgtagccacttcatataactctgaatttggttccttcacacattctctccagat

SEQ ID NO: 4191 - DNA, 535 bp, Homo sapiens
  I.4191 (AA629051)
ttttttagcgacttaaaacaaaacacatttattctcttacagttctagaggtcagaaattcaaaattagtttcactgggctaaaatcagtgtgttggcagggcacacttcctccagaggttctaagggaaaacagtttccttgccttttccagcttccaaagctacgttcgttgcatttttggccttctcttccacctccaaagccagcagtgtagcatcttgctgcagtagtcacattgcctccttctcctgtgtccaatctctctctctggcccccactcataaggacacttgggattgcatttagggggtccacccagataatctaggataatcccctcatctcaagatccttaatttaattacatgtgcaaagtccattatgtcatataatattcacaggttacaggggttataaaggggtatattttgggggccactatttagcttaccaccaaggaagcaagctccaaaagtttggaagaaacacagttcagatccctggtccacatgaaagaagtgtcagattaggag

SEQ ID NO: 4192 - DNA, 428 bp, Homo sapiens
  I.4192 (AA629049)
ttttttttttttccccggactagtttttatggatactttagaaaactgctgcatcaaatagttctatccatgtcgttgcagtttcaaattttccctccatccaaagggtttgaggtatctgagaaattaaagcatgggttaaaaactgagatatctggtttaaaaaataaaaatcagagatgattcgaagggcaaagacggaaggaagtcatttctccctcccccagcatagcagatacgggagggcacaggctcctgcccccacatcagaactctgccatgctcaggcccccagagtggaaactggcggagaaaaaggaaagttttaccaactgctctttgggatcagaagaggctcattccaagggcgaccagagaggagaagggagagcagcatgcactgagcgccacagggcatctgccatggg

SEQ ID NO: 4193 - DNA, 505 bp, Homo sapiens
  I.4193 (AA628986)
tttacaaccctgggaagtaatttcatatcattttcttcattaatagataaaagctaaatgaagcacagtgagtgaacatgattagcttacttgtggaaaacaaatgtcagacacatggccaaagcttacaggtcctgagtttccagattgttgcataaaccactgagtcacaatgattctatacctggtgtgatttaagtgaaactgcaggtgaaggttgaaatcattcctgagagtctcccacaatggcatttctaatattaacctgtcatttcattctgcattcctcagtcctctccatactctgaaactatatttaagatagacttttgggtgggaggttatgagagagtgaatgagaagctagggaaattcttgtttatcctggtatcctatttattccttctttctagccatagtcacagcaaatgttgaccattttttaatctgagttttttgttgaaatgtgtcatctaataaataggaaactggcagtaagggagca

SEQ ID NO: 4194 - DNA, 440 bp, Homo sapiens
  I.4194 (AA430093)
cgagtcagtcaccctttggccggacagcggttcccgggcgcggaggatggaaacctggcggtaacctctgcaggtcgtgccactcggtgtgcgcaaggtctccagaggcatcttttcatttttagggggcacttgccacgaattcatttgagctacacagcagtcctgggcagtggggagtggtgagctccattgtgtacacttggaagcagcccagaaagcttctagcacggtgctttgtgcacagtaaacactccagcggctgttgaccaatgaatgaatgaagattgtaggctcaaatattcaagttatcaaagtgcaaagaatgagaggttgtttgcactggacttaaaaaataaatagcctggacctgtactgtcttatacaacagctatgagctactggtatgtggctagtccaaactgaaatgccctttaaga

SEQ ID NO: 4195 - DNA, 369 bp, Homo sapiens
  I.4195 (AA429664)
tttgaagaagggtggtcattgtatatttgaaggacactgagttgtggggaggggctctcaggcccaaggatggaggcagaaagccaggccaagcagggtcaagggcatgccacaggctctcaggagcgggcccagcccagtgagcagcagcagcagtgcgtcctggaggctaagttgtcctgagactgtacccatttgcaggagtagagcctcctgctgtccaggaccttcaccggccccctgactctggcccctggtgagaagtttgcgctgtggcagagtgtgacctgcgggcctatggagcaggtcaaaggtgaggaagctgaccagaagcagcagcagggctggagccagtggtggaaaagactg

SEQ ID NO: 4196 - DNA, 403 bp, Homo sapiens
  I.4196 (AA429804)
ttttagtttaggagatgtaaactctaagctttaatcaagtattgattgcatgctatcagataatatacaaacaatcaagaaatgatgccacagcaaattcagcatatgaatcaaatgtacacattaattaaagcagcacaagcgaagatggctgaataggaacagctcaggtctgtagctcacagcatgatcgacaccgaagacaggtgatttctgcatttccaactgaggtacctggttcatctcattgggactggttggacagtgggtgcagcccaaggacggcgagccaaagcagggcggggtatcacctcaaccaggaagcacaaggggtcagtggattttcctttcctagccaagggaagctgtgacagactgtactgggaaaattgggacactccca

SEQ ID NO: 4197 - DNA, 372 bp, Homo sapiens
  I.4197 (AA428646)
tttttttcatttctaaattattttttatttttttatttttactgaaccagcaacccagtaaggaatgatctggaagaaacgcttggccaggtgttgtggcgcgcgcctgtagtcccagctactttggaggctgaggcaagaggatcgctgttcgaggctactgtaagctatgattgtgccactgcactccagcatggggaatagagtgagacctagtctcaaaaaaaaaacaacaaaaaaaaaaacaggagagaaaaagaaaagctgttttatcttcccttaccttcccagaatctataccttgaaaaaaggaactgttaaaaaaaaaaaagccagtgtgtttaggttttgacagcagtgcatgcaagcttc

SEQ ID NO: 4198 - DNA, 217 bp, Homo sapiens
  I.4198 (AA429634)
ttttattttcaaagcacaattttattagacaggcataatttacattttgcttttctagtgggtttgaaaatgtttattggagattgggctatgtagtttataatttttaattcataaaaaagtaatcatacatgagaaggtagacctgtgccctaggatcatgtcacatatacagataatgccatttccttgtgtgtgtgatgtgtgttttgatgac

SEQ ID NO: 4199 - DNA, 390 bp, Homo sapiens
  I.4199 (AA429633)
tatatttccaacaaaagaagcactgtaatacaaaaaagattattaaatatttttagttagtgcttttcatgagaggttgccaaagaaaaatatacactttaaaaatgctggcactttagtgatttttttacaaagtattttgtgtaaggttacttcagcagtagagataggactaaaatcctgtatattatcacaattgatctccatgcattcaattgacagtcacaatggaagcaattatattcaaattatgaagaaaatacataccaaacttctataattacttaaccttgaggctagcctagagatatttaaaacaaaaaatctgttaggctgttattaacatatagaaagataaattctaactagcttaaataaacccagtctttt

SEQ ID NO: 4200 - DNA, 436 bp, Homo sapiens
  I.4200 (AA429630)
ccccggcgacatgcgtggagctggcgctgcctctcctgaagccgagggctaacttgagtgaagaggtctataggctttttcacttttggttatctgctcaggcgctccttggggtcgcgcatggtctcggacagggtttgcaaggacttcggagctaaccagtttggagccataaccctttcgtacttgccaaaaaactctgggcaagactcttgaattttgagccgcagtattctcgttcataaggtgagaataaaaacatcacctagggttgatgtgaagagagatgaaatcattgtgaaataggagagttattgctttcaaccaatgacattttctggaaacgtgctggagatatggctgcagcagtgacgcctgcaaacgacgttcctgtcatcatgatgctgacattttaattgggaagcagattgaaacg

SEQ ID NO: 4201 - DNA, 476 bp, Homo sapiens
  I.4201 (AA429606)
ttttttgaaaaatatgacaagttttttttaatgttaaggaaaattctgtaagagagtttttttgttgttgtttttgggttttccccccaccctccaaaagatgagttttgcagcattttctcccagcagcacactggtagctctgacatcctgtatataatgtgttctggcaatgaagccctcaagtaccgcagctgtcatattctccagcacaggacccccagaaagaagtcctgcaggccccatggcatcttggtcttttccacaccctctagcagcacccaatccttgggcatcttgcaatagcggctgaagtccagaacttgaacttcactgagaaaatcaagtccactcaaaatgcagcattttcatcttttggttgggtgattcttggtcccccatggataggaatgatacctgttagatgtaaaattgtaatagccactttcctcaaggacttcttcaatcacagtctg

SEQ ID NO: 4202 - DNA, 587 bp, Homo sapiens
  I.4202 (AA428548)
ggttgcttagactgcggcccacgtggaaggctcttagcaccctgcctggcccgaggagaaaaacaagcaaatcctagtgctgggcctggatggagcaggaaaaaccagtgtcctgcactctctagcttcaaacagagtccagcacagtgtggcacccacccaaggtttccatgcagtttgcatcaacactgaagacagccagatggagttcctggagattggtggcagtaaaccttttcggtcctactgggaaatgtacctatccaagggattgctgctgatctttgtggtggattcagcagatcacagccgattacctgaagccaagaaataccttcatcagctaattgcagcaaacccagtacttcctctggttgtgtttgcaaacaaacaggatcttgaagcagcctatcacattacagatatccatgaagctttggcattatctgaagtgggaaatgacaggaagatgttcttgtttggaacctacctgactaagaatggctcagagataccctccaccatgcaagatgccaaagacttgattgcacagctggctgcagatgtgcagtgaccaggactcagcc

SEQ ID NO: 4203 - DNA, 376 bp, Homo sapiens
  I.4203 (AA429462)
tttttttttttcaggccttgaaattttatttacatgtctctaacacacacacatacacttcctattttttaatacaaaaagtacatagtagccccccgtatctgcgggtggtatgtttcaagacccccagtggttgcctgaaaccaagatggtaccaaactctaaaaaaaaaagaacaactttaacaatataccgtaataaaagttatgtgaatgtgatctttcaaattttttttgttttttttgagacagacttttgctctgtcgcccaggctggagtgcagtagcgtgatctcgacctactgcaacctccaccttccaggctcaagctaacctcccaccccagctgggactacaggcacatgccaccacatttg

SEQ ID NO: 4204 - DNA, 427 bp, Homo sapiens
  I.4204 (AA430713)
gtcagcgaagagtggtgctgatggctggtgctttggctctgttattgtttgtaccaaggttgatacagctactcgactagcctatgactgactggtggtggtaattaaactttgtacagattactgtgtgcagatagttactgtcttaatattaagtttcccagagattttacttttgagatagctgagaattaacgactcttggaatttataaaaatttagttgataccatttagttgctgccagctgcctgtgttcttatacataggagacatcggagtgagtgctttttaaaaaattaatggcgtatgtcaggtatatgtaaaaggacaattgcataatgaactcatgttaacatgatcaatccatggccaatcttgatttatctaaatgccattcatctttgaacccctatttattttgaagc

SEQ ID NO: 4205 - DNA, 469 bp, Homo sapiens
  I.4205 (AA427522)
tttttttctaacaacagaattgtggttttatttaacagtccttatcttttagacatacatattgaaatatttacaaatgaaatgatttgctatctgggatttgcttcaaaataaataggggttcaaagatgaatggcatttagataaatcaagattggccatggattgatcatgttaacatgagttcattatgcaattgtccttttacatatacctgacatacgccattaattttttaaaaagcactcactccgatgtctcctatgtataagaacacaggcagctggcagcaactaaatggtatcaactaaatttttataaattccaagagtcgttaattctcagctatctcaaaagtaaaatctctgggaaacttaatattaagacagtaactatctgcacacagtaatctgtacaaagtttaattaccaccaccagtcagtcataggctagtcgagtagctgtatca

SEQ ID NO: 4206 - DNA, 486 bp, Homo sapiens
  I.4206 (AA429425)
ggctcacccctaaggaatctcatgttgcctgcagtaaaaataaaaatggactgctacaatgacatactgagagagttttaaatcatgctttacaaactgacattctgagctctgagacagcagaaaatgtatcaccagagcaagggaggaggcaaatgttctgaacaataattgaaatggttgtgattttatttggagttggcacagatccaagtgaccaaaggagttcaaggcccaaaatttagttatgctggattaattctgagagtaacaagcacatagattataatctaagaaaaccctttgtagctatgcatgtcgggagagcatctaacactaatggtgatgtttcccatgcagagactcagattacagtgactcttccagtgaagacagatgaaagccattgggcattgtacctttgttaatcaagctaaactaaccaaggatataggggtgtgtatgtgtctgtgtgtgtgtgtttgt

SEQ ID NO: 4207 - DNA, 247 bp, Homo sapiens
  I.4207 (AA429380)
tatttattaatttttagaagcctttaaactgtgttagaatctttttgaaaaatgttgattttgcatcataaagtttcaatttatcaaggatatcttttcagttacacttttagaaagagtgaataaaaagggcagtgagttatgctcttggacttggtgaaagctatcatctctccatattgtatttgttcagctggtttaattcactcaggtggatgattgcacatacattggaattggctggaga

SEQ ID NO: 4208 - DNA, 463 bp, Homo sapiens
  I.4208 (AA428368)
tttttggacatttcaggcctccactggcagttgctttcactgtacaaatgtaaagtgtggaaaagggtaaggacctagaaaaagttatacaaaaaatatgtgccattgtcaggtgcaaaacctggcgactactctgaaccaaattaagtataatatccttcaaaataaatgagaatatataaataagctaaaatagaatccacacaggcttcatagaaactttgaaagcattacacattggtaaggccccaggataggaagaaaataacctaacatgttcaaaagggcaaggaaaaacctccctacactgggaagtttgttactaaataaacttttctaaaatggaagcacaataatgatcagctcttggaatttttattgcttaaaggcacgtctagtatacacgaaatactcttttaacattgctggtcttttggaaacattcttagttttaaaacttgaa

SEQ ID NO: 4209 - DNA, 393 bp, Homo sapiens
  I.4209 (AA428313)
ttttttcctttataattccatttaatcttcaaatttaataaatatatttatagattagtaataaaaatgactaaatgaatactaacaacacacttgatattactttttttagaaagccctaccatcaaccctcaaattgtacacgatcattaaacttctctgtgtagtctctccagccaattccaatgtatgtgcaatcatccacctgagtgaattaaaccagctgaacaaatacaatatggagagatgatagctttcaccaagtccaagagcataactcactgccctttttattcactctttctaaaagtgtaactgaaaagatatccttgataaattgaaactttatgatgcaaaatcaacatttttcaaaaagattctaacacagtttaa

SEQ ID NO: 4210 - DNA, 424 bp, Homo sapiens
  I.4210 (AA428116)
cgcggcttaggtggcggcgcgaaggatgcacccggcaggcttggcggcggcggctgcggggacgcccggctgccctcgaagcggaggatccctgtgtcccagccggcatggcgacccccaccagcttttcgatgacacaagttcagcccagagccggggtatggggcccagccgacctggtggcctgagttatctgcagcctctcccacgccccatgcagccttcctggctgacccggtgtccaacatggccatgctatgggagcagcctggcgccagggaaggagctggtggataagaacatcgaccgcttcatccccatcaccaagctcaagtattactttgctgtggacaccatgtatgtgggcagaaagctgggcctgctgttcttgccctacctacaccaggactgggaagtgcagtac

SEQ ID NO: 4211 - DNA, 444 bp, Homo sapiens
  I.4211 (AA427969)
gcaagctttttgtcctgagaagactctttaatgtatatttggctatctgttgtattttatattctcagtgtaaaatatcaataaatgtttatatttataaaatctagttgttgttattgtgcaacttgacattcaacataaaagttacttaaaaccttatactgatagctaaaatctacaggtgtaggtgctcaagtagaatactagaatccggatacagatatatattgtgtaactttatgtatattatacatatatgctatatatgtgtatatttttatatacaataaatgtatagttatatattgatgccttgaactgagaaattgaaaatctaaaaatgaaagcatgagccatcatatctggcctgaaagttttattttcatgcttggggcatggtgtatagaaccagctactaagaatgtttattagcattagagattg

SEQ ID NO: 4212 - DNA, 392 bp, Homo sapiens
  I.4212 (AA427886)
ttttaatcttattgcttttaccgaggcaaagtctgttttgttgtttttgctgctgttttttgagacagggtctcgctcttctgctcagcctggagtgcagtggcccatcaaagctccctgcaacctcagcctctttgactcaagggatcctcctgcctcagccttctgagtaattgagactataggtgtgcaccaccatgccagtgatccccctgcctcagtctcctaaagtgctgggattataagcgggaccaccacacccagccaaggaatcccatatgcaacagagttatttaatttactctttgtatattgcttaaagcattaaatgatagctaaaaatcgaagtgtttggcctatcttctattcagctgggacacatgctgtgagat

SEQ ID NO: 4213 - DNA, 420 bp, Homo sapiens
  I.4213 (AA427754)
cacatgcacacatgtttaattgtagcactatttacaatatcaaagacttggaaccaacccaaatgcccatcagtgatagactggatacagaaaatgtggtacatatacacgatggagtactatacagccataataaagaatgagttcatgtcatttgcagggacatggatgaagctggaaaccctcattcttggcaaactaacgcaggaacagaaaaccaaacaccacatgttctcactcttaagtgggagccgaacaatgagaacacagggaggggaatatcacacaccagggcctgttgggggtggtgggcaaggggagggatagcattaggacaattacgtacgcaagtggggcttaaaacctagatgatgggatgatggatgcagcaaaccaccatggcacgtgtatacctacgta

SEQ ID NO: 4214 - DNA, 445 bp, Homo sapiens
  I.4214 (AA427753)
tgcaatagatgcttcctgagaaaccactctaaattcaatggcctacgacaacaaataatttcttcttttaaaaattatttattattttattttttgcatcttttttattattataactttaagttctgggatacatgtgcagactgtgcaggtttgttacgtaggtatacacgtgccatggtggtttgctgcatccatcatcccatcatctaggttttaagccccacttgcgtacgtaattgtcctaatgctatccctccccttgcccaccacccccaacaggccctggtgtgtgatattcccctccctgtgttctcattgttcggctcccacttaagagtgagaacatgtggtgtttggttttctgttcctgcgttagtttgccaagaatgagggtttccagcttcatccatgtccctgcaaatgacatgaactcattctttat

SEQ ID NO: 4215 - DNA, 498 bp, Homo sapiens
  I.4215 (AA429278)
cacagttgatgcaacattgcttttattgggggttaggaacatatgacaaagtcacataaaatgtcaacaaagtcacactttgtgcttggctgctctttaaaaaaaaaaaaaaaccctgtttatttatgaactcactcaatgagaactatgtgagatgtggccaacaattatcatgcttaaaacaggacggccagagccatgaggagattgaagtctgacaatgctagctagctaagtggaaatttaccattgtcaaatatcagatacttccacacatttagatgtttgtccataagtagacccagcttagctgactcctttgagaaagaattgtgtctcaaacctctgttattcagctggccatattattaatcattactaaatgccagccacatgcaacggggatggaaaagaagaatgagatttgctcagttttagctttctgtggctgaagtatttttgagtcagttacatggatacatgaggattatagtagga

SEQ ID NO: 4216 - DNA, 337 bp, Homo sapiens
  I.4216 (AA429197)
aaaacagtcttgctctgtcacccaggctggagtgcagtggcgcgatctcggctcactgtaatccccgcctcccaggttcaagtgattctcctgcctcagcctcccaagcagctgggactacacgcgcccaccaccacacccagccaatttttgtatttttagtagagacgaagtttcaccatgtcggccaggctggtctcctgacctcaggtgatccacccgcctcggcctcccaaagtgctgggattacaggcatgagccactgtgatcggcccagactctaatcccagttacttgggaggccgaggcaggagaatcccttgaacccaggaggcgg

SEQ ID NO: 4217 - DNA, 472 bp, Homo sapiens
  I.4217 (AA429181)
atcatgttactaaaaaatcagtgtaaagtctgtttaaaataaaaaagaatgttttctatgtctgtatatcttttgtgaatatttattaggatttcttattaaaaaagtgcaatattaataattgtacattgtcatccagaaacaaaactatttgggggactttattaactaacttcctgcagttgtgttcctgtaaactcagtagtgattattatatttttcctatttttaatagaacctggtgtttaactctggatccattcactgtacaggatgtgttgtaaaaactaacatgggatgctgaggcagtaagagggaattcatttgtggcataatagttatgcatggaatgataaagacagacaaattccatactactactaatgtggttaattatttctagttcgatagtgattgaaaatcagtggtcactatttacatttcctaaagagcaagcatcctccagctccat

SEQ ID NO: 4218 - DNA, 342 bp, Homo sapiens
  I.4218 (AA429020)
cttttttttttgagacggagtctcgttctgttgcccaggctggagtggcgcaatctctgctcactgcagcctccgcctcctgggttcaagggattctcctgcctcggcctcccaagtaactgggattagagtctgggccgatcacagtggctcatgcctgtaatcccagcactttgggaggccgaggcgggtggatcacctgaggtcaggagaccagcctggccgacatggtgaaacttcgtctctactaaaaatacaaaaattggctgggtgtggtggtgggcgcgtgtagtcccagctgcttgggaggctgaggcaggagaatcacttgaacctgggagg

SEQ ID NO: 4219 - DNA, 430 bp, Homo sapiens
  I.4219 (AA428992)
ttaaataaataagctgtattatctgtacaaaaaatacaaatacagttttgtgttttagaggagaaagtgcctccttccacattagccagcagccttcattgtcttgtggtgctgctgagttgcaattcacagaacaaacattaaatgtacattcatttcatgcaacgagcattctgcttcccacccaaacctaggttctgccagctcactgagacccactgccaactgctccaacccaacatggagctggaggatgcttgctctttaggaaatgtaaatagtgaccactgattttcaatcactatcgaactagaaataattaaccacattagtagtagtatggaatttgtctgtctttatcattccatgcataactattatgccacaaatgaattccctcttactgcctcagcatcccatgttagttttt

SEQ ID NO: 4220 - DNA, 339 bp, Homo sapiens
  I.4220 (AA428694)
gccttgcaaaataggtattattatccccattttacaggcaagaaaactgaggtttaagtaacttgccgaagtgccatatacagggctcacattcagtattgcagttgcaaagctcatgatctatagtgccaagttgcaatattgtagtcaatgtcacaattattacccctttttatattccttgatatttttccatggcaaacaattagctatttcatttaataatcacctaaaacttttcagtcttctgattaaaattacgctggagtgatagaatgtattttcatgatagaaattgggaaaaaaaatggggaatgaagtttatcagcatttcagact

SEQ ID NO: 4221 - DNA, 414 bp, Homo sapiens
  I.4221 (AA425808)
aatttataaaggaaagaggtttaattggcacacagttcttcaggctgtacaggaagcatgatactggcacatgctcagcttctggggaggcttcaagaaacttacagtcatggtggaaaacgaaggggaagccagcacatcttacatggccagaggaggaggaagggtggagggaggcactacatacttttaaacagacagatttcatgataactcactcactcactgtcttgaccaagggagatggtgctaaatcattcatgagaaactgcccccatgatccaatcacctcccaccagcctccacctccaacattggggattacaatttgacacgagatttgggtgaggacacagatccacaccatattagaggccatgggtaaaaatgctctgaatgatttagaaaactaaa

SEQ ID NO: 4222 - DNA, 441 bp, Homo sapiens
  I.4222 (AA426234)
cggcacgagggcgcggggtccgtatggcgcggcacggaggggcgtactggcgacccggagtgatgagcccgcccgagacgatgccgccgtggagacagctgaggaagcaaaggagcctgctgaagctgacatcactgagctctgccgggacatgttcgtccaaaatggccacttacctgactggggaactgacggccaccagtgaagactataagctcctggaaaatatgaataaactcaccagcttgaagtatcttgaaatgaaagatattgctataaacattagtaggaacttaaaggacttaaaccagaaatatgctggactgcagccttatctggatcagatcaatgtcattgaagagcaggtagcagctcttgagcaggcagcttacaagttggatgcatattcaaaaaaactggaagccaagtacaagaagctgg

SEQ ID NO: 4223 - DNA, 484 bp, Homo sapiens
  I.4223 (AA426197)
aattaaacttcatctccatttcccataggaagaaactgaggacaggaggggccaaacaagttacagtttcatccctccagagagccaacagagtattttgcacgaagttgaagctaaacaggtattatgtcctatctctggactgaatgactagatgctactcagcttctgaactagaggaagcctgggaccttgaccacactaatgctgatgacagcggatttgcaagtggctagaggtaccagatttagcaaatcaaaatataggacgtcaagttaaatttaagtgtaagataagctacgaataccttttctagtattagtacatcccatgcaatatactagaaatgttattcgttatttatgttaaatttaattttattagggcatcctatattttacctgtcaatccaacccatgacctaggcagacactgtagaaaaacaaaaggagaattaaggagataaatgaaacacagggtgagc

SEQ ID NO: 4224 - DNA, 442 bp, Homo sapiens
  I.4224 (AA425166)
tttatttttttgagatggcgttttgaaacaaaaccaaccgaccgaccaaccaaccaaccaaccaaacaaagcatgtatctgcatgcttgtctgagggactgtggatgagcgggtgggtagagagcttaaccctcttgaacttaaactctcctcttgagcatcagtggtgggagttccagaaaggtactgcagctgggctgaggctagatgaagacaccatcttagtaaaaggctgtggggcatcctgaccagatggggacagtttggggaaatattttgagccaccactcaaagaatggcagcagtcccccgctttgcaggtctctctcctctttgaggtcccatttttctgctacatagtcataagacctatttatgctctggcagccttttgcaaagttctctcttacccaccatctctttggggaggacatgaggtagg

SEQ ID NO: 4225 - DNA, 269 bp, Homo sapiens
  I.4225 (AA425625)
attttataaaatcctttattttatgagtggcaatcgtcacctccctacccaacacataaacacacatacccatctagtctttgttttcatcacatttcccaaactgatcgcatgtcaatgtgactcacatagaaaataaacaagaggggcccatcacatacgccaagttatcaatactcctttcaccatttctgctcaatctagaagactcagcttggaattattttaagattttatgttatttgcaatattatggaaaagtaagttac

SEQ ID NO: 4226 - DNA, 489 bp, Homo sapiens
  I.4226 (AA426080)
aattcggaacgaggttttagctgttcttaggtagctcaggctgaagcgcagtggctgtgagctcggcttactgcaagctccacctcccgggttcacgccattctcctacctcagcctcccgagtagctgggactataggcacccgccaccatgcccggctaatttttgtatctttagtagagacggggtttcactgtgttagctaggatggtcttgatctcctgaccttgtgatccgcccaccttggcctcccaaggtactgcgattacaggcatgagctaccatgcccggccacaagacatagattttctatatgcacatcaagggaggtgctggtttaggttgctataggacagagctatcctgtattccagttggtttttgtagagaaacaattagacttctctagatagagccctgatttttctctcacgctttcagttttttaaaagcactaatgatatttcctgttttctcataagaaaaagt

SEQ ID NO: 4227 - DNA, 454 bp, Homo sapiens
  I.4227 (AA425714)
  misc_feature (95)..(95): n is a, c, g, or t
agtgttgatcagtttactagtatttttccaaacctgaagaatggtgaaagtttgtggtacagtgtggggaaaacagtaagtgtgggccccggggncggccggcgagcccccccgggcttgccggccccccgcaccaagagggggttggagtgtgtggtctctaaggcactgaatttcagtctgttctccatccatcagtggatatgtgagatgcaatgcaggggtgctggcctgtccctggtaatgagcgaggatatgagcaaagcagtgagtacagcctggaattccagctactcaggaggctgaggtacgagaatcacttgaacttgggaggctgaggtttcagtgagctgagatctggccactgcactccagcctgggcgacagagtgagactctgtctcaaaaaaaggattctacgactatgattccaagagtgtaaaattccaagatgt

SEQ ID NO: 4228 - DNA, 462 bp, Homo sapiens
  I.4228 (AA426618)
aaaaattctccttttattctctagttataaacatgtactcactttcaaataaaattctatattagaaggaaaggtctctttgtaaggcatagtattgactttttcttatgagaaaacaggaaatatcattagtgcttttaaaaaactgaaagcgtgagagaaaaatcagggctctatctagagaagtctaattgtttctctacaaaaaccaactggaatacaggatagctctgtcctatagcaacctaaaccagcacctcccttgatgtgcatatagaaaatctatgtcttgtggccgggcatggtagctcatgcctgtaatcgcagtaccttgggaggccaaggtgggcggatcacaaggtcaggagatcaagaccatcctagctaacacagtgaaaccccgtctctactaaagatacaaaaattagccgggcatggtggcgggtgctatagtcccagcta

SEQ ID NO: 4229 - DNA, 445 bp, Homo sapiens
  I.4229 (AA426451)
gagagggagtttcgctcttgttgcccatgctggagtgcaatggccgatcttggcccactgcaacctccatctcctgggttcaagcgatcttcccgcctcagccttccaagtagctgggattacagacgtgtgccatcaggcctggctaattttgtatttttagtagagacagggtttcgccatgttggtcaggatggtctcgaactcctgacctcaactgatccacccgcctcagcctcccaaagtgctaggattacaggtgtgagccactgcacccggccctgcccccagtcttgaccattctactaattttaaagaacatcttggaattttacactcttggaatcatagtcgtagaatcctttttttgagacagagtctcactctgtcgcccaggctggagtgcagtggccagatctcagctcactgaaacctcagcctccca

SEQ ID NO: 4230 - DNA, 473 bp, Homo sapiens
  I.4230 (AA424826)
agggccaaggatttaatttattcatcttcaactctccagtgtctggcatagtgccaggtacatattacatactcacaaacgttctttgaaatgtcagactcctaaccgtatcccacaaagcccctgctcaatagggcccagcctgtctcttcaacctcctcagatgcctttcccttgtcaccacggaccagccacacttcctcaaatgtgccacgctcattcccacctcagggcctttgcctatgctctctccccttggaacattccttccccagttctctgaattggaggcagcttcttagctgttgggtgtcagctcaaacgccaacccctccatgtggaaataacctgtatcttgagctgagtgctggctacatggcatatgccagtggctttcaacagtggcgatttcgctcccagaagatatatggcaatgtctggggacatttttgatggtcacaactgtgtgggga

SEQ ID NO: 4231 - DNA, 156 bp, Homo sapiens
  I.4231 (AA426378)
ttttttttttttgaggttgctatgatttatgttaagaatgaatcttccatctgtgaaattgtcaagtaggaaaaataaatttgtgctagttttgctgttgtgcctcagactgcaaaagttatggccgcagtgcatgatgagtgctgagttaagatg

SEQ ID NO: 4232 - DNA, 420 bp, Homo sapiens
  I.4232 (AA426056)
ttttaagttttgctaagtgaacttttattgaaagtggctttaaacagtttcagtcttctgcaatagttttcagtgacttgtgtgaatgccagaaagtaataagctaatgtttcaagataatagaaatgaggaagatttgttttgtttgagggtttggtgattttttcccctgaggtgtatgaaaaagatgcccttctccacttctttaaggccaaggaagaatcccatattcacggagggtggtcagcctgtgaccactagaaaggcacacagtaacattttctctgggtctttgaaattcttaacagtcagattcgcagtgcagcttgatttcacctctagttggtttttttttcttttaagaattttgctattcttaaaagcagaatttaagcagaatggcaaaggtgctgaccggga

SEQ ID NO: 4233 - DNA, 429 bp, Homo sapiens
  I.4233 (AA426030)
tttttcaattgattcaatatttattgatgcccagctacccatcttctcacaatcttggaaggggtatgttggacaataggcaaggaacataccctttgccttttagcaaaaggaaccgatgacaaaagttagaactgcgtggccttttctgggtctgaaattctccaagagggagagtgtttggctctatgtttgtgcccctgcagaatctagtacagtgctatgtgccatgcccagcttaaattcttactgctagtgaatgagggccccctaggactcagatcctcatagctccagctccgtttgcccagattaatgttttccagacccaaccagctgcagtcttctatcccctattaaaactaaaggaagcacaaattaatagaaatatcaaaccattggcttttgaaggtgggtagaaaacagcac

SEQ ID NO: 4234 - DNA, 556 bp, Homo sapiens
  I.4234 (AA426021)
  misc_feature (64)..(64): n is a, c, g, or t
  misc_feature (66)..(66): n is a, c, g, or t
  misc_feature (67)..(67): n is a, c, g, or t
ttttcgccatgcccatcagggtttattgtttctgtaacagcggccaccgcctggggcgtgcgtngnntgcagctggagatctctcagcaccttgggttgggggcggggctgggcgggacatgggatggaggcggtgctgctggcagacagggtggaccttggggcctgcaggcaggagatgagttcggcggccacagtggcccccagcagcagcagcagcagcgggaggttcagcgggcgcgctcaccgcaccaggtggaaggtgagccagtacatgagcataggctgcgcgccgccaccgccatggtcaggtacatgcgcactggttccgggccccacgcaccgggaccccctcagctgctgcgtctgccaagatcttcagccgcagcgtccggatcatgaacacaaagatggctacgcagcaccagcccagcaccaggtagtagccaatcttcccgaagagcaggcccatgaggaccccgccaatcatcccgacatatttgtagcccaagaaggccaccaggtcgatggtggtgaggtcggtgttgacagtgac

SEQ ID NO: 4235 - DNA, 262 bp, Homo sapiens
  I.4235 (AA425653)
ttttttagtttttatagttttatttcaggtaaaagtgcatttcttaaaaaaatgtttcaatatccagtttccattggcaagtgataacagttaaccctcaatgattcatgaaaagttttactgtgaatcaaacatagaattctgccccccctcaacagtcataaagaaccagaaatagtaactgtaagtgtgcctacttcaaacactgtataaagcagtggtcccctaaccttttttcaacagggaccggtttcgtggagac

SEQ ID NO: 4236 - DNA, 387 bp, Homo sapiens
  I.4236 (AA425698)
aatgttcattttacctttgttgattaaaaatcccaatacccccaatacactgttttacaaatatttttaacattcaaaatccaaatagagatgctgttattatgttagcattatctttgtacagttgtccgttggtattctcagggagactgattccaagatcctcacaggcaaatgtggatgctcaagctcctgatggaaaatggcatatttacatataacctacacacttctactcgtgtattttaaatcatctttagattacttataatacctaatacaatgaaaatgctatgtaaatagttgttatattgtattttaaaatgtgtattatttttattgttgtgttattattcttcagtgggtttactttttgaatgttttgga

SEQ ID NO: 4237 - DNA, 412 bp, Homo sapiens
  I.4237 (AA425415)
atcgcctgaggcagaagttttccagcctgggcgacagagcaagactccgtctcaaaaacaaccctaaaaccaaaaaacaaatctgtagcttgtccattgattcacacctgggattataggcataagctactgcacccatctcagaatttgtctatgtttacaatattatcaatgggtagacagctaattgcacagaatataaatgaggagaggtagatttttattaatgtgtacattttccttaattcctgatttactcaggcccaggcttctttgtttctggtcttggatctatgggcctgtgtaaatctttgtcacttagctaaaaggatttcttgaaaatccttgtagttgtttattgagcatttactgtgtactaggcactattgtaggtactagggatacagcagtg

SEQ ID NO: 4238 - DNA, 500 bp, Homo sapiens
  I.4238 (AA425310)
tttctttttcactgctgtatccctagtacctacaatagtgcctagtacacagtaaatgctcaataaacaactacaaggattttcaagaaatccttttagctaagtgacaaagatttacacaggcccatagatccaagaccagaaacaaagaagcctgggcctgagtaaatcaggaattaaggaaaatgtacacattaataaaaatctacctctcctcatttatattctgtgcaattagctgtctacccattgataatattgtaaacatagacaaattctgagatgggtgcagtagcttatgcctataatcccagcccaaagctagttttagaaagtattttgaggattcccacttctgtaatattttttcctttaaatctctgttcaaatattaagttggcagagatcaaggagggctgatctgctacctttctatttaaccagagatttacaaattgaaggagttgagtgacctgtatatgtatctggagtaagagtgt

SEQ ID NO: 4239 - DNA, 495 bp, Homo sapiens
  I.4239 (AA425208)
gagtttgtcaatcccttttatggaggaaggttttgctcatgcatggcatgttagtcaatttagttatttgcttctagctggcagaatgtggtcttgattacttaatttctgttacccctgtgttttccagaatggcttctcctgattttacttacgtgttttactattgctcaaattacagatactaggaaacactactactttataagtacacttctttttcctacttaaactctcaaactacagttacgtatttgccatgatgttaagggaccttgatggtctgtgaattatcagttgctttctgcactacctcctgtagatagacctgactgatagcacttacaaaaagactgatagatgccaaatcagtcatttattaaccctccaaaaattggtgtcccgatcatttggtaaacgctaagagagcttagttttacattcacaaagtatttgtatttgataagtcttaaaaatgatttaagttgaagccta

SEQ ID NO: 4240 - DNA, 448 bp, Homo sapiens
  I.4240 (AA424103)
attcggcaccaaggtgggcagggtggaagacagcatgaagaggtgggaacccaagagaatgcaggcccccctgaaatacagtgctgtgatggagtggacttcagagggccgattatacacatctcttcccaaagctcttttcggtgtcctcatcttggtatcaccagatgctgagcctatggaattaaaatagaggtctcctaaaaaagaagaagaatcagactggcatcagatgatccagaaaaaatggagggagaagacaacagagcaagaccgtcaaagttatgaaaggactactatatccagtcaaactgtcaattaaataagaaaacaaaaataacctattttgagacatgtgaaaactgcagaggtttcctctcatgcagccctttccataaatttttttgaggatatactccagtaaaataaagaggaagatgtagattgt

SEQ ID NO: 4241 - DNA, 450 bp, Homo sapiens
  I.4241 (AA424046)
tttttgggagaaatctctcaattgatttatgactcttacttcttcataagagaaaagtgttggacatttgtgataaaaattaaactgatttacaattttaaaagtgccagagtgtgttacacaaagcattaaccaccatctaagatgctaccaggattctatgtttaggctataattcttactatgcctccattatgaaaattcaaaaagcattttaaaggctcttagaagtctcacctatggagtttggtttaactcaagttaaaaaatagagatatgctattcattctttaatatttattgtctgttacctaaataccagacactatacaagattccttgatacagcatagtcaccttttatggagcttaccttctaatgggtgaggccaagaataagcaagttaagaaatacattttaaataaacttacaggaaataaatatagatt

SEQ ID NO: 4242 - DNA, 244 bp, Homo sapiens
  I.4242 (AA424010)
gttttatagtttatgaagtatttaatctgagctgatttgtagttaaaagaataatttttgtaaaatttcatcatgcacacaaaattatttttagatataattccacaatttgtgtattgttacattttatttagttaaaacattccattagcttctatgggagaaccatatataggcttacttttctttagttattgttcccttaactttttataagtaacaaaagtaaattttatttattgag

SEQ ID NO: 4243 - DNA, 344 bp, Homo sapiens
  I.4243 (AA424009)
tgaaaaatgcttacaatttcatgttgtctaaccacaaaaatgttaccaatatgagacaaagcattaatcacatagaactaagcatttgacaatgtatatacacttcaaaatgttgttttataaaatatatacattttgtcaagttaaaaatatatttttagacactatagaaggataacaatgttccaaatactgtctgtttcttttataaaacttagcagtatcctatcgtacagtttttcagctgttttgccagtcataaccataggaacgttgatgttcaacagcatgttctgaaccagcacagggcatgggagaagccaatgacttcagggcttttattt

SEQ ID NO: 4244 - DNA, 468 bp, Homo sapiens
  I.4244 (AA423904)
gacaaacatggctaaaaacaaaacatcaaatcctgcccccgtgaagagttccctgtcacctcaagtttgaggatagtcctctaagagtgacctaagcataagtgaaagacatctcccctcacccttctagccccctacaaggtgccaggttggggtaaagagttggagatgatggccaggagtggctccaacacgctggtgagaggcctgattaggttttggggaagatctgagagctctggcctcttcgtgagtggaacataaagccgcctcttgttgggagatcctaccccagtgacagaggaatcccccaaactaggctgtgcctggctccgtggcggctccagacccgggtagtgcctttgtcccctgaatactcactcccccggtccagagggccttcccactgcccagcctggagaaggctcccctgacctgctctctcagtatcctggagagctggccaga

SEQ ID NO: 4245 - DNA, 400 bp, Homo sapiens
  I.4245 (AA423883)
ttttggagatggagtctcactctgtcacccaggctggagtgcaatggcgtgatctaggctcactgcaacctccgcctcccaggttcgagcaatcctcctgcctcagcctcccaagtagctgggactacaggcacacgccgccacgcctggctagtgtttgctcttaaatacacaaaatgcactgaaccagcaaaaacaaagtcccaggtctgaggagctctgaggatgatgcctgtgatggcctctgcagcatcgtccaggatactgagagagcaggtcaggggaggccttctccaggctgggcagtgggaaggcctctggaccgggggagtgagtattcaggggacaaaggcactacccgggtctggagccgccacggagccagggcacagcctagttt

SEQ ID NO: 4246 - DNA, 445 bp, Homo sapiens
  I.4246 (AA421020)
tttgagtcaggttcttgctttgttgaccaggcgggagtagagtggcatggtcatagctccctgcagcctcgagcaatcctcctgcctcagcctcccaagtagctgggacgacaggcatgtgccatcatgccctcattaaatttttttttgtagagacagaatcttgctatgttgcccaggctggtcttgaattcctggcctcaagcaatctttctgcttcagcctcccgaagtgttgagattacatgtgtgagccgctgcccttggcatggagcattttttaaaaagcaggatcctgcaatgatattctctgcctctcatttatctggcctcagagcgatggcagagggagaggcagggctcttgtgcggggaggtcctgtgtcttctcactgctgagccttgttgaagaaatagatggaggtcaggatggtgaacaaggccatg

SEQ ID NO: 4247 - DNA, 484 bp, Homo sapiens
  I.4247 (AA418930)
ggtatagtctgtggttcctgggccataaacttgtgcagcatgtcactgtactgaatactataactgtagacaattataacacagtggtaaattttcgtgtatctaaacatagaaaagatacagttaaaatatgatataaaagattagaaaataggccaggcatggtggtgtgcacctgtaattccaggtactcaggctgaggtgggaggatcacttgagatcaggagttctaggctgtagtgtgctatgagcacatctatgaataggcactgcgttccagcctgggcaacatagtgaggccccatctcttaaaagggcacacgtgtataggacagctccattataatcttatgggaccactgtaatatgtgtaatccattgttgactggaacatccttatgcagcacatgactgtgtacataacttaaaatttatcatttaaaccatttttaagtgtacaattcggtggtataaagtacattta

SEQ ID NO: 4248 - DNA, 209 bp, Homo sapiens
  I.4248 (AA418944)
tactttgaattctattttattttgggaccttttggttctgttccaagatcttggggttttatcatttaaaagtgaaaagttaactttgtaattgaaatgtcttgcagcttttgcttatacatattccacaattgagtatattattattgttgaggagcttaaagggagcagcctttacttaaaaaatataattgagttagactagacca

SEQ ID NO: 4249 - DNA, 450 bp, Homo sapiens
  I.4249 (AA418841)
ttttttttttttttttttacataattccatttatacgaggtacctggagtacacaaattcatagagtcaaaaagtagaacaatggttaccaagggctatgggcatgaggtgatattgtttaatgggcagagcttgtttaggatgatgaaaaagttagggagatggatagaggtgatagttacacaataatgtaaatgtactttataccaccgaattgtacacttaaaaatggtttaaatgataaattttaagttatgtacacagtcatgtgctgcataaggatgttccagtcaacaatggattacacatattacagtggtcccataagattataatggagctgtcctatacacgtgtgcccttttaagagatggggcctcactatgttgcccaggctggaacgcagtgcctattcatagatgtgctcatagcacactacagcctagaact

SEQ ID NO: 4250 - DNA, 277 bp, Homo sapiens
  I.4250 (AA418819)
tttttttttattgttgttggaagtcttttaataaccctattttactttatttacatgtaagtaggataaatgtacagtcatgtcctggtatctgcaggagattggttccacaacccctgtggacaccagcatctgcagatgttcatgtcgcttttataaaatgatgcagtacttggatttaacctatgcacatcatcccaattactttaaatcatctctagattacttttaatgcctaattcaatgtaaatattgtgtaaatagttgttatactgtg

SEQ ID NO: 4251 - DNA, 488 bp, Homo sapiens
  I.4251 (AA418756)
aaaaacccaagaaggtcacgaagaccagttggaacttcagtagagagagtctgagtaaaacaaaagaataggattcagatattgaatactatatctagggtgtcattgtttcagatttcaacatttttaaatgctttgatactgctttttccctttcttgcacattcactattgttaagtattaggaatgaggagctgctgtgacattcaaggcctgggagagtgagcattagattataatttgaaatcaaagcctggtccttgcaccccttagatgtatgaccctgggcaacgtgggtataagaatagtacatttctcatagtgtcatgtgatttaatgagataatggatagagagtgtttagcaccatgcctggtacactctaagcactcaataagtggtattcactatttttataaagttgaagtttgacccatacgaagagaccaaaacatggatgctggggtaaaagtggaggagtaggatgc

SEQ ID NO: 4252 - DNA, 475 bp, Homo sapiens
  I.4252 (AA418695)
taaagatgctgcaacttaagtccctagaagcatttacctatacctgtctcttaagagcaaagatataaggtcaattctagttgtaactcagaaaaatctgtcacagatcagacagcttgacagtcatgagtgctctctctcctggcatcctactcctccacttttaccccagcatccatgttttggtctcttcgtatgggtcaaacttcaactttataaaaatagtgaataccacttattgagtgcttagagtgtaccaggcatggtgctaaacactctctatccattatctcattaaatcacatgacactatgagaaatgtactattcttatacccacgttgcccagggtcatacatctaaggggtgcaaggaccaggctttgatttcaaattataatctaatgctcactctcccaggccttgaatgtcacagcagctcctcattcctaatacttaacaatagtgaatgtgcag

SEQ ID NO: 4253 - DNA, 329 bp, Homo sapiens
  I.4253 (AA418588)
ttatcttctttttcctcaagaagtcattgagggctgttgtatccctataaaaggagaatttagagtagccaaataaaagggggctgaagtagtctcattacggaaaaagagagtgtgagcagccttttagtaattgattgcctcaagatgtggtattcagccagggtgaagggaaagtagttggggctgtggatctggaggtttacagaagcctttacccatcctgagactcagttctgctgttggtcttcagagaagtgtctgcacctgctgagaagaaatcacaccactgcactctagcctgggcaacagagcgagactctgtctca

SEQ ID NO: 4254 - DNA, 580 bp, Homo sapiens
  I.4254 (AA418628)
attcggcacgcggagaagaacttgataaaagactcaaataaatgttagaaagagcccgtaattttaggactcctataaaattcttccttgtttgttaatgctattaaaactcagattcaagggaaataccagcttccacttgagtcactttgaaatagttaattcaacagcaccatgttagaaatatattggcagccaagactctgaactctgcagaaacatttgtttcacccagacttcaaactctagccctgactatgatgcccctgtgtgcatttacaataaagactccaacggagggagcctgttggtgttaaattgtttacatttctttatacaaataatgtgctttcagtgccttagttacagctccctttctgtttcttgttccaaggattctgtagtatgtagtgtgtttcttaggtaaagtctctttttgctactgaaagggaaatggtctctaaacactggtcactgtagcaggtaaacactactctaacgtggagaaatgagcttcatgctgaggtagtggttgccttagagctgttatttatgctgtagaaaacgaaaatggttttgc

SEQ ID NO: 4255 - DNA, 581 bp, Homo sapiens
  I.4255 (AA418622)
aaaaattttatcttttagtggtaagaaactgatctgatttattttcttctccaatgagttgactcattggatgattaagtgaagtatagacatagcaatatgtgctttaattttacaaagtcattttaccatatcacagagaattggcctccatgttaggtaacaatatttgttcatagtgttgtttatagtttcacttacagttgatcatagattaaaagctgatatttttcagtatttctatagtactggcaattttatcagttggcaatattaaattgtactgacacagtattcctagataggacgtgtaaagctggctggtgtaatgaagagaggcgctgaccttggagttagaagactaggtttctgcatcataatctgccactaaatagctttgggcatgtatctctttgtcatgctgtgacatattgtctgactgtgacaacatctgtgactctggttagaccttgacaactgatccaagaaaatctgaccaacatacctggttactaatggaaaatatgcttttgctaacaagcagagattttgagtacaataattttgtcagttgtgcattg

SEQ ID NO: 4256 - DNA, 310 bp, Homo sapiens
  I.4256 (AA418572)
ttgttgtttttttttgagacagggtcggctctgttgcccaggctagagtgcagtggtgtgatttcttctcagcaggtgcagacactgctctgaagaccaacagcagaactgagtctcaggatggggaaaggcttctgtaaacctccagatccacagccccaactactttcccttcaccctggctgaataccacatcttgaggcaatcaattacgaaaaggctgctcacactctctttttccgtaatgagactacttcagcccccttttatttggctactctaaattctccttttatagggatacaacagc

SEQ ID NO: 4257 - DNA, 271 bp, Homo sapiens
  I.4257 (AA418560)
aactgtttggttgacgcctttattctgggatggatatgacggatggcacaactcacgaatataccatcagagatggagaactaaggccattgggtgagttaggtgtgaaacttgggtgttttgcagatagggatcttgaaagagaatgaattaccgaaggcgagattgtcgggtagaatgggaatttgatgcaggtacaggataacgttagggctatatcgaagcggaagcttgtcaggtagcagggccattttcgtttgtctacagcata

SEQ ID NO: 4258 - DNA, 502 bp, Homo sapiens
  I.4258 (AA418555)
taatggagacgagttcttactaggttgcccaggcaagtctcaaactcctgggttcaagcgactctcccacctcactctcccaaagtgttgggattacgggcgtgaggcactgcacgtggcctaatccacaaactgtctagaagcaaacaaccaaacatatgagaattttgctgagtgtaaaaataaatctctttgtggcatgattctattacagatcactggtatgcctgattaaagtggactacaataaagattacatacaccagactttaaataattgcaatccactgaaataacagcatttactaatctcagcgaatgctcaatttattgagcattacacctgaccaaatgtcttaattcaacctttactcaatcctgaatcatctgtataaattgaaataacagttgtcatacaaactttaagtaattctttcactggtaccagatgataattctgtgacatgccaatagattaacagatgagggaattaatttatta

SEQ ID NO: 4259 - DNA, 657 bp, Homo sapiens
  I.4259 (AA418217)
gctcctaagagatggttctgaagaccagatttggggaagaggtcaaaatactggacagaatctcagcaacatggaacctcaaactaagtgacagtcacagacaactcttccccaaagaaaataagcacagacatggtttgtggtaagcagaattataaagatgaattcccatctccctgtcagattaccagtatggtaaattaccagattacctggttatttattcaaacactaatacagttattgccttgatggaaacatacagatacaattaaaatcccaagtaccaaataaattgaccttaagacaaagactaagtaaatcacatgagccctctacaagcagagagtttttctccagctggtagcagaagccagagatttgaagcataggaagtattcaacacattattgctggcctgaaaatggaaggggccacataacgagggaaaccggtggcctctagaagcagggagcagtcccctgctgacagacagcaagccaagacctcagttctacaattgcaagacactcaattctgctaaggacaaaaatgagcttggaagtgaactctgagcttcaggtgagaacacggccaaacaacaccttgatttcagcttaaacaaagaatgcagccactccatgccagaattctgac

SEQ ID NO: 4260 - DNA, 448 bp, Homo sapiens
  I.4260 (AA418182)
cttttagcagtagagggggcccacgagccctctctcaccagctagcacttttctcaccaccttcctcgaaatacttgggggcagcaagggtgttggcagatgagagtctcccactcaccatggtgagagtggtggggagtacccagggctgacctgactcacaagggaagcagtaactgtagaacctgccagcctccctggtccctgtgcccatatggcttcggctgatgagggctcagactctaggttgccctgaagatcaaggctttgtctcccattctgcccattcctgggtttcttcccaaaatgactactgtggggccagtcatggacaagggccaggacctctagaggctggggtggggaaggactgagctagtgattcttagaggccttctggggcctaagagctgaaatctcagcgcccgggtttccctaaagtttgctg

SEQ ID NO: 4261 - DNA, 493 bp, Homo sapiens
  I.4261 (AA418150)
caatctgaagtttaaaataggagtgagagataaaagaacacacccaactgataggtgttttccatctgaactgtaaggcgagagatatcatcacgctgactgggttcttccatataagacacagtactcatagaattgcataatacagaaggtattcataaaaactcaatttcttttctactgaacaccatattaaaaattcatggagaagaagaggtggtacaaaactcaaattagctttacttctgacatgtgctgggattgctactcctttatagtcagtttcccacctgtaaaaggcattgtatgtgtaatccacagacttccagggtctttgatgcgcccatgaatttcccttcggccaaaattcatgattacttagagaagaaatactccctcttttcttccatgaatgagctgctctgcctttagcattgtctgacatcatcataacctgcagcagggaggcttcgccggagcctcccagacctcc

SEQ ID NO: 4262 - DNA, 483 bp, Homo sapiens
  I.4262 (AA418126)
ggaacagtgtcatgaaatctgggttgaaggagaatacagtatatatgagaacacttaaagttcaaatagaaatcatttctgaagacaaaagcagaggaatattgtcagtgccaagtaatggaagaataagggcggcatttacactgtgcaagtattgagaagagtgcataaagacagggaactactctcatggagacagtttctctcttataatcaagtaactagaaggggaaaaatcatctaagttatgaaatccaacataggcgctatattacaaactgtgccggattatgcaaattgtagttgttactgatcaaagtttaattgcttcatttttgtttaaaaagggatactggtgtcagaaaatctgtaatatgttttattcaaaagatgtaaataatgtatacagacttgtatgtgatgggatgggaaatatttaaattctaggtgtttttttttttttaaagaagaaactcaatgttt

SEQ ID NO: 4263 - DNA, 358 bp, Homo sapiens
  I.4263 (AA418046)
tttttttttttttttttgaagctattaaaacatctatttattagctcaaatttctacaggtcagaattctggcatggagtggctgcattctttgtttaagctgaaatcaaggtgttgtttggccgtgttctcacctgaagctcagagttcacttccaagctcatttttgtccttagcagaattgagtgtcttgcaattgtagaactgaggtcttggcttgctgtctgtcagcaggggactgctccctgcttctagaggccaccggtttccctcgttatgtggccccttccattttcaggccagcaataatgtgttgaatacttcctatgcttcaaatctctggcttctgctaccagct

SEQ ID NO: 4264 - DNA, 449 bp, Homo sapiens
  I.4264 (AA418009)
catacttgaaatgagaaaatattttgaactgaatggcagtgaaaacactacacatcaaaacttagggaaatgtggttagtgtggtacgttgagggaaacttataacctcacacgcttgtttcacaaaacaacagcagacaacagagatttccaactccagcaatgacaggctagggtacctagatgaaccatcacactgaaaacacatgctgcagtaaatactgaatttctccttaagagctgtgggaatctgacaagccaggaaggtagaaacaagggagaagtgagggacccaggggcccaggaaggtcgtgagcgccaagcacccagtgctgctgccccagggcgttggcagtccaggcttacggggctcaggtcctagggggctgaccagcagggtggggcagacaccaggctccagccagcctcaggtgagagtgaagggagca

SEQ ID NO: 4265 - DNA, 489 bp, Homo sapiens
  I.4265 (AA417980)
  misc_feature (1)..(1): n is a, c, g, or t
ntgtctgcagtgccggagtctgggaggctccgggcgactccctgctgcaggttatgatgatgtcagacaatgctaaaggcagagcagctcattcatggaagaaaagagggagtatttcttctctaagtaatcatgaattttggcgaaaggaaattcatgggcgcatcaaagaccctggaagtctgtggattacacatacaatgccttttacaggtgggaaactgactataaaggagtagcaatcccagcacatgtcagaagtaaagctaatttgagttttgtaccacctcttcttctccatgaatttttaatatggtgttcagtagaaaagaaattgagtttttatgaataccttctgtattatgcaattctatgagtactgtgtcttatatggaagaacccagtcagcgtgatgatatctctcgccttacagttcagatggaaaacacctatcagttgggtgtgttcttttatctctcactcctattt

SEQ ID NO: 4266 - DNA, 486 bp, Homo sapiens
  I.4266 (AA417950)
tttcaggattcatggccaaacgtaactatttattcatttttttcttataaacattgagtttcttctttaaaaaaaaaaaaacacctagaatttaaatatttcccatcccatcacatacaagtctgtatacattatttacatcttttgaataaaacatattacagattttctgacatcagtatccctttttaaacaaaaatgaagcaattaaactttgatcagtaacaactacaatttgcataatccggcacagtttgtaatatagcgcctatgttggatttcataacttagatgatttttccccttctagttacttgattataagagagaaactgtctccatgagagtagttccctgtctttatgcactcttctcaatacttgcacagtgtaaatgccgcccttattcttccattacttggcactgacaatattcctctgcttttgtcttcagaaatgatttctatttgaactttaagtgttctca

SEQ ID NO: 4267 - DNA, 232 bp, Homo sapiens
  I.4267 (AA417773)
gttggcagaaaacaggcgattggcacgagaactctcaaagcgggaggaagaaaaactggacaggctgattgctattggtgaggaggccagtgctcagcaagatactgccaatgagctccgcaggatgctgtcatcgcagtcagacgtttggcaacagcagtggaagaggcaactggtgcttttcagctaggccttgaaaaattgcttcagaggttgatttcgaataccaaaa

SEQ ID NO: 4268 - DNA, 414 bp, Homo sapiens
  I.4268 (AA417792)
aagaaagtatagtttattaattcaattaaatacttattccataaaagttataatgtaaatctatattcttgacaaggaaatatattatttatatatatattaattagtgagggaaagcagattatataacaaacgtataatgtgactacattgttgttcagatgataacaaaaaaacaaatgcatacactgaaaataaacttgacaacattcaatctattaataatacttccccaaattccccgagaatagaactccttcttgttctagcaactgccaataaaattgggacctattatctgcagagagaccatggaagacccgagcccaagtggtgattcagactccatacatgtgtatcaacataaatagagtctagaggtttaaaaatcaaaatattaactggatttttttc

SEQ ID NO: 4269 - DNA, 431 bp, Homo sapiens
  I.4269 (AA417737)
ctgttggtccacactgaatcctttctgccacttgcaggccatttactcagcctcagggtgtttttctggaggttgtctcactgattggacctacctagctctttagttagcattagctgaagtcactggtgttgtcctttgaggtgctttgtggagaaaaagcgttgtatggtcaataggttagagaactgtgaatgtgatacctcactttaagagatcaccaatcacacttgcacattcaagtatctgtgaaggtgctcctgaaggtgaacttgtcggcatttagtctaatacttctccaaattctttgagcatggagggagctattttcttgttttatcaactgctaacataccatggaactagtatctgcagagcagattgtgggagacgtgagcttaaatggtgatctagtgctttgttatggattt

SEQ ID NO: 4270 - DNA, 404 bp, Homo sapiens
  I.4270 (AA417742)
gaatttacatatatttaatattttataaaatggccagtattttatattgaagattatcgatataaaccgtaacacacaatggcggctccctggcacttcttatttccttatattgataggagactaagaaccagtaaaatgaaggagagaaagacggtttgacaaaacagtgcttactagtagatatgtcagatacacagcagtggaaatgtaagagattaaggtacaaatacaggttgtgcttatagtcgtctaatgagccacacagggattttaaaaattaagatttcaaactccatgaagcagtcaagttagaccagcaaaggaaagattcaagcaatgaagtcacagtatatatccatacttctgtatcttgtaaaccaatctgccttacctcagccaag

SEQ ID NO: 4271 - DNA, 303 bp, Homo sapiens
  I.4271 (AA419360)
gtacttcgggaatcatagattacaagagctttagatatctatcttttctgaagattgatgttaattgggtccttgaagttctagaagggtggttctttcctgggtgattttgtccccagaagatatttggcaatgtctggagacatttgtacgtgtcatgactgagggaagtggagtgttactatctctactgggtagaagccagcgatgctgctagacatctccccattacaaagagttatctggtccaagatgtcaatagtgcaaaggctgagaacagttttagaggggtctgtgtacaca

SEQ ID NO: 4272 - DNA, 318 bp, Homo sapiens
  I.4272 (AA417111)
cttgctggctgtgtgaccttggccaagttaccaagaaccgttctgagcctcagtttcctcatcaggaaaactgggacaataattccaatttaggagctgttggggagatggcataagacaataggtgtgaatcctggcacacagcagtcgctgaacagaagctgctacaatcacctctccttcacctgcctataatgaacctcgctgggattgagtttgggcccaggacctctctgacctccttatggttgggtcagactttggctgaacacctaccagctctgtgccagggcggcgctggggaagaattaaaggttc

SEQ ID NO: 4273 - DNA, 299 bp, Homo sapiens
  I.4273 (AA417016)
gtagaatagaaagcgaacctttaattcttccccagcgccgcccctggcacagagctggtaggtgttcagccaaagtctgacccaaccataaggaggtcagagaggtcctgggcccaaactcaatcccagcgaggttcattataggcaggtgaaggagaggtgattgtagcagcttctgttcagcgactgctgtgtgccaggattcacacctattgtcttatgccatctccccaacagcgcctaaattggaactattgtcccagttttcctgatgaggaaactgaggctcagaacggttc

SEQ ID NO: 4274 - DNA, 371 bp, Homo sapiens
  I.4274 (AA626334)
tttatactttaagcaggtactgtttatttttcataattactccccattcaaactggagaaaatgagcaaaaaaaaaaaaatatttgggctcccctcctggtacaagtcattgtaactaggtgtgtggacatcataaattattttctcaatcacgtgagatcacattcaaacaacatgttttttccttcagaaaaaaatggagtccctgttccaatgcctacacattttccatccatcttcagaggtgacaaaaaccagagagaaagaacatcctacacacagtcctgaaggatcgcttctatgtaagataggaatatcttcactaggtatgtatctagagcaattctgatacaagtataccagaataaatg

SEQ ID NO: 4275 - DNA, 335 bp, Homo sapiens
  I.4275 (AA626313)
tttgaaacattgaaatttatttttttccatatgaaaatccattattttctgtgcatcctgaggcacaaataaaaaggtgtatcttttataattttgttgaaatttgaaaatactatctttggggttttctaatttcttgcgcaattgtttttccaaaagttaagtgggaaaaagggatttaaggagggagggagagagaaaaggagggagggagagaaggagagatggattttgcttttcttctttgatcagcagaaaaaaatgtgactgctagcaacagcttttaggagaggggaacaggaatctagatgtgcagaagccaggagggcatatgt

SEQ ID NO: 4276 - DNA, 245 bp, Homo sapiens
  I.4276 (AA626266)
atttattttctcagagcaaactgtaatgaaggcagggaatagggcctttacacttcagaagggcacaggctagctcctggagaggagtggagatctgggtccaggcacccctcggccccaccacttttcctcaaggcacagaaaaagccaaactcgaaatacgtcttgagtctacacgagtgtacatctccttgcctacaactccgtgagatcatcattgaagtacagaagtattgcaggtgtgt

SEQ ID NO: 4277 - DNA, 476 bp, Homo sapiens
  I.4277 (AA626187)
tttaaccagctcccctagtgcttttattatgtaggtcgctttacaaaaaaaaagtaaatgtacaaaaaaacttttcaagatgatatttgctacataaagcaaagcacacattaacatgcctctgaaccattatctgggctgcagaaacagactgcaaggctggtcagctgggcagaacctccatgggaccagggagcacaggtcacctacatagccggcactggccaccaaggatttcaaagagcagggtgagaacaggagacccaggctaacaggaagtcagtgataggaatgctacaaagaagggggctcctggcaagttactttttcggggctgtgattttctttcctgccaagaaggaggtatgggcccctctctctttcccaagtcagtgggcacacgtttccctggccccattacctgactccctgagccggcaccctaggaagggagctggctcacactggcccaaact

SEQ ID NO: 4278 - DNA, 483 bp, Homo sapiens
  I.4278 (AA626163)
tttggttcaagtttgacttttatgctctgttattctcacttcaaagatgatgagactgaaactcaaagaaagaagacctgccttgggttacatatcagtttagtgatggaactctaggccagcgcttttactgatagtgatcttcactctctgctcctctttgactggggaggagccttgtgcttagctgtactattctacatcttgatacatagacttttcattttgtgggagagtagcagcaagtccttggaagctgttcattttgcagttagctaaggtagaggggctggtaatgttcagtttttctgtaccattctcctgatatgttggctcaagataccagaatctatcttggaatgttgtgtattacccattagttaccaatcttagagagactttcacactggggcaaacttcaaaaaaaaaaaagagaacgcttatacagaaagcaatttacttggccagtaatgtttagtattc

SEQ ID NO: 4279 - DNA, 431 bp, Homo sapiens
  I.4279 (AA625887)
tttagctgagcatctttattggactcaaaaacaatttcataaacaagtaaatgagaacttcacattttctgaaccttgaaggttttttcctcaatttcattcttttaaaaataccttttaaattaattcagcaaggttcttaaacacagcaaattgacaaatatcaactgagtgtctgttctgtgcaaatcactctgtaacagcttgctggctttacattctcgagggctccctgcctccagagcaccctggttttcggccctgcacgcatcttttctctgcaccttggctggttggagcagtttcagtagacaggtcctgattgacccaacatttcagagaacatgcacagagcatagtcctccttctaaatcagggattctcaaatttcagtgagcagaactcccctgggtgcttgtttacacgtagat

SEQ ID NO: 4280 - DNA, 469 bp, Homo sapiens
  I.4280 (AA625846)
ttttatcttttatttatttgatttgtaaagaacatgagtaatttaaaagccatataacaaaggagggaaatcccactctaaaacggaacagatttgcatttttacttcaaaagaggagtaaagtttttgtttcatgttccataattaaactagaccttgtcttgattttctgacatcaagtcagcattctctcttagtggctctggacctcagagccagaggatagcattctcagacaacggagacaaggagactactcatgcctagatggcaatgtactaagactaggaagcaaactggatctctccgcatttagtcttcattgcctctctctaatttatggccagtggatcataaagactcacaggaaccttccctgggacttgtctttttttgttgtttttttttgttgttactaatctttactcagctgtatcttgtgcagcatagagatttagagcaatggctt

SEQ ID NO: 4281 - DNA, 329 bp, Homo sapiens
  I.4281 (AA625751)
attatcagttaagcatatcacacacaagcttgttctgtttatactacgttatggagttaatttagtgccgaagagatatgggcatgaccaaaattccaatgaaatgagccagattagctggcagaggggaaaaaaatacaaagataacagttgctggcattaaatctgagtaaataatttatgtgctggattcattatgtaatttgagtcatagacaaccagttgatagtcaatgagtgtgcaaaaacgtttcactcggcattatgtacagatatgaaaaaacccaacggcaggtggctggaaagtggcttctagctcccctatgctgg

SEQ ID NO: 4282 - DNA, 383 bp, Homo sapiens
  I.4282 (AA625552)
tttaacatttttaaaatctttattatttattttaagatatcctatgtttacaatggtcaagaaaagaggagataaaatacgtagttaaatgtatcgtattttttcatctttaagtagaacttacttttcagttgttgggatgtccatcacaaatataagtatgcacctgtatacttacgcattattatacagtaaattaaaatttacatgcagtgaaacacacagctgtatgttgaatatacaagatacatttggatttggataagtgtatacacccacataaccaccacccagacaaaatatattctgtcatctggaaagtttcccagtattccctttcagttaatctttatccccccagaggaaaccactgttctgatttc

SEQ ID NO: 4283 - DNA, 514 bp, Homo sapiens
  I.4283 (AA621370)
tttcttggcttcacaaaacccacaccactacttcatggatggtatagccattaaccctgaggcttctgtcacacaaagcaaatagccattcttctgtgctctcataatgttcaaccattccttttacttagagaattccagaaactgaccttaggagagctaaacatcaaacaaggttgcgagtgtccttccttgggaagaaaaactgaaaaattgattactgcttcgctgcccccaccagaccaccaggtggttcattactcaagagaaccatcacaaccagacatgctgacctgcatcccctacccttcacatgctttgcccagcccagcctgcatacactagtcttgaaatcaattcccatgttttgtctaattaaaaaaaaaaaaaatccctaatggcgtttctttgggagctagccagaggatctttctcaccgttgctgtctcccttgcacttgagcataagccccataataaaagtcttatctggaaaatctgcttggccatgagtt

SEQ ID NO: 4284 - DNA, 318 bp, Homo sapiens
  I.4284 (AA621275)
atttcctcatgctatatctttgtggtcaattcttttccccaacaccattccctagcaaccaatgatgttctccagacctacagttttgccatttttagaaggtctatgaatgtaattttataatttgtatgtaccccttggaggctggcttatttctcttagcacaatgcattttaaattcttccttgttgtgcctatcgatactccattccttttttattgctgagtaatatttcattgaaagatgttccacgatttgtttattcattcaccaatggaagaatgtttgtttccagacatttgagattataaataaag

SEQ ID NO: 4285 - DNA, 414 bp, Homo sapiens
  I.4285 (AA621272)
tttttttttttttttttttttttgtggcagcacctggtccttgttttgaggcaacatcgccttgaatccagaaggaactggggcaacaagactagggataagagacctggcagagtcaggaccagtatctctgaggtcagctgtgcctgagaaatcaaggccaccttctgtgcgcagagcgtggctccagcctggttgtgggtgcaggtgctggtggcaggccaaggggatacccagccctccagcaccaggctctcagggtgttcaggcatgagcatgaatctaagcttggcttctcacttctttgcagtcaaccattgatgagggatgtgtggggatggagaatcacagctgcatcttgggagtggaggggcagcagcgattatctgggtggggcagagaggaagacaaagc

SEQ ID NO: 4286 - DNA, 555 bp, Homo sapiens
  I.4286 (AA621248)
tttcagcagcagttgaaaagggattgagttcttgattttatttttggcttagtcattgttggtgcctactgatttgtgtacattgattttgtagcctgagaccttaccgaatttgtttatgagatctaggagctttttggatgagtctttagggttttctaagcatattatcatatcattgatgaatcgtgacaatctgagttattcttttccacttcagatgctttttatttctttcccttgtttgattgctctggttaggacttccagtattatgttgaatagaagcggtaaaagtgggcatccttgtcttgttccagttctcagggggaatgctttaaactcttcgccattcagcgtaatgttgcctgtgggtttaccttatatggcttttgttattttgaggtaagcccttctatgtgtatttttttgagggttttagaataaagggatgttgaattttatagaatgctttttctgtgtacatgagatgatcaaatgggttttggttttaattccatctataagatgtatcacatctattgaactgcatat

SEQ ID NO: 4287 - DNA, 211 bp, Homo sapiens
  I.4287 (AA621192)
ttttttttttttttcaggagactttacagtttaataaaccattcaacctggagaaagggaggtcgggacttaggtggcggtggactaaggacatgacaggagccataggttgtcagggagctggagcccaaggtacaggatgggaaggctttgctatggatcccagcctttctagggctgggtagtgggaacctcccaaaattggagttcg

SEQ ID NO: 4288 - DNA, 392 bp, Homo sapiens
  I.4288 (AA620762)
tttggctcttttaaacaaattttactctattaaaattggagacaaacatgtctgccatctctcactttggtagtagggagtaaggggtgccgtactcaaccagggttcctaatccacagtttgtggttctcaaattttgcactgatatgccgctagacactgcagcaagctcacagaactgccaaagaatatttaaaaaatttcaaagtggcaacagtggcatctgtcagataccaggtgttgagttgtttggacctaactatgtattaacagaactactagttatttcttttagtttaggggcactgcaaagcattactgagatcccaaaggcatcctgaatgggaaatgtttggcaggctctctggggctcagtgcaccatcaccatgtc

SEQ ID NO: 4289 - DNA, 351 bp, Homo sapiens
  I.4289 (AA620760)
ttttctggcagcataatttattcataacctactactccccaggaagggaagacagatggtttatctatttccaagttggaggttggaaaactaagatcaataggcatgatcccatggcaaacgctgctgtctggctgtgctccaaatcgctctccgcctttgtcctcctcccactcctggaaccacctttgtccagatttcttgtagactaaataaaatcctttttattgacctatcctctgttacttgtagccaaacacattcctttgaatttagttgcagtaaatagagcagcacagataatatctgaaaatacagaatggctgagttgaggtggcagggcagagagca

SEQ ID NO: 4290 - DNA, 312 bp, Homo sapiens
  I.4290 (AA602942)
gctcgacaaaaaaaatcaaacttacctgggaataatgtataaacgaaattttgagaaagtcatgtttttctcatatttactttcccaccataaaactttatctttccatattagaagatgatctaagagtataaatttgaagggtttttttttttcaatgttttatgcttgcactaacatttttttcctgtcacactaaaagcagacttcgttatgctgctcacacgtgaagtttatgtgagatatatggaagtaaatgtgtgtaatgagtgtcaaaacatttaatgtcaagaaaaaaaaaaaaagtcgacg

SEQ ID NO: 4291 - DNA, 347 bp, Homo sapiens
  I.4291 (AA610063)
tttgtctaaaaatgtctttatttcccttcaatactcaattgataattgagcagaatatgaaattataggtgggaatcatttccctcaggattttgacgcctcattctattttcttctagcttctgatgtttttattgagcagtctgaggcaattctgattgctgatcctttgtaaaaatcttcttttttatctctcgggaagcttttaggatcttttctttatccctctagttctgaaatttcacaatgatacataggcctgagtgggaccttttttccttcattgttcttggcgctcaatggacccttttatactggaaattcagattctgcacttctggggaaag

SEQ ID NO: 4292 - DNA, 402 bp, Homo sapiens
  I.4292 (AA609393)
gtgtagtggcatgatctgggctcactgcaacctcctcctcctggattcaagcaattctcttgcttcagcctcccaaagtgctgggattacaagcgtgagcactgcgcccggcctagttgaggagtaaatggactggattaaagttaaaccataaccccaaattcaggttcttactaaacctcttcaaagaaatggcagcatgatgagctttgaaaatgtgaaagaaaagagcagagaaggagggccccatgcacacacacccgaagaagaattgtgtttcgtggtaacacactaccctcaggttcagaccacactcaacctgtttttccatatattcaaggttcttactcaaccactttcccttctgtggggttgtgatcagaagcctcgtactgttcctac

SEQ ID NO: 4293 - DNA, 373 bp, Homo sapiens
  I.4293 (AA609338)
tttcaccgttaaacattttattcacaagtgatttgtgcagtcccaataataaatctcactgttagacacagtcctcacaatgtagcaacttaacacagagttcagaagtgcagttaaagaatataaagagagaaagaatcaaggcaagaataaggaaggagaagaaggagaggacatggagggaggaagaatgtgaggaggcaggggtgggaggctggggctccccagcattcccgcctccctctgctggtccgtggtgagggaggagtgagggcctcctgtggctgacattcttccagggaactctgcacagtcctgctgatatcatcagtttcttttgctgctgccttgaaaagtaaacaaaaaagggctg

SEQ ID NO: 4294 - DNA, 408 bp, Homo sapiens
  I.4294 (AA608840)
tttcagagttggcaatttgtattgtgatgttggattgctactgacacctagtggctaactgctagtgacaaaataaaaccagaaaaaaagggatggagaaccacactttaaaatccagaagactatcaacctattttcagtaaatattgtgctctgaattaggttatcatgagtgacaatagggtttccatccatgctatatcttcattgttagcaatggtaagcactctgtaaaatatgaaataaggctgaaaacatactcctggtatcttctctggaatattcctctgtagcctgtttctggtggaaatccacccattgccttcaacacttctttactgcagtctaagaaactaagttgctgggttcacagaaaaatcccgtagttcttctgagaatcactagagg

SEQ ID NO: 4295 - DNA, 294 bp, Homo sapiens
  I.4295 (AA593379)
taaatttgcggccggtcgacgcactgttcattatacagttcaaaatgtataaaaagtcactgacagtgactaacatgaacaagaactaatactaactgaactcttaccatatgccagatactcttaaaaatgctttgtgtgtattagcttactttatcttagtaactctatgaggtaggatgaccatatgatttattgttcaagccagggagttcaagactagcctgggcaacatattaagactttgtctctacaaaaaaaaaaaaaaaaaaaagccaggtgtggtggcgtgtg

SEQ ID NO: 4296 - DNA, 396 bp, Homo sapiens
  I.4296 (AA526625)
tttttttttttttttttgtggtggagtctcactctgttaccctggctggagtgcagtggcgtgatctctgctcactgctgcctccacctcccaggttcaagcgattctcctgcctcagcctcccgagtagctgggattacaggcacctgccaccaagcctggctaatttttgtatttttaatagagacggggtttcactacgttacccaggctggtctcaaactcctgatctcaagtgatccaccagccttggcctcccaaagtgctgagattacaggcatgagcaccatgcccggccaacaaatgatttttgtaaggttgcaggataccagatatatatataaatataaaatgtatttctaaacattgtcgacgcggccggcaatttagtagtag

SEQ ID NO: 4297 - DNA, 442 bp, Homo sapiens
  I.4297 (AA568796)
gaatggaaaatttttatttcaacagaaagaagttaatttagaaaattagtttaaaatacatttgaaaacttaaagagcaaaaagcatttgtaaacaaacaaaaaataaaccaaaaaaaccctgatgaggttactactaatagtaactgtaggaggcatctacctccctagattggggaaacaagtagtggttgaattatcagaacctagaagcacagaacaggggcccctcagaatgtgttctcagactcctgagggaaggatgctacccagctacagctggttcctcgagagtttggaaaaagtccctttatagaggcaaattattattagtagtagtattgtttaacttcttttacctaaagagctggttcattattgtttacagtttgacagtaatgtaaacatttacatgccttctttgagggagaagatctgttaat

SEQ ID NO: 4298 - DNA, 403 bp, Homo sapiens
  I.4298 (AA558560)
gtcgacaaatgcttagtataatcccaagacatggaacatacttatgtgctcaataagtgacacatatgattcatatatatgtaacagtatctaatttaaaaacataataggccgggcgtggtggcttacgcatgtaatcccagcactttgggagaccgaggcgggtggatcacaaaatcaggagcttgagaccaacctggccaacatgatgaaaccccgtctctactaaaaatacaaaaattagctggacatggtggcgggtgcatgtaatcccagctactcgggaggctgcggcgggagaatcgcttgaacccgggaggcagaggttgcagtgagccgagattgtgccactgcactccactgtgggtgacagagtgagactccgtcttcaaaaaaaaaaaaa

SEQ ID NO: 4299 - DNA, 465 bp, Homo sapiens
  I.4299 (AA557538)
tgtatgtcctgctaataccatcttattttaattgtaataaagttggagacatctgatggtatacattcttgagctctgttctgggatacatgtgcagaatgtacaggtttgttacataggtatacatgtgctgtggtggttcgctccatctatcaacctgtaatctaagttttaagccccacatacatgaggtatttgtctaatgctctccctcctcttcccctccaacccctgacaggcctctgtgtgtgatgttccctccatgtgtccatgtgttctcattgttcaactcccatttatgagtgagaacatgcactgtttggtgttctgttcctgtgttagtttgctgacaatgatggcttctagtttcatccatgtccctgcaaagaacatgaactcatgattttttatggctgcataacattccatggtgtactctaatttgtacatgtacaaattagaaca

SEQ ID NO: 4300 - DNA, 178 bp, Homo sapiens
  I.4300 (AA554195)
aagttcttcccagtttattattagatcatactgttttatctaattatgcttctccattactatcctcttccatatcataactaacagaaaacatacacaggtatgttttatgaaggctcctgtgtcgagtaaaacttactaaataaatttctatgttgaaatttctcttgatagttgg

SEQ ID NO: 4301 - DNA, 420 bp, Homo sapiens
  I.4301 (AA564875)
tcaaggctaatcaactgaagctgagggagtgaaaaaagaacaaagaaatctgtgactgcttgtgatcaattagtaaacttaattttttagattaaaatgaaataatacatgcaaagcccttggcacagtgccttgcacataatacatttcggggttaagttgtgctagctattctgttattgattgtcttgccctttgttctctggaaggttggatcttgccatttggggatggccaatgggaaggctgagcaagacatcagagggtgggaggaaaggaggtatatttattttccttactccttctctgctgggcttctattttgtcactagctgcattcctttttatgaccacaactccagtctaatggccaccctcccataactagagttcataatcaaactaacactgccacctcct

SEQ ID NO: 4302 - DNA, 456 bp, Homo sapiens
  I.4302 (AA568734)
tcttttaaattttattggagcccaaaaagaaaatgacagatttttaagccttcaattaagacctaaaaaatatacacacacattcatttattctaccaaataacaagacagctctaaaaatagagaacatagtatattctacttccaagtcatgcaaacttcagattatttcatagggctcggtatttttacatgtctgaaatacatgtatatttatctattgcagacttacatcaaccataacagcaagggctttgttatgatgctgaaagtctgagtgaaacatctcatcttgtaaccatttagccacacagctagacatttgagtctttagttgctcaatgtatcatcccgtggagtaggtaaattccactttagcaccttcaatccctttacaaccgtaccacctgtgcaatgcttggaaattcccctggttggaaaaggtggaccttgtcc

SEQ ID NO: 4303 - DNA, 407 bp, Homo sapiens
  I.4303 (AA536015)
aaaatttttttttttttttttttcagacggggtctcgctctgtcaccaggcaggagtgcagccgcaatcttggatcattgcaacctctgactccctggttcaagcaattctcctgcctcagcctcccgagcagctgggactacaggcacgtgccaccacgctcggctaatttttgtctttttagtagagacagggtttcaccatgttggccaggatggtctcgatctcctgacctcgtgatcctcctgccttggcctcccaaagtgctgggattacaggcgtgacagccacgcccagccctagaaatgcatttttttaaagaaaattaaaaacctggtaatatttgttacggtgatctgaaataataatgtacaaattacaggtttctgcagtttttcagtcgacgc

SEQ ID NO: 4304 - DNA, 490 bp, Homo sapiens
  I.4304 (AA535276)
tacagtaaaatgttttaatgtaggaagcactaaagtctttgttccaacaaaattaactcagagaacaaattattttacatatgtatacagatcaatcaacaaaagtacacattataacaattgctaaacactgtccataaagaaaacatttcaaatgagaagcgccatcgcggttttctccttctgggtcacccagtggaatgagggccctcgccaggggctcttcccagacgtctcttcacaccaaccggcttccttctgatggccccattttcctttaaaaccagttctcatcaaatagggtgttttatgcaccctggcaaatgatcattttgacaaggattaaaactgtaagctaaacagatgacacaaatgacaattgggaataatttttagtggggacagaggctaaatactaccccctccccttttctacttctaaccaatatcttgagcattcagtgggaccaataaggtcttgcctcgtgcc

SEQ ID NO: 4305 - DNA, 443 bp, Homo sapiens
  I.4305 (AA535107)
tatctttacgtatttaatgtaactgcttgtatacactgccaaaagaaaagctactttccataaacttgagatcatagggaaactggatattatacttttagcttaggcgttaactaatggtacaaagtatgtaaacccctatcacttctaaatggcagttcactgaatgaaaatcagtttacttccaatttttgttttgaggattagaggtttagaaaacatctttaaatattaaacagtcattaaaacaagggaagcaaattaaggttcaaaattaagttactgtggttatccttgggccactagttggtcaagccagttacaaatgtgctcccatttctctagaaccctaggctcctaagtccggaagcctggtaacataaccttaaatttttcacattcctaggcccagggttcagcgggctacatggcacctccgtacc

SEQ ID NO: 4306 - DNA, 289 bp, Homo sapiens
  I.4306 (AA533501)
gcgtcgacaaatgatactcagaagcaattttgtgaagaacagaacactggaatattacacgatgagattctgattcatgaagaaaagcagatagaagtggttgaaaaaatgaattctgagctttctcttagttgtaagaaagaaagagacttcttgcatgaaaatagtatgttgcgggaagaaattgccatgctaagactggagctagacacaatgaaacatcagagccagctaagaaaaaagaaatatttggaggatattgaaagtgtgaaaaaaaaaaaaagtcgac

SEQ ID NO: 4307 - DNA, 386 bp, Homo sapiens
  I.4307 (AA532505)
ggtcgacaattaagtctttcttcttaaggtaataacaattactgaaagggatttggaaaggaaataagcttctccttatttaattcaacattttaaaattcaataagccacatcagctatgccaaacaccatctttgtacaacctcaaaccatctaatataccaacctgaaccactgatacttccaccataggaagagggacatttgttcttgcagaagttcttctgttctcaatcccttagttgcaggtaaacacactgaacttggattgggtgatgctaatccctaagcagaaagtatgttggtactctgttttcccacactgtaattattaagttcttacctggtagctgcacagatgcaaaaaaaaaaaaaaaaaagttttg

SEQ ID NO: 4308 - DNA, 210 bp, Homo sapiens
  I.4308 (AA230063)
cctcatgatgaatcaagacatccttgtgttttccatacttctgaagtagagattgtccactaacagcttagggaaagcagagtacccgctcagctgctctttttctggtgtggtcagaccagctgggtcctctgaaacatgaatccatagtgcttcctttgttatactatttctgactcagttttctctaaacggctgtaaaatttaact

SEQ ID NO: 4309 - DNA, 380 bp, Homo sapiens
  I.4309 (AA229911)
ttttttttttctttcctttttctcttttatttatttatttttatgcctaatgaacctggctagcaattccagtatatgttgaatagattggtcagagtaggtggtatcatctgaacactgtgtcctcaaaattcatatgttaaaacctaattcccaatgtgatggccttaagagggtgagcctttggagatgattaggtgattaggctccacctttatcatgagattaatactcttataaaagaggcctgaggaagcttgttctccctatctaccatgtgagaacagaggtagaagatgccaacatgaaggaaagaacaagccctcacctaacactgaatccgctgacaacttggccttggacttcccagcctccagact

SEQ ID NO: 4310 - DNA, 167 bp, Homo sapiens
  I.4310 (AA229910)
tcgactccaatttagtggcaaaaacttgataccttttcctcgaccatttcatctgcttgggctattgtaagaaaataccttagactcagtaacttattaacaacagaaattattttacagtctggaggctgggaagtccaaggccaagttgtcagcggattcagtgt

SEQ ID NO: 4311 - DNA, 386 bp, Homo sapiens
  I.4311 (AA229658)
atttcacacaatgaatggtcaggtttaataattcagtgacggtcaccagggtcatgggacagcctgcgattctaaagtaacttgatttctctctggggttcattttcctcttttattgaatatagataacagatgcttacctttaagcattagaccagggccttaataatcatccagagctacagagatgtaagttggtgttctcttattctttctcctaaatatgagagcataaagtccacagaaagaaaatacagctaggcagttaaattttacagccgtttagagaaaactgagtcagaaatagtataacaaaggaagcactatggattcatgtttcagaggacccagctggtctgaccacaccagaaaaagagcagctgagc

SEQ ID NO: 4312 - DNA, 283 bp, Homo sapiens
  I.4312 (AA229227)
tttttttttttgtaatgggtctcagaggatatttatttaagatggtggttttcaaacttttaaaaaagtagcagaccgcttgttttgtaaatgaaccttactataggaagcagataaatgtggcactcctcggggagcagcaggggtgaggggcctgggctctaccctctcactttccaccttgtcctttaaaggagactctgacatccctgaggaacacaattggtttagagggaaagggaaaagaggttaacatttagacatgtaaatgaacgaataaaat

SEQ ID NO: 4313 - DNA, 184 bp, Homo sapiens
  I.4313 (AA224972)
tttaagagacagggactctatcacccaggctgatataattacttatacattcttttctttttttttttttaagaggcagggactctatcacccaggctgcagtaacagctcactgcagcctcaaactcctgggctcaagtgattcttccatctcagcctcctaagtagctaggactacaggcac

SEQ ID NO: 4314 - DNA, 392 bp, Homo sapiens
  I.4314 (AA224897)
  misc_feature (2)..(2): n is a, c, g, or t
  misc_feature (5)..(5): n is a, c, g, or t
  misc_feature (21)..(21): n is a, c, g, or t
  misc_feature (26)..(26): n is a, c, g, or t
  misc_feature (31)..(31): n is a, c, g, or t
  misc_feature (53)..(53): n is a, c, g, or t
  misc_feature (66)..(66): n is a, c, g, or t
  misc_feature (69)..(69): n is a, c, g, or t
  misc_feature (84)..(84): n is a, c, g, or t
  misc_feature (102)..(102): n is a, c, g, or t
  misc_feature (103)..(103): n is a, c, g, or t
  misc_feature (179)..(179): n is a, c, g, or t
  misc_feature (184)..(184): n is a, c, g, or t
  misc_feature (185)..(185): n is a, c, g, or t
  misc_feature (194)..(194): n is a, c, g, or t
  misc_feature (334)..(334): n is a, c, g, or t
  misc_feature (355)..(355): n is a, c, g, or t
gnggncgctactactactaanttcgnggccngtcagaccttacagatactganaataggccagatntgntggcacatgcctgtnatcccaataccttgtganntcgaggcgggaagatcacttgaggccaggaattcgagaacagcctgggcagcatagggagacctgtctctactganaatannaagaaaacnagctggaggtggtggcctgtgcctgtagtcctagctacttaggaggctgagatggaagaatcacttgagcccaggagtttgaggctgcagtgagctgttactgcagcctgggttgatagagtccctgcctcttaaaaganagaaaaagaaaagaatgtatnagtaattatatcagcctgggtgatagagtccctgtct

SEQ ID NO: 4315 - DNA, 211 bp, Homo sapiens
  I.4315 (AA531564)
agaacttttttttttttttaaaaaatcatgaatcaatcaaatcagataattgtatgatgcactgaattactcttatgaggcatgggcaagatattcctatttctcaggtgttaaatttattgtttgaaggttaataaacatttcctttaaaggtacttaactaggattggtacattgtaagatcactttcacacctttatgtcgacgcggc

SEQ ID NO: 4316 - DNA, 459 bp, Homo sapiens
  I.4316 (AA531352)
aacacttttttttttttttttccggagacagtctcactctgtcacccaggctggagcgtgcagtgctgtgatctcggctcactgcaaccctctgcctcccgggttcaagcgattctcccgcttcagcctcccgagtagctgggactacaggcgtgcaccaccacactcaactcagtttttgtattgttagtagagacgggggttttgccatgttgcccgggctggtcttgaacacctgggctcaattgatcctcccacctcggcctcccaaaatgctgggattacaggtatgagccaccacgcccggcctagaggactttattttcttcatggctgtaactgcagtgcccgtctgtaacagggcacaatgcactctaggatacttgccgagtgagggattttccattagctagtgtagcttcatttctcctgctgccgccatgaagaccccagcatctg

SEQ ID NO: 4317 - DNA, 407 bp, Homo sapiens
  I.4317 (AA524390)
ggagaaaaccaggtttattttaatgatccactgataatgttttctttcagtcctttgggaaagaggatgagctgacatggaatacaggttattgcttcttaaggtaactgactcccaggctgaaatgctaacacattaaaagcgaggaactgactaaggggaaagacgctgacaaactgccacggagctctcactaaaggtccagaaactgccaaggcagccacttatctcagaaggactttccctcctgcagctgcagaccttagggcaaaggcaaaacgcggggctgcctgggtgggttaaagggcatggtgagtggcctgtgagtgctggtgggttcgtcgtgagcgctgacacacgccatttctggggctctcagctcaggaaggtgtgactcttaggctgcc

SEQ ID NO: 4318 - DNA, 726 bp, Homo sapiens
  I.4318 (AA521502)
aaaaatgtggtttatgttgctgttactcaactgcttttgaaaacaaatgtcctatagtgttttatagaaacgacgccaggcagaagtataatctttatggtgaagtcattagaaatctcagtctaactgccttaatagaacttaagacaagttatcaagcaggcttctcagagtccacacacaattgacagaatgagggcagaggtggatgcagaagcgtgaatcttttttcaaacaacttaagatcagaccatgaaaagggattcttaaaacctcaaaggctgaaagtcataacttttcaaataatgtaactcccttgaaatcaatctctatactgcaaacagaaaatcaggtctactgcagctgcttaagtagttaatggctctatgtgtataagttcccaaccatgcacatatccccagctgcaaactgaacagcttcaaatttaaaatcacagaatgcttctagttacggaacaactgttatgtcctttaggattctactgcttttctgttgctcatgatgcactgtgctttttgtaagaggctagaatgggactgagatgaatggaggccttcatgactgagacattcatttcttctgtcccaacacttctcctttcatgggaaaactttagaaactcacacgagattggcagtctcagacagccccagagtttattctgaggtagacaggctcatcactatgtgctgatctcttgagagg

SEQ ID NO: 4319 - DNA, 588 bp, Homo sapiens
  I.4319 (AA521427)
tttttttttttttttttttttcaactaaaatacttttttaattaaaaaaaatggacacacatacacacacacacacacacaccccttaaagctaagaggccttcccaggattcactaatagaacagcagactggcctccaattctaatctgactctgggaggtgaagagttgggtttgcacctgttttcaggcaccccatgcaccagtgtggccaatgggtgttcagacctgccagagtctttctgaaaatgcagcctttccctgactgcagttaaacatcctgagacagagtgtggaaggtgtatttttatgctgtcccatgaacagctgaagcagcgttgagtgtgacaaggaatagctgcggaaacaggcaactgaaccgatgtcttcatgttcccctataggaagactccagggccgatgtcaagcggaacaacgtgacacggatggtgtccgtgccccagacaacagcaggtgccgttttttatgtgttaacattggctgtggctatgggctcggtggaaggacaccacagaggcattttggtatcaccgtgttctccgggaagtctgggaaaactggatttt

SEQ ID NO: 4320 - DNA, 596 bp, Homo sapiens
  I.4320 (AA521418)
tttttttttcaaaaatttgtttagtattgtagttaggctgtttgtgtgtatgcatgtgtatgtgtgtatgagtgcgtttgtgtgtgaccaaaacagtaactggcaaacgtaacaacaggaaattgtagggcagggtctgggaaaaggggaggaacccaaggtactgacaagcccagaccggactcccccgaagtgagcaggcagcaaaggctgagagtgccagctgcctgggcactgacggaccccacccacggaaacgatgccttatgaggaagctaacccgggccacttaccgacgacctgcgcaggcgtggcttgaggaaacgcccgctgtgggcggagcacccgaaaggctccggtcgggggcgggaacaggatcggcccgcgggtgagcgtcgataggctgccgcagagacagggcgggctctgctaagggacgcgcctcgccgtggggcggtgctgcgcctgagcctctacgagagggaaggaacgctgctccgagctccgcgtcgcgtcgcgtagattctcttcgccgtgatctcagaggcgggtcgcaagcgctacgtttttatccctatttcctctttttccaaggt

SEQ ID NO: 4321 - DNA, 479 bp, Homo sapiens
  I.4321 (AA521405)
ttttttttttttttttttttgacttgtgaaatattaatagggctcagtatgacaaatcactctgatttgtctaaattcttgacaaattagaaataatacattacaaaaacatatagtcatgctgaaaatgccaaaagacacggcagcttaaggaatatgttggttgtaaaaggtagatgtcttcaaacttccagtaatggttaatgaatgcatttgaaccaatcttctactaaggacaactagaaaggctgggcaaaagagttttaaagtctgtttataaacattgaagtggtaagaagatagtgaagaattgctgagaaaagagagcagagaggatcagggagcatgaggataagcccacccagcatggttttgcccttcccctgaccatgccagagcacacagcctggagaccagggaattgcccagcccagtccaccacgacggcacctaacacttctccaggggacctgaggttg

SEQ ID NO: 4322 - DNA, 565 bp, Homo sapiens
  I.4322 (AA521086)
tttttttttaacttagagaaaacagagacacagagatgtaagctgcttgatcaaagcttcttcattcatcagtggcagagcagccccagatagctctggaaacatctaaggtatagtaactattaagtcactaagttgttattaaatgagtgctctgttcggggctgaggtaaaagtcattgtgaagatatgaaagtactcacccgttgctccattgttgcttattagactgctcagaatatactctgcttttaaaagttttcctgaaaagcagcaaccaaatgccacacaattagctttgaacatgcacttaacaattacaagttgttcatgttctaagactgatatattgcagcaggaactgtaacctcctttggaagcattccattttataatttaaaatcaacaatgacatcatctataaaactgaaaagaaagatgaagtttttctaagttggtaaggtgggaagttggacagtatctgaaatgaaaattagattcatatgtatgtgataattcattcacatagagcagggtttgaggagtagaggcaaacttttcttac

SEQ ID NO: 4323 - DNA, 178 bp, Homo sapiens
  I.4323 (AA507082)
aggagttgattattattttatttgtttgcataattttctacatgcctatcacaaattcattccctattcttcaccagaagtgtaaacctcctcttactgcattgattcataaagtattctacaacaaatgattttaatttccgttagtgacatccttactagagctgtgtgtcctgta

SEQ ID NO: 4324 - DNA, 387 bp, Homo sapiens
  I.4324 (AA505922)
aagactcagaaatgagtttatttatacttatatataaatttttataccacaaagataaccatgcagtcaatagcaatttaattgtacactttaaaataactaaaagtgcataattgagttgtttgtaaaagataaatgttacaagtaatggctacataatttaccctgatgtaattgatgtaattattacatattgtatgcctgtatcaaaatatgccagatttgcataaatatatacacatattatgtacccacaaaaaaataagaaaaaaatttaaatatcaaaaaaaggataaatatttaacctatgggaacaatattaacttatctgccagttaaagctactggcaaaagagattactagagatgctattccactatgttact

SEQ ID NO: 4325 - DNA, 432 bp, Homo sapiens
  I.4325 (AA505872)
tttttcacccttgattctcaaatgtttatttttaacacggcagatacttagcaattatatcagaggctgaggcatctggagtaagcaagaaaggtgatttgggttaataatctttgaaaggctaaaggattttcaatgtatgtataagactgagccctgtgcatgctccccattctctccctgacatcagccacatccaccccacctctgccgctacacgttggtgctacccaaggtctccattcacgcactgtccctctgcatctcatgcttcatccgggccctcctctgacctgaccttacctggctgacttagtgccccaattctctaaaacatggagagatggaactggtagcttgaaccctcccagttccatctcttccctttgtaagttttcccggtgcccttgggcccatgtttctagactatgc

SEQ ID NO: 4326 - DNA, 251 bp, Homo sapiens
  I.4326 (AA503172)
gcgtcgaccaatcatttaaaatctacattgcttacctatgttcatttctgatttttgttacagtctttcattggtttttaacttgacatgctagtttccaagatgtaatcttacacatttgactgttttgtcactggtccaacatacctggtgaaggaataaatccattaggtagaaatagttgggttttttgttttgtgtttttttttttaatagaaagctttggttaaaaaaaaaaaaaaaagtcgacg

SEQ ID NO: 4327 - DNA, 374 bp, Homo sapiens
  I.4327 (AA493719)
ggaatagaatcactgggttatatggtatcttaactctatatttaaccctatacaagactgttttacaaagtggctgcactattttaaattcccaccggccacttgtgaggttgtaatttctccacattgttaccaacacttgttattgtctatctttaaaaaaaaattagctatcttagggggtgtgaagtggtatcttgttacagttttgatttttattttcctaatgactaaggatgtacattgagcatcttttcatatatgagctattatttttatagaattgaaagattggaattaagacaatagaatccataacctggataaacactattgctttcattagggaaaattcatcattaaagttcttcaaa

SEQ ID NO: 4328 - DNA, 423 bp, Homo sapiens
  I.4328 (AA493225)
gctcgacaaaatgactggtctctctataagaagagtatattaggatacagagacacagagcagagatcatgtgcagacagagggaaaagatagccatttacaagtcagggagagatgcctcagaagaagccagcccagctgatgccttgatttggacttctagcctccagaactatgagaaaacaagtatgtattgtttaagctgtcaggtctgtggtattttgttgtggcagccctagcaaactaatacagcttcctagacatatcagtatttatgtcaaatgcaaatggactatatggtcaaattaaaaggctcaaattgcaattgaagaagacccctgttggttacaagagacatatcaagaacacaagaatgtggaaagattagaataaaaaggtgaaaaaaaaaaaaaaaagtcgacg

SEQ ID NO: 4329 - DNA, 410 bp, Homo sapiens
  I.4329 (AA484943)
atataaatgaagaataggaaactattttatcttcttaccaagtaccttactataagtaaacctaagataagaaaacccagatttacctataagattgttgggagttaatggtgtcaataaaaggattgatggtccctctaatgaaacccagtagatgtttgttgaattgaactgaaaatttatgtggccagacacagtggctcatgcctgtaatctcagcatttggggaggcaaaggtggaagtatccctcgaggccaagagttcatgaccagcctggtcttttgtagagaccctgtctctacaaaaatataaaaatcagccaggcgtcgtgcacacctgtagtatcagctacttgtaaggctgtggcagaagtgctttagcccaggaggttgaggctgcagtgagccat

SEQ ID NO: 4330 - DNA, 406 bp, Homo sapiens
  I.4330 (AA243994)
atactactaaattcgcggcgctcgactgacttctgggagtttaatgaaataattaagaatgtgctgaaatatttaattcaaggatgtctgtagtagcattatttataaaaatgaaacgtttgagggccaggtgcagtggcttatgcctgtaatcccaacaccttgtgagggaggctgaggcaagtggattggttgaactcaggagcccagcctggcaacatggtgaaaccctgtctctacaaaaaatataaaaattaggtaggtgggtgtggtggcacacaccttagtcccagttgcttgggagactgaggtgggaggattgcttgagcccaggaggtccaggctgcagttggccatgatcgcactactgcagtccagcctgtctcaaaaaaaaaaaaaagtcgac

SEQ ID NO: 4331 - DNA, 356 bp, Homo sapiens
  I.4331 (AA244079)
tttttttgagacaggctggtgtgcagtagtgcgatcatggccaactgcagcctggacctcctgggctcaagcaatcctcccacctcagtctcccaagcaactgggactaaggtgtgtgccaccacacccacctacctaatttttatattttttgtagagacagggtttcaccatgttgcccaggctggcgtcctgagttcaaccaatccacttgcctcagcctccctcacaaggtgttgggattacaggcataagcactgcacctggccctcaaacgtttcatttttataaataatgctactacagacatccttgaattaaatatttcagcacattcttaattatttcataaactc

SEQ ID NO: 4332 - DNA, 295 bp, Homo sapiens
  I.4332 (AA244007)
gctcgacgtttctctttttgtatatttaaaatttttaatctatactctgatttttgtgatataaacatctagctagttttctccaaaaatgaattatgaacaatccatcttttttaaataatacaaaacatcaccattatcaagcgctaaattcctacatatatttcggtatttctaaatttcctgttctgttttattcattgatgtcttttcagctgttagtaagcaatttgtggaaataaataacatgcacattttgacatctggaaaaaaaaaaaaaaaaaaaaaaaagtcg

SEQ ID NO: 4333 - DNA, 367 bp, Homo sapiens
  I.4333 (AA226319)
  misc_feature (19)..(19): n is a, c, g, or t
  misc_feature (22)..(22): n is a, c, g, or t
  misc_feature (367)..(367): n is a, c, g, or t
ttttttttttttttttttnggnttcctgactaggacatcagagtgagcacaatgaacacagactttcccagtcataaatcaggagtaacaacaggctcacaatttcagcacagccaagcccagtggcactcacaaatcattctttacctttgggaatttactttgataatgtaaaacactgactattatctttgacattatgaagaaataattttgctacaaaaaataaataatataccctaccaaaactaaatttattttctaaatttgctcaaaagattgctttcattaataaaattctgaaatttaatcaatgcttatcttcaatgacaatgatatctgggcaaacatgtgaaacactaaagtn

SEQ ID NO: 4334 - DNA, 399 bp, Homo sapiens
  I.4334 (AA226318)
  misc_feature (6)..(6): n is a, c, g, or t
tcgacngttttcaagatgtattccctctctgacatctattaactagcacagagtcttcaggatattattaggtgctcaataaaagtttattgtatgagaataagcaatattttctttatctctcatttggttgtatctttccctactttgttatttcattttttcttacattttatctttgtattctgacactatttcttagttttgcttctgttttccccagaagagtactttggttaaaatgtatcacttgcaaaatagaataacacaccgccatgtagtgttgcttcaggttataattttccatatatgtacagtatgccaaaaaggatgctgcttctagagagaatgtttaaaactcacttctctagatttttttaaagttactttagtgtttca

SEQ ID NO: 4335 - DNA, 485 bp, Homo sapiens
  I.4335 (AA225430)
  misc_feature (57)..(57): n is a, c, g, or t
  misc_feature (405)..(405): n is a, c, g, or t
  misc_feature (428)..(428): n is a, c, g, or t
  misc_feature (455)..(455): n is a, c, g, or t
  misc_feature (484)..(484): n is a, c, g, or t
tcgacacctatgacctcattcacagtaagtcatgagtaaaaggcacctactcctgtnccctgatgtagcccagtagagcctgcaccaatacggctgtggcctgaccagtcactatatgattatgaaaggagatccaacttaaactaaagggaattattttgaacaagattcatcaaaatcagagcacatatctcaccatattcagacagctgaggatagttgtccatccctctactaaccaatcactacctataacacagtctggattctttcgtaattcttggtacatagaagcttctcagaaattatttgatgaaaggatggataaatgaataaataaattattataaacacttgctataagatctaagaataattacactggttgttaagggtgtgtatganataacaaaatataatgaatcctnaattagtagaatatatttaatgatttncatttacatttatatcaagaaaaaaaaana

SEQ ID NO: 4336 - DNA, 485 bp, Homo sapiens
  I.4336 (AA225395)
tttttttttcttgatataaatgtaaatggaaatcattaaatatattctactaattaaggattcattatattttgttatttcatacacacccttaacaaccagtgtaattattcttagatcttatagcaagtgtttataataatttatttattcatttatccatcctttcatcaaataatttctgagaagcttctatgtaccaagaattacgaaagaatccagactgtgttataggtagtgattggttagtagagggatggacaactatcctcagctgtctgaatatggtgagatatgtgctctgattttgatgaatcttgttcaaaataattccctttagtttaagttggatctcctttcataatcatatagtgactggtcaggccacagcgtaattggtgcaggctctactgggctacatcagggaacaggagtaggtgccttttacccatgacttactgtgaatgaggtcataggtgtcgacg

SEQ ID NO: 4337 - DNA, 209 bp, Homo sapiens
  I.4337 (AA225239)
ttgtcttaagtttacctgaaaatcggcctaattttattaaatacatattctacccagggggagtggtttaaagaattatctgctttgtctgggcgcagtggctcacgcctgtaatcctagcactttgggaggccaaggtgggtggatcacctgaggctgggagttcaagaccagcctgaatcaacatagaaaaaccctatctctactta

SEQ ID NO: 4338 - DNA, 375 bp, Homo sapiens
  I.4338 (AA225171)
  misc_feature (263)..(263): n is a, c, g, or t
  misc_feature (281)..(281): n is a, c, g, or t
  misc_feature (317)..(317): n is a, c, g, or t
  misc_feature (346)..(346): n is a, c, g, or t
  misc_feature (360)..(360): n is a, c, g, or t
tttttttttgagaaggacttttactcttgttgcccaggctggagtacagtggcaagacctcggcttactgcaacctccgcctcctaggttcaagcaattctcctgcctcagcctcccaagtagctgggattacaggcatgtgccaccacgcctggctaatctttgtatttttagtagagatagggtttttctatgttgatcaggctggtcttgaactcccagcctcaggtgatccacccaccttggcctcccaaagtgctagnatttacaggcgtgacganatgcgcccagactaaaagcagataattctttaaaancactccccctgggttagaatatgtatttnataaattagggcgnttttcaggtaaactt

SEQ ID NO: 4339 - DNA, 315 bp, Homo sapiens
  I.4339 (AA564398)
gagatggagtctcactctgtcacccgggctgcagtgcagtggcccatctcagcttacttcaacctccgcctcccaggttcacgcaattctcctgcctcggcctcctgagtagctgggattacaggcatccaccaacacacccggctaatttttgtatctttagtagagacggggtttcaccatgttggccagactggtcttgaattcctgacctcaagtgatccgcccgccttggactcccaaagtgctggaattacaggcgtgacgaccacgcccgtccaaaagtgaattatatttcaataaagctatttttaa

SEQ ID NO: 4340 - DNA, 464 bp, Homo sapiens
  I.4340 (AA508138)
ttttttttttttttggcagagaacaccaaaaacttttcgtgggtttattttgttaatattcattctcagttccggttttgggtttgttttcagaaataagaagtcttagtcacttttaagactaagaagtcatgtgtttttgatacatataaacctgcatcaacatctcctctaattaaaaacactactgataatcgtttgcaagtgcaacacttcagaaatgcagaattaagtaactagtggactattataacttcagcattctagcatacgctctgaaatgatcattcctttatttagatcttctagatacttttagtgattacattagggatagccaactccatgggctaatttgaaacatagaaatgtactatgcttgcatattcatttcagtatggaaccttctaaaaatctcctcctttggactgaatttttaaattcaagctttttatttttgtttt

SEQ ID NO: 4341 - DNA, 406 bp, Homo sapiens
  I.4341 (AA225155)
  misc_feature (17)..(17): n is a, c, g, or t
  misc_feature (137)..(137): n is a, c, g, or t
ctactactactaaattngcggccgctcgacccgcaatttagtagcagtagtaacaccatagtgcagcacattatttaagtgtttatggtgctggtgtaaacgtgctgcactttcagttgtataaaagtacaagacancggccggggacggtggctcacgcctgtaatcccagcactttgggaggccaaggcgggcggatcacgaggccaggagatcaagaccatcctggctaacacggtaaaaccccatctctactaaaaatacaaaaaattagccgggcgtggtggtgggcgcctgtagtcccagctacttgggaggctgaggcaggagaatggcataaacccaggaggccgagctgacagtgagctgagatccggccaacagagcgagactctgtctcaaaaaa

SEQ ID NO: 4342 - DNA, 398 bp, Homo sapiens
  I.4342 (AA225138)
  misc_feature (17)..(17): n is a, c, g, or t
  misc_feature (19)..(19): n is a, c, g, or t
  misc_feature (234)..(234): n is a, c, g, or t
  misc_feature (269)..(269): n is a, c, g, or t
  misc_feature (295)..(295): n is a, c, g, or t
  misc_feature (297)..(297): n is a, c, g, or t
  misc_feature (376)..(376): n is a, c, g, or t
ttttttttttttttttncntacagagtctcgctctgttggccggatctcagctcactgtcagctcggcctcctgggtttatgccattctcctgcctcagcctcccaagtagctgggactacaggcgcccaccaccacgcccggctaattttttgtatttttagtagagatggggttttaccgtgttagccaggatggtcttgatctcctggcctcgtgatccgcccgccttggnctcccaaagtgctgggattacaggcgtgacaaccngtccccggccgctgtcttgtactttnanacaactgaaagtgcagcacgtttacaccagcaccataaacacttaaataatgtgctgcactaatggtgttactaactgntactaaattgcgggtcgacgcg

SEQ ID NO: 4343 - DNA, 364 bp, Homo sapiens
  I.4343 (AA514450)
ctaagacagagtcttgctctgttgcctacgctggagtgcactggtgagatctcggctcactgcaacctccgcctcctgggttcaagcatttctcctgcctcagtctccctagtagctgggactacaggcgtgcaccaccacgcccagctaatttttgtatttttagtagagatggggttttgccatgctggccaggctggtctcgaactcctgacctcaggtgatccacctgcctcggcctcccaaagtgcgggtattaccggcatgagttaccacgccttgccatattttgatgttctgatccccaacttctccagcatgaccagctaatatgttttcatatgtcctctccaaagctcaagtt

SEQ ID NO: 4344 - DNA, 486 bp, Homo sapiens
  I.4344 (AA514237)
ttcagagacaatttttattttaaagaaaaagtaacttatatatttttaaaatctagagaatgtacaactcctctgccacaacgtgagggagagaagtctgcagacggctgactggtgacgactgaacaagacggaaaggcaagtcgctatgcccgaagcctttgaagggagccagcagggtccatgggaggttcaggacacatatctgcagccctgcttctggccccacccttggggaagccttttgcaggtgatcctgggcctctgctggggaaggccccaagaggtgaagcatcctggagtgaaaagcagttgagtagaaacagagagtggtctgtaatttccttctggaaggaatatccactccatatggcctgaagcaagaatttcaaactcctctgtctggaccacatcagggactcccttcccctctggtctctggttgggtgtggccaatgagggaaggaaatggagtgagggtagact

SEQ ID NO: 4345 - DNA, 446 bp, Homo sapiens
  I.4345 (AA508754)
atggtttataaaattatgtttcatttattctctcatttgatcctgttaacaacccaatataaaatagaaggcaagcattattatttccagtttacaaaagaaacacaatcagagaacttgggtgacttgcccaaagttacagagctcataagtggcagagttgagaatcttactcaagtggtcggattcctagcacagggcacttttaattagatggagatataaaatttaaaataaagtttgcatttaaccattaatgtctttttaaaaatcacatcttagttacgctgctaaagccatgagcaaggaagctccttcttctgtagcctgtatcttaccaactgagagtggtttccattccactagcttccagtatgttaagtaaaatataattgatcgtaactgttttccaaccaagtgacaaagaatatgctcatcatatacag

SEQ ID NO: 4346 - DNA, 403 bp, Homo sapiens
  I.4346 (AA504807)
tttttttttagtagagacagggtttcaccatgttggtcaggctggtctcgaactcctgacctcgtgatccgcccgccttggctccgaaagtgctgggattacaggcgtgcgactgcgcctggcctgaagctattctttacaaaagctcttagtttttgtttgtttgtttgtttttttcttttgcgacggactctctgtcgccaaggctggagtgcagtggcctgatctcaggtcactgcaacctctgcctcctgggttcaagcgattctcctgcttcagcctcccaagtagctgggattacaggcatgcaccactgcgcccagcctgcttcacatttctttatggtatctttattttcagtgttgatgaattgcaagaggatgtgctcatgggcggggccttc

SEQ ID NO: 4347 - DNA, 380 bp, Homo sapiens
  I.4347 (AA504277)
ttttttttttttttttttttaacagaagtgactccattttaattctgataactttctcattgtcccctttttaccaaggtctttctttgaaagaatcactgatcaattattctattgttagtttttgattgtcccttgttggtgctgggatgtggtgtcctgcggttgctggtcttgtcccacagtggagggaagtgattagcagctagaagtcagtggcaaaacctttagccacatttgaacaagagagatttgaaaggaatgtctctcaggctgagtctacctggagtccattattaatttcagttttatttgtttcatagtctttgctatcatctcaaagagccggtccagcattgttcagttaggaggtgtacatc

SEQ ID NO: 4348 - DNA, 329 bp, Homo sapiens
  I.4348 (AA491060)
taagcactgttagaaggtacaagtgtattaatatcactagttttgaggcgcttgggtacatttgtttttaatatatttagaatgtgcagtaaacttttttctcatttttttttctttttagcaaacttgttattttaggtccaattattgagttgacagtctactgtgagaatgagatgacatatctactgtgagaataccataaatgatgaatagtttatttgagaacttttatactcagtggtgttttatatattaagataaaaatatgtacacacatgcatgtcacatctctctactgtggagttaatgtgaatttttaaaaaatg

SEQ ID NO: 4349 - DNA, 263 bp, Homo sapiens
  I.4349 (AA490875)
tttttttttttataaagaatatgcaatccatttgggatttattgcatttaaagaaaacagattaaaacaggtatgataaatacagtaagaaaataactttaaatttcaaacaatacagtgaatcagggacagaattcagtcaaaaagaataagcagtgtagaggcaataaagtaataaaatcagttagtgcttaattagatatggcaggggaaaggggtgggaagggggagactgagtctatctcataattgtttcccagcta

SEQ ID NO: 4350 - DNA, 375 bp, Homo sapiens
  I.4350 (AA490815)
ttttttttttccaaaataagagaaacatatgaacatgtgtaagcagatacaaaggaagcaatgggaagggagagaataaaggcactgagggaggagaataggaacgtggacacagagaggaggtacacaaaggatgacagttttgtccaaaacatgaaaaaggcagacagtacaggcacagaagaatatacttggatgcatacaggattagatgcagtgtgcaatttcaattttggtattccactattcagttatacagtgttatatatcatggtaagtaatgagatactagtgttttggtacaaataccactatttcagtattttaataatgtctgaaacacaccttacttacatcttgagagcaggattaaca

SEQ ID NO: 4351 - DNA, 341 bp, Homo sapiens
  I.4351 (AA489005)
aggcaatcctccctccttggcctcccaaagtgttgggatttcaggtgtgagccactctacctggctgagacttgctctcatttttaaattcaaaaaatgttttccatagatcggccgcctgtggaaaaaggtgactcaggcctgtaatcccagcactttgggaggcctaggtgggtggatcacctgaggtcaggagttcaagaccagcctggccaacacggtgaaactccgcctctactaaaaatagaacaattatctgggcatggtggcaaatgcctgtgatcccagctattccggagactgaggcaggagaatcactttagcccatgagacaggggatg

SEQ ID NO: 4352 - DNA, 192 bp, Homo sapiens
  I.4352 (AA488789)
ttttgagatagagtctcactctgttgcccaggctggagtgcagtggtgacatcttggctcgctacatcccctgtctcatgggctaaagtgattctcctgcctcagtctccggaatagctgggatcacaggcatttgcaccatgcccagataattgttctatttttagtagaggcggagtttcaccgtgttgg

SEQ ID NO: 4353 - DNA, 438 bp, Homo sapiens
  I.4353 (AA485242)
tttttttttatctgtcccattaatgatgctgttcttcagggtttggtcttaatcactaatcttttctagggatcacaaactagcctgacaaagttcagggatagctttcttttccagggctaacagtgttggaaataactgatgtgaatgtctttaagtaagacagacagacactttactactccctgttgtctgccatttatattacctaccaggctcctaaaataagttcatgaccccaactttacactccctgattttgtgtcatgtgctgggtttatagtagagaacaaaaataaacatgttctttgaactaactaagctttcagacaaatgggggaaacacagttgaagacatttttaaaataatgttacgcttagggcacagtgatagtttaacaacaatactgcttaaagctcaaacaaatcttttaccat

SEQ ID NO: 4354 - DNA, 438 bp, Homo sapiens
  I.4354 (AA485229)
tttttttttaatcacaatatgtcttagtgcaatgatggcatactccagttcagatgtactgtcttgattacctcagatccgacatagctgagaaaactgctctaagagttctgacttcctgggatcagtgtcacagaggatctgagtgagcttcctcgagccattttgggcaggctgaagaagcttgttagtatctatatgcttccaggttggcggggccagcttctgccagttctaccatatgccaactggcgacatacaggagcatgctagtgctaccagctccacatatacacacccacttccacccccaagaggtaccagactgtcggacaacttggccgctagcctatgaaaatgtggaaatgctgaagaaacattagccagcaaagcacatactggcagctgaatcaaatgtttaggttcttcaatgtaccc

SEQ ID NO: 4355 - DNA, 427 bp, Homo sapiens
  I.4355 (AA485220)
tttttttttaaggaacaggtcgatacaaaagcgagatatgcctttataagataaagaaaagtttacaagaaacaagctcaatagatataaaaaaatgattagagtatgatgaatatttttttcctttctacttgctagatactcaaagtccataaatatgtccagatgtccactgaaatatctctcatttattcttacttggtttctatatgtaagaatattttgatttaaatagtttatatgctcctgaaatttctgagaaattcaagtcattattttaaatgacttcacaataggaatcccatcatgtatattttcttttcctttttgtttttgagatagggtctcattttgttactcaggctgcagtgcaatggtgtggacatggctcactgcagcctcaacctcctgggctaaagcacttctg

SEQ ID NO: 4356 - DNA, 372 bp, Homo sapiens
  I.4356 (AA485117)
tttttttttagagatggggttttgcatgttgctcaggccagtctcaaacttctggactgaagcaatcctccaccttcagcctcccatagtactgggattatggttgtgagccacggtacccagcctgaaaaaaagttataataattcatagacagatgtaccgaataggatttcaacaagactctttcttcaccatttgcaaagactctcacaaactgctgaagtccaggctggctgaaaagcagcttgaggaagcatgttcatgcatctgggaacaaggggagttcactggagtgcacatgccagaatggaaatgagccccctgctgttatctgaggcaatttgtagtgggtctcaatgctaaaattaaag

SEQ ID NO: 4357 - DNA, 323 bp, Homo sapiens
  I.4357 (AA485116)
gttcagatgatgaaacctgatcaacataccacagaacacgactggctgaacaggttgtgtagttcggcacagagtagctgtattctcaaggctgttaaagcaagggtctgacaccactaagtgttagtagtgggttgatatctattatggaaatggatatgtaaagcagccaaaacccgatggcatgaaatagttacatagtcaacctctcttgagatctaattcatattccactcaccaataaactctgatacttggacttcccatatagcttgtctagacccttgctgtttaaagtggggtccatgggccaggagcactgg

SEQ ID NO: 4358 - DNA, 152 bp, Homo sapiens
  I.4358 (AA485041)
tttttttttaacatcgtagagggcaatgctggcaaacaggggctcaatttcaatctcgaacttcaaggtcagcaacttgaccaatattctgttgcccaggtgttccttgggacattctggtactggacgtatttccacagcatcctcctcgt

SEQ ID NO: 4359 - DNA, 112 bp, Homo sapiens
  I.4359 (AA485040)
tgtaactgtgaatctttcaaagcctcagttttatgaccctgtggagccagtggactttgaaggacttctgatgacacacctgaacagcctggatgtgcagcttgcccaggag

SEQ ID NO: 4360 - DNA, 330 bp, Homo sapiens
  I.4360 (AA484952)
tgtcttaaaaaagatactgttcatggagagtgacttaaactggcaaagagtgatatagccgaaataaattatatatacatttcattgatagcctaagaacagggatcatttgttcagactcttacagtgtattactgtgcctgcattagaggcaggcagtaatgtcaggagctctgtcaggggtttggttatgtagtctatttagtgaaggaagttaatgttaatggaatgcattatgattgtcgcccaaaccattatcctcattataaaaatccttaaatgtgtatgcaattgcttattaaaagtctctggcaagaagagtttaattta

SEQ ID NO: 4361 - DNA, 365 bp, Homo sapiens
  I.4361 (AA484011)
ggtcgacttttttttttttttttgagaaattcaaatcttttgcccatttttaatcttattattaaattttttttctcatggagttgtttgaattccttatatattctggttattaacctcttgtcagaaagatagtttacaaatattttctcctattctgtgggttatgtcttcattttgttgatagtttcctttgctgtgcagaagctttttaacttgatgtgatcccatttgttcacttttgcttagattgcctgtgcttgtaggttattactaaataaatttttgcccagtccaatatcctggagagtttctccaatgctttcttgtattaggttcataatttgagttattagatttaagtc

SEQ ID NO: 4362 - DNA, 300 bp, Homo sapiens
  I.4362 (AA483687)
tataaccaagagtgttttaaagaaataaattatgtttgcctagcatcacccaactccatcagccaagaccaggcacttaatttgcaagttctagtgcaaaatagatatgtgcaactacttgttcattatttattattcatttcaaagtgatggtatcagagcattagcagaaccacagggccctgtaagactgcacaggtttttaatccatgaagttgtccttgccaatagaatactcatgtgacttctactagtgaatgaccaaaacatggtttagaaaaaaaaaaaaaaaagtcgacg

SEQ ID NO: 4363 - DNA, 323 bp, Homo sapiens
  I.4363 (AA465712)
gtaagcttcaagtgctgaaaagcaaaaaatacaagatggtttctctaaaagaatcatttttgagaagtcacgggaggtgtcagtctcttaccaacatttagataaataaattgtacattataaaccattactgatgacgcttatgcaaggatataactatgtaaggattttaagcagtaaaaaataccgtaaatcaagacaatgttttaaccaaactgtttccaaccatgttaagttacagttgtacactaaaataataattattcatgtttgagaattagagatcttcacaaaaatacttcaaatatattcacagctggaca

SEQ ID NO: 4364 - DNA, 396 bp, Homo sapiens
  I.4364 (AA458848)
acacacaataagagtgccaagggatacaagaagccacagggggaaaaacaagtgacatatctgcatggagcctaaatttcgcttggtgattttcagggtagaagcattacatattaaaaacactgctattttaggggaatacagaatttaaaaatccacacagattcgcaacgtaaaacatgccgcccaaagacacgtccgcggtgtcccgacagttccggctccgccgcgggccacgaggcggggagcgacggtcactcccctcggttacccggagtacttgggcgggaacgcgtactcgcgggagagacgggctcctgggcgagggctgcgtcttagtcgccctgcttcttagctctcgaggtcccgcgtgttacgtgttagcaccgcccgggg

SEQ ID NO: 4365 - DNA, 520 bp, Homo sapiens
  I.4365 (AA280096)
aaataggtgcataattggggtgagtatataagtgtgtatttatgcataattatacactgttatatttggtattatgataactattgttataactggttatgataaaatctggtatactagatactggtataactggtattttgttatgatatcccaggcagatgaatacagccccccactaaattccatgaggtgtaaagtggcggttggctctcaacaaagggtgatgctgtcctccctcctccccgccaagacatgtctcaatatctggagacattttggtttatcagaactgagggtaggggtaatataggcatttagtggttgtaagttaaggatgctgctaaacatagtacaatgcacaggacaactcccacaacaaaaatatatctagcccaaaatgtcagtagtgctgaggttgagaaattgtgaacatctttttaggatgtatgtgctcttgtaagctaacccaagtcctttacggaaacaagtgagttatcaggagatatacatttaagag

SEQ ID NO: 4366 - DNA, 341 bp, Homo sapiens
  I.4366 (AA280027)
  misc_feature (329)..(329): n is a, c, g, or t
cagctaagatgatacaaatatttcagaaaatttttgccaaaaatagtaacattggcagtcaagccatattatttcacacttgcaaaaaatgttttttatggctctgccatgctttttagttatcaattctaatgcctgggtgaataaacacacacacacaaacacatacacgtatataaaatatttatttaaaaattacaagtatctagtgttagaaaatttatggcagcttataaggtgaatgattttaagagaaaattatacttcacatacatacaaatataaatatgcatgcacacatatatacttcagggttatgttttcatttnggtagatatgag

SEQ ID NO: 4367 - DNA, 343 bp, Homo sapiens
  I.4367 (AA280005)
ggtggaattaccctggttcagtagacccccacaggcgagggcagactgttggctggggaataggctactattagctttgctctgagatccatgaaaataacacttgacctctgcaattactgttctcttacagtgaagatctaaaatctgttcctttataattatatgaaaacacattttctcaagggtctggtctactaaggcattaccaagcaacagggtataacttgaggatgtttctttcttttttctcttcccactgagccctgtacttaaatgtaagttttaaaatattataatcaccaatgaatgtgttggaataaaacatgaaaaatgggtttaa

SEQ ID NO: 4368 - DNA, 249 bp, Homo sapiens
  I.4368 (AA279637)
ggaaaatcacttaagcctgggaggtggagattgcagagatcgtgccattgccctccagcctgggagacagagcaagactctgtctcaaaaacaaaaaaagaaaagaaaagaaaagaaattagtaacatacttataaagtataaacaaaattaacttaagaatacaactagtagtctttaaatgaattaaacccctcccaatattagtcctggaatttctttctctgctgctttaagcacagaaccttat

SEQ ID NO: 4369 - DNA, 502 bp, Homo sapiens
  I.4369 (AA279410)
caaagtagacttggagaatgtgaatctacctgttgcaatgaacccgtaatttaagtgggacttggtattttcttttaaatgcagcgttccttttgttgatagtcttagattcttctgctgtctcatcattgggtcttttgcccttttcaaaggagctctctagtgatgtttgttttttactcattttggctatggttagcttgtgggtttaccaaaactatgactgagacaagtactcagtgcaggaaagagacacggatggaagtggtaaataaaaaaatgggcaggccacatgcagactaaaataagtgtcagattctgacttaaagcctgccactagatgcaactgtacaattgaagcacatcaactcacttgccactataaagcctactaccagatgcaacttaattttcacttgccactcagcaatagggttttgatatgagtctgcaagcaattgatttattaaggtctctgtgcagtcaacctctctgctaatgt

SEQ ID NO: 4370 - DNA, 490 bp, Homo sapiens
  I.4370 (AA279409)
ccaatctgaagtggggctgaggcactgatcttagctctggggagctgctgcaaatatagattaacattagcagagaggtttgactgcacagagaccttaataaatcaattgcttgcagactcatatcaaaaccctattgctgagtggcaagtgaaaattaagttgcatctggtagtaggctttatagtggcaagtgagttgatgtgcttcaattgtacagttgcatctagtggcaggctttaagtcagaatctgacacttattttagtctgcatgtggcctgcccatttttttatttaccacttccatccgtgtctctttcctgcactgagtacttgtctcagtcatagttttggtaaacccacaagctaaccatagccaaaatgagtaaaaaacaaacatcactagagagctcctttgaaaagggcaaaagacccaatgatgagacagcagaagaatctaagactatcaacaaaaggaacgctgcattt

SEQ ID NO: 4371 - DNA, 423 bp, Homo sapiens
  I.4371 (AA278947)
aaataaatgaataaaaaagaagaaatacctttcataaggctatagctgccattgattcctctgatggacctaggtaaagtaaattgaaaaacttgtggagaggattcagcattccagatgccattaagaacattcgtgattcatgggaggtcaaaatatcaatattaacaggattttggaagaagtggattctaaccctaatggatgattttgagggattcaagacttcaatggaggaagtaactgtagatgtggtggaaatagcaagagaactagaagtggaacctgaagatgtgactgaattgctgcaatctcataaaatttgaacagatgaggagttgcttcttatagataagcagagagagtggtttcttgagatagaatctactccttgtgaagatgctgtgaacactgttgaaatgg

SEQ ID NO: 4372 - DNA, 188 bp, Homo sapiens
  I.4372 (AA278923)
gttgctctcatagaagtaaacagaacagtggttactagaggctgggaagggaaaggctgtaaaagggatagggagaggttggttaaagaatacaaaattacagctagataggaggaataagttctagggttctatagttctggagggtgactatagttagcaataattcattgtatattttcaaaaag

SEQ ID NO: 4373 - DNA, 435 bp, Homo sapiens
  I.4373 (AA278821)
catttatttttatttttagatggtgtttcactcttgttgcccaggctggaagagcaaaactcggtctcaaaaaaaaaaaaagctatcaatcatctaggcctttagcaagtcatattctttgctagttggagggtctttgctccttgttaatggctgctgactgatctggatggtggctgctgaaggttggggtggctgtggcaattccttaaaataagacaacaatgacatttgctatattgattgacttgttttcatgaaagagttcctgatggcgtgtgatgctggttgataatattttacccacagtggaccttttcaaattggagtcaatccagttttctcaaaacctgcctctggctttatcaactaagtttatgggatattcaaatcctttggtgccattttcacagtgttcacagcgtcttcaaaagg

SEQ ID NO: 4374 - DNA, 413 bp, Homo sapiens
  I.4374 (AA278761)
ttttttttttttaaaggatgttaaaaatgtttaattcacacataatattcatacatgtttatgcagtacagagtgagattttaaaaaacttttatttagcctcagggttacatgcgcagatttgttatataggtaaactcgtgacatgagggtttgttgtacagattatttcatcacccaggtactaagcctgggtgatgacaactgcaggctggcattctctaactctcaacatttggcttatacctgcttcttcatctttctggtcctctctctcctccgaccctccactctcaggtaggtcccagtgtctgttgttcctctctttgagtccatgagttctcatcatttagctcccacttataagtgagaacgtgcagtatttatttttctgttcctgcattagtttgcta

SEQ ID NO: 4375 - DNA, 463 bp, Homo sapiens
  I.4375 (AA278234)
gaggcagctctgatcacttccccactgtggaaacaggactgacccagccttcagcgtgggctgctgaagctatcctcctcaggcctcagggatgacctcctgcctgagcctctcacaggctggctgtgggccagtttcatctgctttcctgttgggggtcccgggcctctgctgtccttgacccactggtgttctgtgcaaggcttcttcccattcaccaagtgcacaccttgcatctgccgctcggcatgcagccagttccacacaccatcccattttacagacaaggacgctgaggcctgcagcacagtgtgacttgctcaaggtccagtgagtgacctcattccccagaaaaggctcctcccacaccagagtacagcctgggtagggggaaaatcagttctttcagctaccacccatccaacctttgggcctatgtgaaaagaaaggaactaagctgggt

SEQ ID NO: 4376 - DNA, 481 bp, Homo sapiens
  I.4376 (AA278221)
gataaatcaaaagataattgttcttgaattgggaagctttttaaaaaatcacattcaatctaagaaaaatgattataaatgtgctagttaaaaaaatgtttagcgtgcttctcagggcttttcatctagatcaggaaaattaggattatccgtgtcacttgggcattagagtgaagtttccctgcttttcatctagatcaggaaaattaggattatccgtgtcacttgggcattagaatgaagttttcctgagaactgcagtcaggtttttggcatggctggccttctgttggtcatatgttaggcatggaatggaagatggctcgatgtttgctgcggctgtccatgcccctctacgccatccacaagcctctgaccgagttatccgtgcatgcatttgagcgtttcttgcaggagaggccggggccaaaggaacgcttcagttgcgctgggctgtgcaaggggcctcagcaggagcaac

SEQ ID NO: 4377 - DNA, 157 bp, Homo sapiens
  I.4377 (AA278692)
ttttttttttttttttttgttaggagaatagaacatattttatttaacagttgttagcttgattgataacttttaaatatttagacatatggtatgaggcccctgtgtgtactcttgccctggccctgttggcaatggggtgggcttgggtcagcct

SEQ ID NO: 4378 - DNA, 215 bp, Homo sapiens
  I.4378 (AA226629)
  misc_feature (15)..(15): n is a, c, g, or t
  misc_feature (22)..(22): n is a, c, g, or t
  misc_feature (208)..(208): n is a, c, g, or t
ttttttttttttttnttagganggagtctcactctgtcgcccaggttggagtgcaatggcacaatctcgcctcactacaacctccacctcccgagttcaagcgattctcccacctcagcctccccagtagctgggattagaggcacccgccatcatgtctggctaatttcttttggatttttgtaaaagacgggggtttttgcaatgntggccaa

SEQ ID NO: 4379 - DNA, 429 bp, Homo sapiens
  I.4379 (AA225023)
  misc_feature (283)..(283): n is a, c, g, or t
  misc_feature (384)..(384): n is a, c, g, or t
  misc_feature (402)..(402): n is a, c, g, or t
cgacgtttgttttaatggttcaaaaaaaatctttcttataaagagcataggtagaattagtgaactctttggatcctttgtacagataaaggttatagatttcttgtgttgaatattaaaaaagcaaggatgtctaaccattaagattatccaaagtcaggctgggcgcagtggctcacgcctgtaatcccagcactttgggagggataggtgggcggatcacctgaggtcaggagtttgagaccagcctggccaacatggcaaaaccccgtctctacaaaantacaaaagaaattagccagacatgatggcgggtgcctctaatcccagctactgggggaggctgaggtgggagaatcccttgaactcgggaggtggagtttntagtgaggcgagattgtnccattgccctccaacctggggcgacag

SEQ ID NO: 4380 - DNA, 249 bp, Homo sapiens
  I.4380 (AA484213)
gtcgaccgatttgaaacatttggcaatttgtgtgttggaaatacactcaccacagttgatttaaagctgtcaatgtaaagtcactgaagaaggagacaagatgtgcacaactagttcctatgtgtgagtatgagttggctccagcatactatcgaaaccccacgtgttcttggtagcctttcattcaacagtatttcaagaataacttttcctgtcaacaaatgttcctttgaaaaaaaaaaaaagtcg

SEQ ID NO: 4381 - DNA, 483 bp, Homo sapiens
  I.4381 (AA481282)
tttttttttctgttcccttgctctggttttcttcacagactcttgtccaaaggttgactcactttttaaatttttttcatcttctatttttcttaacatattatccgttgtttatgttcctcctactttagtctccatttctgaaataattttcttttatttctaattcttttcctgagcttcatttcttagttttactaatgctgatcgtttttctttcatgtcttataccatcttattgtttttagctcattttgaaatacaaggttacaattttcgacttgtcttataggtgtatatttctggcttgatttcatcgtctctagggatgctgttcttttccgcatcccgtttttcttgtaacactgtacgggatttgaccttgttattcctgttattgtttttatgtgaaattagttttcctcaacttttagaatgaggtgaattagggtagtttttctaacttcacagagctcccctcct

SEQ ID NO: 4382 - DNA, 499 bp, Homo sapiens
  I.4382 (AA481138)
tttttaaagcctaagcataccctgagaacaacaaccttttttgattagaacagaagaaaaagccagagtgttcttgggctgccaaaatattaatacgtttgtctcaaagacgagccacttaggtgcttgcttagagacttctactttacacagaatttgaaaagtttgacagctggctacttactctgcaaaacggaagggagactttttagaacagcaactggtgatctggcaaaaatgaaaagtagaacttgtgaagaaatgagatggacttggtgtattaatagctaattttagaagaccctgtggatattctaaatcagcataatagtgatgtctgagccatagtgttaaattatgattactgtatttgaagtataagaaggcagaaaagtgtgatgctgttagaaaaaaatctcatttcaaatgattgaaggttaaaaacaattggggaaagattagagagggcaggcggtgctttaagggaggtggaataata

SEQ ID NO: 4383 - DNA, 451 bp, Homo sapiens
  I.4383 (AA482013)
aggcgcgagacgtaagagatgcccaggtttctcggtgactctccccgtaatgcgcgtccagatttctgacctcatgctgccacttcttcgaggcaggtttcttgccaggtaagtcgagcgcttttagggagtccgctacgcagagaaaactgactgtgtcctgccgggaggacttgaaaatggtgttcgggcgactcttttctgaatgacggtacagtcaaaataggaactccgcggtgaacctgggcggccacccctctgccaacttggctatcttgaaacgttgtggaaaatcctctggggaatagctgagaggacttttttgaatggtttctgtaattcctatacccatatgctcagctttatgtatatatgtatattttaatatcctctcttgggaccatgtcacatagtaacaactagtagtaacaactagtagcttgatcttgaa

SEQ ID NO: 4384 - DNA, 424 bp, Homo sapiens
  I.4384 (AA480325)
ttttttttttaagaaaaccaagaatttatttcagtcctgttaagtttgagatgcctaatagacatccaactattgtgttggatatcaaatatatgagtctgccactcaacaggtagactgaattgaacttattaccttatagtgtgtgtgactaggttagaaaaatactattcattaaatgttacaggtaaatatttttcaaaaagcatcttataaaataatactttgctttttgccattctcacactccttgaatctattttattaaaacttttcacacgagtcttttacatcaggtctctgccatcactagaaccactttcccaaactttaacagttctgcaaaccacgtcatattcacctccagataagctgtttgacatgcagcacttttggggcctgtatatgatgttgcctctggata

SEQ ID NO: 4385 - DNA, 317 bp, Homo sapiens
  I.4385 (AA468175)
acaaccatatataggactcagcacacagtaagccaggcatttgcgggacatggaggagatccccacgcttttgtttccctattaaagctctaccaatttttttcgggaagctcaaacctcttcaccactgtctctctgcaatagctcactatttccacctattcggattatgtcttctctggtcacactaattcctttgagttaattattttgcttcagataccaactgcccaagatgagatgagtgaggccatcattggtcaggaaatggggtgaggtgtgtggtactactgaaaggtggcagatagatgcatcag

SEQ ID NO: 4386 - DNA, 360 bp, Homo sapiens
  I.4386 (AA468113)
ggtcgactttttttttttttttcttaaatcttttttaaagtagtactagctcatggaggatttggaaacttacgtagcacaaagaaaggagagagaaaagagtgtgtatgtgtgtttactcagtaaatatttaacaaatgagtgaatcacaattgaattaataattaattcaattaatattagtaatattctttcagactctgcaaacgcatataatcctattttttaaaagagaaatggtataatactgtacgtcatgttttgtagcttgctcttttcacttcagggtttttctcaaacatttccatatgataaacatgatctctattatcatgctagtgttttcatagttttttaatt

SEQ ID NO: 4387 - DNA, 340 bp, Homo sapiens
  I.4387 (AA281688)
gccatagtgcatacatttgctgtttttcatctgattcacctttacctctctacttgatgctatagtacatttacaaatctgcaagtatactgcagaatacaaaatattgcaatgcagtgccatagattatactcaggcaccatagtaataatcagaacaagtagttcttaggaaaaattatggagaagagttcataattggaatgaacatgtttcttgttgcttctaatatctcatggctaattattatgaacatagaattgtcagatgaacctagaaatgactcatatcacattggtacactgattctcttaatgaaataatataggctggtattgggg

SEQ ID NO: 4388 - DNA, 357 bp, Homo sapiens
  I.4388 (AA281627)
tttggaggcacctcaaaatatgcttaaagggccatcctttctccattctcttcctaccatttcatggggctaagggttaaaaaaagaagctatcatccattccagaactatattccaaacatatagattaactgaccatcagtgagaaattcagcatggtgtgagtgtatgactgctagtcactctccacagcaattcttgctagcactgttttgagccagcaaagaattgaatgggccaaggaatcctgctgagcatttcaattctcgtcaatttctatcccctggtggtttataataatagagttagcagggagaacagaggaataacattagtgacacatgtgcttgctctctc

SEQ ID NO: 4389 - DNA, 296 bp, Homo sapiens
  I.4389 (AA281328)
ctaattaggcccggctacctcccgcgccgcccactgcccgctccaggcccgctgcccgctccaggcccgaggtgatggcggctgttcctgccgttctggggcctgtgccagatgctggccgcgtttctcggggcgggacagtctctgctcgcctggcttaacccagacgagcccaggacgccctatccctgaaccccatcgtggcgtgcaggtctgagtaggctctgggccatgtcggggtacctggcttggaggctctcttcagtctcgggagagatatgcttatcccaggcgga

SEQ ID NO: 4390 - DNA, 467 bp, Homo sapiens
  I.4390 (AA281275)
tgctgctttaattaatcaccagtaattttctgcaacatattttctaaacatatcaaagagagtttatagatcttacttaaaagtctctcagtaagattagtctcccagtaagattcatccatcaccttcctgacagactctattcagatgtgaaaaaatggtgtaagaagctgcagtatgcttgtgggtgaacacattcaatcttaggcacacagaaatcctccgcttggaatatggcaactcagtgggtaaaaaggttaggagacattagtgttctttgttatcagaatttcctgtaaactgagcaatagaacaggaataaaatgacctgaaaagggaggatatggaagcattgatttcccaccaagttctttataagcagtttctaccgacaatgaagaaaccttgtttttggcctacttctgtagctaatcgtattgtgttgaatattgtcaaagcaacattcg

SEQ ID NO: 4391 - DNA, 302 bp, Homo sapiens
  I.4391 (AA281154)
ttaataaaaggtccatgtgtccatgtgccatttccatgtgtcaccaactaggagagtccaaaggttcacataggtatgaattcaccatttgagagccataaaagcggccactcccaagttcttcccatgctctcatgttgtatatccgtgaaggtatttagtgcaaggccctgggggtggactagtaacaaggtatatagcacatgtccgaggacaaattggagctacaagacaatgccgtcattagctctttgtccttttaaattatacttattcaggtagttactgcctggttacaaaga

SEQ ID NO: 4392 - DNA, 289 bp, Homo sapiens
  I.4392 (AA465327)
ttcttccctttttattaaaaaggcattttattataaatacattttagttgtagcagtaaaatacattttgttaccatgaatctttgaaaacaaaagaacttcactgagacaatgagcacactgtaggaactgtagaccccaagttgaaaacttgttctatggaaccaaagtagctaacgtaattccaaaactaagttagaaaagataaagacaaagaaagaagaaaataaaaaccctagagagtggctttggggttattttacggtacaaagtcacttttacttttaag

SEQ ID NO: 4393 - DNA, 449 bp, Homo sapiens
  I.4393 (AA465263)
gagtttgtggaaagtgaagaagtgatgtgctggagccagaggccagtgctgggctggggctggctggcctgacccaagccacctggttactcagagcccagcactgggtggaatccctggggtctacaggcattcacccatccccagaagcccagatgagtctctgaacagttggctgtgagtgagatgacctcagaaatggaagaggtcagtgccttagccagacaggcactgacatgaatgtcataggcatgctccagggccttctgagaaatggaaataccatctggatggaatgacctttatgcaacaaaaagtttaattaaaagaagtctcctcaacaggcattgaatattagtgctcgtcaagattcaaaagagatttcccttagaataattcctcaccacatatattgaggttctggagtgattcatcctaccctcatacat

SEQ ID NO: 4394 - DNA, 566 bp, Homo sapiens
  I.4394 (AA465175)
cttttgcaaagggaaagagtgggaaagaagtgtctcttcatagctggcatgggtgatttagatggatttactcacctaagccaacaagtaaatgtacgatttgttactctccaaggtaagttcagaatctccctgttatgcactactctgactctctactgttggttagttcaataataaaattgacttcacagagagctcctctgagtctgaagggtggttggtctccaggagccacctttccaggggccgcgggggtcctggggtatgttacagccacctggaggcccacacaagtacccttcactaggggccattcctgcctcccaggcaggagtcaagtgacagtgtgagtgtgcgtgtgtgtcctgaggtctgggacacttgtccttcaagctgcagcaggaagccagggcataccttctaagattagaacaaatttcctaaggtgccagcccccggtctgcatcccagtcagctgtagcctctcctgttacaagcgtctccaaccctgactcgcttgcagtcagagttagcattttcaggacatggtgctgggcccctgg

SEQ ID NO: 4395 - DNA, 395 bp, Homo sapiens
  I.4395 (AA465153)
ttttttctggttagcacaaacatttatgtatgagggtaggatgaatcactccagaacctcaatatatgtggtgaggaattattctaagggaaatctcttttgaatcttgacgagcactaatattcaatgcctgttgaggagacttcttttaattaaactttttgttgcataaaggtcattccatccagatggtatttccatttctcagaaggccctggagcatgcctatgacattcatgtcagtgcctgtctggctaaggcactgacctcttccatttctgaggtcatctcactcacagccaactgttcagagactcatctgggcttctggggatgggtgaatgcctgtagaccccagggattccacccagtgctgggctctgagtaaccaggtg

SEQ ID NO: 4396 - DNA, 293 bp, Homo sapiens
  I.4396 (AA412562)
gattctgaggcctccccagccacgtggaactgtaagtccaattaaacttctttttcttcccagtctccggtatgtctttatcagcagcatgaaaacaagactaatacacccccacaccatggtaccgaagacgggacacagctgctctactgattaaattcaactgacgtgaggttgcagctattctattcatatattcaccatcccattcttgatgatgttcctcaagcttacttaacttgcacgtggatgcagaagaaaggtttcttttgaaagactgttgtaaataaaag

SEQ ID NO: 4397 - DNA, 238 bp, Homo sapiens
  I.4397 (AA412418)
tttaatttgtaaaggaaagagtttttattgacttgcagttccacagggctggggaagcctcaggagacttacaatcacggtggaagaagaagcaaacatgtccttcttcacacggtagcagaaaggagaagtgccaagaaatgtcctctgacatgaaaatcggtaaataaattacaatgaacacaatacagccatgaaatgtaccaacgatctctgcatcaggtgctgacataaaaga

SEQ ID NO: 4398 - DNA, 411 bp, Homo sapiens
  I.4398 (AA412715)
tttttgtttttgaatgctcttaaaagacaaaaaaaaaaaaaagacaaaagtttgtatcacatcagaagttccctacgtgctcttcaaagctgattgcttgcagttaaaagaacccagaagaagcaggcacgccatgattttgaagctccgtttttgttctgttattcaactgcagtcaacttccaacagccggaaacaacaattcgctgaccatctttggcctcttgccactaaggagttttggttttcccatctgtagaaattcttaattgagtccatcagattcccagtcatcctagccatggttaccttcttctctaagttggcaggttagtgagcttaggctagcacttcagcatcaaatttagacttcataataaagtaaatcacacagggaatagctgtcagcat

SEQ ID NO: 4399 - DNA, 405 bp, Homo sapiens
  I.4399 (AA405907)
ttttgcagggaaagaagtcaggttttaatggtattgatatgtgagcaggacatcctgacattgaggtggccagaagaagccgctggaaggaaggaatgggaccacaccacccaacgctctgggcacatgatgctcaggttatgtggacttttcatttttttttttttttttgagacagggtctcactctgttgcccaggttgctggagtgcagtggcatgatcacggctcatagcagcctccaacttctgggctcaagcaatcctcccgccttagcctccagagtggctgggactacaggcgtgtgccatggtgcctagccaacattgatcttttatccagtgccaccacacacacattagcacctcaaaggtgggaagtcagtcatcagtcctcccctgttgtc

SEQ ID NO: 4400 - DNA, 577 bp, Homo sapiens
  I.4400 (AA401706)
cccagaagatgaggatacagaattggctgacaactacgttctaaatgtcagtgttctccaaaattcatatgttgaaacttaattcccaatgtgatggcattaggaagtggggcctttgggggagggactataggtcatgagggtgtaacctcatcaatgggattagtgtccagagagctgccttgcccttccaccatgtgaggacatagtgagaaggtgccatctatgaactaggaagtgggcgcttaccaccagacacccactcttctggcaacttgatcttgaatttcccagcctccagaactctgagaaatcaatttctgttaattataagctacccagtcgatagcattttgttaaagctgctggaactaaactaagacactgacgctttctgcgacaaaaagatagagtgagtctctatagcataccatgtaacagatgtttttggaaaaataacctcatttcatatgtttcctcaagataaaaagaatgtcataacaacaaatgagaaaatagttgctttagaaatattgcaccctatggagagagtattttggattttggttttttgttt

SEQ ID NO: 4401 - DNA, 333 bp, Homo sapiens
  I.4401 (AA402225)
tttaatgtgaactgcatgtttcctaaaattcccctttagtcttctgttctcaaaagccagctctctcattattattccacattagttccatttgctagtttgatgactaaaggcctggtggcagatgcaaattctgctttctgatgttaatttaacatcagatgttgtgagtctgtcattcgccaaaagcttacaggagtctcacaatcattttgagaagtactgcacaaatctatgcaatacaacatacttatacaaatggatttgttagttctgaaagtgaacattcacccaactaaaaggtaaaaagaccacgattcctttggtaaagag

SEQ ID NO: 4402 - DNA, 307 bp, Homo sapiens
  I.4402 (AA401726)
tttcatcatcaattaatatttattgagtgcacatacaggggaatgggcaatttgctgaacgtcctgacccagagccctaactgcaagaacaagacgaatggacacagccctccctccctgtggcccaggcagagggggttgtctgaattcgagcacatgcatatgtgtttgtccaaagtctggcaacaattcctattagctggactgtgccaagctttaccacaactctgatttagcaaattaatattttgaagaaaagacaaaataatattgtaacttgcttccagcaagggattgagtgccagtg

SEQ ID NO: 4403 - DNA, 350 bp, Homo sapiens
  I.4403 (AA401696)
  misc_feature (318)..(318): n is a, c, g, or t
ttttgttttaaaatttttattcatgtttattttaaccacaatactaattgctattcctaaaatatgtttttctttctcctcctcccttatggagtattaaatgttttaatgtcatggcaaactcttttattagcttaggattactttatatatatatataaagaaaaaaattaatagcaagttacgagaaaatgtacatttttcttgtaatgtatctttacatatttcaaagaggcaagtggcagcaaatgtgaaataagcataagcaaagtgctttcatttaagtgcttagaggattaatcaaggagcacttcctanggaagtgtggttttgaagattttaaagagaag

SEQ ID NO: 4404 - DNA, 315 bp, Homo sapiens
  I.4404 (AA401691)
tttagtttttaaaacataggcagattttattagatgtgttaagtagtaagtagaacatgtgttagacacagaaaggaatagaaagtccaggatacctaacattcctagctaccaagtatacatgagacacctgagcatgaaatatttgatacattaaatgtccaagaggcactaaatacagtgcataaaatacacataagcatgaaatagtcatgctattcacttctgtccccaagtgtcctctgtccaagaaacacagtaaaacccatggttgctccacaggccaacaggcaaagctcagctctttgccaggct

SEQ ID NO: 4405 - DNA, 265 bp, Homo sapiens
  I.4405 (AA401670)
tctggaggggcgaccggcctggcacagaggggaaggaagagagcgggatgctaagtgccgtctggggagccggaggcccggggcgtgcggggctgctcgaggacagccgagcagaaaagaattgcttgctgaggcaccacctttggagcggtcctcgctgcctgtccttcccgctgggctcactccccgcgtctctcctggggcttcctggagccacttcccacaggagctgcttgtcccaaatcttgcctcaggacttgctgcc

SEQ ID NO: 4406 - DNA, 359 bp, Homo sapiens
  I.4406 (AA401900)
caggctgtgaaaacacttcaggccagtccctgagtaggaatggacaacaaggtggtcaccatgctgacagctattccctgtgtgatttactttattatgaagtctaaatttgatgctgaagtgctagcctaagctcactaacctgccaacttagagaagaaggtaaccatggctaggatgactgggaatctgatggactcaattaagaatttctacagatgggaaaaccaaaactccttagtggcaagaggccaaagatggtcagcgaattgttgtttccggctgttggaagttgactgcagttgaataacagaacaaaaacggagcttcaaaatcatggcgtgcctgcttcttctggg

SEQ ID NO: 4407 - DNA, 229 bp, Homo sapiens
  I.4407 (AA400790)
gtgagcaccagataaacttttattgtgttcagccaagtgagatttaggtgtttatccatacagcaactagtgtcacctgaagggatacagagatttttctcccttttgctggcagctgcatgcagatgtgacacttcaaggcttaagagcagtgctgaccctgtagggtggaggagactggaggggaggtatccggagaagtatgagcaccaccagcagatggggtggt

SEQ ID NO: 4408 - DNA, 231 bp, Homo sapiens
  I.4408 (AA400778)
ataattcgtaacattcttttccagtcaaggagtgatatgtagtgttgcttggctcctcagtccaatctgtgccattactaaggaaacccatggcgggtaggtcaatccctcctagccaagcgcttacgttattagaggctgggaagggagtatctgcacaggtaacagtgcagaagaaaggcagatttagaagatgggcttaatagagtgtagcaggtaccagttgcaacc

SEQ ID NO: 4409 - DNA, 428 bp, Homo sapiens
  I.4409 (AA399436)
  misc_feature (267)..(267): n is a, c, g, or t
  misc_feature (428)..(428): n is a, c, g, or t
gcagtttggaggtttctcaaaggacttaaaacagaactgccattcaacccagcaatcccattactggtcatatagccaaaagaaaacaagtcattttaccaaaaagacacatacactcacatgttcattacagcactattcacaacagcaaagacatgcaatcaatctagcggctcatcaacagttgattagataaagaaaatgtggtgcatgtacaccatgaaatactacacagccataaaagagaataaaatattgtgctttgangcaccaatggatatagctggaggccattatcctaagcaaattaatacaggaacagaaaaccagataccacatgttcgcacttacaagcgggactagacattgggtattcctggaccaaaagatggcaacaatagacactgggactactggggaggggagan

SEQ ID NO: 4410 - DNA, 343 bp, Homo sapiens
  I.4410 (AA399422)
ggtttacagaacttttatttggattctttccttgtctgttaataatataggctgcacctgggcatcatcgtgcccttcctttttgattctgctgttttgcttttaatcctacaggcatttcttctggcaggagccttgtacacactctgggtggttcatgaccaccacggacttgccctttcaaggcagaagcctgtgattcaaaaacttccattccttccaatcgactattataaaactcattttgtctagtgcccatactcctttaccttaggatcctgggccaactgtcactaaagaaaacaaaccatttcctcctcctgggggaatgtgcttctttcaa

SEQ ID NO: 4411 - DNA, 371 bp, Homo sapiens
  I.4411 (AA399404)
cgggatttcattatgttggccgggctggtctcgaactcctgacctcatgatccgcccgcctcggcctcccagggtgctgggattgcaggcgtgacactgcgcccggcaaagctgagttttaaactgttccttccttcattcagacacttactgagccctagtaagaagccacccatgttctaggccaggggttgacaaactttctctaaagggtcagacagtgaatatgttagcctttataggccacatacagtctctatcactactaccaccaataataataataattctttctcattttctcattcctcttctccttctttacagctcttaaaaaatattaaaaaaaaaaaccaaacctacaaaacaga

SEQ ID NO: 4412 - DNA, 532 bp, Homo sapiens
  I.4412 (AA399324)
caatagagcaagactcagactcaaaaaaaaaaaaaaaaaaaaaatcttcaaatggcacctgatatcctgcagctgtacatcccaaacacagaatctaagattaacgctgatgaaatgagtacggaacaaggacaactttgtgaattttttctaaagttaaagtattcaatggattgtttattgtgagattttgcttcctgcttttttggtgttaaaatatccttttgtttatgaaaagatagatgagtaaatgatagtttttaagaaacatctccacctagtaaacagaaaagttggcagaactacagcagctgagttttattttatattgtaatggctcaatacaaaaatgtcagggaaacactgaatgaccggaaatccaagaaatccaaaaggcaaacaaggccctcactgatttatttcctctcactttcccagacgttttgctccagcaatataagagtgcaaggatgtccagcatacaacctactaattatttccctttcctcatgctttcccatgaatggaatga

SEQ ID NO: 4413 - DNA, 408 bp, Homo sapiens
  I.4413 (AA399545)
gagagagagattgatttaataagatagcaatgggccaacaggaaagtaattttcaaaagaatgccagaaatatgttgagccgtgaccagcaggactgtagggacaggtagcttgaagaatcgtaggatcttggagagcagctatgactcccttattggccccccagacgctgacagaatcttcatcatactgatactgaggccgcaagatattggtgtggttcaacagtagtttcagcctgggtagtgggatggcagctacaaagctgtacacaatgctggccttctcaaggctggtgtaaatttctacgcagatattaggcagctgagacggcaagcagcagaggaatatcacatcggcccaactcaccagatcagcgttatggtaaaagcatttgattcccagctt

SEQ ID NO: 4414 - DNA, 500 bp, Homo sapiens
  I.4414 (AA398890)
tttggttagtaaatgttttatttgtgaaaagagatactggaatgctgaaacttgttagaaatagcatcgtgctgaaatcttccatccccttcgccactcacggcaacacccatgtcactcctcattctctccttgctctgcccgggtggctggcctccccacgctcctgagaaggtactggttgtgctttcagcttctgcgtttcctcgcccccctcactcctccgtccagaggcagccttacttctccaaagaggacgctctgagtctgcgttcccctggcagcaagtcctgaggcaagatttggggacaagcagctcctgtgggaagtggctccaggaagccccaggagagacgcggggagtgagcccacggaaggacaggcagcgaggaccgtcaaaggtggtgcctacagcattctttctgctcgctgtctcggcagcccgccgcccggcctccgctcccagacgcattagatccgtctctcttcccttggcaggc

SEQ ID NO: 4415 - DNA, 419 bp, Homo sapiens
  I.4415 (AA398760)
tttttattcaaattttattggaagtttacaaatgtattacagacatcagtaaaacatcatatccattttacagggcacggatctcaagcaaagtgttcagaacagtctctggcagagccacaccaaaggcctgttgcagaccttcttaacaaatagcttgacactcaacacagaacacagactctggcctgcctcaccttcccaggccctttgaggttttgtttatgcacttgaaatgaaagcaggagatggacaaagcaatcctgtggaggaaagaatgagtttaggagaggaaaacctgccgaagtcctaatttgctaaaaaaaaattaattaaaaaatggaggactcatagtccttacaatgttaagtcagggtctatgatagaatcatgacactttatggaaagatatgaaaatc

SEQ ID NO: 4416 - DNA, 364 bp, Homo sapiens
  I.4416 (AA398646)
tttttttcagttttaacattttattgtaattttatatacaaagaatgcttaacattaacagagcttagaacaacagcaacatttacagaaaactggattacagatgtttaacaactaatttgtttgaacccaaacattgttttacaaatacctgtagtttaaaaaaacaaaaaaaaaaaaccaatcccccaaaccgctccaactcctccccacaaagaaacaatggtaggaatagaccaaaaactcaaatatggtccttacagtacataagaataaaaacagtaaactataaacttctaagtgttaactctatactaaaccactttgcattagaaaattataaaataggatggctttagtccac

SEQ ID NO: 4417 - DNA, 443 bp, Homo sapiens
  I.4417 (AA398611)
tttgaatctttaatgaatatttaattaggaccttttcagacagtgtaatagttgggggaaaaaagatgcctttttccaacacaccactgagttgaagaggatggaaaaagtcaacagatgagtttcctgtctttcccgccagttcccttaaaccatttctgcttttcatttcttctccttttcttacatctctgcatctgtggactctcctgtcgtctccaggagcaaggcagagacacattcttgtctgtgagcagatgacttgtctagaaatcatggacagcctgcaagtccttccagtcctcccaagaatctgacatggttttaggcagagaagaggctcagaggcctgctgactcaacatctcttacaagcgcctttgagtttctccaggaagcgctgaggttttctcagaagtcaaaaaactttttctgtattgtttg

SEQ ID NO: 4418 - DNA, 356 bp, Homo sapiens
  I.4418 (AA398364)
gttttgtttgttttgtttttttttttaatattttttaagagctgtaaagaaggagaagaggaatgagaaaatgagaaagaattattattattattggtggtagtagtgatagagactgtatgtggcctataaaggctaacatattcactgtctgaccctttagagaaagtttgtcaacccctggcctagaacatgggtggcttcttactagggctcagtaagtgtctgaatgaaggaaggaacagtttaaaactcagctttgccgggcgcagtggctcacgcctgcaatcccagcaccctgggaggccgaggcgggcggatcatgaggtcaggagttcgagaccagcccggccaac

SEQ ID NO: 4419 - DNA, 337 bp, Homo sapiens
  I.4419 (AA398331)
aagtttatgctaattgatttattaaattcagaaatatttaccgagtacctgttttgtgttacgtcctgataatatcaaaatgaacaagacaccttccgtaacaaaagaggactattagctagttaggaagaaaattgtaaacagataattgtaaaacaatatgggaaggcagtgatagggatatgtacaaaatacaatggtagtacttgaatatctttcctaaactagtctggggatctgggaaggcgtcttggaggagttaatatctaagttgagctttgaagggtaggttaagagttgactaggatgagagaggataagcttgatttttcttttt

SEQ ID NO: 4420 - DNA, 199 bp, Homo sapiens
  I.4420 (AA398293)
tttattatactttaagttctggggtacatgtgcaattcctcaattagaattttaattttaccttgagaaagcaaagtaactttttgttaatattccggttatcgtatcattccacacactgaattcatttaggctagaccaaaagactgaagtctttagtcttttgacttaggtcattgtgggactcacaaatcctcat

SEQ ID NO: 4421 - DNA, 416 bp, Homo sapiens
  I.4421 (AA398290)
tttttctgcttagcaaatttttattttttatttttattgttcacatcaggcaggtaatgtgccaatgacaaggctcaagggaggcacatctcacatgtggacgcgaaaactcaatcatcaagcttatgaaccacaaaaggatctagaaaagttttaaacatatgacacaattctgtgtccatgcttgtgtgcaaataggtcacactgttgtataactttttgacttaaaatcatctaacagtggaaatgctttccaacattctttttcaaaacactctctcaacttcatgaacataatgaagagaacaacatacactggggcctatttgagggtggagggtgggaggagagagaggaggagaaaaagcaactattgggtactaggcttagtacctgggtgaggaaattatctgtac

SEQ ID NO: 4422 - DNA, 483 bp, Homo sapiens
  I.4422 (AA398265)
tttttcagttagtaccaagttttttattttcttaattttaattttttaaacttttttctttccaacttttattttaggttaagggggtacatatgcacgtttgttacataggaaaattgtgtatcatgacggtttggtgtacagattacttcattacccaggtaataagcatagtacccaataggtagttgtttgatactcaccctcctcccacttctgatttttaagagatcaatttggaaaccccatgtaatgtctttttgttgttgtttttataaatcttttggcatttttaggattttttaaacttttattttagactcagggggtacatatgcaggttcgttatctaggtaatattgtgtaatactgaggtttggtgtatgaatgatcccatcacccagacactgagcatagtacccaacagtttttcaacatttcctttcctctcccctccccagtagtcccagtgtctattgttgc

SEQ ID NO: 4423 - DNA, 440 bp, Homo sapiens
  I.4423 (AA397919)
ttttctgtttaagaacagctggtttattcttttgatttattgtaggtattaaaagtttcttttgtgagatggcacataggcaggtttggtgtttcctaacactatgaatatcttaaattgcttttgaaagttttatccacaaagaaagaaaaataagggtttcctcacagttgaaaatagtttttgaaaaaaggttaagaggaaaaaaatctaaataccatccttgataaagaaatggaacttcaagttaaaaatacaaatttaaatgaagttttataaaatattaaaaactagctaaaagtacatgcataggcatttaatcaaggtaagaggaacagcagtggaacttaaatatgatacaatttatcaacaataaataaacatttcagtgcaaatagtgcagaaaaatttctcaaagatcatagcaatcattctaatcg

SEQ ID NO: 4424 - DNA, 433 bp, Homo sapiens
  I.4424 (AA397913)
gcgaccgcgcctccggtccgctccgtagccgacccctaaagatccgggcacaaaacacactaaaagcaatcagcaaagcgtcctctgcagactgtttcgcctagcaaagtcctgaccctcccaacctggccagcagctcacagcctccttagggctctagcttctcccttttgccttgccccacccccactgggtgacagcgaggaccccaacttcagacctcctataaggtgggacctgtgtgtcccaaagaaaggtgtgtggtgggggggggggcgggggggcgggcaaaaggcaaacagaaagctgcaagtctaaaagcagatttttgaaaaatcccagataatggggatgagggcccctttctcaaggactgggctcccccatctccccaagcatcctagttccttggaaacttctccccacttatctg

SEQ ID NO: 4425 - DNA, 422 bp, Homo sapiens
  I.4425 (AA397957)
gaagaaggaaaagtatttttaaaagacaatctgaagctcatactgtgactgcaacataaaatgtgttcacctgaggagactgctttcatcgccagtgtgtcacagaaggtctctgatggttctggtttcctgggcacctagaataagtgtgtcaccatttgtcctgaagctgacttctctgagctggatggcaccctggacatcaaccagcccttcaccttcacgtcacacaggagggacactggtccatagagaggatgcctgctctggtcaccagctggagagtggcagaccttgggtacctgacctttggactctgccacacagagcacttcctcagtccctcctgctgcccctggcagggtggagctggcagggcagctgatccaggaccgtccacttccaagccagcaggaggatgg

SEQ ID NO: 4426 - DNA, 684 bp, Homo sapiens
  I.4426 (AA397580)
  misc_feature (639)..(639): n is a, c, g, or t
gcacacacaccatcatacacacacctcctacatagacccctcttctaccgggatagggagccaaattgattagtgtctatcactgcaggaaatagtggcttggaaatggacatgctccaggaccttgagtccctgcagtttgagtatggggttccagaggaagatcgtatctggctgtatttgcagggccgttctcggggactgatgatcgaggcttgtgcccatgcaaccttcttctgcaaactattatataatttgagagcatcattaaataagaatcaaagttccagacatctctcaattggctcccttaattcagccactcctgaagagtttaaggtgggcatcattggaggtggccacttgggaagcagctggctggcacactgctgcagcttggccccatccctgctgaaagcctgcggatctccactcggaggccagagactctgggtgagctccagaagctgggaataaatgcttttaccataacgctgatctggtgagttgggccgatgtgatttcctctgctgcttgccgtctcagctgcctatatctgcgtagaaatttacacagccttgagaaggcagcattgtgtacagcttgtagctgccatccactacccaggctgaactactngttgagcaaaccatatcttggcggctcaggatcagtatgataggg

SEQ ID NO: 4427 - DNA, 339 bp, Homo sapiens
  I.4427 (AA398852)
tttacagatttttttgtactgtgtgatttgaactttttgttccttgctatgatcaatgtttatgtagtagagcacttatgatcacaaattaagttttttggtttgattgcactacattaaattttttaatgcagttctgatttttgactggactaaaactgtgtcttaatgtatgtgatgagtacttaaaattttaatccatgtggtccccccccgttttttttttttttgcattgtatgtcaaaagcgcttgttctttcgtgcatgtgtaagatttaatggttccattgtattatttgaccatgacattttggagaaacattcccagctgtaatgttg

SEQ ID NO: 4428 - DNA, 495 bp, Homo sapiens
  I.4428 (AA398850)
gacccgagagcagcgaaagtcggttgtgactcactgggtcccgagggagttgacaggcgtcgttgggtttcagtaggagcctagcgccgtccgtagttgtcgttgagagtgaggctcgtgctgtacgtacctgttcttctggctcgtaagatcgtgaagtgttgtgaccgactaatttgctcgtttcctggtagagtaacccacagtttggtccacaaggcttgctgcccaatctttgccaacagttgaaccaagactctgaggctgatatgcaatgtcacttacaacattaatcagatactgcatttaagtacagacggggtttcaccatgttggccaggatggtctcaatctgttgacctcgcgatccgcccgcctcagcctcccaaagtgctgggattacaggcgtgcgagccgcgcccagcctgaactttccatttctctcccaagtctcctattctacatgctgaggatgccagaggtccccttaccaca

SEQ ID NO: 4429 - DNA, 444 bp, Homo sapiens
  I.4429 (AA398837)
attatgcctctctctgctcccggggctgtacaggacagagtaggagaggtgcaggccccatggaggcaaggaaaagcagactgagcatttccaaatggtggggccactggagatccacaaagtcactgctcagaggaggactcttgagtgatttctgcaattttcatgtaaatctgtagaaagcaaagtctatttctcttcagtaatgtttgaccaatcagacgctatccgcatagagacaggtcaaagaaacagccagaggggattgcttctctgaggtttgttactaaacaaatcttctctgattactaaacttctaaggcaattactctctttgctgccacaaatgctacattttctaattcttgtcttaaagtgtacaaaatgttacaaagagcagggttatctctctataccgcattgtcaatttaaagattgtctttt

SEQ ID NO: 4430 - DNA, 454 bp, Homo sapiens
  I.4430 (AA397739)
tggcaactgtaaactgacacagcacactgttgggcgtgcttagcgggaggtgcttctgccacgcacctgttttagctagtccctcaatttggtctggtgtcagagcacgcctccagagtccagtcccacttcctaccccaggttgaatgatagtcctccaaaagataagtctactgcctaacacttagaacctgtgaatgtgacattttttggaaagcgagtatttgcagatttgattatattaaggatgccaatttgagattatcctggattaagtgggtgggccctaaattcagtaacaagtgtcctgataagcaacacagaggagagacttggagagaagtgagaagaccatgtgaagacagaggcagggatttgaggtatacagccacaagccaaggagtggctggagcacaaggagctggaagagacaagaaggattcttctccagagc

SEQ ID NO: 4431 - DNA, 521 bp, Homo sapiens
  I.4431 (AA394302)
cagtggatgcttcaataccgacaagccaaaatggttttgggtacaagatgccagatgtccctgatgcatttccagaactctcagaactaagtgtgtcacaactcacagatatgaatgaacaagaggaggtattactagaacagtttctgactttgcctcaactaaaacaaattattaccgacaaagatgacttagtaaaaagtattgaggaactagcaagaaaaaatctccttttggagcccagcttggaagccaaaagacaaactgttttagataagatgaagtccactttcgaaaagaagatgcaaaggcagcatgaacttagtgagagctgtagtgcaagtgcccttcaggcaagattgaaagtagctgcacatgaagctgaggaagaatctgataatattgcagaagacttcttggagggaaagatggaaatagatgattttctcagtagcttcatggaaaagagaacaatttgccactgtagaagagccaaggaagagaaacttcagcaggcgata

SEQ ID NO: 4432 - DNA, 184 bp, Homo sapiens
  I.4432 (AA394227)
gtggagtcagtctgaggttgtgggggctcgagaacacaggcagattatttgggagatgtttccaaggaactaggatgcttggggagatgggggagcccagtccttgagaaagggggccctcatccccattatctgggatttttcaaaaatctgcttttagacttgcagctttctgtttgccttt

SEQ ID NO: 4433 - DNA, 359 bp, Homo sapiens
  I.4433 (AA393949)
ctgaattgtgccccccaaccagatgcttctgttgaagttctaactcctgaatggatttggagctagggccttaaaggaggtaattaaggttacaaagattctaagggtggcgcctaacctgataggactgatgcctttataaaaagaggaacagacaccagaaatctcaatctctctctctctctctctctctgtctccacacacacacaccgaggaaaggccatgtgaggacacagcaagaagacagctgtctgcaagccaggaagagaagcctcactagaaaccagccctgccagcactttgatctttgatcttggacttatagcccctagaactgtgagaaaataaacttctgttg

SEQ ID NO: 4434 - DNA, 408 bp, Homo sapiens
  I.4434 (AA393541)
gcctgttgctgaagattcagaactagcagcaacaccaaaacaaaaagatcaagctggggtgacattgtaacgagaacttctcagctggagttaattgatttgaacaattcaagtccaccaggcaaatcagcccaggacagcttaccacgctggccgagttaatttttttttcacatagtttttgaacggctgcgatgttaagaggagaccaaaggctgtgagatggagaaaatagaattcactgaatgtcaagggacttgcccagggacacacagtgttgtgctttctccattacacagtcacctaattgaagattggccccaaatcttatttatcttggtgtctattggcaatggcatgcctcacacataataagtattgagaaaatgattgttgattaaatgaatg

SEQ ID NO: 4435 - DNA, 458 bp, Homo sapiens
  I.4435 (AA393186)
gcttgcattttctgctcaacaatgtgtatcttctgtttgggaaagcactagtgatggattactttttaaagcaatacatttagcttgcaaattgtgcctttaaaaaaaaaaataggcagacttttgagggccaagaaggaagctgtccagttttccaaaaatcctttttccctgctatcagaaatgtgaaaccaaatttagcaaccaagattaatgaaaagatgggttttccattagtgctgtccctatcttgttcttggctttgttatgtcctttcccctagactgtatcccgacaaaatgtcctagtaacaaattgctttttaagctcctgttctgggaaaactaagcattaaaattgattattctaaaacataaagtggactaaagccatcctattttataattttctaatgcaaagtggtttagtatagagttaacacttagaagtttatagtt

SEQ ID NO: 4436 - DNA, 427 bp, Homo sapiens
  I.4436 (AA393060)
caacaacggcttcagggagtcggaccagcttttcaaacaatacagaaaaagttttttgacttctgagaaaacctcagcgcttcctggagaaactcaaaggcgcttgtaagagatgttgagtcagcaggcctctgagcctcttctctgcctaaaaccatgtcagattctcgggaggactggaaggacttgcaggctgtccatgatttctagacaagtcatctgctcacagacaagaatgtgtctctgccttgctcctggagacgacaggagagtccacagatgcagagatgtaagataaggagaagaaatgaaaagcagaaatggtttaagggaactggcgggaaagacaggaaactcatctgttgactttttccatcctcttcaactcagtggtgtgttggaaaaaggcacttttttccccaactat

SEQ ID NO: 4437 - DNA, 458 bp, Homo sapiens
  I.4437 (AA292920)
atctcatgtagctcaatctctcacttgaccatgtgagattcatttgccaaggctagaatgaaagtctacaaaggaaattcaaaaggcattgccaataaaggactagttaggccattaagtatatttgaaagtgtaatgaggatctaaagggaaattttgtcttattgcatacagtctctcaaagatgttgtatatacattccacacatttataaagcaagtaccatttgccaagcactgtattacaaagtatgtgtcacctgcacttaatctttgtttatgcacaatcatagtgcagtgtctgaaaattacatttagatctgattcttcaaaccataaattaaaataattgaaattccatagtttagaataaaagggacttattaaactaaatatctggatctatttctctgtatttcaaaaccaaacattctttggtacctaatccacatagagtat

SEQ ID NO: 4438 - DNA, 410 bp, Homo sapiens
  I.4438 (AA292893)
atggagagtttgctgagcacctactatgtgccggcccctgtgctgatggaacaattttatggagagagacccacaaagacacacacagacaaaccaatggcacagacacctacacctgcacagcactgacttgagaggtgagaaaaatccttcttcaggagcatggggagcttttattacttaggagtggtaattgctgacacacaaaatggtcagactccccagaacacatggtgtttctggggataaaaattattggaggaagaggatttttaaaatttgcaagtactagagagtgaaaaggaagatctattggtttaattttcaaaggagtttaattgctgctttttaaaactatatggagtatttgaactgagaaggactgtagagattgtaaggtcaaatgtctc

SEQ ID NO: 4439 - DNA, 534 bp, Homo sapiens
  I.4439 (AA292880)
ctattttaaacataatccaaaatgtttccataagcaacttgatctctctcctttattttgaaagtggcagtatcaaaatggaaccattagcagcttgctaatattttgatgcagaaaaggaatctcattattctattttactcacatcatctttccactacaaaagcccatggacaaaatagctacctaaatttgtttcggtaaaaaatttactgtaaaattgaaaaacagcctgaagctactgacattaagtgctgtttgcaggagcaaaccagtgattttctattaattgttaatcatggacagaagattttaggcagctcatttttttctaaagtgattcaaaatagttttgtgtgggaaaaagctcttctgctgattacatatagctataaagattaaaacctagccacctgctcagtttgatcttccccagctcagacctctcccttctgagcagatgatagaggtaagatgatacatgagaacctccaatggctcctgtcatcacatactgtataaaatccaagttcc

SEQ ID NO: 4440 - DNA, 498 bp, Homo sapiens
  I.4440 (AA292875)
gtgaaaagcaagaggaaagagatgggataagtaaacgctgtcaagagacggtgcaaatctggtggaagatgcctgctacctaaagcctacctcatacaatgttcaggggccaccatcccccacctgccccaacctccacccctctctgtgatattgactttcctgtggatagtggtgctgaagacgacaggtttgagcaaggagactcaaagaggcaaggtgccccacgccaatgacacaaacttgctctgtccgagatgcaggtacaagcaagcctggcaaagagctgagctttgcctgttggcctgtggagcaaccatgggttttactgtgtttcttggacagaggacacttggggacagaagtgaatagcatgactatttcatgcttatgtgtattttatgcactgtatttagtgcctcttggacatttaatgtatcagatatttcatgctcaggtgtctcatgtatacttggtagctaggaatgttaggtatcc

SEQ ID NO: 4441 - DNA, 351 bp, Homo sapiens
  I.4441 (AA293869)
ggaagagagaaatagtagaatgacaggccatgtttggcctgttggaaatgcccaccaccctttggtaagatttactggccgtttatagaaggcctgtgtatataatatgaaaaagcttctctcaactccaccccaaccttttaatagaaaatatttgccatatttagcccttctatagatggaaaaagccacgctgttttacttttataagcaatattgcattaaatttttaataatgaagaaaatccttcctgggtcgagtggggacttagagaacttttctgtcttacaagaggtttgtaaaatgcactcccaggcttttcaagaaattaaaaacaatctcttgacagt

SEQ ID NO: 4442 - DNA, 338 bp, Homo sapiens
  I.4442 (AA292804)
aggaaatataaaggaggggaaagtcacatagtgttaggaaaacattcctgtgttttgaatacgatgaatccataggatagagaaaaatctgcttgttctattctgagagttctctgagatatcccttcactctgcttggcatttggccattgatattcaacaggtcactgaccaagcttttctaaatttttcagagagagttacttaccaataaggtctgttcttaaacctacctagttgattttcatatctttccataaagtgtcatgattctatcatagaccctgacttaacattgtaaggactatgagtcctccattttttaattaatttttttt

SEQ ID NO: 4443 - DNA, 445 bp, Homo sapiens
  I.4443 (AA293363)
ctgaaatacaaaacatttcattaactgctctaagatgtgtctgctaatggtgcttaaattctcccaagaggttctcgcttttatttgacggaggtggaagagaaacagatatgcaaccaatctgatttggttccacaccctgccacagaagtcccaaaggagaagcaaatgccacttgtagactcaaactctggacttcattctcagcaccatctcttaacctactgagtaaatcctatgaacctgactagggtggcaactgaagttgtagtactttctgtcttcaaaggagggtgaacctggagtatgttggaagaagtgttaggttcattagagacacctctttcataactgctgtcacctagaatgtctattctctaagcaccttcttgaaagaagcacattcccccaggaggaggaaatggtttgttttctttagtgacag

SEQ ID NO: 4444 - DNA, 386 bp, Homo sapiens
  I.4444 (AA548307)
tttttttttaaaagaaaccgagtttattagagcaacggtatatagtaaaacagctgcttgctccatagacagagcagggctatcctataggcagggtggcccagagtagcccagttatttacaatggctttaaatgacaaggcccggctatgtgccagaaacctcacatcctcccactacctggtgcacaggggctcatcccattttccaacaaggaaactgtgcctccagctaggcagcctgtgctttctgccagaccacactgcctccccatgctggtcaccatgcacgcagagctgacacagcattgcctctggcccccagggagagcaccactctttaggccagctcgccctgcctgcagacagaaaatgcccagccagagc

SEQ ID NO: 4445 - DNA, 295 bp, Homo sapiens
  I.4445 (AA496309)
agctgtttgaggacaaactccaaggtcccttaaaaagtgccttttagaggctgggcatggtggctcacgcttgtaatcccagcactttgggaggccaaggtgggtggatcacctgaggtcaggagttcaagaccagcctggccaacatggtgaaacctgtctctactaaaaatacaaaaattagccaggcatggtagcaggtgcctgtaatcccagctactggggaaagctgagggcaggagaattgcttcaatctggaaggcagaggttgcagtgatattgcaccattgcattc

SEQ ID NO: 4446 - DNA, 491 bp, Homo sapiens
  I.4446 (AA496108)
tttttactctaaagaagacaatttggttttattttatatgtgcatgttaacttgctttgagatcatcattttgtattttagggtattcacttagatgaagtaagatgttcttcatttgttactgaaaggggacatggcctcactccaggagattaaagctggaacaccttctgccttctgtagggataatcacagctcacctggctgtagctcaaggtcagggcaaaaagaggggactttgtgctttttagaattgcctatgactacagtagagaagaggaataataaaacaattggacaagattgaaagtgaatgtgcatcatatgaagatagttaataagatgaatgatcagaaaaagacaatctggaagacatccttcagtggtaggagaatcagtggtagaagaagaaaggggtattttggggtgcaaaactatgacctctgttaacttgcaaaaattagtactgttgtgattggttataaagggct

SEQ ID NO: 4447 - DNA, 564 bp, Homo sapiens
  I.4447 (AA496107)
caacaggctcttgggcagacgcaaaggttctttcttattattactgctactattgaaagtcttctgtttaaatgtagggatgctttttcctcgagttgtatgatagtgtggcttgggttttttttttccctcctttgtttgtttggactttttaaaaaacaaactttacatttgcattgataattatgttattattaatgacaaaatgattcagtatggggactacttatcaaaggtgccagttctttcacatttaagtgacattcaatttagatttacaaaacacccagaaacaattcctatttctccagagaagttgagagaaaaattcaaagggattgaatcctaaaacacctacacttaaccatttttatttacatgctattattacaaaacaaacaagcaacaatattagatcaaaaaactggatttactgacttattgcttgtgcagagagttctgccttccaagcaatataactgacaaggaactattttaaaaagtatgtataccaaatgaaaaattaaaatcatactaaatgtttacaaatgtttttataatttt

SEQ ID NO: 4448 - DNA, 500 bp, Homo sapiens
  I.4448 (AA496041)
gtttattttagtttagtttttgagacggagtcttgttctgttgccactaaatctgtccccatctttcccatgaaagtgaaacagtaagttttcacactagaacacaacctatggcacgagtggggacacagccaagaatctggttttgacttttctctaacgaccatctatcgtcagatagaccttaaatgatttaacaagactttcagaagctaagaaacaatttgattacgaaccagaggattaaaaagaacaaggagtaatgtttggttaacatgaattctgagagcaaatataggacagcaggctcaaaaacaccaagttcagattcagctacttccacctcaatgtcatactaagagatactccaaaccccaacatggtacaattcacttaaatcattacattcaaatacaatacttgaatttccaatgctggacacaagctgacaaagatgaggtagagctttgaatagatactttatttgctttgtatatggt

SEQ ID NO: 4449 - DNA, 317 bp, Homo sapiens
  I.4449 (AA495843)
ataaaaggacccacacagtagagaaaccttatgagtgtaaaacatgtagaaaagccttcagtcatttcagtaacttaaaagtccatgaaaggattcactctggagagaagccatatgaatgtaaggaatgtggaaaagcattctcttggctcacttgccttctacgacatgaaagaattcacactggagagaaaccctatgaatgtctacaatgtggtaaagccttcactcggttcccgtttccttcgaggacatgaaaaaaactcacactggagagaagctgtatgaatgtaaggaatgtgggaaagcattgagtt

SEQ ID NO: 4450 - DNA, 451 bp, Homo sapiens
  I.4450 (AA495787)
tgtgtgaaatactggtttttattggttggcacaagattacaacctacaatttcaatgcccttccctcccacacagctcaaatggaaggaaactgattaacacatagaaaggaacggcaggctcacaggtttaagcatttgtttttacaaaaaggagtgggatatgggggtggtcaagttttacgggtaataacaacattctctctagatggcagggggtaagtctgcctgtcctccattgctggtaccacataagggatacattagtaaagtagggaaagggttatatgtgtggctggcctgttctttagagaggaaggtgggatggtatctgctgtgtacctgtctcagaccaaacctggggctggaccagtgcccctttcttctcagccctcctccacagcctgactgtactgccagccgcacccatgagaaggaggtgtgaaggaagc

SEQ ID NO: 4451 - DNA, 438 bp, Homo sapiens
  I.4451 (AA495775)
agaacactaccatatatggcatcagctttggttaccagagaaattttcttagtcattagaccatgtaacagtaatatatcatatgtaaatctttagatatcaatttgaaaatcctccaaaaaaaggagcaaagaatgcataagctatgtgttggcaaaagtaatttatattaaaattttgacctgcctatgtaagattaagtggtaatgtcatagtggtgggtttttaagtcttaaccaatctctaaggtttgtttcatcctgcaagggatggttcatggcctctcttcccactgcaggaagactgcacaaggctgtggattaattgtagcatttcactgatcttcactccagtcactagggacaatagaaacctgcaaaacacagattcattcgtaaatattattaatagcttattaaaggaaatggtctttgttaa

SEQ ID NO: 4452 - DNA, 339 bp, Homo sapiens
  I.4452 (AA490709)
aggattagttttaaagcaactttgaatagaagtatttcagacataggacttctgccttgttgactagcgtggatagttttctgtttaaatgcattggtcttttggctgtttgtaattcacttcagcttatagagaagttgatgaccttggatcatgctgggtatgattggtctttaaaaagcagtaatataccaccagcccaaggagaaaacattgttaaaatgaagagtggtggaaatagtgtgttgggaagaataaaaaatttagattggcacttattctaaagtgagctgtttttttcaagaatttactagcatttgctcgtagtatgatttctga

SEQ ID NO: 4453 - DNA, 95 bp, Homo sapiens
  I.4453 (AA490487)
tttgaagatgacaggtggtacatcttttaattggagacctaaccaggtaagtcttgacaaatagtcatgcaatgaaattcaataatatgcattta

SEQ ID NO: 4454 - DNA, 551 bp, Homo sapiens
  I.4454 (AA482082)
  misc_feature (174)..(174): n is a, c, g, or t
tagggaaggaaaacttcggttttattataatttaattctgaaatttctcacctcttccagaaatcaatttgaaaacagctattggacaaaaatgaactaagacaaagttataaggagaacgccatcctgctcaagggctgtatgaaggctttgacgccgggctgccagcggaantagaacaaggagcgtggagtgagggtaccctcggtgacggcgccacccctgtcaccagcaaatgaccaacggggatgatttgggcacgaaaacgagaaagggccgacggctctaccgccagctgcggctccattccctgtgggctgagaccacctcgagcacacgcccgcaggcctgggctgtcctgttccgcccgggccggtcaactatggcccgatcctgggtcaccgggtgcaccacggcgccaggtgggctcagaccttggggctgtctcctccagacgtgtctgcctgctgctccgacgcggcctttgctgcaaactctgctgccagctgcaggtccgaggtcacgttctgcaaaaagcggtaactggagga

SEQ ID NO: 4455 - DNA, 529 bp, Homo sapiens
  I.4455 (AA481972)
  misc_feature (260)..(260): n is a, c, g, or t
cacggccatcaagatccagttcacttcgctctataacaaagaagagcccccagctccccgctgcggccactgtacccccagatctcccctctgaagatccacatcccggagccggacctcggagcatggtcagccccgtcccctccccgacggcaccatcagtgtccccaactcctgcccagccagtccacgcggtgccggctcctccagttaccgctttgtgcagaacgtgacctcggacctgcagctggcagcagagntttgcagcaaaggccgcgtcggagcagcaggcagacacgtctggaggagacagccccaaggtctgagcccacctggcgccgtggtgcacctggtgacccaggatcgggccatagtgacccggcgcgggggcacagacagcccagggcctgcgggcgtgtgctcgatgtggtctcagcccacatggaatggagccgcagctggcggtagtagccgtcggccctttctcgttttcgtgcccaaatcatccccgttggtcatttgctggtga

SEQ ID NO: 4456 - DNA, 189 bp, Homo sapiens
  I.4456 (AA479459)
tgccgcctgctcacacacatgccgatgtggagtgcccgcctgctcacacgtgcccatgtggagtgcccgcctgctcacacgtgcccatgtggagtgcccgcctgctcacacacgtgcccatgtggagtgcccgcctgctcacacgtgcccatgtggagtgcctgcctgctcacacacgtgcccatgtgg

SEQ ID NO: 4457 - DNA, 516 bp, Homo sapiens
  I.4457 (AA479427)
ccagtcccaatttttcccactagcttgcaagctccgtgactcgaggagaccgggggatcagagtttgtttttgcggagaagtgagtcctttatgccccaaatagtgactgacatagagaaggtactcagtaaacactttttaaaggaatgcctgcctgactgaagcttaatgatgtgaggcttctagtgggataccctaccttgttttaacctgaagtgactcttccttagctaagagagccagacggactccatcgtgactccttcactcgcagcccctcacccacccccttcctcaaggacttaacttgtgcaagctgactcccagcacatcaagaatgcaattaactgataagatactgtggcaagctatatccgcagttcccaggaattcgcccggttaatagcacccagagcccctgcgtttgtgtccggttgataacgcccaaagcccggcgtccatcaccttaggatagacttaaagcctctgtacctggaactgtttactttcctgta

SEQ ID NO: 4458 - DNA, 545 bp, Homo sapiens
  I.4458 (AA479382)
cctggctactggtgctataacttgtgtatgctgctctaagggatgaagaaaagacatgacacttaaacaaacccaaaataaatatcaagggcagcacctgggtctttgacatctccctaatggcagaaatcttccctgttgtcaaatttacacactctcataaaccatacattgcacacaccaccaccaccaccacctccgcctccaccacaactgccaccaccattttatccagctcatcattggcagaaaagagggaaatttatggataatttggaaagtaagaaagaatgataggccttattttatcacaatgtaggcatcgtgtttttctggccttggaaatgggaagtatataagttaggaattctttactattacagcaaaaataatgcaagacaaaaatgtaattaagcatgaaaggaatttatgtattagaagactattggatagttctcatcatctctaggaggcccagaagttggaaacctcctcccaaatcctgctgcgaaactgtcccacaaattggcatcaccaccaccgct

SEQ ID NO: 4459 - DNA, 291 bp, Homo sapiens
  I.4459 (AA479368)
aatgacctggatttgaagaccagtttatccatttcctggtctcatgatcttcagcaatttgcttaacctctctgagactgagttgcctcacctgtaaaatgggggtcataattacacctacctcatagcatttttatgaggattaaatgagataatgtgtgcaaagggcttagtacagtacagagtataagtacagtaactattaacatttattcagcttattaacatacatactttatgtaaatattaattcacttgttcttgcagtaatttggtgacttctcaggcatc

SEQ ID NO: 4460 - DNA, 392 bp, Homo sapiens
  I.4460 (AA479350)
tttttttttcacaggtttgtcttttaatcagcatccatgaaaattcattaaaaggtctgatacgaaaagcaccaggctaacaaatcagtcctgaattcaattttacaaaaacaccctctcctcttccatctcatccctaatattcctacgttatctcgaggtgcagagaaatataaaagggatccttgacataaaaacgtattaaaaagccaccatgagtagaatgtacggtaacagcgtctgactcggccggcagacaggaaacctacagaaccaccatgccagggctttgtgtgagcaggcgggcactccacatgggcacgtgtgtgagcaggcaggcactccacatgggcacgtgtgagcaggcgggcactccacatgggcacgtgtgt

SEQ ID NO: 4461 - DNA, 421 bp, Homo sapiens
  I.4461 (AA479285)
gcacaattaaaaatatttaatatttttatgttgaaagttcaaaatgaactttacaagagcagaaaaatgaagtattagaaattataaattcagaatttgccatttatgtcttctacaaaaagtggagaaatataattactggttaatgttcgtgatgacagcttaagaaataagcctactattttcagtgcatcctatttatactatatagtgtttgccatttgttcagagggtggctcttttcaatatattctagaagcaagataaactcttggacactggggtgaattgtctggtgaaatgtatccagtaggcagtggtttgtgccagtgtttggaagaagactggcttctgctcctgctttccatggacgctgatctgtccctcttagcctttcaggtctgtcctctctgccttcatt

SEQ ID NO: 4462 - DNA, 531 bp, Homo sapiens
  I.4462 (AA479272)
tgggaaaaaattattttatttaacatcacctaacatgttctcattagttattgctaaggtattataataaaaacaatgctgtggttgcatgtaaatgtatacaaatgaacatcatcatcatcatcatcatcactatttttctgagcatttggaaagaaaactgttgcatttgtcttagataaaagactcagataattccctagaagcctgaggacaagattctagatcaatcctctaaactaggttgattcctcatccactttctgacctcctactttcttggtgagaaatgattattgaccctcctcaatgagggtgtaatgatagagcatagtattttgtcccctattggatgttgcatggagagttgggctgaaattcttctgtgcaagtgagaagccataaagggaagaaagggtcagacacttccaaatctttggattttcttagttcctcttttgtaagcctccattgttgtgtgtagtcagcagggtcccagaggcagaccaccacggaccatcttggcagtac

SEQ ID NO: 4463 - DNA, 436 bp, Homo sapiens
  I.4463 (AA478878)
ccaaaagaaagtaacaaatgctgacgagaatgcagaggcaaaggaacgtttaaacactgttagtgggaatgtagacttgtacaaccgttatggagaagagtatggaggttcctgaacaaactaaaaatagaactaccatatgattcagcagtcccactactgggtatatatccaaaagaaaatccatatatggagacatctgcacctgccatgctcgttccagcactattcacagtacccaagattggaatcaacctgtgtctatcagcaaatgaacagataaaatgtggtatatataccccgtggaatactatttggccattaaaaaaacaaaattctgttattctcagcaacatgtatgatcttagaagacattatgttaagtaagccaggcacagaaagataaatactccatgtactgtacttatgtggaagg

SEQ ID NO: 4464 - DNA, 393 bp, Homo sapiens
  I.4464 (AA478723)
tacgaattcaggagtcctttattagccggcagccgagagacagctagcgctcgaaattctcttggccccgaagaaggagctagattttcttttatactttggtttagacagggggagagggggagtctagttgaaacaatcttacagaagtaaagtaggcaaaaagttaaaaggataagcggttacaggaaagtaaacagttccaggtacagaggctttaagtctatcctaaggtgatggacgccgggctttgggcgttatcaaccggacacaaacgcaggggctctgggtgctattaaccgggcgaattcctgggaactgcggatatagcttgccacagtatcttatcagttaattgcattcttgatgtgctgggagtcagcttgcacaagt

SEQ ID NO: 4465 - DNA, 399 bp, Homo sapiens
  I.4465 (AA478621)
aattttgagagatgttgctcaggctggtctcaaactccaggcctcaagtgatcctcccaccttagactcctaaagcaccgagattagaggcatgagccactctctacttctatgagatcttttttaccttccacataagtacagtacatggagtatttatctttctgtgcctggcttacttaacataatgtcttctaagatcatacatgttgctgagaataacagaattttgtttttttaatggccaaatagtattccacggggtatatataccacattttatctgttcatttgctgatagacacaggttgattccaatcttgggtactgtgaatagtgctggaacgagcatggcaggtgcagatgtctccatatatggattttcttttggatatatac

SEQ ID NO: 4466 - DNA, 194 bp, Homo sapiens
  I.4466 (AA478611)
actaaaaataacaggttttattcagaatgacacggtccttgctcaagaacaacaggagtaaccagagaatgaggggagataagttagcaatcagtattgataaagaaacatttgagaaacaccccaaaactgaagtactgatcagcagcctggcccaggttccttagaagtgagacctgtatatgttcccgtta

SEQ ID NO: 4467 - DNA, 374 bp, Homo sapiens
  I.4467 (AA478474)
aagttataaaaatgactttatttttctgtttctatgtactacatatccaaataacattaagacattttatcatgaatttgcactatgacaaatcaactttcaagcattttcttgacagttttagaggttttgccagcttttgacatacatacagacagagtaaacaaggggaaaaaagaaaacttagtgagcacgtaagtcatggagtttgagctccaataaaaatattcattaaagaggaagaataaggtggggggtggagagaggtattctgaagaaagaaacaaatttacctcacattaaaaaccatgcataggaactgttatcaaacacagccaagaaattaagttttccaaatttatataccccccttt

SEQ ID NO: 4468 - DNA, 244 bp, Homo sapiens
  I.4468 (AA478416)
tataatgaacagaaatttatttggctcacttctggaggctgagaagtctaagattgaggttccacatcttgtgagggccttcctgttgattcataacctggtggaagtcatcatgtggcaagagagagggctacagagagcaagaggaaactcactcctgagatatcaacattaatccattcatgaggctgaagccctcatgatctaaacaccccccactaggccacacctgccagtatcatta

SEQ ID NO: 4469 - DNA, 297 bp, Homo sapiens
  I.4469 (AA479853)
cctacacagctaggctataatgggcctgagtgagagggtagcttccccagccccaagcacaggcagaggggtggagagcaatttttggttttatttttgtttctgaagtggtgcctgtacctccagcccccaggggccttccctggccacacttctctgccccacccaggcatcgcagtcccagcactttgctccatgtcacccgtaagatgccctttgctgaatgtacctgagtgtatgtatttaaaaggactcacatgggcatcagagaatttatggctctgtatccaataaaaa

SEQ ID NO: 4470 - DNA, 280 bp, Homo sapiens
  I.4470 (AA479727)
gaccagtttcaccatcttttttattggatacagagccataaattctctgatgcccatgtgagtccttttaaatacatacactcaggtacattcagcaaagggcatcttacgggtgacatggagcaaagtgctgggatggcgatgcctgggtggggcagagaagtgtggccagggaaggccccctgggcgctggaggtacaggcaccacttcagaaacaaaaataaaaccaaaaattgctctccacccctctgcctgtgcttggggctggggaagctaccc

SEQ ID NO: 4471 - DNA, 428 bp, Homo sapiens
  I.4471 (AA470107)
gagcaaaccatttaggacagacccaacaattagtcttgttgtagaaatgggccatggcggatattgtaggagctaaagggtgtgacgtattactaagtcccataaaaaatcctaacagacctagtgatagtaaaacactcatgtttactgttggttaataactgttattcctgctgtaaggatagtaattaagcaaaatgctacagtaattgagattctgttcgatattacaccctgagggtgctatagtatatagtaatacttggcttaaaaggagaggtagaaacggcaaaaagtatttggtgaggtagaggcgagactaagtgaattaaataaagtgaatcctgacttaaaagaagaaaatccactcccaagagggaaatccactgaaggcagaggaaagacaccctacactctgcttctgcttc

SEQ ID NO: 4472 - DNA, 380 bp, Homo sapiens
  I.4472 (AA469937)
tttatattaaaatgtctttattctttcaccagataataccttttgattccaaaccttgatatatttcctttttcagtagccgatttcattgtcattttcatcattcccacaatcaaaatttgagtccatctttttctgcaatttaaagcaggcttgatgccaaaaggaaatctgggacctgatttgtatctgtttccagtttctgggagtgagtgagtcactgcacttctattacaacacagtctactccagtattttccagagttagtcatctacatatttttgaactttttgaaagacccctttagaaatgaaagaagcctccacttggaagcagaagcagagtgtagggtgtctttcctctgccttcagtggatttc

SEQ ID NO: 4473 - DNA, 465 bp, Homo sapiens
  I.4473 (AA401890)
aatagttattatttattaaaattacacaatattccagttacactttcaaagactttacatgtaccaaacatttaatttccatgatagcagtctcaggtagatgtgattatccttatgtacaaataatgcacatagtgtctgtgtgctggacaacgcacaggggtagtgagcctttggcccagtgtctcacagggaggagggcgggggatggtggggacaactggtagagtgggtggcatgaccaaaggctttctcacgtgttacattagcagggttattccacagatgccacggagtaaagacagaatggtactggtagtctttatgtattcattaaactaacccacacaataaaaacatctacaccaaaaacaagatcattcagaaaaagtgatttttccactcttcaaatttgcctctagaatgacttctgatattctgtaagcagaagagtgatcagtgggc

SEQ ID NO: 4474 - DNA, 521 bp, Homo sapiens
  I.4474 (AA293018)
  misc_feature (220)..(220): n is a, c, g, or t
tgggaggctaagtcgggagaatcacttgagcccaggagttcgagaccagcctgggcagcatagtgagactccgtctctacaaaaaataaaaaattagcaggtgtagtggcgagcgcccgtggttccagctactcaggaggctgatgcgagaggatcgcttgagcttgggaggtcgaggctgcaatcgcaccactgcactccagcctgagcagcagagcangactctgtctcaaaaacaaaacaaaaacttgataacatagtcataaattagcatttatcgaatgataaatatgtgccagactgttctaagccctttccctgcgtgatctcagtgaagtccataatagccccgtgaggcaggtactgtcctttatccccattgcagggatgaggaaattgaggccctgaggtcgaagaggagctggtaagcgatgatgccgagataggccccggatcgcctggctctaaatccccagcccgggccccgacacacagtcccagggtgggagaggtggtcttcg

SEQ ID NO: 4475 - DNA, 303 bp, Homo sapiens
  I.4475 (AA293472)
aaccggaagcggaagtgcgtgtcggcgggatcatggcgactttggtcgaactgccggactcggtcctgctcgagatcttctcttacctcccggtacgtaccggatccgcatctccagggtctgtcaccgctggaagaggctggtggacgaccggtggctgtggcgacatgtcgacctgacgctctacacggtacgcgcactggccgggcggcatgggcgcggtcggtcgcccggaccccgaagaccacctctcccaccctgggactgtgtgtcggggcccgggctggggatttagagccaggc

SEQ ID NO: 4476 - DNA, 331 bp, Homo sapiens
  I.4476 (AA291522)
ttttttttttttggttatataaacatttaattacatctccatgcattttgattgtgccgtcttcttttcgtattctggagacagtgttttcctgagtgtcaaactttttggaaggcccccaagaggcctggcctggggcctgtggctggccagccgggcagccaaagctccacccaggttctcagcgagactctgctactgaccggctgagactgggcaggccctgtctctcctaagccctgtctctctgtgggcagggcgaggggttggaggctcttgctgatttggagctgattttcacattcctggcacttcctgggcaccccttagt

SEQ ID NO: 4477 - DNA, 301 bp, Homo sapiens
  I.4477 (AA291458)
cctcggcaccaagctttgtcccctctcgctgtggggggctagtgattctcctccgacctgacgattgcttggttttttcaaaagggagttttgtgcggtgagaagtgtgtttctgtgtggctaactctgggctagcgtgccgtggccattgaaggtgtggcctgcgtgggtgcagtgtaagtgacgctggattgtcaggtggcagcaggggacccctgctgtgtcagtgctaatgaaacatgttggttggtttctaaaataaagccaaacaagccagcacatgcagaggcttggaccctga

SEQ ID NO: 4478 - DNA, 464 bp, Homo sapiens
  I.4478 (AA291443)
  misc_feature (45)..(45): n is a, c, g, or t
gagacagagtctcactcttgcccaggctggagtgcagtggcacgntcttggctcactgcaacctccacctcccaggttccagcaattctcctgcctcagcctccccagtagctgggattacagacatgcaccaccacacctggctaatttttgtatttttagtagagacagttttcaccatgttgtccaggctggtctcaactcctgacctcaggtgatccacccaccttgccctcccaaagtgctaggattacaggcgtgacgactgcacctagcccactgatcactcttctgcttacagaatatcagaagtcattctagaggcaaatttgaagagtggaaaaatcactttttctgaatgatcttgtttttggtgtagatgtttttattgtgtgggttagtttaatgaatacataaagactaccagtaccattctgtctttactccgtggcatctgtggaata

SEQ ID NO: 4479 - DNA, 444 bp, Homo sapiens
  I.4479 (AA284803)
gtgacttttccttgctcaatagaatgagaaggaggtggcgcaccggctacaaggctagaccgggggctcgcatatctccacttgcagctgccactgccattagaagaacttgctcagccagctcctgggccccaggaaaaggacaagtgtcacccagaacagagccacctccagctgcactcagctccagaagctggcccggccggtccagtacaccttttaaataatgtcctctacgtgccggtgtggaagtagcccggatgcaattgaatgaacaacagacggtgctttccaggacggcgctgtgctttccaggatggtgctgtgctttcattcatttgggtagctcctctgtgagcctcccagcgccgactgcagacccccactctccagcctgcaagaccccgaaattcaagccacacaaagaaaggaggagggggccgt

SEQ ID NO: 4480 - DNA, 459 bp, Homo sapiens
  I.4480 (AA284850)
ccttgtaccatttattaattatattattctctgtttagcaacagagagatatgtacagaagccacaaaagctctagataattacattttccaattacaagagtttcagtttttgagactatgacatcagaatatttcagaataagtcttcagtttagaaccagggttacgattctttttaaagaggattactttatatgtatttctgtgttgctttgaaggatccctgagtaatttctatgcatgtgtcacaggttttttttttcttgtccttccttcctggtgtctgactggcccccgccactgccccaagtaaccactcccgccccggagattactcgggtctaaatggcacaggtgttctccttttatcccgattacccttgaaaggatagggagaaaacattagaaatcatgtcccacatagggtcaaggctgccatgagcttaaggcaggaagt

SEQ ID NO: 4481 - DNA, 465 bp, Homo sapiens
  I.4481 (AA527369)
ttaaaatttaatttttatttcaataggcttttgggaacaggtggtgttggattatatgaataagttctttattggtggtatctgatattttggtgcacccatcacccgagcagtatacactgtaaaccaatgtgtagtcttttattcctcacccccaccccccgcctttcccctgagtccccaaagtccactgtatcattcttatgcctttgtgtcctcatagcgccgtcccacttatgagtgagaacataagctgtttggtgtttccattcctgagttacttcacttagaataatagtctccaattccatccaggttgcagtgagtgccattaatttcattccttgttaaggctgagtagtattccatggtatatataccacatttgctttatccacttgttgattgatgggcatttgggctggttccatatttttgcaattgcaaattgtgctgctatgaaca

SEQ ID NO: 4482 - DNA, 323 bp, Homo sapiens
  I.4482 (AA525000)
gcgtcgacgacatttctagaaaaggtgtgacaacttccgggtcatcgggtcattgtcatggaaagtggtggtaacttctgggtgtcgccatggcaatggcaaactgacatggcaccctggtcagtgtgtcttatgggaaagtgtttttgccccatccctgttttagttaatcatcaattaggtctggtgtccaagcctcacctccagaatccagtactgcctcctacctcattagaattgttttcactgtgtgtcaacatgatcattcctctgttttaacaagggaataaacttaatgaacttcaaaaaaaaaaaagtcgacg

SEQ ID NO: 4483 - DNA, 495 bp, Homo sapiens
  I.4483 (AA524996)
ggtacgacgtcctagccagagcaattagacaagaagataaaaggcatccacattggatagggagtaaaattatattttttcaccaatgacatgatcttatagcgattctataaaaacagaataattaacaaattcagcaaagttgtcaaatacaaaatcaacacacagaaatcagttgcatttctatatagtactagcagtgaacacttcatgaaggaaattagcagtttcatttaaatagcatcaaaaagaataaaatacacaggaattaaccaaggaggtgaaagacttgtacacagaagactacaagatattgttgaaagaaattaaagaagacataattaaatggaaagacatcctgtgttcaattatatccatttaaggacacaattagatggaaggacatcctgtgttggaaagtttaatattggttacatgtcagtactgtccaagttggcatcagggcaatgcagtccagtaacatccaacggtgtt

SEQ ID NO: 4484 - DNA, 515 bp, Homo sapiens
  I.4484 (AA524901)
ttttttttagtttggatgccttttatttctttattttgtctgatcactctggcttggatgtcccatactgtgttgaataagagtggtgaaagtgggcatccttgtcttgttccagttcttagaggaaaagcttttcaatttttcccagtgagtaggatgttagctgtagattagtcatatatgccttttcttatgttgaagtgttccttctatgcctaatttgttgagagttttcatcatgaagcaatggtaagttttaccgagtgatttttctgcatctgctgagatgatcagatagtttttgcctttcatcttgttgatgtgatgtatcacatgcattgattttgtgtacgttgagccatctttgcattcctgggataaatcccacttgatcatggtatattatctttttcattcatcattagatttggcttggtagtattatgctgagaattcgtccatctgtgttcattaggaatattggcctgtagttttctctttctgttgtggtcgac

SEQ ID NO: 4485 - DNA, 576 bp, Homo sapiens
  I.4485 (AA524816)
gctcgacttttttttttttttttaacaactgagccctatggacaaattaatttttaattcttaccagtttgtatcaggagagcaaagtaagaggccatttaaataaatggagtagttctgaagaagaaagtgggagaataaagtaaaatcacttaaaaaaaggaatcagtgagggcaatgtgatacgtcatataaacaaaagtgccttctcttgggagaatctgtatttgttgagaagatacagtatgtgaatttacacatataaatttattaaaataatttataccaatacaaatttgttcaattatataaaccaatgaaaacatccagaatctcaaacattctagatctgaataatgctttaacatgagggtaagcctcattcaaagcaacttccataacttagtagtaaattacattgtcctaggactttaaaaaaagccctcagatcattgtgtagggccacatgagcatatttaacatggttctaagttttctcattttgggaatatactgtgaaataccgcaaatcaaaattaactctgaaataaagtttattggtattcaattaacttt

SEQ ID NO: 4486 - DNA, 281 bp, Homo sapiens
  I.4486 (AA523145)
tttttttttttttttccaaagtttcttttatttacatttacatacgattctgaaaaagcgtctccaagctaccacttcttgtagttgccattgtctcattccaccaaaaaacatctcagaccgcccgcgccaccccaaatacgcctgtccactgaagcctcactaaaaggaggaagcgctgatgtcagggttacttaaattcccaggctccggatccctagaagaggtatttccctttacgcccgcgaatttgtcatagaaggcagggcactaggtcgacg

SEQ ID NO: 4487 - DNA, 318 bp, Homo sapiens
  I.4487 (AA522653)
cagttatatgtgttaatattttatatgcgaatttaaaattttaacttaataatatagactacagcactatagaatccacgatattttgaggggttctggaacttttgaactcatatgcaccagggttaaaattttgtttctggcactttctaacgttgttaccttggacaagtttcttaggccctctatgcttcaattcacttatccatacttcgcacatgctttgtcagcattagattaagtaatgtatgtaaaagacttactttggtccttagaaaagagtagttctcagttaacaaaaaaaaaaaaaaagtcgac

SEQ ID NO: 4488 - DNA, 355 bp, Homo sapiens
  I.4488 (R76549)
  misc_feature (87)..(87): n is a, c, g, or t
  misc_feature (124)..(124): n is a, c, g, or t
  misc_feature (177)..(177): n is a, c, g, or t
  misc_feature (250)..(250): n is a, c, g, or t
  misc_feature (274)..(274): n is a, c, g, or t
  misc_feature (297)..(297): n is a, c, g, or t
  misc_feature (301)..(301): n is a, c, g, or t
  misc_feature (311)..(311): n is a, c, g, or t
  misc_feature (315)..(315): n is a, c, g, or t
  misc_feature (323)..(323): n is a, c, g, or t
aaaacctgagtccggaagaacaaagcaaaaaaaaaaagatattgtctgggtccctgtattatagacctgtattatcagccctagatnactgaagcttagactgctataaggaaaacaaattttnatcttgttttaaaatccagtcaatgtaattcaccacattaacagaataaagangaaaataatgtaattatttcaacagatgcagaaaaaccatctgttaaaattcaaaaccaagcatgataaagancattaggcaaactaggatatatanggggaacttctttatctgataanggantatctattangggnaaaaaaancctatgggcaaggcatccatattaaatgtctt

SEQ ID NO: 4489 - DNA, 434 bp, Homo sapiens
  I.4489 (R51605)
  misc_feature (318)..(318): n is a, c, g, or t
  misc_feature (357)..(357): n is a, c, g, or t
  misc_feature (373)..(373): n is a, c, g, or t
  misc_feature (399)..(399): n is a, c, g, or t
tttcagctccctgtgccatttattcttggttttttgagagcggtagacctaaagtcagcccaacaggtttaacgaatgataaacacccaagattattttaatgtttacaatgaactttgcaaaatattcttcagctctgtgagaggagaagaagggaaaaggggaggtaactttacagagggcttgattggcacctgcctcttccgcatagatgttctcacttaaggcccagggttgctgctggacagatgagcatactgaggttcagggaggtctgggaacttccttagggcctcacctgagggtcagctcccaggntgagcgtccctgactggcaattttcctcgtgcctccttncaccaggccaggtccnggggcaagaacaaggcagggccacgnacacgttacattacaggggagggattcccccttcg

SEQ ID NO: 4490 - DNA, 201 bp, Homo sapiens
  I.4490 (AA133318)
ggtaagatactctgagtatatccagtggactagggcttctggtttcaggacattcaagctggtgtcttacaaagaacaatcatagctattaatcagaagataagcttcacagatattttctaaaaaggttgttttgcaacacacataaaagaagaacgccattcaatgaacgaggaagattacatactaatcttcaaataa

SEQ ID NO: 4491 - DNA, 171 bp, Homo sapiens
  I.4491 (AA133317)
  misc_feature (85)..(85): n is a, c, g, or t
tctgcatccttggtcacacagcagcccacctcagtgtcattgtaagttgtcctcatcctagatctggttgggggtctgcgtctanattccaggctgtggctgctccctgtcacaatggcttatagttggcacgctcagcagaaattgctaggctcagaagcagctttttat

SEQ ID NO: 4492 - DNA, 1699 bp, Homo sapiens
  I.4492 (U85992)
gttcaagacattggggcttggaatagaacggaagcatctcaaaagcatgtttttctggttaaggaaagcacacgagaacgtttcacagcggtgctctgctatcttctctgtacccctccgccctacgctcatgggagagctcatttctctccccatcagacactgggaaatactcccaaggctctggcagtctcaaggctgcaattcctgagaccggggactctgtgctgccatctcgtggcagatctcagacacagcaagctggctgccggaatcctgtttgaacttggcttgcggcgggagctgtggtttggctcaaatccttatagagctttgttgccagtcatgttgatttttaaaaaatgttttactccctatgccccccttttagtttttcatgttggcacttcatttaatgtgcctccagaggctacattttgggttttgatgtgtttggtcaatgttaaagaatcggttaactatcttcctgaaagaaggcagtaatgcagacagacgcctttgacagcaggtagaccactggctggcaaccgtagaaagagggacacacgggagactaagaatgaaagatgcagtaaggtttattgctcttattcattggttaggtttttttttttttttttttagagtattctgaccttttccttgagtgtatttttgctaccatttctcttgtttagatctggagagactcaaactcaagctgggatttggggaaaagtgtttgaggatgccagtctggctttcagaggcatgataggcacatctctgttgatatccaaattggaacaactttccttgttaccagaaaacagctggtgtctgcagaccttcccatggttggccatgacacaggcccctggagttgctctgctttcgttagagagttcctgtctggagccaccaggaagacaccaatctcccctggggcctgagggcaggatcattattttgttctcttctgcatcctgaatgcctgggaaggcatttaaatgacaggcctctatttgtattccagatctgtgtcttgggtgaccctgggcaagtttcctaacattgatccctcctctgtaagatggcgatcattgggaatttttggtgaaaaaaatgcacataagattcttagcacagagcctgaacacacagagaatgagttcagtaagtgtgagccagtattagaaaatgtttcttgaatgaagatgtgaacggaatgagccctgaacttgagtcacagtggtgacacatagtgcatgtggggatgaggcagcccagggggtgagggagtcctgaaggcatggctttgcgtgtgccacttctctccagagccactggctcaagaacaagtgtttttgtctcttggcaaaattgggaaagtgaatggagtggtcttaattaacctgtgtttgaatttactctgtagctgctggactcaattaaggaaatggaggaatcaggctctcaccagcaattccctgagcttttaaagttttttcttggaaggcctgggattccaaagactactccacattcacaccaatcagacaccagggcaatgatcagatatggcagttctgtaccaatgtgaccgttgatagaatatttaaaaactcccagtgtaatcagggggaaaaaacccactaaacctacagctaaggtttaggtttgttctatgtgtgtgtac

SEQ ID NO: 4493 - DNA, 351 bp, Homo sapiens
  I.4493 (AA463525)
gctgtggagggtgggtaggggagtgggccgggccagcacactgagactggcagctgctccaaccccatccctccttagagatgccacctcccccaccacccacccctaatttgtgccttgcctccccaccctggagtagtccctccgggtcaccagcactgccatggcagagcacgattccctaccctaacctgcccaccctccctatcccccagcattaggttgatactgtggggaagtgctgggggctgggaggtagccgaggaatggggcagttcccgggggcatcgaaaccaagtattattatgaattgtaattgtatttgcactgtttttttcctctgattgcatc

SEQ ID NO: 4494 - DNA, 290 bp, Homo sapiens
  I.4494 (AA463490)
ttttttagaaaccattcctttctttattaaacatagcttgcaagtgataaatattacaaagtttttttttcttttaatcctttctccaaaaattagcttattatttgaatctgtcactgctgaaatgctcagcagcatctgaaacagatgggagtgtatttgcctttttgaaaaccagtttctattggtcttagttttttcattttatttcccaaacacaatgcagaaaatcagaatgagttaaaaaagaaataaaggaaactttaagagagttgtgcaaaagggtcttg

SEQ ID NO: 4495 - DNA, 407 bp, Homo sapiens
  I.4495 (AA463423)
gtttagagacagggttcactctgtggcccaggctggagtgcagtagtgcgatcacagctcactgcagcagccttgatcttcagggatcaagtgatcctcctgcctcagcctcttgagtagctgggaccaaaggtgtacaccaccatgcccagctcatttttaaatttctgtagacatggggagtctcactatgttgcccaggctggtcttgaactcctgggctcaagtgttccatctgcctcagcctcccaaactgctggaattacaggcatgaccaccaagtccagcccttcttgctctcgtttttaaaatggtgggtgacttccaccctgagaagggatgtgaacactatggtgaaaacttatttcctatgaagtttactctgggaaaaagagagagaaagaaag

SEQ ID NO: 4496 - DNA, 462 bp, Homo sapiens
  I.4496 (AA463422)
acggggatgatttataagtttggtttctgtcacgtcaggtgctgtgccggcgcttgagataggaaatgtaaaagacaacgtgcgcctcaattcacagtctcgtgagagagacagacaattatattacagcgtgaataaatgtaatgaagtcggcggatgtggagaagtgaggcttcggggcacggggtctgggcgctggccggttgctggcccagggcgggaggcagggcgaactctgtgcagcccctccccttttccctgaggcggaggttcggtccctccggaccggaccgtttgattgacaacttcgataaataatccagtcacacttccgggccctttcgttggggatcgccaggcgctgctttcgtcaactgtcaatccgcctgggtttgagtagagtgtgactgttctggtggactttcccctcaccaaacgtctcctcctgcctcagcctgcacc

SEQ ID NO: 4497 - DNA, 448 bp, Homo sapiens
  I.4497 (AA463400)
tctaccccagcctctaatctcctgataggaacagagaaattcgcaccctagctactgggtttcaagaaataagcctgactccatcaacatcttgcacttttggtccccatttttttttttttctctgaagcgatttacctcctggatgatacggctgcttctagatttaaggctctgcaaaaccagttttagttcccacattcccttaacacgtttgttccttttctggtccactgaaatagttgtcttataaagcctggctatatccttttatgcttgtttctttttataatctattattactatgtgtttgaagtagaaaagtatgataaagcatgacttactatgttgttctgattataagccctgaataagcttttaatattccaggaggcctttcctccacctttacaaaaacgagcttaaagatattaggaatattttaatt

SEQ ID NO: 4498 - DNA, 403 bp, Homo sapiens
  I.4498 (AA461250)
tgtgcagacctccctgatcagtgttacatataatggataaaacaccactgtggaaaaatataatatgcttatctataaaatataaccctagcgtttttaattttgagaaatcgacacagattttgactgaatatatgtttggatttgcccaggccaaacatgcatatgatgcaaccccaccctacatttatgtggcacgaagggaaagtatgatgaaaggagacgaagaaagggattggaggccacagcccagtgccagtaacacagcagggttagggggtgtgatggatgcctagggtatctgcttgcttcctctgcagaggatcaaacctattgtggaggatgtggctcaggcagcacatcatgactgaaaatggggaagactcagggtccactcagagcc

SEQ ID NO: 4499 - DNA, 227 bp, Homo sapiens
  I.4499 (AA461008)
actgtactggtttttagtatggaaactctgcccacaaaccatgtccttgtgacatttacgtacacatgatagaataaaacatgctcctcattcaaacaccagaagcaccatggccattttagggaagatgtctctgcccccttgttccaggaatattttattctatctcactcttggttttgggtctccttggtgattctagaaggtgaatgcctgtgccaaccatg

SEQ ID NO: 4500 - DNA, 318 bp, Homo sapiens
  I.4500 (AA460997)
cagatctgcttaagtaaagagctataatcccaacctaaacttttctgagattttacaataattagatctttttccaagttaattgggttttcccttctcccagtcataggtggtttttatcatcaagacagactgatattttgtcaggatattttcttttacagtgtttgatgtgcataatgccagagttatttttttattattcattttctctctttttgttcaatatgagattcaggatcatatttgtttaaaaggtaacacatagagatgtatgtatatattttgttataagacatacaaaataattttaagagg

SEQ ID NO: 4501 - DNA, 331 bp, Homo sapiens
  I.4501 (AA460943)
gtggaccctgagtcttccccattttcagtcatgatgtgctgcctgagccacatcctccacaataggtttgatcctctgcagaggaagcaagcagataccctaggcatccatcacaccccctaaccctgctgtgttactggcactgggctgtggcctccaatccctttcttcgtctcctttcatcatactttcccttcgtgccacataaatgtagggtggggttgcatcatatgcatgtttggcctgggcaaatccaaacatatattcagtcaaaatctgtgtcgatttctcaaaattaaaaacgctagggttatattttatagataagcat

SEQ ID NO: 4502 - DNA, 419 bp, Homo sapiens
  I.4502 (AA460733)
aacctctttgaatatggaggccgctgcagacggccggctgagaccaaaagccggtggaaaagacagcccggcgaagacccaaagcccagcccaagacacctcaatcatgtcgagaaataacgcagatacaggcagagttcttgccttaccagagcacaagaagaagcgcaagggaaacttgccagccgagtccgttaagatctccgcgactggatgtataagcatcggtttaaggcctacccttcagaagaagagaagcaaatgctgtcagagaagaccaatttgtctttgttgcggatttctaactggtttatcaatgctcgcagacgcattctcccggatatgcttcaacagcgtagaaacgaccccatcattggccacaaaacgggcaaagatgcccatgccacccacctgcagag

SEQ ID NO: 4503 - DNA, 427 bp, Homo sapiens
  I.4503 (AA460661)
ttttttagagaggacatttttaatacacatttgaaaaacatcattcaaagcctacaatttactatttgtgaccagtaaacagtgtgatcattatcatcagaaagtataagatacagggcaagggctttgcttccaacactgaaatgaagggctacgttcactccaccattgagagttctttgttttttgtttttcttgttttttttcccaaggacaaagatttgagttttcaagtagcaatgtctgttctcaaaggacaaccaaagtgctgctcgtcacccacttccgtgatctcaagtccttgtggccatcactgacctcagctagatcaggccagaagtgtctataatacaaccacgtgtatttcaccatgcctccaattcccattagaagctttttcctgatatactctgaagactggctattg

SEQ ID NO: 4504 - DNA, 355 bp, Homo sapiens
  I.4504 (AA460650)
tttttttttctcattcacaatactttttaaaaaagcacatacactgttaaaaacgctatttctgaagagaaataaacaaattaagaaatttttaaaaatgcaaaacaaaagtaagatgtgcaaggtctacgtagtaatactgctggctatgtctttctattacccaacatgggttaagcttagagcattaattgaaaaatcattcaggacaggaaacttttgtcctctccagcctgtgtcactaaaccccagaaataatggtatttctgttacataagaagcatatttgaactcttaacatcttttccaaacagaaaactaaattaaaaaacttaacactcaaaaaaagctcttc

SEQ ID NO: 4505 - DNA, 326 bp, Homo sapiens
  I.4505 (AA460588)
agtaggtccttatcattcactggatgaatgaatatccaagttacggtgtatttagtgagctgggattggaacaataccattgatcaaatgcattactgagtatgtgcccatctaagtttgcagctttagattgtggtcagaggctgttacaagatcttatatattctatgatgggccatatgcatctaaagcatggtggttcagtttatgaatatataaaaggacaattttttgattaatgtcagctttgagtttagaatgtatcccagacatcttagttgcccttaattatttttggagatatttttctcagccattaataaagc

SEQ ID NO: 4506 - DNA, 371 bp, Homo sapiens
  I.4506 (AA460581)
gttctcccttgtgggtgctttttaaaattttttttttttttggttctttatagtaagtcttgctactgttcattgtttgggtcaccttgtgtgtatgggttgtaatactcgccgtgaaggtctgcattttcactcctgagctggtgaaacgggaacccactaatagaaaacaattctgaacacgtgatgaacatcagaaaaaaataaaggaacgcccagacatactgcttttagtgaaccgtaacactcactgtgagggtctgtggcttcattctttaagtcagaccaagaacccaccaattctggatgtagaaggatctactggattccaggagtgcaaatctagtttgagcaatacagcaaggttgtgt

SEQ ID NO: 4507 - DNA, 448 bp, Homo sapiens
  I.4507 (AA460573)
atccatgctcaaggcacttgaagctgctccagaaattcaaggcttggacaagcacaaacttaagagcacccgttccctggattggagccaaacagtctggacatctcacaagagacctgcagagatgtaaggacacactcacctcctgtgttggggaaggagtgactcagctggctggaacacagtggccaagagggtcagataatcttgctttatttcctaacccggaccggcctttgttccaggacagggatcctggtcatagatccaaaaacaataatcacaaatccatcccacatccaggaaagggaccagatgcatattctgctgatagtggccaagaacgtggctggtctgtgtgtctaacgggcagtgcatggtgactgcactgcatcaaccttaatgggatcttctggaagaaatgtcggtgtggggaattgtagaagat

SEQ ID NO: 4508 - DNA, 500 bp, Homo sapiens
  I.4508 (AA460136)
ctacttgggtttttggaacatcatcaatcatggattaggctcttgcttcttctctagctccagctcggcagccgtttgtactgctgcatcgactagcagcaggaagctgctgaagtcggcgtactcctctggagacacaagttctggagaagacggggaagtgatagaaatcttgacctttttctttggctgggctattccggtgagcttctggctaggggccgactccggatctggttgcttctctcttgacatctggccctttggcaagggcacaggggcaggctttgtacattgtctggaccactggccctgacttggccggcacagacgcctcggtgctctgcaggtgggtggcatgggcatctttgccccgttttgtggccaatgatggggtcgtttctacgctgttgaagcatatccgggagaatgcgtctgcgagcaatgataaacccgttagaaattcgccaccaagacaaaatgggcctcctctgcaacat

SEQ ID NO: 4509 - DNA, 476 bp, Homo sapiens
  I.4509 (AA461584)
gagacggtactgaacagacaattaaccccattcagatcgtccgctactggaactacagtcatagcgccccacaggatgacctcatgctcatcaagctggctaacctgccatgctcaatcccaaagtccagccccttaccctcgccaccaccaatgtcaggccaggcactgtctgtctactctcaggtttggactggagccaagaaaacagtggccgacaccctgacttgcggcagaacctggaggcccccgtgatgtctgatcgagaatgccaaaaaacagaacaaggaaaaagccacaggaattccttatgtgtgaaatttgtgaaagtattcagccgaatttttggggaggtggccgttgctactgtcatctgcaaagacaagctccagggaatcgaggtggggcacttcatgggaggggacgtcggcatctacaccaatgtttacaaatatgtatcctggattgagaacactg

SEQ ID NO: 4510 - DNA, 307 bp, Homo sapiens
  I.4510 (AA461515)
gcatcattcggattgctttattaatggctgagaaaaatatctccaaaaataattaagggcaactaagatgtctgggatacattctaaactcaaagctgacattaatcaaaaaattgtccttttatatattcataaactgaaccaccatgctttagatgcatatggcccatcatagaatatataagatcttgtaacagcctctgaccacaatctaaagctgcaaacttagatggggcacatactcagtaatgcatttgatcaattgtattgttccaatcccagctcactaaatacaccgtaacttgga

SEQ ID NO: 4511 - DNA, 376 bp, Homo sapiens
  I.4511 (AA461507)
tttaaacacccatttatttattcgtttatttcagacacacaaccttgctgtattgctcaaactagatttgcactcctggaatccagtagatccttctacatccagaattggtgggttcttggtctgacttaaagaatgaagccacagaccctcacagtgagtgttacggttcactaaaagcagtatgtctgggcgttcctttatttttttctgatgttcatcacgtgttcagaattgttttctattagtgggttcccggtttcaccagctcaggagtgaaaatgcagaccttcacggcgagtattacaacccatacacacaaggctgacccaaacaatgaacagtagcaagacttactataaagaaccaaaaaaaa

SEQ ID NO: 4512 - DNA, 308 bp, Homo sapiens
  I.4512 (AA461499)
tttttgttttttctttttctttattttctttcatgtgtatgtgctgggagtggggttggaggagactattgatcagagaaggaaacaaagaccaatcttctacaattccccacaccgacatttcttccagaagatcccattaaggttgatgcagtgcagtcaccatgcactgcccgttagacacacagaccagccacgttcttggccactatcagcagaatatgcatctggtccctttcctggatgtgggatggatttgtgattattgtttttggatctatgaccaggatccctgtcctggaacaaag

SEQ ID NO: 4513 - DNA, 358 bp, Homo sapiens
  I.4513 (AA460460)
ttttcaggaaagcttgctgttgtgagggattcccattccatgaggtaatatccagtaattcaactgtattaattttagaaactttcttaaaagtttaaatctcagtttctattttcttttttcttgctaggttattcaagaattccttttaaacaaggataaattggtgaaggttatcaggtaccaaagacctgatttgttattgtttcaggtatctgaaaataaattcttctttactgtatgaagttatatgctggaaagataggaacagatattcactctgattggtctgagaggaggtttaaaattaaaacaggcagctcttatattttttcagcatttatttctactctctcat

SEQ ID NO: 4514 - DNA, 337 bp, Homo sapiens
  I.4514 (AA460296)
gctacattcccaaattttcatttggagattttattttgaatagagggaaaattatctgcttgtatagtccatggcagacagtggaatgcagagggagaagtagggtctcacttgtccttagcagtgttctcaatccaggatacatatttgtaaacattggtgtagatgccgacgtcccctcccatgaagtgccccacctcgattccctggagcttgtctttgcagatgacagtagcaacggccacctccccaaaaattcggctgaatactttcacaaatttcacacataaggaattcctgtggctttttccttgttctgttttttggcattctcgat

SEQ ID NO: 4515 - DNA, 313 bp, Homo sapiens
  I.4515 (AA460192)
gaagaagagaaacaagttgcagcaaaagtcacagtggggtagctgtcctagagttgaacagacacatttcaagccttatccaagtttaggacttttggaaagcattgcagttgcgaataagagaatgtgcttggaatcttactcttgtgcattgaagaaggataagaaacaggaagaagtagaagaataaggggctggagatcaagacctacccattgtgatgaataaatccaggctctcagcaatgcagggagaaaaagttttgtctatcaacactgcagcaaccagtctcttagcacaggcaccagccctg

SEQ ID NO: 4516 - DNA, 335 bp, Homo sapiens
  I.4516 (AA460188)
cgaggagaagagtaatgtcttgctctccgccctgacaacttttatgtattataatttgaccgcgctgggccacgctgcgcagtcgcacgtcggaaccgctgcgttaacccagccccggaaataacgtaccgatcttcggagtccaagtcggaagttgactagagagtcacctgctttcgtccgctctaggacaccagacacaccaggccgccatgttgtgtaaggatccccagccagtgagcctaaaatgggtagaaggaaaagatatttcttaccctacgcacccaggtccaagtcatcattattttgtctgaaatttatcttcctaactgatt

SEQ ID NO: 4517 - DNA, 94 bp, Homo sapiens
  I.4517 (AA459925)
tgatggttacagtggtcaggagcactaggtaaggtccttcccaagctgatttgagctttgcttctttccatcctttgatgaggacatgaactcc

SEQ ID NO: 4518 - DNA, 314 bp, Homo sapiens
  I.4518 (AA459828)
ctttgctgtgctgtttggtggagaaactctgaccagagctagagacaccatctgcaatgatctctacatctatgatactcgcacatctcctcctttgtggttccacttcccctgtgcagatcgtgggatgaaacgcatgggccatcgcacctgcctttggaatgatcagctttacctggttgggggttttggtgaggatggcaggacagccagtccacaggtttgcatcctggactttatctaaatagtgccaagacacatcactaagcctcgttttgttttgctttgttgcaaacctataaagcgttatcacc

SEQ ID NO: 4519 - DNA, 260 bp, Homo sapiens
  I.4519 (AA459825)
ttaatatacaaccatacctcaaaatattgcaggatcagttccagaccactgccatgaagtcaatattgcaacaaagtgcccaaaaatcatggtctagttttccctgctttcaccctcacaactggagggttcatggagctctccaggggatgacggttgtgccatgcagacagcatttctaagcaagtgtgagttcatgagtgtgattgaaactgctgtttcacatagaaaggcctgcgtgcagcaggttgcaaacaggg

SEQ ID NO: 4520 - DNA, 261 bp, Homo sapiens
  I.4520 (AA459708)
gagtctcagattgaaatttaataagcatttgaagtgaagcagatagctctggtgataacaggtttataggtttgcaacaaagcaaaacaaaacgaggcttagtgatgtgtcttggcactatttagataaagtccaggatgcaaacctgtggactggctgtcctgccatcctcaccaaaacccccaaccaggtaaagctgatcattccaaaggcaggtgcgatggcccatgcgtttcatcccacgatctgcacaggggaagt

SEQ ID NO: 4521 - DNA, 301 bp, Homo sapiens
  I.4521 (AA459705)
aaattcacaggtgcatttttattgcctctaagaaaagtagtgaaagcaattgtaaatatactaatctttgcatactgtactgcattatgcccaatgcaaaaactatataaaaacaggaaatattaattcttaaatctgttaaaatacctttagcagtatgagtaatttctaagttatccttagacactgttttgttttacttttagctcaggggattttcatttcaacgttgtaatggccggggagacggagagtttatcagaatagagccttccatgagtagagctcttgagagaaacct

SEQ ID NO: 4522 - DNA, 294 bp, Homo sapiens
  I.4522 (AA459648)
gcataggatggaagctgagcttgaagtttaattggagcgacgaaccatagaaatgtagagttgtgagccagacagggtggagacaaagaccaggagaggcctgcccatcaaccatttgtggattctgcactcttggacactgtgttaatgcaattctattacactgtctctctatctaggcccctaccaccagggacctctatgtgaggcataaaccagtagggagggcccacactccattttctcttatgtggtctttattgttcagcagatagatttttctgcttgaagggg

SEQ ID NO: 4523 - DNA, 304 bp, Homo sapiens
  I.4523 (AA456023)
ttttaaaaatgtttttctttttattaggaggttagcaagtccccatcacactgggcccgcatgagtgtggattttactctaactgcagtgggaagcacgggagaggcacatgatcacatttcagttactgaatgctcgctgtggttgctatgtttagaatggactactgaaggtcagaaagagaatcagggaagcccattcctgggtttctgccttagtccagatgtgagacagtaggagtgtgagacagtaggggcttgagctaggcttatagctgtaaggcagttaagaactggcagattaa

SEQ ID NO: 4524 - DNA, 354 bp, Homo sapiens
  I.4524 (AA455383)
gaggaaagttcttagagttatttatattcttgttttcctcttagttagaatctacagtttaactttatctttaaattatttgaacatatttgatatgtagcttaaatacaaatgtttcagataacctctttaccataactaatcctggcaagcatggtctcttttttttgttggtgtttaaagcctgtaaacagtttttctgaatgatcatgaacttttcttggtttagcactaggatttagctatgaagagagctcataggctttcaggtgctaattgagatctgccctgttagagtcttggggtgctagattggtcacattgacaccagtggcagggaaggcatctatgagt

SEQ ID NO: 4525 - DNA, 489 bp, Homo sapiens
  I.4525 (AA455080)
tccctgaatgaactatagcaatattctggccattcactattttgtaaatatcctaaaatccggtatgaagaagaacttccgtgtgcaggagggtattgtcatcactggcaagaaggaattaaagtacagaaactataaaccaattcagtggcaaccaaaacaatacacaaaaaagacattccctcaatccccaatacttcccttttataagtaaaactcctaattgagtgccccattcatgatacaatcaaacacgcagaactatggccaactagaagggaccgttcaagacattctgaaatgaaactcccaccgtaatcacaggtgagtctaaatggttttaaaatcctggagaaatcctttgcttttatttaaggacagcaagcccagcaacatccaggaaacaagaaccataaacccatccttccccaccgaggaaagtgacactgagggaggcactggtggtggaatggcagcccatgcagtggc

SEQ ID NO: 4526 - DNA, 555 bp, Homo sapiens
  I.4526 (AA454211)
tttaagaatccattttcaattaagatttctaattagattccacgtttgagacacatctctagtagaaagcaaatggcaagagtagtaattaaaaagcagctgtctcttgtctttctggtatgaaacaagccgttttgtctgtaagttatgaaatcctaggaaattctgtgatgtttgtctcagtttttaataacagtcaacttaattggaagatgctgaattggtctaaaaaagtcgatgccctttgcaacacatatgctgaaaacttctcttccaaaataagcataagtcaactctgggtttttcagacttttagtgctgcaaagacaaaatctccacattttatatcaaatcaaatcattggcccaacatggtagctcacacctataattccagcactttggcaggccaagatgggtggatcatttgagctcaggggttcaagacgagcctaggaaacatgctgaaactccatctctacaaaaaattagacaggcatggtggtgcatgcctgtagtccctgctactgagagaggttgaggtgggaagatcacc

SEQ ID NO: 4527 - DNA, 572 bp, Homo sapiens
  I.4527 (AA454210)
ggattatattgggaaatctttcaaaagtttacctcttcggaatatgcattttaagaagtttcttttgtacctgagactggcctgcttttagggagcttgacctattttatggctatgagcattaaactacgttagataattttctagaatctagataatgcaagccagaaaaaatctgattgcttcattggtttatttttttccagctgaagatttttcttgaccttaattatatggttaattgcctcaaatcctgattatacttcacatgtggaaatatagcctcaggtatcaagaacaactggagcaaaagcttcctaaataattttcaacattagcattagtaatactggttttcttaaacggagaaaaactacacaaattgctgtttgcatctcagttaatctgaatcatatttctttcctttgaaaatgcttattctctttgatttataaagttttataatggaggcttctgaaaaagtcttaaagtaaggcaaatgacttggggtaatgcctactttagtactttaaagaatgatttgatctctaagaaatagctatgttccatga

SEQ ID NO: 4528 - DNA, 388 bp, Homo sapiens
  I.4528 (AA453996)
tttggaaacatcctagtaaaaatttattcagacaagaatcgtcaaaggatgctaaacctaggaggggtagatttgatgaggaacagaattgtcaacaaggtctcaaagtttctcctcacaaattacccactaattgcaaaaggaaaaacaataacgatacactggagaaactggacatcttacccaagtgatcaaaattagcatcaccaataagggacaaatggacattctgtgcatctggatgtatacctgcaatacatatcacttacagcatttcaaccctcactgcactaccccaatctaaccatgaggaaacatcagaaaaacccaaatagaaggatactctatcctttagctgtcctgtatttttcaaatatattactattat

SEQ ID NO: 4529 - DNA, 448 bp, Homo sapiens
  I.4529 (AA453879)
gtgacggcctggacgggccaaggagactccgggcttgagccaggcctcccgcacggctcagctgctgaatttttccttgaggctgtttggtgtgtgacccagcaagggccctgtgtgggacagcaagagggaggcgtcgcggggccttagcagaaggggaacaatgagggcatttcatgaaccatctcaggcacttctgcatcacggaagacctggccctcccagccgtcctggggatgctcagggtgcaggcagaggctcgggaggccggactcaggggtcagaagcagggactggggcaggcgagcccggacagggaagaggggctccgatcaaagccggccgtgctgctggccgggggccgaggtgggtacaagctcctttgtgctttgcacaacctgaatcccccaccagagaggatgtgtgtgaggagccagaaacgctgaat

SEQ ID NO: 4530 - DNA, 459 bp, Homo sapiens
  I.4530 (AA453862)
aattcggcactaagaggagctgctgcttcgctgtgagaagtatccgcgacgagctatccgggaaagggccgaatgcgatcaaacctaatccgcgagacttgctaaggttctgtgctacaaattgatgtttagataaacttcagtgaaatgactcttcaggaattggtgcataaggctgcctcctgttatatggacagagtagctgtatgttttgatgaatgcaacaaccagcttccagtttactacacctacaagactgtggttaatgctgcttctgaattatcaaattttctgctgttacactgtgactttcaaggaattcgggaaattggtctctactgccaacctgggatagacttaccctcttggattttaggaattctccaagtcccggctgcttatgtacctatcgagccagattcaccaccgtcattatcaactcattttatgaaaaaatgt

SEQ ID NO: 4531 - DNA, 442 bp, Homo sapiens
  I.4531 (AA453794)
cttgtccaagatcatttattgttattattatttttctctcttaattggattcagcgtttctggctcctcacacacatcctctctggtgggggattcaggtttgtgcaaagcacaaaggagcttgtacccacctgggcccccggctagcagcacggccggctttgatcggagcccctcttccctgtccgggctcgcctgccccagtccctgcttctgacccctgagtccggcctcccgagcctctgcctgcaccctgagcatccccaggacggctgggagggccaggtcttccgtgatgcagaagtgcctgagatggttcatgaaatgccctcattgttccccttctgctaaggccccgcgacgcctccctcctgctgtcccacacagggcccttgctgggtcacacaccaaacagcctcaaggaaaaattcagcagctgagc

SEQ ID NO: 4532 - DNA, 411 bp, Homo sapiens
  I.4532 (AA453778)
caacaaggatatactttagattacattttttcataaaatgagttgataatgacggtggtgaatctggctcgataggtacataagcagccgggacttggagaattcctaaaatccaagagggtaagtctatcccaggttggcagtagagaccaatttcccgaattccttgaaagtcacagtgtaacagcagaaaatttgataattcagaagcagcattaaccacagtcttgtaggtgtagtaaactggaagctggttgttgcattcatcaaaacatacagctactctgtccatataacaggaggcagccttatgcaccaattcctgaagagtcatttcactgaagtttatctaaacatcaatttgtagcacagaaccttagcaagtctcgcggattaggtttgatcgcattc

SEQ ID NO: 4533 - DNA, 176 bp, Homo sapiens
  I.4533 (AA453549)
attcggcacagccgcgaaaggctggacggaaaggaagagaaacgggcgggtggcctgacacccagcagccaggtgtctataggttttctgtcctgggagggggctgtcagggtgatgcccgcctgcagagagggggtcattctgcgaggttgggctgcagacccctgtgccagcgg

SEQ ID NO: 4534 - DNA, 475 bp, Homo sapiens
  I.4534 (AA453489)
ttttaacatttaaaaatttatttccaggaattccacctaaaacaatcttctatatcattctatattttggaaaacagtactttgggagttccttctggacactttgctgtgattcaacaccacattcccggtttgaaatttagttccttttctaacaggtgtctatgtttcatgcagaacttccatagttccttttgctgaagatgccttaatagtgatgcatggtctcaattagccattggtgtaggcctaatctccgtgtgctggtgctacgtcaagtgtggtggtggttaggagtcaccttccgtgtgaggtcaagcgttctggctcccgttgtccttgaagttgcatctcaggcttctgggcatggcagagcatgcgttcctgtgactcggctgaggcgcgtgtgatggagacttcccggcagcctcccggacctggtctctccaaggtcagatcttgaaacttctgggca

SEQ ID NO: 4535 - DNA, 427 bp, Homo sapiens
  I.4535 (AA453488)
gtggggctgagacttcgcgtcttaacaagctgctctcagttgatgctgatcctcatggtccaatgtatgacaatgctgttgaatgtgcctcttcatttcagcacactgccttcaggaggcacatgggccactcctggcaccctgcacattttagcatttgtttcctgtctctccccactagaatgcaagctgcagaggaattgtatccgtagcacctggcttcgcagaccaagagcaagtcggcacaccaggacaggcatttgcatgggtgcccagaagtttcaagatctgaccttggagagaccaggtccgggaggctgccgggaagtctccatcacaccggcctcagccgagtcacaggaacgcaggctctgcagtgcccagaagcctgagatgcaacttcaaggacaacgggagccagaacgct

SEQ ID NO: 4536 - DNA, 307 bp, Homo sapiens
  I.4536 (AA453357)
gaattactcccccagagaactggtcatcttccgtgtcctacctagtggcaaccagtacagctgagatttataccctcctccacaccaaaataatggatgaaacagacaggctattaaaaataggcctgattctgttcccttttaaccctcacatccttcaaatggatgtctccaggcagttaagtgttctagcctttgcggccccttgttaccgcctgattttgggtgttttacagcaacggaggaacttaagcaaagaaacactatgtggcttgaaattcacactaatccatttagaaataaaaga

SEQ ID NO: 4537 - DNA, 291 bp, Homo sapiens
  I.4537 (AA453256)
tttaaaatttctcagattcttttatttctaaatggattagtgtgaatttcaagccacatagtgtttctttgcttaagttcctccgttgctgtaaaacacccaaaatcaggcggtaacaaggggccgcaaaggctagaacacttaactgcctggagacatccatttgaaggatgtgagggttaaaagggaacagaatcaggcctatttttaatagcctgtctgtttcatccattattttggtgtggaggagggtataaatctcagctgtactccgttgccactaggtaggac

SEQ ID NO: 4538 - DNA, 460 bp, Homo sapiens
  I.4538 (AA453181)
tcagctccacgatccagcctaggatcatatgttgtattgccataaccctctaatctggagcagttcctcagcttttctttgttttttataatagtaatatatttgaaaaatacaggacagctaaaggatagagtatccttctatttgggtttttctgatgtttcctcatggttagattggggtagtgcagtgagggttgaaatgctgtaagtgatatgtattgcaggtatacatccagatgcacagaatgtccatttgtcccttattggtgatgctaattttgatcacttgggtaagatgtccagtttctccagtgtatcgttattgtttttccttttgcaattagtgggtaatttgtgaggagaaactttgagaccttgttgacaattctgttcctcatcaaatctacccctcctaggtttagcatcctttgacgattcttgtctgaataaatttttac

SEQ ID NO: 4539 - DNA, 454 bp, Homo sapiens
  I.4539 (AA452983)
tgaagctctttccttggttacagataagacttggtttacactattggccagtatctgctaaacatatgaagacttaactattcagtgttgcctaggcattcgcctgcacaacattttgaggttagaacatagaatattttcagaaatactgttgtagtttgtgagtgttgttcattagttacacattagctatagagtggatgcatgaagccccatgacaccagtaaacttctcttaccagtaggtaaaccaaacaccattctgtcattagcagccctcttaaatgttgcctctccgtatcctgttgcatttttgtgtgcattgtgtttctactgatctctcttaggtttttacggaatcaaaggaaactaatttttccttaatagcaagaaagatgaagaggtaaagggcattgaagcagaaatgtatagtttggggtacgattagaaaactc

SEQ ID NO: 4540 - DNA, 408 bp, Homo sapiens
  I.4540 (AA452842)
tttttttttaattttcataccacttttttcttttttatttaaaatattataaccaattgacatactagataacattgtttacattccagtggtgcatgtttaatgactagggcatgaatgatgaaaaaccacaataatgatctcagcattccctaaaaagtgccccattttgttttgtctagaggaaaggagagggaacggaacacagggaaggagaggaatggaggaggaatgacatcgcagagggagaaaagcaaatgtcagctatcatactcaggtttccaggtgtgacaccctgctgaccaggataaactgtaatgagaaaatagatgtcacagtccagggagacacgtaattcagtctaacttcattattcagctaaaagattaacagcttctcaaaaatata

SEQ ID NO: 4541 - DNA, 494 bp, Homo sapiens
  I.4541 (AA452365)
tgtaaatgagtagattgatacgcttattgattgcctagaattttattcagttttacccaaatgtattttatgagtcttttattttggcagtatgtattaggaaaaatgcttgttgatttactaagagctgaataataatttattccatgattgattcttaataaaccccattttattgcttttgaaggtgatgcagttataatcctatgctttgtcattctttgtttgcaaatgcacattaattgacaggacaagcacacacccatgactattatctactctgagaaaatggctaaatattaggaagagagtgagttttaaatgatctcgttcacatgcatacagatatgcccatctttggcttttttctttaggagaatatgcattagcttttttaaaagaggcaacgtaatagtctagtacactagattggagaattctggtcctcagatgggggaattttggtcctcctgtaaatccctagataatgtaag

SEQ ID NO: 4542 - DNA, 403 bp, Homo sapiens
  I.4542 (AA452139)
tttttcctatttgaaagaaacaaaattttatttatttatggatgacatactgtatatatggaaaatcccagggaggctataaaaaaggatagtagaagtagtaagcttagcaaggtctcaggatacaaggtcaatataaaatatcaattgtattttacattttaataacaaaagattggaaattgaaataaaataccattgtttaaatacaatagcatcaaaaaatgtgaaagaagtagggataattttaacaaaatatgtgcaagaactgtacattgaaaactacgaaatattactgagtaaaattaaagcagatctaaataaatggagagatatgccatgtttatggattggaggactcaacattgttaatgatatcaattatttccaggctgatctatta

SEQ ID NO: 4543 - DNA, 441 bp, Homo sapiens
  I.4543 (AA449745)
tttttttttttaaggaacaatcactttattgtcttataataaatcgtggacacttggtatttgccatatttcaacaactgggggtaaatcctctaaggagaatcactctaaatccaagcacttcaccctctgaaaggcttgtcatggggcaaaagaaatggtcctttgaattcacatgtcatacaatccccgccagaaaaacatgtgtattgggaaggcagcctgtgttcggtggagttacatgtaagaaacagatgttttgctgtattctgagagactgttggtcattcctgagaaattgttgagagattgcatgatcatttctgagccatgtctcctaagacttaaaggagagccccatctgtaaatcctagtagcaggcatttgtgtctaaaccacaggaattctatcttcaggttccaacactggggtgtttgaaac

SEQ ID NO: 4544 - DNA, 468 bp, Homo sapiens
  I.4544 (AA449644)
attcggcacgtggaaaaaaaaaaaaaaaaccctcagagatagtctttgtgaagagcttctgacagaatcactgagtaccttccttcccccagatgtggaagacatgggggtctcagtgtctgtgctgtctcctcttctcttccccaaccaaggactgtgccattactgcccgtctcaactgtccatgcaggaggacagagttgcctggtactcttacccttgtccctctcctaaagggagcacaaggaaactgaagagactgaaaaagaagagagtttgtagctgaaaaagaatagggatagcaaggaaacccagaactgcattcccctaagtggggccatcccatgtgattgaattgtccatagcttgcctatggtgagaaatgtgcatgctccgtgagctgggtctcttgaaacaggacttatgcttcctctatattctggttaaattttccaaacacataagttc

SEQ ID NO: 4545 - DNA, 412 bp, Homo sapiens
  I.4545 (AA449481)
ggctaccaattaactattctgaataagaataagagcagtatactttacagctaatctcacacaaaggatgtaactaatcagtgatatttgacgaattatggtagggtctattatattcagtcaacaacaaatttagagaaacatacaaaggtttttaaaaatatgggtggtgtcacacagatcaacaacactgtgcctcctctaaataaatctattttaaataaatattccttgtattgacacatgaaacccagaggcccaaaaatatcactacacatcccagttaatgataaggttctaaattgactttgtgagggtaaaatgaattgctataaagtaacaaggaaaatagaaagtagcataatatagcttgcaaactaaattatgtatttttaaaggtacagtcatccca

SEQ ID NO: 4546 - DNA, 517 bp, Homo sapiens
  I.4546 (AA449026)
caacatgaatatccactaagctgtaacaggccctgctgcaactatagtatttcctgaaaaagtatcaactgccacaagggccacaaataaagtctgtgaacttgaaataaccatggagaatgaaatgttctgattcagatcatcggtgggatttcactgggaaatctcccactgggcaagagtagatgatggaggaggagaaacagtcactagaaaaaggtgatactttgtatcaagaaacaattaaaaattagatcacatcctgaaacattaagcatatgctcctttgtgaggcttgctggctgaacttgaactggattgagtgaataatttcttaaaaacaatcaaaatcacagatttattctattttaaatacttatatttacttatatttcattcagaaattagttaacaaataatttttgagtatcctgggaactgttctaatcattaaacatgcaagtttgaagaaagtaaggatgaatctgcctgcgtggggctctcaatctagcgagaa

SEQ ID NO: 4547 - DNA, 451 bp, Homo sapiens
  I.4547 (AA448276)
tttagtttaaacaacagaaatttattctctcacaattctggaggctaggagtccaagaacaaggcaggtggcagagccgtcctccctctaaaagctctagggagcaatccttaattgcctcttccagcttctggtgtttgctagcaatctctgacattcccttgtagctgcattaccccagtctctgcctgtcttcacatggctttctccctgtgtgtgtgtgtttctgtgtatagatttccctccatgagtgtcctataaaattacaaaagtaatttatgctcattgtgacaagtcaaagaattgaggaagttgtgatatcacctacacttctacagtgccatcgcactgtaaaggcatatgtgactgaagactgaaggagatgccaaagttagtcatgtgatgtattttcaaaggccctgaggcagcagtatgtctggagtgttcaagc

SEQ ID NO: 4548 - DNA, 380 bp, Homo sapiens
  I.4548 (AA447050)
cacgatcatggctcactgcaatctccacctcctaagcttgattctcctgcctctgcctcctgagtggctggaaccgcagtcgtgcaccaccataccaggctagttttttgtatttttggtagagaaggggtttcaccatggtgctcaggctggtctctaacttgtgagctcaggtgatccgcccacctcggcctcccaaagtgctgagattacaggtgtgacccatggcacctagccgagtttaactcttaaataaataaactgtgccaggcatggtggcttgcacctgtaatcccagcaattcaggacatggaggtgggagaattgcttgaacctaggagtttgagaccagcgtggacaacatagtgagaccttgtctc

SEQ ID NO: 4549 - DNA, 429 bp, Homo sapiens
  I.4549 (AA446807)
aggaatcctgctcttttttggttttggtaagaggtcgctattcacagagggggcggggttcgtccctccaggcgagtacggggctggcgggcgcagtgctgcctttctgctctgtctcttgatcccgcttaggatctttgtggctcctctgagtcttcttagagaggccgtgaaagatgggaaaggcaggttgctgaaacgctgctgctcggggctggcagagaccctggtatagggaaggcgcaccactgtgggtcagatcagctgacagtgggggttttaggtgatggggtaacttacagttcggatctcttagaacccagaagcaggtaggcgatcgctgcttcatcacacttcacagggagtcctggatctttcctgtccgtaacccatggacgccatgattcagtatggcggaggtccggggct

SEQ ID NO: 4550 - DNA, 430 bp, Homo sapiens
  I.4550 (AA446805)
gtctgagcagcagcaaaataaataaataaataaataaataaataaaataaaactttttaaaggtcaccgaggctgctgtgtggccaggggagctatagaggagcaagggtagaggagggcaagcctgggaggaggcctttgtgaggatggaggcatagactggggttttgacagtggggatggagagatgaggacagatctgaaatatgttttgaagaacatatttaacagaacttgctcatggattggaagagattttaggggagagagagggaggtagatgttccccacttggtgcaccctgatggttgcagactgaattccaatagaatcttctccccaaggtctttttattccctctctcttttcctcaattcagccactctatgagtagttaatacaggtatttatttcacagatgaggtgagac

SEQ ID NO: 4551 - DNA, 340 bp, Homo sapiens
  I.4551 (AA446474)
ttttttgaagaaacaaaagcagagttttattgaaaacaaaagtacagtcgactgcacagagtgggagcggccggagcacgttggctcaagagcccgtcacagaattttctggagtttaaatactctctagaggtttccattggttatttggtgtgcaccttggtgaacgccctatgcaaatgaagaggatatttcctgtcgtagctgaaatgcctcctctctcctctccatctgattcagttctgggaagtcctcaggttcccttcctctaggacttattctctcgtctcaccactgcactcaagcctgggccccagagccagactctgtgtctaaaaaa

SEQ ID NO: 4552 - DNA, 404 bp, Homo sapiens
  I.4552 (AA446463)
tttaattctaatactatattttacttaatatatcaaaatgttatttcaacatgtcattaacataaaaattactaatgagctattttgcattttttctttgtactaagtctttgaaatccagtgtgtgttttactcttaaagggcatttcagtttggactagccacataccagtagctcatagctgttgtataagacagtacaggtccaggctatttattttttaagtccagtgcaaacaacctctcattctttgcactttgataacttgaatatttgagcctacaatcttcattcattcattggtcaacagccgctggagtgtttactgtgcacaaagcaccgtgctagaagctttctgggctgcttccaagtgtacacaatggagctcaccactccccactgc

SEQ ID NO: 4553 - DNA, 474 bp, Homo sapiens
  I.4553 (AA446154)
cactaggtcttcccgtcacctccacctctctccatgacccggctctgcttacccagacccgaagcacgtgaggatccgatcccagttcctccaaggggcctgggtgctggggaggggtcaggtagtccagtgcgtccacctgtatccacctggggccctagctgggcgagctcctggacagtgtcctatggctgggggcactaggactgacaatccaggcagtcttttccaccactggcccagccctgctgctgcttctggtcagcttcctcacctttgacctgctccataggcccgcagtcacactctgccacagcgcaaacttctcaccaggggccagagtcagggggccggtgaaggtcctggacagcaggaggctctactcctgcaaatgggtacagtctcaggacaacttagcctccaggacgcactgctgctgctgctcatggggctgggccgctcctgagagcctgt

SEQ ID NO: 4554 - DNA, 475 bp, Homo sapiens
  I.4554 (AA446138)
aatcactaataccctttcttccagttgatcaaatcagctactgaagcttgtgcatgcatcaggtagttcttgtgccatggttttcagctccatcaagtcatttaagtgcttctgtacactgtttattctagttaggcattcatctaatctttttttaaggtttttagcttccttgcaatgggtttgaacatcctcctttagctcggagaagtttgttattaccgaccttctgaagcctatttctgtcaactcatcaaagttgttctccatccagctttgttccattgctggcgaggagctgcaatcctttggaggagaagaggcactctggtttttagaattctcagcttttctgttctggtttctccccatctttgtagttttatctacctttggtctttgatgctggcgacctacagattgggttttggtatagatgtcctttttgttgatattgatgctatccctttctgtt

SEQ ID NO: 4555 - DNA, 309 bp, Homo sapiens
  I.4555 (AA443712)
atttatttttaatttagtttcatactttagggcatatccactaaaaatgcatagacaagtgactgtgttttaaaaatacttgaagtaattctcctctgtgtgtttaggacaccaacacaattagtttcatttatttcatttagcttttgctttggatatatagttacgcacctcataacattgtttcagtcaacaatggaccacaatgaaccacgtatgcaccagtggttccataaggttgtaatggagctggacaatttctatcacctagtgacactgtaactgcagtgacatcatagctgtcttaat

SEQ ID NO: 4556 - DNA, 402 bp, Homo sapiens
  I.4556 (AA443664)
tttttgtaattacaattatttttatttttttgtttctctacgtaagtacaatttataaatacagatatgtatttgtagatattaatttcacatttacatataacaatagctaccaattcattccttaaactatatttttttttttttgcagcacacatctagttactaggaatgcagcaatgggggaaaaatatgtccccactctcccaagctttctggtgcagaggaccagaagaggacctcaaaggtgtcttgtcttgtcttttctttgagatggagatttgctcttgttgcccaggctggagtgcaatgacacaatctcggtggctcactgcaagctccacctcccaggttcaagctattctcctgcctcagcctcctgagtagccgggaccacaggca

SEQ ID NO: 4557 - DNA, 465 bp, Homo sapiens
  I.4557 (AA443471)
gcttgaacccaagaggcggagctgcagtgagccaagatcatgccattgcactccagcctgggcgacagagtgagaccctgtttcataaataaataaaatcactctttttactttatatgttttttgagacaggatcttgtggtacgcaggctggagtgcagtggtgtgtgatcacagctcattgtagcctcgacctcccctgggctcaagcagtcttcctgcctcagcctcctgagtagctaggactacaggtgtaagccaccatgcctggcccttaattttttttaatgagcatgtacagtagtcccgctttatccatggtttcacttaccacaatttcaattacctgttttcaactgcagtcagttacttttcttaagatattttgagggttataggctcatgctataaccccagcactttgagaggccaaggcagcagatccttgagccaggagttcagaca

SEQ ID NO: 4558 - DNA, 400 bp, Homo sapiens
  I.4558 (AA442897)
tttacacattttcagacatcatcttgtttattacaaaacttaaaacaccttccaggcaagatccaaagcaattttatcctaacattgttcaccttcatctgtagagtcaaatgtatctgccagcttgtgttgacaagggggaatgcttcccatttggtcaaggttgagggacagtaaaggaatcttgtattctaatgagtacagcatcctttcattgtccaagccatccaccttaggctttgaggttcaagtccaggtctggagaagagaaagtttcatacccaaccttgtggtctttccttcggtagtacattcgtgtcagcacagtcattagaaaagtctccagtatgaggaggtggcaattcatcacttgagacctggttttagaggaatagggagg

SEQ ID NO: 4559 - DNA, 393 bp, Homo sapiens
  I.4559 (AA442705)
ggtgagtggagattgcgccagtgcactctagcctgatgccacagagcaagattccattaaaaaacaaaccaaccaccattaccacctttaggatctagcagctcttgctgttttactccagtgattgggaattaagcactgagaattgtctgttcaagtaacacatttctaactgtaaactaggcatggatcattggttgtaatatcatttacctttaagttaaaataacattttaccttaagcatcaggacttgtgatgcagctctagtggcagtcataatctacagctgtaggttttaaatcagtgattcttacagtatttcagaagcgttgttacctataatatcctttgtgttttagggcagggtaaattgtcagctactgctaaaatg

SEQ ID NO: 4560 - DNA, 476 bp, Homo sapiens
  I.4560 (AA442636)
gctaaggtcctgcacataaccacaaccacccccactgctcggctctacttcttccacaacatgaattctggcatctttccatgtttctataattttctttccagttagcgttgtcaccctggtgcattgcttcctgagattattccgggagaatgctttaatttcctggttaagggagtacattacatgagcagtggctgggaacaaatacaaacaaatccagcaggcatagaaaacggctgaactgctagtcccttattgcccaggtaacaaagccagcctcagaggtgctcgcccatccaggtaaccgcagcagccacagaccaagagactgagtcgtccagctccgtttatcccagcgatgcaatgtaaggcgaaatttgattggtcattgagacacaagtgccgattggatgctgtttcttcttcctgtcagccagaaacctgcattttcccgaaagctcgagggatccact

SEQ ID NO: 4561 - DNA, 350 bp, Homo sapiens
  I.4561 (AA442487)
tactgaggacttatatagcagaaagccaagcaaagagaaatagatattgttcctatcctcaaggaatcagagtctagtgagtggaaagtgaaccattaatccagcagtgccctgcaaagacggctaaagcagagcttctcttcgcctcagataaagaagccaggagctacaattccttcccacctgctccctagataccccgttccaagacaggagcacccaagtctctgacaccctcctgcttcacccatccgcctgacttggctgaacgctggtgtcctggaactcattctctttctctgatcttcctgtccactgccagagagtggtgccacaattccaaaaatgaa

SEQ ID NO: 4562 - DNA, 189 bp, Homo sapiens
  I.4562 (AA442467)
taaacacggtgcttgccctgtcaccattgcacttgagcctgggcaacaagatcgaaactccgtctcaaaacaaacaaacaaacaaacaaaaaattattctctggaaattctgggtaacgtcagtggattacatcaatgttaatcttctggttgtggtattatatactacaatcaccagctgaggtaacc

SEQ ID NO: 4563 - DNA, 493 bp, Homo sapiens
  I.4563 (AA442459)
tcaagatgccctgaggcgaagagcagaggggtgctctctggtggcccagcagttctgccccacgggagaggtttctcttttactaccgcgaaaacccacaggacgctgcttcatcccagagccaaggataccaggaaggaaggtcagagtgaggaggtgtctgagtgtttcagatcacacagtgacatactgcttgatggcttcagaaatccttcatgagctgggagacagccccagaggtgacagtttctacaagagcagtctgaaatgccacctcccaagaaacctccatgcaacttcccaagcagaatgagtcaccccctcttctgccctttcatagccccaaccatctcgaggacaacacatcagcagcagcagccacgtagatgtttgtttctgtacctggattctaagtgcctgaaggactggacatatctggtttctaagttccaggaggactggacacatccatcacccacgtgtaaacccagca

SEQ ID NO: 4564 - DNA, 491 bp, Homo sapiens
  I.4564 (AA442366)
gaagcttctgcacatgtagttcctagagctgctgcttattaaaatgtcaacatcttcatcttctagctgggacaacctcttagagtctctctctctcagcacagtatggaattggatacaagcaagttttttgggagagactagtgcacctcagcaaacaagtttgggactattagataatcttgctccagctgtgcaaatcatcttgaggatttctttcttgattttattgggaataggaatatatgccttatggaaacgaagtattcagtcaattcagaaaacattgttgtttgtaatcacactctacaaactttacaagaagggctcacatatttttgaggctttgctagccaacccagaaggaagtggtctccgaattcaagacaataataatcttttcctgtccttgggtctgcaagagaaaattttgaaaaaacttaagacagtggaaaacaaaatgaagaacctagaagggataatcgttgctc

SEQ ID NO: 4565 - DNA, 405 bp, Homo sapiens
  I.4565 (AA442273)
acctgagttctaaatttatttctcaaagaagccaagctcctgagagagaaatgatactgtaagagtatctgcctggaaaccctgttgcctggagaccactcttgaagaacatccactgctgtggcctcttaaagatttaagacatctaatgaacagctgacagaaatcatcaatttgctcctcatttcagtgtcaaatcatgatgcaacagcagagtgaactcagtgtttttggtatgaagatctccatgtgtttccatcatcagcatctcctgtgctcttaatcttaccctggacacctgacccaggtgcccattctgtgaattctttcattgtaggaaagagaaacagatgttgacaccatgctcttggacttcccagcttccagaatcatgagccaaataaa

SEQ ID NO: 4566 - DNA, 508 bp, Homo sapiens
  I.4566 (AA442232)
gcagacctcgtaggccctcttctctccccaccccaggttttatgccgtgtgcttttacctgctgatgctggtcatggtggaaggctttggggggaaggaggcagtgctgaggacgctgagggacaccccgatgatggtccacacaggcccctgctgctgctgctgcccctgctgtccacggctgctgctcaccagatttctgaggggagcacagctctatggatcaacactttcctcggcgtgtccacactgctggctctctggaccctgggcatcatttcccgtcaagccaggctacacctgggtgagcagaacatgggagccaaatttgctctgttccaggttctcctcatcctgactgccctacagccctccatcttctcagtcttggccaacggtgggcagattgcttgttcgcctccctattcctctaaaacccaggtctcaagtgatgaattgcacctcctcatactggagacttttctaatgactgtgctgacacgaatgt

SEQ ID NO: 4567 - DNA, 387 bp, Homo sapiens
  I.4567 (AA442052)
agtggagatggggttcaacatgttggccagaatggtcttgatctcttgacctcgtgatccacccgccttggctcccaaagtgctgggattacaggtgtgagccactgcacccggcccaagatggggtttcatcatgttgacctggctggtctcaaactcccaacctcaagtgatccactcacttcagcctcccaaagtgctgggatgacaggcgtgacgacagtgcccggcctagtacattgtttaaatggtgcatgtaaaacctcatggtactacaactgcctggtgacagactcaccagagtaaataactatcctgctgttctccaaccacatgggattccccaaacaaagatttgttgagtccaagatgcatcatgccagaact

SEQ ID NO: 4568 - DNA, 423 bp, Homo sapiens
  I.4568 (AA441939)
gaataaaaaaaataaccgtatttattaaaatgaaacaaattatgtgtatgactgcaagagttctggcatgatgcatcttggactcaacaaatctttgtttggggaatcccatgtggttggagaacagcaggatagttatttactctggtgagtctgtcaccaggcagttgtagtaccatgaggttttacatgcaccatttaaacaatgtactaggccgggcactgtggctcacgcctgtcatcccagcactttgggaggctgaagtgagtggatcacttgaggttgggagtttgagaccagccaggtcaacatgatgaaaccccatcttgggccgggtgcagtggctcacacctgtaatcccagcactttgggaggccaaggcgggtggatcacgaggtcaagagatcaagaccattctggcc

SEQ ID NO: 4569 - DNA, 447 bp, Homo sapiens
  I.4569 (AA441883)
cctaaaccagactttacaagtagataggatcaacaatactctatcaattttcaactccaattttctattctacttaaaatgggaactagaaactgtttgcctgaagaatgtgtctgaaacataatatatcactgcatgtctgtgctgtagacctgttaattttatctgtgagaaaaaaagttactcaaaattctccctgacctaagaatactttctagttcactgcagtcttactgaccagatgcaacagttgaagtttgatttctcgacccaatatttctattgggttttgaattattaatatcactgttttgaggtattcagaaacaccagtgtatcaaaaaagcatttgcactttaggtgtgtgtggtggttatgtcatttattagaccatcccagacataagacaatcagggaaatcagaaaactccagcctcaaatgtgtct

SEQ ID NO: 4570 - DNA, 438 bp, Homo sapiens
  I.4570 (AA441822)
ttttccattatgaaagacatttattgagtaatttgcaaatgttaataagccttagaaactaggaaaagctgagtactagtttatgacttacatttaattttttttccagccttttatcctgggtttaaagtaacacagaatctttcagtgtcaacagtgagctggaaattaacctataataacaagttttgagcattttgctcctccaggcaaaatctggtcactcataataaatatattatgaagaagccaatgatgatgtattccataaacttgttatgaaaaactgactccagaaattatgtgactttacttgaataattaccattttacttctctacaataatcattgtgagagcagtgggcattggatggttgaaaagttattccagacaataattaggcagatgtattacaatttaagttgaggctagatca

SEQ ID NO: 4571 - DNA, 321 bp, Homo sapiens
  I.4571 (AA437369)
aaaatgaaactgcatgagaggcttgggacccagcctgcatgggtttcctcggcaaggacaaggcccgtctagcacctgggcccatcacaggaatggtgggggttagggcagggctgaggaaaatgcccggcctcacagagtggggaaaagaggctctctgctcccggctcactctgcagaaggtgccatgagcccagggctccgtgggcagtgccatccctcctgtgtcctgcctgcttgtggcagggacacggccaagcagggctgctgctgggcaccaagggtacatcctccctagaaggccacccggggaggcccctc

SEQ ID NO: 4572 - DNA, 415 bp, Homo sapiens
  I.4572 (AA437287)
ttttttttttttcaatagcgttctctatctttattgatacaccactgcacacatgagggaaacagtgctttcctggaaaagattggagtccatcacatttcaaatgggggaagtaaaccctgatgtggacaagggactctggcagtcagagcagctgcagtagggctcagaggagcaatccctcttcgtggcaggtttttgagcaacgattatcccttctaggttcttcattttgttttccactgtcttaagttttttcaaaattttctcttgcagacccaaggacaggaaaagattattattgtcttgaattcggagaccacttccttctgggttggctagcaaagcctcaaaaatatgtgagcccttcttgtaaagtttgtagagtgtgattacaaacaacaatgttttctga

SEQ ID NO: 4573 - DNA, 388 bp, Homo sapiens
  I.4573 (AA437210)
tttataaagaaaagaggtttatttggctcatgattctggaagctgggaagtccaagagcatggtgtcaacatctgtttctctttcctacaatgaaagaattcacagaatgggcacctgggtcaggtgtccagggtaagattaagagcacaggagatgctgatgatggaaacacatggagatcttcataccaaaaacactgagttcactctgctgttgcatcatgatttgacactgaaatgaggagcaaattgatgatttctgtcagctgttcattagatgtcttaaatctttaagaggccacagcagtggatgttcttcaagagtggtctccaggcaacagggtttccaggcagatactcttacagtatcatttctctctcaggagct

SEQ ID NO: 4574 - DNA, 378 bp, Homo sapiens
  I.4574 (AA437136)
gggttctttgcttattttaatatcatttggttaatagtgaagagggttatacttaagtgttgtacagtagaccccacttatccttggaggatgcgttccaagatccccagtggatgcctgaaacttcatgtaacaggcatggtgagagcaatgagccgtggttgactgcaggtgactggctcgccaccacactcctgtcactgccatcctcctcttatctcatcaagagacagtgctaaggtttacactgatgtctgcttacacagttgttttctttctttctcgtgaaggatttgttgcttgttttggtttggttctaggttggtgatgaacaccttaggaaacaacaccgggtgctggcagatcttcattacagca

SEQ ID NO: 4575 - DNA, 271 bp, Homo sapiens
  I.4575 (AA437133)
tttttcttgtctgaaatcaccttcttttaatgtcttaaaactctaggagttgcttatgtgctgtagcccagccaataagttctgacatcagtaattcagagggtctgctgagagaacatgacggcctgagaggggataagctgtcacttctccgcacttccgaagcatctctatatggaacgtttccctgttccggtctgatcatctttctcttgatcctgctttccgatcttgattggactgaagacagcgaggacagaggggtggggtc

SEQ ID NO: 4576 - DNA, 408 bp, Homo sapiens
  I.4576 (AA437106)
cactaaacatgattctttaacccattcctgtcaacactggcatcgaccaacctcccaaggtccctgctgtacccctcaaaaccattaagcctttgctggactgtgatctaagggcggctggcaaacacagttttgtcggtttccaccactcactctgctgagatcagcttggcctacacgaatgggtcctgtctgctcccatcccttcttacttgtggtaatctcggacacagtagatcttgttctctgagtccacggtgaagggcaccccatccaaacactcattacagatgacacagcggaaacagccggggtggtaggacttccccagggcttgcaggatctggagcagagaccaagactcagtggggattatagggaaggatgagatggtggaaggggaaagga

SEQ ID NO: 4577 - DNA, 352 bp, Homo sapiens
  I.4577 (AA436992)
ggaaggccctggtaggctgtactcctctctctcttagggaaaaccagcaccaaagttctagagtctggacgtctgagatcagggtgccagcactgtcgaggtcacagactgcagacctccttgtatcttcaaatggaggaaagaggacaagagagctcctgtggtcccttttatcaagatgaatgcacaaggaaaatgttgtacatttgcacattggagtacacttcagccataaaaagaatgagatgctgtcatttgcaacaacagttgaagcctagtcaagaagagggctcagagaagcttgactaaagtttcatgaagagagtctctgtcagtggtgggtctttgattc

SEQ ID NO: 4578 - DNA, 415 bp, Homo sapiens
  I.4578 (AA436878)
ttttttctccaacgaagtcttatattttaccattctgcgtgtattagaaagctaaatttaaacagcaacaataagaaatcttccccagtggatccctcgagcctttcgggaaaatgcaggtttctggctgacaggaagaagaaacagcatccaatcggcacttgtgtctcaatgaccaatcaaatttcgccttacattgcatcgctgggataaacggagctggacgactcagtctcttggtctgtggctgctgcggttacctggatgggcgagcacctctgaggctggctttgttacctgggcaataagggactagcagttcagccgttttctatgcctgctggatttgtttgtatttgttcccagccactgctcatgtaatgtactcccttaaccaggaaattaaagcattctc

SEQ ID NO: 4579 - DNA, 379 bp, Homo sapiens
  I.4579 (AA436683)
tttttttttttttcttttactttcctttcatttttggaattgtggcaccactctctggcagtggacaggaagatcagagaaagagaatgagttccaggacaccagcgttcagccaagtcaggcggatgggtgaagcaggagggtgtcagagacttgggtgctcctgtcttggaacggggtatctagggagcaggtgggaaggaattgtagctcctggcttctttatctgaggcgaagagaagctctgctttagccgtctttgcagggcactgctggattaatggttcactttccactcactagactctgattccttgaggataggaacaatatctatttctctttgcttggctttctgctatataagtcctcagtaaat

SEQ ID NO: 4580 - DNA, 264 bp, Homo sapiens
  I.4580 (AA436658)
tttctgaaaatctttttctcttttaattagatagactttagattcatatgtagttacaagaaataaaattgagagatcttgtgtacctttcacctggttacctcagctggtgattgtagtatataataccacaaccagaagattaacattgatgtaatccactgacgttacccagaatttccagagaataattttttgtttgtttgtttgtttgttttgagacggagtttcgctcttgttgcccaggctcaagtgcaatggtga

SEQ ID NO: 4581 - DNA, 345 bp, Homo sapiens
  I.4581 (AA436651)
tttgctatacaataaaatgctttattcagccacagctttctaaaaatagatgtggcatcaaaatgcgcattcatcaaatcttgaaggagtttcaaatctttagagtgactctgaactctcgttttggttgacacaataatccataaaaacaaataaagcacccattctgatctggaaggggtaacgaggtgaaaatattgataagccaaagtgacagcctcttttgtagacatgatcctgcctaaatttctcatgcctcacaaaagagggccctgaattccctgcttctccagagctccacgcagtccttgaagcactctctggctgtctctgcaagtggctgaa

SEQ ID NO: 4582 - DNA, 434 bp, Homo sapiens
  I.4582 (AA436580)
ggcagggagccttagctaaatgctgtatgtcatagatcatctggttcttgtggggtgtgtgtgtcagaatcacatgggaaacaccttcagagggtaggggcctgggctcagcgtggggagtctgaggcagcaggtgcagagtgggaggagctgggcactgcacttgtgctttggctgagctcccgctgactctgaggggagcttggtgacattcttcatggtccacaggccttgctcagaaagaactatgttctcatttaggagagctttgaggcagttgggaagcattgttggtaaggatgttgaggcttgagaatgtaatgcttttttctttactatggcccacactcagcagataattgcctctgggataaatccccgacccatgcccaccccgatcagggaaacatagtggggagttcagaaacggactc

SEQ ID NO: 4583 - DNA, 444 bp, Homo sapiens
  I.4583 (AA436574)
ctgactgactagaattttgagatggaattctcaaaattttgagatggtatttgataggtgcaatttctagtattttgtctccctaaatggctcattaagtgacttaaacactgaggatctgaacagattttgactgcaaagcagattctacagttcgtttcatctaaccgttggaattaaaatggaaaacgttgcaagtttgtaaacccaaatccagatgctgtgttaagcatggtgcccaggtggaagcactgcctcttgttcccacgtgctgccacagagatggccctggtggggtgaaatggacggagaacaccgttcacaaggataactcatggtgtgggctccagaagcacatttcactgaaatcctaagaggacccagtctcagttttcattaataaaaaatacatggggggattctagaacctaagagtgttttgca

SEQ ID NO: 4584 - DNA, 418 bp, Homo sapiens
  I.4584 (AA436553)
tttaacctttaggatcaaaaatttattaaaaaccaattatatcaacaggcatcaagtctacagattcaggttacaccagaccatgaagtaaattctgtccccatccacaccatacttgccaggtcttctagactcctgagccatctccctatatcctcatccaaattcccagattacaggcttaggtttttggtttggttttcagtccaatggaggtgggggcagctatgtgttgatttttggcaccaccctgtggtcatacctaaatattgcaccttctactcaatcccacaaagggaaggaaacatgtatgtagagggcccagccgacttcaaatctcagctctacttcacagtaaaactgtgggcaagccaactaactggaggggccgtgattataaccatgtaaagatgtgtat

SEQ ID NO: 4585 - DNA, 392 bp, Homo sapiens
  I.4585 (AA436547)
ttctgatgactcccagtctcgttttattgccgctgacaactctggaggagacagataaaaaaagagctcacgcgaccagtgaaacaagccaccctcctctcccggctttaaattcctgcaaaacactcttaggttctagaatccccccatgtattttttattaatgaaaactgagactgggtcctcttaggatttcagtgaaatgtgcttctggagcccacaccatgagttatccttgtgaacggtgttctccgtccatttcaccccaccagggccatctctgtggcagcacgtgggaacaagaggcagtgcttccacctgggcaccatgcttaacacagcatctggatttgggtttacaaacttgcaacgttttccattttaattccaacg

SEQ ID NO: 4586 - DNA, 442 bp, Homo sapiens
  I.4586 (AA436503)
tatgtataataggtaggatgcaaaaagatatgtaattgaaacaaaaaacattggactaaaatatcagtaattgaacatgtttatgtttgattattatttacactatggaaagatgcaattctagtactttgttaggaaactgcattaaagcagttctgccttgtataatctgtaagtacctattaagacaaaatacttctaaagatacttatgaaatgtatacatattttttcttgcacgttacaaagaaaatactcaattgcataacacggatgtttgacaaacttttttttttttaatgcatttctttctttcatgagacattgaaaccactgatagctcatttcaccctatcttaaacccttctcttgtctataaaactaatacgggtcacaccggaccttcggattaattggatccacattccccaatgatgtttgca

SEQ ID NO: 4587 - DNA, 424 bp, Homo sapiens
  I.4587 (AA436456)
ctttttattgattttttttcaaaagcactctatatatggagtggcaccagatttaacctatttaaaataaaagtcatacaaacacaaaatatatttctgtgtcatgccagctcattatataataaacatgttatgacagctaattctactagaattactgtgaatacttacagtacactgaattttattctttcacatccattttagttttaaagagaggttcacgagttaaatgacaatggcatggctatcttgaatggggtgcaaacatcattggggaatgtggatccaattaatccgaaggtccggtgtgacccgtattagttttatagacaagagaagggtttaagatagggtgaaatgagctatcagtggtttcaatgtctcatgaaagaaagaaatgcattaaaaaaaaaaaagtttg

SEQ ID NO: 4588 - DNA, 414 bp, Homo sapiens
  I.4588 (AA436300)
ccaattaacaacatggatcttaaacaggccagcctgataagctctctggttcctcattctggttagtattggtacagttttcagaaatatcaaaaaatttcaagtatcaacataggcagatcacattcagtttttaaacaaaagcaattatgttaggttgaaaaatatagtctgtttttacaatattagaattgaagatctggacatttgtttaaaggatatcagcacattacaggtaattttcattctattttactctttagagtttcaacaagtgtgagataaattacattaacactaaattttgcatttgttggagggaaatagatgctggattattttaaggatattgagagttcacaaaaatagcaatataaatggacctaaataaaatatgcatatactgcagagtga

SEQ ID NO: 4589 - DNA, 504 bp, Homo sapiens
  I.4589 (AA436289)
attcggcacgcagggagaatcgctagaacctgggaggcggaggttgcagtcagccaagatagcaccactgcactccaggctgggtgacagagcgagactccatgtcaaaaaaaaaagaatgtgggaactcaaattttcatttttaatgtaatccccaagattttctccaagaaataaattgttgttttgtattttgtaacttaaaagcagctattggtaaatttctgagatatagcaggagaccaaaacatgtttggaaagagaataaatatatgaagagagactggttgttttattttcaatgtattgaatatattagactactatttattttctgagtggatgtgattaaatattcagacgtttagtgtatgattaagagtgagatagagatttctttggagtaattaaatccatcctgtcttttacacaatggacaaatcaagttaaaaaaatttttagatagcttagcttgttttctggtgctgttgacctgcaagagaa

SEQ ID NO: 4590 - DNA, 455 bp, Homo sapiens
  I.4590 (AA436250)
aggagtggtggtggtggtgtggtggtgattaggtacagtgctttcaatgcagtcttgcagacagaaaaaaaatctttctcaaagcttacaaacatttcccccctactatttccacccttcctcaggccacatgaatttgtgtcacccagataataaagaagcagcatgtatgctcttaattaccagtcaaatataaatcaatactaccctaaattaatggctttctgcaagtctacattaagctgaggtctacatgttggcaaatcagggttttgacttttttttttaaggaaagtttccaaccagttcctttccccctctttattaccagttaatttccaggggtttgtttttgcctttttgttgttgttgttgtttttgttgttgagatggagtctctccctgttgcccagtggagtgcagtggcaaatctcagctcattgcaacctctgcct

SEQ ID NO: 4591 - DNA, 445 bp, Homo sapiens
  I.4591 (AA436173)
tttttttatttattaattttttattagtatttaataaatatacatatttttggagtactcatgataatctaatacattcatataatttgtaaagatcaaatcagtataattgggatatgtatcaccttaaacatttttccttgtgctagaaacattcctcacagaactgttaaagctaacttgtagtctgttatccctgtcgctcactgatagttcacattttttactttataatgtctccttaggttaaaataacattttaaaaaatttttgtaagtatcaggcactgttaggtgctagattttaaaagtaaaaaagaaaaaaaaataagagtctctgtccttgggtagcttatcttctgtgtgattatttcgtcttctgtctttagatctctgctgtccactgtggtagccactagcaacatgtggctatttaagtggattga

SEQ ID NO: 4592 - DNA, 457 bp, Homo sapiens
  I.4592 (AA436162)
caataaaatatttttaatgcctacaatttcttgtatacataaattgcaaaactttcacctgtatatgcaaaagtatattctcttgcaggtcaacagcaccagaaaacaagctaagctatctaaaaatttttttaacttgatttgtccattgtgtaaaagacaggatggatttaattactccaaagaaatctctatctcactcttaatcatacactaaacgtctgaatatttaatcacatccactcagaaaataaatagtagtctaatatattcaatacattgaaaataaaacaaccagtctctcttcatatatttattctctttccaaacatgttttggtctcctgctatatctcagaaatttaccaatagctgcttttaagttacaaaatacaaaacaacaatttatttcttggagaaaatcttggggattacattaaaaatgaaaatttgagttc

SEQ ID NO: 4593 - DNA, 393 bp, Homo sapiens
  I.4593 (AA435832)
caaaatgcaaatgctgtgttttgtgatttgagatctagggaggtggcttaggacaaaaacccacagaaggacttactcagcgttcagactcatcaggtgtcgatcccccatggtcgggctcaggtgggcccaggtctcgtcattggctctgtcctctcctgtgaggcagctgcagcagttgcagggcagggtcaggggattcctcagccggaacctctggcacttccccttctctgagttcatcctcccacggtgctctttagcattctgtcttgatcagggtacggttctcttagcccttggctctggctttcaccaggaccctgtttgtttttctttctcagatgtgggatggggaaggacaagaccagcagccctgacccttacgtgatg

SEQ ID NO: 4594 - DNA, 407 bp, Homo sapiens
  I.4594 (AA434127)
ttttttaatccagtcatttattcacttcactcttctaacaaatctgtattaaacgctgcacatgccagcattgcactaggtactggaaacacaagataagctcactaagtagacaactgggagagaggcagtttaaagagaaaagaatctaaacacagactgatgcaattaaagaagacaagtagaaaactgcagcaaaacagaacaacagaacacagtggattgggggatgcaggtaagatgggagaagaggacagggaggaggtgggggtgggggaaggagtctaaagggtgctgggggacacacagacaagactgcaggaaggaaagagagcaaagaggttgctgaaatgacccacaaaaggtgaaggccagaacaaagaaaatttaagatttgagaaaaggtc

SEQ ID NO: 4595 - DNA, 325 bp, Homo sapiens
  I.4595 (AA433997)
gcaggcaccccagggcggggcagcaagcaggcaggaggggcctccccgggtggccttctagggaggatgtaccctggctgcccagcacagccctgcttggccgtgtccctgccacaagcaggcaggacacaggagggatggcactgcccacggagccctgggccatggcaccttctgcagagtgagccgggagcagagagcctcttttccccactctgtgaggccgggcattttcctcagccctgccctaacccccaccattcctgtgatgggcccaggtgctagacgggccttgtccttgccgaggaaacccatgcaggctggg

SEQ ID NO: 4596 - DNA, 433 bp, Homo sapiens
  I.4596 (AA431927)
aatcaagataaaaaatacttatacagtgatgtgtcacttaatgacagggatatattctgagaaatggtgccgttacgggtttgtccctgtgccaacatcatagaatatacctactgcacacctaggctatatgatgtagtctattgctcctaagctacaaacctgtatagcatgttactgtactgaatactgtaggcaattgtaacagaatggtaaacatttgtgtatctaaacatagaaaaggtacagtaaaaacacagtataaaagtcaaaaaatggtacacttgcaagggcacttaccaggaatggagcttagaggttggaagttgctctgtatgagtcagtgagtgagtggtgagtgaatgtggaggcctaggaaattattctacactactgtagaatttatgaacatttgggctacactaaatttata

SEQ ID NO: 4597 - DNA, 571 bp, Homo sapiens
  I.4597 (AA431794)
tttaaaggaaaataaaatattttaattgattatgggctctttaaaagccaaaaattattaaacccttcaaactagaaaagaccactgaaacatcctacaggttttaatttccaataaagtaaatactgataactataacccacataaaaagctctttggggtcctcaataattagttttagagtaaaaagttcttgagaccaaaatgtgagaaaaccacgtgaattaatcccagccttgttattagatttatttcttcctatgccctcataaggaagcattgctttggaattccaagatgtatgtaattccctggcttggctgaggttgccagttctagttctttattctttttactcaatttttcctttcagtttgttgctttttcttactttttgtccagcattgtgctttaattccattatagagatccattcttcaggtgaactatgcaagtgattttcttttcaagtgatttgaaccaagcgtcttacaagtttttcccgaaattaagctgacctgggacaccttgactccaagcccagcagtaagtctcacatgccacagggcct

SEQ ID NO: 4598 - DNA, 570 bp, Homo sapiens
  I.4598 (AA431792)
tttctttaatgctgataggaactcattatgttgatttcacaatcaattaatgagagacaattcagtttgaagaacactgatttcatgcctatattttggttttctgggtagagtaaaatttctgtctgcacctgataactctaaatgagtcatttcatctccctgagtctcacctcatctgtgaaataaatacctgtattaactactcatagagtggctgaattgaggaaaagagagagggaataaaaagaccttggggagaagattctattggaattcagtctgcaaccatcagggtgcaccaagtggggaacatctacctccctctctctcccctaaaatctcttccaatccatgagcaagttctgttaaatatgttcttcaaaacatatttcagatctgtcctcatctctccatccccactgtcaaaaccccagtctatgcctccatcctcacaaaggcctcctcccaggcttgcctcctctacccttgctcctctatagctcccctggccacacagcagcctcggtgacctttaaaaagttttattttatttatttatttatttat

SEQ ID NO: 4599 - DNA, 419 bp, Homo sapiens
  I.4599 (AA431552)
ttcggcacgatggacaggaagaaagtggtggagtcagaggtcacaatccaaagcaaggtgacagtctcttgacgaagacaccctgagtgctgaattaaggggctaaataacagtgctatagtggtttcataatcataaagcattccaggaacacaatattgcttatcaactgagctttaaaacagatatgaggcaggacatggtggctcacacctgcactcccagcaatttggcaagccaagctttgatggctctggcagaaagccttcctgttccaaactcaccacttatcatcatagtacccgcgttcaggcattaagaagaaaagagcatccaatccctctgctttcctgcatcggctcccatgcacaagcaaatgtgttgtgttagtggctatcaaatattcatgtatttgatca

SEQ ID NO: 4600 - DNA, 408 bp, Homo sapiens
  I.4600 (AA431270)
ctaatggttagcgcccacctgtgaagagtcgggggtcggggagggggtctcgctaagaaggaggtttgcagaccatggcaaagactggagctagagattcgctggccttgaagaagcaagctgtcatgttgcgaactgcctatggagaaaactaaatggcagggaactcagacggcttctagaacttgagcgcacgctgcagctgacaaccagtaagaagccagggccctcagtcacacaaccacaaggaaatgaattctgccaacaacctgagaggtggcctccagatgagaagacagcctgacttaaaccttgatagcagttttgtgagaccctgagcaaagaaaacagataaactgtgcgtagactcctggtctacagaaactgtgagataataaatgtgtctta

SEQ ID NO: 4601 - DNA, 362 bp, Homo sapiens
  I.4601 (AA432331)
gcgtgaagaagacagtggactgggcatttcgtccagatgaatgagcatggtagttaagtgtagaaggtgaccttcttccctctggagagaccagggaggggggaaccaccggaggagtttctagcggttgcagctacttgaggttccagtctaataactacgaactgttcatttcaagtagcattaaagtagatttgctacagtaacaattacacttggctaaggaaaatttgcaaggcaacatggtctattgcatagagcactgagccacatgttaacactgtaacaaacacttgctattttgaaattttacgcttcatcttttgcaaatcagatgcaggtgcagagtgaattaagaggag

SEQ ID NO: 4602 - DNA, 255 bp, Homo sapiens
  I.4602 (AA432277)
ttttttcttaagacacatttattatctcacagtttctgtagaccaggagtctacgcacagtttatctgttttctttgctcagggtctcacaaaactgctatcaaggtttaagtcaggctgtcttctcatctggaggccacctctcaggttgttggcagaattcatttccttgtggttgtgtgactgagggccctggcttcttactggttgtcagctgcaggctgcgctcaagttctagaagccgtctgcagttcc

SEQ ID NO: 4603 - DNA, 402 bp, Homo sapiens
  I.4603 (AA432295)
tatagatctaattggcttttatttgcaattcatgaatcagggcagcttccattctacaaaacagcatgagggttcctgctggacagcagcagaacagtgggttttgtaaggtgagaacaaggaaataggaaaaaaaaaattttaaagtcggattggctaacatgaggttactttttgtgtaaaaattaaagcagagaggacttccttattgcactgacacaggtagactggaatcttctgttctcaagaaaaactagtctatgttggatctatctgcttccttaaagcttctatttgatgacgaggcatttagcatgaatgactccattttggtttggtctcgtctgttggggcctagtacaggagttcagtccaaaataacgggctcccataattttgttt

SEQ ID NO: 4604 - DNA, 546 bp, Homo sapiens
  I.4604 (AA149051)
  misc_feature (440)..(440): n is a, c, g, or t
agaaattagtttattctttattatcacacagaataacaagaattagagttaaattcacaatatttttaaagaaaacattatgtgaagatgattcatttcaaaccaccagccaatttaacataaaacacttgtcaagctgagtagactgttttcttatgtgaaccacaaaatattttctctgaaatctacacttagtttaaaaacagagatgggattttgcatattagcttgaaaataagtatatgatgatgatattaggtgcccactagcacctagtttttacagctttgcattgtcaccccatcactgccagggacccagccccaggcatacacagatgaaaggacagtttcaccttcttggcaaaaaccttcagaacaattgtcaacatactctcaaatgtctttcccactcagaaatgaggagcaaggtgtatgacnttagattcaagaagtatatggggctaaatatctttaaaagtttaactctgggacaatgtacttagggacctactacttactccaaataggggtagtagccattagt

SEQ ID NO: 4605 - DNA, 484 bp, Homo sapiens
  I.4605 (AA149050)
tcccctaacatactttgactgttttgcacatggtagatattcacatttttttgtgttgaagttgatgcaatcttcaaagttatctaccccgttgcttattagtaaaactagtgttaatacttggcaagagatgcagggaatctttctcatgactcacgccctatttagttattaatgctactaccctattttgagtaagtagtaggtccctaagtacattgtccagagttatacttttaaagatatttagccccatatacttcttgaatctaaagtcatacaccttgctcctcatttctgagtgggaaagacatttgagagtatgttgacaattgttctgaaggtttttgccaagaaggtgaaactgtcctttcatctgtgtatgcctggggctgggtccctgggcagtgatggggtgacaatgcaaagctgtaaaaactaggtgctagtgggcacctaatatcatcatcatatacttattttc

SEQ ID NO: 4606 - DNA, 469 bp, Homo sapiens
  I.4606 (AA143124)
  misc_feature (2)..(2): n is a, c, g, or t
  misc_feature (7)..(7): n is a, c, g, or t
  misc_feature (267)..(267): n is a, c, g, or t
  misc_feature (377)..(377): n is a, c, g, or t
  misc_feature (415)..(415): n is a, c, g, or t
  misc_feature (454)..(454): n is a, c, g, or t
cngagtntgaaagaaaacattttgtttctaaattagtctaccagttgagtgagaataatcaatatcaagaaagaagactatctttctcaactaaacaataatattccaatcagcttggtaagacctgaaacttgaataagcagtggaaatgccaaatataacagagggtatgtgctacagagaagtaaaaagggtttgactttttatgatgggattttttttttctgggtatgtaatctattttttttttaaactggaaagcatttntgtcagtgtgaatgagggtcaatagtgcagccagtggtgacatttttctttattttgcaaaatgcttttaaaaccaaaggctgctctaagttgatggacagtatcagtcntgagtctaaattggtaggacactttttcatgtaacatnacatttggggattgggtttatttagtggtaatgaagatnatttgatataaaaat

SEQ ID NO: 4607 - DNA, 471 bp, Homo sapiens
  I.4607 (AA142923)
  misc_feature (449)..(449): n is a, c, g, or t
tttttttttttttttttctagaaattaacttttattttaaatctgtcaagaactcctggcagttattaattttattaaaatgattacatatggcaaaacaaagaatagaggtaattctatttctctacaacataaattatgagttagattttcagctgccggctcagcattgttcaagattcttttaaaggactggggggattttaatatccagaaaatgttaaagcagcaaaagaaaaaataaattaaaaagtcattgcaattggagatattaccaaggatgtgcttactataaagtcttcttgacatgttaattataaaatcttccaacctttggtattaaaaaaaatcatgtgaatagttgtcccaattgccctgtcatcataattataacatggaagaattgctgattttttaaaaagatggcaacatgaatcctggactccttnaattaaaatacacccagcattc

SEQ ID NO: 4608 - DNA, 470 bp, Homo sapiens
  I.4608 (AA412065)
  misc_feature (104)..(104): n is a, c, g, or t
  misc_feature (155)..(155): n is a, c, g, or t
tttaaagatttggggttgtagtagacagctgtacattttttgcaatccagcatctaagcatccttcttacctggggtactgtgagcatctgcacagcggcagtngccttccactgtagaagctgaaaggcccagatactccttctgcccttgganatgaagacacacagtgccaaccagaagtttgcatcttaagtgtggtgactcacagacacagggacaatcaagaaatcagtctaacagcagcggaggaatcataacatcttatgtagatttcatctttttatgagcctggcttatttcaactttcctgtccatttagtgagctaccagatagctttctaataaaaattttctgcttaggccaggcacggtgcctcacgcctgtaatcccagcactttgagaggccaaggcgggtggatcacctgaggtcaggagttcgagaccagtctgaccaacatggagaaacc

SEQ ID NO: 4609 - DNA, 413 bp, Homo sapiens
  I.4609 (AA412166)
tttttatgcaacttcttttgtttttattgtctttacacgcttgctagattacgatcagaaatttgggcagtgattttacaaatgcaaattcaaattagaatggaagtttgagaagcaatagaaacaaaaccacccagagccaagtgatttggccataaagaaggagccagctacaaagaatgaggatgaactcggaagagatcactgtgtttggaaatagccggattaccatcagaataatttatacaaataagaatgcctaggcaagcaagctttgctgacatcaatgacccatggaagcatcagtgtactccaatattagaaaatagccattgttaatgaaaaacattcttagcaaatacaaaaaagactttttcaataagctttgtttactaaaaacagaaataggtatc

SEQ ID NO: 4610 - DNA, 395 bp, Homo sapiens
  I.4610 (AA412000)
ttttgaatctactcaaagtgtctttaatgattcccaccactggcattacatcctgtacgcttttaggtggatttccggtgaggtgatgcacctctgaaacccttgctaagtagagtatgttccagttcaaccagcttgttttccaccatactgaggtttaccaatattcgcttctgcctggctattgagtgtgggaaattatttaaaatatcccgagagaggtcgtagactgcaagattgttgtctgtattgctgttaattaacccagaagaagagggtctcactagtgcaagagcagttgaatttgatgacatttcgccagtgtttctctgaaagcggcgatatttccagaagacaatcaaggcacacagaatgctgctcgctaggagtaaata

SEQ ID NO: 4611 - DNA, 436 bp, Homo sapiens
  I.4611 (AA410828)
gagataaggtctcactctgtcatccaggcttcagtgcggcagtgtgatcatagttctgtaacttaaactcctggcctcaagcaatcctcctgcctcagcctcccaaagcgctggtattacagatgtgagccaccaagcccagcctaaacagcatttctctattaaaccttttcagaagactgcatgattagccaaaagtgacttttttttttttttgagatggagtctccctctgttgcccaggctggagtgtagtggcgtgatttcggctcactgcaatctcagcctcttaggttcaagcaattctcctgcctcagcctcccgagtagctgggactacaggtgcccaccaccacacccggctaatttttgtatttttagtagagacagggtttcaccatattggccaggctagtctcaaactcctgacattgtga

SEQ ID NO: 4612 - DNA, 472 bp, Homo sapiens
  I.4612 (AA410475)
acacttccggaacgaggcatttcaggcagcttcataggcatagacctccctccttccctcctaccccctcccccctctcccaactaatgccagaccggccactactttttaactgttttacatatttaaccttcaagaaagatttcctttgatccaagtgtattgcagcccacaaaaaagcttggaaacccagctagatggtctgtttttctagttcctacattggatttaagtcctacccatcgagactactgtcttcagagggcatcttcatgtgtgggcaccagggctgcggctggaaccacagtggacaccccacgctccaaggacaatcctctgcagaaaccagcagctggaaacaattcttaatgctgcaggaagtagttaggagaaaacgactgtgtaagtcagagctaaaactggagttcaaaaaccacagaaaatatttcaaggctgtctgtgaagtggggat

SEQ ID NO: 4613 - DNA, 436 bp, Homo sapiens
  I.4613 (AA410583)
ccaaatggtctcttatcttggcctgcagcccctttctaaaccagagaaacgggaatgccttcttccagactttggggtcacatttactgactctgcccttcaggcacggctgagaaatggtgtgtgagggactagcatgatcagaggcccccagctctaaattctgccttccccaaagacctgttggaaggcccactgccagctgttattcttacccatcaccactggggatcttccaaatgacacagagttccatagagggcctcctcatcatggacatgaagactcgctttgcaattgtattctagcaagaagaaaaaaacccatgtcagtcaccctgtggcacgagcaaattaaaaccaaagttcaacgtccaggcctaggactagtggattccaaaggaaagggcgggcttcgggctattgggtggaggctc

SEQ ID NO: 4614 - DNA, 441 bp, Homo sapiens
  I.4614 (AA410540)
gcaatgtctgcagctgcctttacagccttccaaatggattcattgcagtgtcagcagaaggatttgggaagagggaattaatcttgcctgaatggggacccagcattacagtattaataatggagatagaatagcaaacagatgtggggagtaaagagactatgctggaccttaatttatatttttaataagaacctgcagagagtatttagtgcagctagcctgtacctttttgttgacagatttattcgtggttaaaagaatatcatttcctatgtggcttaaggattcttccagtctacctgctaggtataggcccaaggcccaaaataacatgaagaatgtgattgagcaagcctcatatttcagaaggggcaacctcttaatttgaaataggacctttcttattgtttttttctggtttaatactatcctcttaca

SEQ ID NO: 4615 - DNA, 453 bp, Homo sapiens
  I.4615 (AA410483)
tgctaatttcccaagttactttacaaccaccagcagcataccaataaattacaaaagcagaaaatgaaaattaaccctaggtgttctgatgatagagaaatagctaaattagaaaagaaagatatggatagatgcttttaggaggaaaacctttttagaatggcaatgaccacttggatctaggtcaacatattccaaaatgtgtgaccttgggctttgtgtttactgaactcactctagaaaattctggacctgattcattaaccccgcttttcttctctaatgtgtcctgaagctgagctagatgatgagtaaattctttgctgactgttgctcatcactttctctcaaagttagaacttttcagtataaaaataattagcttttaactgattattaattttctttaatagtttctgtcaaaacttgtctaaaatttgtgttgtgccaaat

SEQ ID NO: 4616 - DNA, 427 bp, Homo sapiens
  I.4616 (AA410340)
tctttaaaaacgttgatgctgtgacagtgcaaacagcattgattttattgctcgacttcggcatgggcacatacatagttaatttttaaaaaccatttatacagatgttactgataaagctcatgtaacaaatgaatgaaaatacaaagaatatcaaagctaaaacactctgtaataaatacaaatacaatgaaaatgataaaactttgtttttaaagtcagtctgagagaagaatattacataaagtgaactaattacatctagaaataaaacaactcagcatttggaacaatcatcctaacatgttaaataccacaaatggcacccgttgactgtacgcttagaaaacaagcagaaggagccactctcccaaactaaggatggttggaacagcctctaactcccaacaatccaatcagtccaatg

SEQ ID NO: 4617 - DNA, 470 bp, Homo sapiens
  I.4617 (AA410338)
cctgtaccactgtcactattctctacagaaaaaaagggaaataaaaatttaaccccataacttacattacctcattgcccatcattaacgtttaaaaccctgcccttattttcctatggatcccctcagaaaaaccacacagcacacacaatgctacctaagaggcttcacagatcaaattcatcatgtatttcatacgtaagaatgttagtctaagaatggagtgacacaaaatattaggggtattgtaactgctaagaaagagtaagatgaagtgatgatgcctccactagggagaggtggccctaaggatccctgtcatccctcatgaacaaagtcattaactcaacccagctttagccaacaggtggaacactgtttaagtctatataacggcttgtctcatgggagagagaacaccggaataggttagactttcttgctatagcaagctcaaattgcctcgtgcc

SEQ ID NO: 4618 - DNA, 429 bp, Homo sapiens
  I.4618 (AA411759)
atggaactatattaacagatggaaaagatgcttataccaaggaaccaaccaccaacatttgtgtttttgcagatgaacaggttgacagaagtcccactggctcaggagtgacagcccgaattgccttacagtatcacaaagggcttctggcactgaaccagatgagagccttcaaaagcagtgcaactggctcagtattcacagggaaagctgtcagggaagcgaaatgtggtgattttaaagctgttatagtggaagtatcaggacaagcccattacacgggtacagcaagctttataatagaagatgacgacccattgagggatggatttcttctcaagtgacatcttccatgattttcagggctttctttttaaagtaatcattatccttaaggactgttttctctaaattatatgaaaacaaata

SEQ ID NO: 4619 - DNA, 412 bp, Homo sapiens
  I.4619 (AA411618)
gatatacacagtgttaatttattatgttatataaaagcattgatttgcaaggtttcaaaattaaaaacaaaactgagcttcaccacaatttgagagccactgctctaatgggaattcccaggcagggatggaaaagggtgtgtgtgtgtgtgtgtgtgtgtgtgtaactgtgtagccaaacataaagggaagagataaaacagctccctttcagcaataaaaccacaattgtgttggataattatatattgcacagtctccatcgtaaacaaaaacatttgtttccattttggttgaaatgaaaactaactatttctcttttccaggctggctttgctgcctggtcagtgagctcaggccactaatgaatggctggcatcccagcgtctacccacaaaagacccactctgac

SEQ ID NO: 4620 - DNA, 457 bp, Homo sapiens
  I.4620 (AA410314)
ccaattataaaggtacctattcgtgttttattatttttctttctttatttatttttttgagatagggtctcgctctgttacccaaactggagcgcagtagtgcaattatggcttactgcagcttcaaactcccaggctccagtgatcctcccacctcagccccccaagcagctagggctacgatgcacaccaccatgtctggctaatttctgtattttctgtagagacgcgggagggtctcactatgttccccaggctggtgtcaaactcctgggctcaagcgatcctcctgccttgacctccaaagtgctaggactataggcatgaggcaccatgcgcacgctatagaagtacttttgacttctgcaacatagaccagaactgggtaaatatctgagaacattccttccacattcttctagtgccaggatgtaatactggaaaatactaggcttga

SEQ ID NO: 4621 - DNA, 390 bp, Homo sapiens
  I.4621 (AA410301)
tttttttttacacagagatctcactcctttattagggtgaagattttacagccaatcatcatagttatctttcaagaaaataatcactgaataatgaatcatcttggtattccccaaagcgatgcttatacaaaggcaagacataaaaaatctaggacttaaaatgttaaccacttgtggagtaaactgaatgcaccatattatagtgggtatttccaatttggcacaacacaaattttagacaagttttgacagaaactattaaagaaaattaataatcagttaaaagctaattatttttatactgaaaagttctaactttgagagaaagtgatgagcaacagtcagcaaagaatttactcatcatctagctcagcttcaggacacatt

SEQ ID NO: 4622 - DNA, 438 bp, Homo sapiens
  I.4622 (AA411263)
ctagggttctgtatcctgtctttattatttagcgtggtatcacgagcatttccctgtgctgttgtatacctgaaaacataattttatgtatgtgtatacatattatagtccactatatggatgcaccagaattttttcccgagatggagcctcattgtcgctcaggcagaggttgcaatgagctgagattgtgccactgcactccactgggcaacagggagagactccatctcaacaacaaaaacaacaacaacaacaaaaaggcaaaaacaaacccctggaaattaactggtaataaagagggggaaaggaactggttggaaactttccttaaaaaaaaaagtcaaaaccctgatttgccaacatgtagacctcagcttaatgtagacttgcagaaagccattaatttagggtagtattgatttatatttgactggt

SEQ ID NO: 4623 - DNA, 427 bp, Homo sapiens
  I.4623 (AA411279)
ccggcggcggttcggtgggcccaatcccgggacggtgcggctgtttcgcgcgcgggccccgcttttccgcaccctgctccggcctcgactacggcgagcctgagcgcggcggcggcccacgcgcagcacagggagagatgagcagcaccagcagtaagagggctccgaccacggcaacccagaggctgaagcaggactaccttcgcattaagaaagacccggtgccttacatctgtgccgagcccctcccttcgaatattctcgagtggcactatgtcgtccgaggcccagagatgacccctgtatgaagggtggctattatcatggaaaactaatttttcccagagaatttcctttcaaacctcccagtatctatatgatcactcccaacggaggtgttaagtgcaacaccaggctgtgtctttct

SEQ ID NO: 4624 - DNA, 402 bp, Homo sapiens
  I.4624 (AA406573)
tagtttatatgtataatttatttgttttcatataatttagagaaaacagtccttaaggataatgattactttaaaaagaaagcccttaaaatcatggaagatgtcacttgagaagaaatccatccctcaatgggtcgtcatcttctattataaagcttgctgtacccgtgtaatgggcttgtcctgatacttccactataacagctttaaaatcaccacatttcgcttccctcacagctttccctgtgaatactgagccagttgcactgcttttgaaggctctcatctggttcagttccagaagccctttgtgatactgtaaggcaattcgggctgtcactcctgagccagtgggacttctgtcaacctgttcatctgcaaaaacacaaatgttggtggttg

SEQ ID NO: 4625 - DNA, 426 bp, Homo sapiens
  I.4625 (AA406466)
aatgaccactatcagtcactggctggccaacgtcaagtaccagcttaggaaaacgggcgggacaaaatttctgaaaaacatggacaaaggccaccccatcttttattgcagtgactgtgcctcccagttcagaaccccttctacctacatcagtcacttagaatctcacctgggtttccaaatgaaggacatgacccgcttgtcagtggaccagcaaagcaaggtggagcaagagatctcccgggtatcgtcggctcagaggtctccagaaacaatagctgccgaagaggacacagactctaaattcaagtgtaagttgtgctgtcggacatttgtgagcaaacatgcggtaaaactccacctaagcaaaacgcacagcaagtcacccgaacaccattcacagtttgtaacagacgtggatgaaga

SEQ ID NO: 4626 - DNA, 434 bp, Homo sapiens
  I.4626 (AA406454)
ctcatgaggcaggagaatcgcttgaacccgggaggcggaggttgcagtgggctgaaattgtgtcactgcactccagcctgggtgacagagcaagactccgtccaaaaaaaaaaaaaaaaaaaagggaccatgttctagtgtaggggtaagtggattgttttggccccaaccccaagaggatcaagggagaccactgcagctgcccgagaaattcttgccctctgacaagaaacaccctatccggtctggggaatttgccagtccaacccctccccttggctcaagattctgggaaatcctaaatagtgtttaccattggccttttatcagctccagtataaatgcgtctggccagacttgctttacaactatgcataatggatagttgggccaggcttggtggctcatgcctagtgctttgggaggccgaggtt

SEQ ID NO: 4627 - DNA, 346 bp, Homo sapiens
  I.4627 (AA406371)
tttttctcagtcattacttttcttcggtggcactttgttttcttgtgacagtgaaaagggtactgtggagacgagacagccccattgcaatttatcaatgaaaatctaataccgcccataagcagagaagtggaaatcaatacttcattaccaaattgttagtgaggatgaagagaaatggctggggtgattttttttttttttttttttggcagtcttctcagagccagggtgtcaggaggagttcaatgagttcaatgtcagaagcaggatggtgcaacgaagaagggttcagtgtgaggggatccaggctggaaagtggaaactaaggcattcgtcctgcaga

SEQ ID NO: 4628 - DNA, 314 bp, Homo sapiens
  I.4628 (AA406345)
tttttttgcaggttttatttatttatttatttatttgagacaaagtctggctctgttgctccagcctgggtgacagcgccacactccgtctcaaaaaaaaaacagaaaataaaatttttttttgtagagatggtgtctcaccatgttgcctaggctggcctccaactcttgggctgaagtgatcctcccacctcggcctcccaaagcactaggcatgagcaccaagcctggcccaactatccattatgcatagttgtaaagcaagtctggccagacgcatttatactggagctgataaaaggccaatggtaaac

SEQ ID NO: 4629 - DNA, 409 bp, Homo sapiens
  I.4629 (AA406297)
aaaatgaaaaacgggtttactaaaacaggtccaaagacaacacggaagataagctacaaatccagcacacaaggcccacccacaccagccccagcggcccgttggcaggatcagggctgaggctccagtctcctccaaagcccagtcacacattttggtttttgcttcccctttcaggtttttaaaagctaaacctaggagcctggtgggtctgcctgtgctgggcagtgtgtccagcctgccgaggtcacgctctggtgcgcggtgccctcagtggcgccttgggtctcggcgcctgggcctcactcctgcgcgatgctcctcagcacgtacttgaccgtgtaagcaaaggctgcaaacccaacttatcacaaacaagttcgccagggggccaccaggagtccgtggt

SEQ ID NO: 4630 - DNA, 361 bp, Homo sapiens
  I.4630 (AA406252)
ttttcaaagttacattacccggttacttccatataggtgctaagcaaaaacccccaatgtattattgaaccatggacttgcacctcatgtttaatgtgaatatttatttccatgtccctcttaactggttttttcttgtcttcctctagctgtattgttatttcagatatgtgatatctgttttcatactcttgcctttccatcatgaatgcttagttatgaacagagattcctttgtagagctcataggcagtacagagaggtaagtcttgcctcagagggccttgtatcttggtgtagtttttaaatagtgcatagtgtatagtgtatagtgtacattttgttttgcacatagtttgtt

SEQ ID NO: 4631 - DNA, 444 bp, Homo sapiens
  I.4631 (AA406248)
caatttgatcttgctatagcaagaatagtctaacctattccggtgttctctctcccatgagacaagccgttatatagacttaaacagtgttccactgttggctaaagctgggttgagttaatgactttgttcatttgggatgacagggatccttagggccacctctccctagtggaggcatcatcacttcatcttactctttcttagcagttacaatacccctaatattttgtgtcactccattcttagactaacattcttacgtatgaaatacatgatgaatttgatctgtgaagcctcttaggtagcattgtgtgtgctgtgtggtttttctgaggggatccataggaaaataagggcagggttttaaacgttaatgatgggcaatgaggtaatgtaagttatggggttaaatttttatttccctttttttctgtagagaat

SEQ ID NO: 4632 - DNA, 517 bp, Homo sapiens
  I.4632 (AA405931)
gagaaaatcagtgacattccaattcctgaaagagctccaaaacatgtattatttcaacgctttgcaaagattttcattggctgtcttgcagcggttactagtggtatgatgtatgctctctacttatcagcataccatgaacggaaattctggttttccaacaggcaggagcttgaacgggaaatcacgtttcagggtgacagtgccatttattactcctattataaagatatgttaaaggcaccttcatttgaaagaggtgtttacgaactgacacacaataacaaaactgtatctctgaagactataaatgcagtgcagcaaatgtctctgtatccggaacttattgctagcattttatatcaagccactggtagcaatgagattattgagccagtgtatttctatattggcattgtttttggattgcaaggaatatatgttactgctttatttgttacaagttggcttatgagtggaacatggctagcaggaatgcttactgttgcgtggttcg

SEQ ID NO: 4633 - DNA, 421 bp, Homo sapiens
  I.4633 (AA405180)
tttttttttttttggcattaaaatgtattttgcagtacaagatacataccaataaaatataaacaaaaagcaaacaaacgcattttttaaaacttagctattaagaacatttcaattgtcaaaagatacatttgagtagaatataccaggtcaatttttctatttaacttctactccagcaatacaacatacatcagtgacatcaaataaggcagtcagacttctgtttattttatttcttacaattctcactaagatctctaaagagagtcttattcttttgtttaagtagcataagagagtcttattctttaaaaccattatgtttacatgagaaagtatcttttcctcttcaaatatgaagacagatatagggattacatgaaattaatagcaaagttaattgaatgtggtagccagc

SEQ ID NO: 4634 - DNA, 465 bp, Homo sapiens
  I.4634 (AA405307)
tttaagaatccactcaaacaaagtaaccatatggtttattactataatacaaataatatacattaggatttgttagatttgtgtcccctagatccctgaaaaccttgaaggaccaagccttggaaactagcataaaaacagggacttggatagttctataaaggattgtggataatgattcaatttctactaaacaaaatacatacagcaggagataatatatcacaatgcccaagtcattaactatcaaaggtgaccagaaaagtcttgttatatttgaattccagagtttttgactgatattataaatatggaagagattgctggtgccagaaaccgagtgagaaatgtgagtagatgcaataatgaaagcatatttctacaataagtagaagtgatactaacaaaaaaggaactgtctttccacagttgtcacactcataaggcttctcccattgagggttc

SEQ ID NO: 4635 - DNA, 269 bp, Homo sapiens
  I.4635 (AA405306)
tcccatcatgatagtcaaaattttagtctgtgtattcaagtgagaaaatttttagtcagcattatacaagtagtatttattatgtatacattcagtggagttgtttctacaaaagtatttcggaatgactattctgctgcaaacttttgtgtaagcgcttcaccttattcctacaataaggagaagtgcactaacaaaatgaacaatgcagcaagggcttcagtcgcagctcaggtcttatcaaacaccagagaaccctcaatgggaga

SEQ ID NO: 4636 - DNA, 208 bp, Homo sapiens
  I.4636 (AA405635)
gggcggccctgttgccctggagacgctttccctgctgccggccgcgaccgcaacccgctaggccttcatcgcgagctacgcccggaccgagaagccccaggcatggccacgtccatcggagtgtccttctcggtgggcgacggggtgcctgaggctgagaagaacgcaggggagcccgagaacacctatattctgcggcctgttttcc

SEQ ID NO: 4637 - DNA, 402 bp, Homo sapiens
  I.4637 (AA405485)
ttttttcagttgtcaaactactaacatctttattttgtcaagatatttaacaatattaaaaagttcagatttcttcatggtcatgtcttttaccagcttttcaaagattcattcagtagtagaaacagccaaatgctgctacaacgcagaataaactgtcattcatgaaaacatcatgagtatagttgtcagtgtcagcatcccagaaacagcgagaagccatgaatactccttcacctctttgttctccaatcactacttgcaccaccattttgtatcggtcaaatcccatttcttttaatttatctttaatgttttctgataaatgttttgtaagctgaggcatttcttctggagaatattcagcatttgccagttcctccttgagcacagcatggatac

SEQ ID NO: 4638 - DNA, 304 bp, Homo sapiens
  I.4638 (AA401734)
tttgagttgatggattttattatggtgaatcacattgttcccctccacagtcttaggtgagatgtccacctctgcaccatgtgtagtactgggctttgaggttattactgcagagtcaatccagctaggtagagaccctctggcttccatcccattcacgcatgtggcctcatcctgcagagttgagataactgactcccaatgctgagtagcagagagtcagcctttgagtagcagagagatactgtcaatgcaacagccttctcagtatctctctgctccttgtagccaccacattcatact

SEQ ID NO: 4639 - DNA, 460 bp, Homo sapiens
  I.4639 (AA402483)
tttttgatggtgaatagaatagctttattatgagaaaaagggggaaggcctggcaaattactcagaaattatacattcatctatgctaatttcatttgaaagggaaactgcataagtttttttgtgcaatcaggcagagctgcactaggtatgatggagatcagccctatgctcacagtccttggctcatcagaattctttgaagacatcattactgtgaagctgctaagctgttttcagaagagaagaggaagcacagagtaggtgctgttattgctttgaatggaactcagcttgcttgtgtgggtttggagttgatatcatctactaagagaagacttaattgtagtcataaacagtctgtgaatgacttgggtccttctgaagtgctgtatatgggaaatttctttttaactctccaacatttggtaagaaaaatcttccaacaaatggaattgcc

SEQ ID NO: 4640 - DNA, 221 bp, Homo sapiens
  I.4640 (AA401979)
gtttcccaaatccaggcggctagaggcccactgcttcccaactaccagctgagggggtccgtctcgagtaaggagaagaggccgaagaggaaacatgaacttctatttactcctagcgagcagcattctgtgtgccttgattgtcttctggaaatatcgccgctttcagagaaacactggcgaaatgtcatcaaattcaactgctcttgcactagtgagac

SEQ ID NO: 4641 - DNA, 209 bp, Homo sapiens
  I.4641 (AA403063)
tcccaggtatgtgtggtaatttattattcagatacactagcacatatatcagatgacagaggtgtcaacgtgctgagagctaacacgccagagttggaagggctctgttgaaagatagctggcttgctgctccctggacagctccactctgaaatgcagctctcctgaacagtcagcaccagagctcagaaatacctcctcccaccccc

SEQ ID NO: 4642 - DNA, 179 bp, Homo sapiens
  I.4642 (AA401645)
cgtccatccctcaggacaacctctacatcgccggtgatccagcggtacatggggaactcgatgtagtccccgtggggcgtcttcagcgtgatgtactttaggtaccagtcgtcatttcagcagtacatgcgcttctccattctgatcagcctgattttgtccagttcctcgtcacagtc

SEQ ID NO: 4643 - DNA, 272 bp, Homo sapiens
  I.4643 (AA402295)
aattcggaacgaggaaaattcttgtgttggaaacttagttcccaatgtaatgatactggcaggtgtggcctagtggggggtgtttagatcatgagggcttcagctcatgaatggattaatgttgatatctcaggagtgagtttcctcttgctctctgtagccctctctcttgccacatgatgacttccaccaggttatgaatcaacaggaaggccctcacaagatgtggaacctcaatcttagacttctcagcctccagaagtgagccaaat

SEQ ID NO: 4644 - DNA, 490 bp, Homo sapiens
  I.4644 (AA403198)
ggcagaggcgaccccttcccagctcgtctgcctgcccccggccccgcgcccctacagccgccaacctcgtataacagtcattgcttcctcctatggtaggacgtgtacctctgtgtgttcatggagctggagaaaccaaaactgggtctctctccacccgggagctgaggaggggtgggggccgtttgttcagttacctgggggaacctcacccagcaccctgccccgcttcccagggctggccaagagagaagactggacggcagggaggtcaacattacgagtggggggatcacaaagccaggggttggccaactcccagcgaacgcatgaactcccaagccccggcctcagcctaaccaggaaaggggctcggagggagaaaggcccagggcagtggggacgggtcccagcacctcggagccccttcacacgcctcctaccggcccatgtttctatttgcatttccccctcctcagatgggaagcct

SEQ ID NO: 4645 - DNA, 601 bp, Homo sapiens
  I.4645 (AA401205)
tttgtttgatgcttttaatatcattatttgtgttacacgatacacaaccaaggatgatggtcaatactgcaatgaaaatgttaaaaaaaatattatacacggctcatgtcttccacacaccttcctggaaataaattagtgagcacggagaaacctggctgggtggcagccacagctgagagaggagggagtgttaaggcagtatctacaaggggaagggtggcaggagggcaagctaaggcctagattcttccctccaacctccctgacagggaaggagggagccacacatgcactgcctcagttggaagcccttgcctgccagaagctgccactgccagcttcctgcctctctctgccacacagaaatttctatgaagaaactctttcaggtataaaaggatcttcaacataatttcagctgctgttcattttctagttgaggaaactgaagacgagagaaagcaagtggcttgttgaagatcacagggaggggccagagctacaaccagaacccaggcttctgactcccggtccaaggctgtcagccattgcactgctgagccgccttctgcactgtaaacagaccacacaggcactt

SEQ ID NO: 4646 - DNA, 495 bp, Homo sapiens
  I.4646 (AA400699)
aaatctatgatgattacaatatttgatccatttgatatggatcacagaatttgaaagtttccagagatacagactgtttggttttccttagactaaactcttatttgcttgtgtttgtcatattactttaaaactaaagctaacataggcctttacgttgtctgtccataagtgagccagtcaaacgatattctttgagcgattctgcattgaaacctaaatgaatgtcagcttttaattaatatagttttcataaaagagaaggtggtggtgggtgggatggaattgaccaagtaggtcattaactcttatagtaagtaatccttctgggtatatggttttgtgtttaggaagtgggaagcggggaacagtattattaccttcttttggaagtgttttagaaggctttgcacttagttttgtttgtggactaagtggctttgtattttcactaattcttggtttttaaatgattcatctctgaccagtactccc

SEQ ID NO: 4647 - DNA, 401 bp, Homo sapiens
  I.4647 (AA400654)
ttttttttttaaatccaaaatactttaataccattttatacagaaaatcttatacagagctttaattctttgcctcaaggataattccatgttatttttcttattaatatcagtggcgcctatcacagcatgcataagcacaagaacttacaataaccagaaatcttaaaaaatatacactaaaagagacatttattaaaccagaaaatgagccaaaagggagtactggtcagagatgaatcatttaaaaaccaagaattagtgaaaatacaaagccacttagtccacaaacaaaactaagtgcaaagccttctaaaacacttccaaaagaaggtaataatactgttccccgcttcccacttcctaaacacaaaaccatatacccagaaggattacttact

SEQ ID NO: 4648 - DNA, 490 bp, Homo sapiens
  I.4648 (AA400534)
  misc_feature (58)..(58): n is a, c, g, or t
cctcacatattgctggtgggaaggtcacgtggagacagctgggcaaagcttggggcgntaaacacagagtcactcatgacccagcacttcctctcctatgcaccttgtacaccccagatcaatgaaacctacatccacacagaaacgtacacaaatctctcagcagcactgttcacagtagccaaaaactagaaaccacatgtccgtcagctgatgaatggagaataaaacgtgggaaatccacaccaggagagaaaaaggagtgaggcaccagcataggcaccccgtggatgaacccggaacctgacgctaactgaaggaaggctccggctatagggagtgtcccaggcacagcagagattgaagggtgccggggccgggagttggtgggggttggggctggggacacagtggccagtgtgtgggtttgttttggggatgatgaaaatgttcttaggttgtgtgtggtgatggctgctcacctctataa

SEQ ID NO: 4649 - DNA, 361 bp, Homo sapiens
  I.4649 (AA400533)
agatgttactctcagaaagagagtgaacaactagaagatgtggaagaaaattccaagggccaattttgaaacaaaccaggcagagacccagatgcagaatcctgcaggctgagggatgttaggaagagttagcccaccactgctgcgctgaaaccaggatgacgcaaactgggcctcaggcagtagatcaataaaccaaactccctgtcacctcagactctgcacctgttaaagccctgtaaagagccgacatgtaaggacttatactgactggatacagagaatatggagcaaatcaaacgtatttaaatagtaaattatcatattgttataaataaaaatttacattgcatttcctttt

SEQ ID NO: 4650 - DNA, 374 bp, Homo sapiens
  I.4650 (AA400488)
tttttttttggtttttagtaaaaggtttatagaggtgagcagccatcaccacacacaacctaagaacattttcatcatccccaaaacaaacccacacactggccactgtgtccccagccccaacccccaccaactcccggccccggcacccttcaatctctggctgtgctcgggacactccctatagccggagccttccttcagttagcgtcaggttccgggttcatccacggggtgcctatgctggtgcctcactcctttttctctcctggtgtggatttcccacgttttattctccattcatcagctgacggacatgtggtttctagtttttggctactgtgaacagtgctgctgagagatttgtgtacgtt

SEQ ID NO: 4651 - DNA, 294 bp, Homo sapiens
  I.4651 (AA400487)
aaaggaaatgcaatgtaaatttttatttataacaatatgataatttactatttaaatacgtttgatttgctccatattctctgtatccagtcagtataagtccttacatgtcggctctttacagggctttaacaggtgcagagtctgaggtgacagggagtttggtttattgatctactggcctgaggccacgtttgcgtcatcctggtttcagcgcacgagtggtgggctaactcttcctaacatccctcagcctgcaggattctgcatctgggtctctgcctggtttgtttc

SEQ ID NO: 4652 - DNA, 533 bp, Homo sapiens
  I.4652 (AA399066)
gctactgcttactctttgggtccacgctgcttttatgagctgtaacactcaccgcgaaggtctgcagcttcactcctgaagccagtgagaccacgagcccaccggaaggaacgaacaactccagacgcgccaccttaagagctgtaaccctcaccgcgaaggtccacggcttcattcctgagccagcgagaccacgaacccaccagaaggaagaaactccaaacacatccgaacatcagaaggagaaaactccagatgcgccaccttaagagctgtaacactcaccgcgaggtccgcagcttcattcttgaagtcagtgagaccaagaacccaccaattctggacacgctacctcgatccagatgaaggtaccccaagcagcttgagatgtgatgatggagaccagtttgagaagacccatcatctctgatttccctctgattatgaagtaatacaacaaagctacagtaagtggactgatacggtggtgattgcaaactgtttctaacttctctcatttactggctggtgtc

SEQ ID NO: 4653 - DNA, 430 bp, Homo sapiens
  I.4653 (AA398968)
tttgctttctcaacttttaattagagcaaaggtgagattatgtattgtagggaatatggaaaggcaaaagtatatttacgtaaggatataatctttgaagaaacagtttgcttagcgcacttttataatatatcaaaaatttcaaagcagagattttaaataatgacgttgtacagaatctaaacagtttgtaacatttatcatactttggcagcacgagaccttccccttcagcagatattagcatttttacagcaggagggccaatgtcttgtttccatatcaataattgttttatattttcaaagcatttcacaagatgaggctgtacagactcaggatttctgctatcagctagaatatcaagaagctcggcattgctaagaatgtaagatcttgggaaaattaatcttttaacttcaaggtaatc

SEQ ID NO: 4654 - DNA, 370 bp, Homo sapiens
  I.4654 (AA398757)
tttgtgtctatacataaagttttattagaactaagccaacttcatttatttgcatattgtctgtggctactttcacattataagagaatctaataaccttataacagaactattgagcatgatgttatgtttaggtgcaacagagacctacaatatttactatataactctttacagaagatgtctgccaacttctggattagagaaacagcttttaaaatctcattttctttcattttgaggaatgatttcgacatctctttatttattcatttttttctcagtctgtttgtgatgctataacagaacacctgagatagctcatttataaatcatagaaattcattggcctatggttctgggggctgga

SEQ ID NO: 4655 - DNA, 268 bp, Homo sapiens
  I.4655 (AA398512)
tttttgcaagtttgataaatgtaattttttttttttttaagaaaacacagaacaagtcctaaatcagacaaattgcacaaaagagagagaagaaaattgtaagcttcctgggagaggaagagatgtccatgagaaaaccaactgggatgagcctacaaaagcatgtccctctctctcctaatttacttagtctcaactgagcccaacaggagctggcctctgtcccagctgcaggatgctcccaaggcagtgtccaagagcctggaag

SEQ ID NO: 4656 - DNA, 374 bp, Homo sapiens
  I.4656 (AA398647)
tttctgaaatcaagatttaatttagggatgacactcactgtctcatgtcaaatgggtcccaatcaaaggtgtctgggtcctgacccacctccccagctccccaagctccccagaaccaggtctggagactgcagggctgagggctgctggtcctgaatgctctgcgggagaggggacagtcctggtgcgaggcttccagaggggctgagagacgcccactccttcaaggcctgacttcacaggacccctctctgtgtccaggcagggcagttgggagacctggggaaggtgatatcaggggctaagggaagcaggcacagcagagacagcagacgaggcttggggtgtgcagggtgtgtgtgtctgtgtgcaca

SEQ ID NO: 4657 - DNA, 461 bp, Homo sapiens
  I.4657 (AA398613)
tttggttttctgtagtgataatcttttattccttttcctttctcatttgtgtatctgctctactagtgttttatgcttttgtagtttcatgatggtagatatcatcctcctacttccagatgtagtactcccttaagcatttcttgtggggctgatttagtagtaatgaattccctcagtttttgcttgtctgagggaggcaaaatttcttccctcattctgcttcatttctgaaggatagctttgctgggtatagtatttgtggctagcaattttgtgagcttttccccaccttgcagcacttttaatatggcattcaattctttcctggcctagaaggtttctgctgaaaaatctgttaatctgctgttgattcccttatatgtgacttcatgcttctctcttgttttttaaattctctctttgatttttgacagtttgatgaaaatgtgcctcagaga

SEQ ID NO: 4658 - DNA, 628 bp, Homo sapiens
  I.4658 (AA398435)
tttttgcctacagatttctttaatacaagttgtacgtggcatgggagccctcttaaaaagatgaagaccccaagaagcagttagagtcaatcccccttagatactgcattgaatgaatcatcgtgagatgtgataaggccaaggggcttgggctagggcaggtaactgggcagggaagtgactcgggaggtaagcgttcattgtacaagatctgtttgtatggatttcctttggcttcaacttcccaaccttgatgaaaagagtgttactttccttttggtatagtgaggacatctttcataggggactttcatctcctgcttctaagaaacagcacgaatgtcagagtatcttgcacctgctgtttttctaagtgcttttcattcaacgtagtccctgtgccacagcagcataccttggggtgacaaattcttaacacctccagaacaaaggctcaggagaccacgcatggcctgatctggtgttctccttcccaggtggattcatacgacgtgactgtggacgagggactgggcgagatccagctggtcagaatcgagaagcgcaagtactggctgaatgacgactggtacgtgaagtacatcacgctgaagacgcccactggact

SEQ ID NO: 4659 - DNA, 373 bp, Homo sapiens
  I.4659 (AA398412)
tttgactcaattgggttgcttttttgacttgtaaccatattttatttacccagtcccctatttgtggagtagagtataaagaccaatacaggtaacaacattcaacagactaaaaaactataaatttaactgggaatatttggaggcggaaggtgagcggaatgcacgcacttccccaggctccccatcctaccaagaaatgcaatgcccagccacagtggacgaaccacttgctgtcagagccagacttcccaaagtatgttgcttccttggttctctacactaaggaatttggggaacgtgagggtggcatgaaaactatgggggtgggaggaggtatttctgagctctggtgctgactgttcaggagagc

SEQ ID NO: 4660 - DNA, 422 bp, Homo sapiens
  I.4660 (AA398820)
ctgaagcaactacacagtttcaaggatctttgctggttttctttaatatgcttcttggttaagtgataaactgaatttttgcttcttggaataagatcagaaggcttattttgctatatttcaaatatgtggcttatttcatgatttgggctcttgtttgttgaagaacttttgaagctttttaataattattttcagttataattcacgatttatgagaagggtacagattgtgatgaactttttatacacccttaagtaattaacaagtcttaatctccaattttatgtttcatatcaaagaaagcgtttttattgaggaaattctactccactaaaattgatgcaagcatttgctgcctgcagacttacctcctaaaatgtggttgtttggtaagctcactttgcagactgttatatat

SEQ ID NO: 4661 - DNA, 472 bp, Homo sapiens
  I.4661 (AA397596)
ccaatgaccggcaaggaagtgagttgctgatgccagtgggggccgtgtcacagaacattggttgctacaggctgtccagcatctacttactcaagggacagcactggacttccatctggagagccccctcccctcactctcagcacctgcttgctaggtgggcggacccatccccctggctcctgggagaacagaggactcaagcttggccgatgacagccctatgtccccagaccccagtgatcagtcagggaaaagcagaggacccacatgaacccaatcagagatcagaattttgcaggaactactgagtaaaagaacagacatcacgtaagggtcagggctgctggtcttgtccttccccatcccacatctgagaaagaaaaacaaacagggtcctggtgaaagccagagccaagggcttaagagaaccgtaccctgatcaagacagaatgctaaagagcaccgtggg

SEQ ID NO: 4662 - DNA, 378 bp, Homo sapiens
  I.4662 (AA393254)
gagaattcacggcactgtttggggctcaggctgacccaccaccgcccccaaccgtactcggcttcggaccaggaaagcctccacccccgccaccgcctccgtgcggcgggggacccgtgcacgccccgcctcccaccgtcggcacggctcctcctggcgcggacaagtcaggagctggctgtggccctttttacctcatgagggaactgccaggtagcacagagctgacaggcagcacgaatctgatcacacactacaacttggaacaagcctataataaattctgtgggaagaaggtgaaggagaagctaagtaacttcctgcctgacctgccagggatgattgatctgcctggttcccatgataacagcagcctcc

SEQ ID NO: 4663 - DNA, 369 bp, Homo sapiens
  I.4663 (AA393187)
cagcagtcactgggaagtccgatgacttcctgagccgagctgttggtgtgatgtgatccatcggtggtgttacttctggtttttgtcttgttcacaataggatttggagtagtttacaaaggttaacaaagttcagggagtcagggaagggaaaattaagaaaaagcccacaggacagagtggagcatgtggcaaggtcagtggccgcgtggacgtctccgattgtgctggctgtgctgctgtggccgcggtggggcagaaggccagacgtcctcacttcccccaaccccagtccagttgtacatgttgtgcactgcacaagggccctggcagaggaccaagttggagttgaaatccagccatggcatg

SEQ ID NO: 4664 - DNA, 524 bp, Homo sapiens
  I.4664 (AA292900)
ctgatgtcatgctgctggcccgaccagctgctgtctgtgacaatgccaggtgtggtcctgccacccagaaaagagaaagtccgcctgcagagatcttagaactaaccaggctgcttcccttgatgtttgtgaaaataaccatccacaacagcgtaaaaaaacagctccacctgaagcttgccacgggccgctctttttatcttcagctgtgtcctccatcggatgcaagtgaagacctttttgttcactgggaaaaccttgtttacatcctgagaccaccagtggaggcttacagtgataccagggctatcctagctgggaacacattggactcatctgtgttggaggaagtgcagaggagcccagtgggatatgccatgaagttttgtgaagagaaggagcaattcagaatcagtagacttcacatgaatgctgaaatgtttgggtccacctattgtgattatacaatagagatatgaatccaacatacctcccacatatactacgttcaagagttcacacac

SEQ ID NO: 4665 - DNA, 409 bp, Homo sapiens
  I.4665 (AA293835)
aatagaaaggcaattccatttgttggaagatttttcttaccaaatgttggagagttaaaaagaaatttcccatatacagcacttcagaaggacccaagtcattcacagactgtttatgactacaattaagtcttctcttagtagatgatatcaactccaaacccacacaagcaagctgagttccattcaaagcaataacagcacctactctgtgcttcctcttctcttctgaaaacagcttagcagcttcacagtaatgatgtcttcaaagaattctgatgagccaaggactgtgagcatagggctgatctccatcatacctagtgcagctctgcctgattgcacaaaaaaacttatgcagtttccctttcaaatgaaattagcatagatgaatgtataatttctgagt

SEQ ID NO: 4666 - DNA, 454 bp, Homo sapiens
  I.4666 (AA292856)
  misc_feature (412)..(412): n is a, c, g, or t
gattaatgtcatgagtgaattaatgtcctagctcaggagtgggtttctcttaaagtaagtttgtccctctcttgcactctctcactctgccctcacttgccctcagccttctgccatgggatgatgcagtaagaaggccctcaccagatgccactgccatgctcttgtgttttccagcccccagaaccataggccaatgaatttctatgatttataaatgagctatctcaggtgttctgttatagcatcacaaacagactgagaaaaaaatgaataaataaagagatgtcgaaatcattcctcaaaatgaaagaaaatgagattttaaaagctgtttctctaatccagaagttggcagacatcttctgtaaagagttatatagtaaatattgtaggtctctgttgcacctanacataacatcatgctcaatagttctgttataagggtattaga

SEQ ID NO: 4667 - DNA, 149 bp, Homo sapiens
  I.4667 (AA293054)
gaacttggcactggtgtgtttgggcccttccatcttaaccctcctaccttgtgtccccatgctagttctgtctttcgtgtgctcgcagaatctgtctgcctcttgccccacctcagaggcttcttccagcctgggcaacagagtgggac

SEQ ID NO: 4668 - DNA, 402 bp, Homo sapiens
  I.4668 (AA293369)
ttatttttttgcttttgaattactttatatgacataggacatgacaaataatttacataatgtgaaactaacaaataatgacataatataattgaatagaataaacattatagagtaaaagcaaaaaaattaatactaattcatgtctgtatttcaagagagtgaaaagacaggaataagggagctgagaggtatcaaagtgataaacgcattgccttaagtatgtgacacattgcagatattttatttttgactttgacattaaaaaaataagtcaaaatgcattgggaaaacttatgggtaaatattggaactaaaagccgttacgatgccttccaaaatagaaggcagaagaaaaaaaatagacaaaaataacattaaaacattaaaaagagaaatatt

SEQ ID NO: 4669 - DNA, 420 bp, Homo sapiens
  I.4669 (AA150346)
  misc_feature (68)..(68): n is a, c, g, or t
  misc_feature (69)..(69): n is a, c, g, or t
  misc_feature (92)..(92): n is a, c, g, or t
  misc_feature (360)..(360): n is a, c, g, or t
agagaccattttataaaacatggtaagaccctttttaaaacaaactccaggcccttggttgcgggtcnntgggttattggggcagcgcgtgngtcgtcactcagtcgctctgcatgctctctgtcatacagacaggtaacctagttctgtgttcacgtggcccccgacgactcagccacatcaagtctcctagaccactgtggactctaaactgcacttgtctctctcatttccttcaaataatgatcaatgctatttcagtgagcaaactgtgaaaggggctttggaaagagtaggaggggtgggctggatcggaagcaacacccatttggggttaccatgtccatcccccaaggggcncctgcctccgaagtcgatggtgtcccgcatctactcatgtgaactggccttggggaaggg

SEQ ID NO: 4670 - DNA, 441 bp, Homo sapiens
  I.4670 (AA152323)
tttttgcattccagagtttttatttttcttttccaaagaaatatcaccattaaatttccaaaatacttcctattatataatagactcataagattgttatgaaaaaatcatttcaaaaacattaaatgttttcgggggttaaaacatggtaatttttaacaaacaaagtaaaatctagagcaaactgaagcattcactcaaagcaacaacaataaaacaaacaaattcaccaaagcaattgcatgtttttatcagacatggtgatttcaaaggcctcaaggtaggcaattagtaatgccatcatctggtaaaaagagcaccagaaggggaatctagaaccctaggattttgtcctggttgtcactgtataactgacactgtataacataataactgtcactggtataacataataagtcacagttaccagttacttcattt

SEQ ID NO: 4671 - DNA, 502 bp, Homo sapiens
  I.4671 (AA151503)
ggctgcaaaaattgcattttcagtactctaaattactacattagaagagagcatttctccattgtctttattttctgttatatatgtgttgtaaaagtacactacattagaagggagcttttccgttgtctttattttctgttatacatgtgttgttaaagtacatgcattcttagactaactctcagatgctttgctcttttggagctgaagaattgtttgatggtgatgtcatatatctgatagattagtttcagtggttctcatttcacttttatacgtaatttcttaactatagttaagatagttgcaggcagtgtacctcaggtttgactctgtacatctgaatagtggagtcactagtattttgcttcaagccttctgaaaatataaccatagttacctaagcacacagtgaatagtcacatggtagtaacttgtgattagagcatgtaaaacaatgtaattgaaaaagtcagcttccatattttgtagggggaaa

SEQ ID NO: 4672 - DNA, 381 bp, Homo sapiens
  I.4672 (AA151576)
  misc_feature (229)..(229): n is a, c, g, or t
  misc_feature (237)..(237): n is a, c, g, or t
  misc_feature (263)..(263): n is a, c, g, or t
  misc_feature (291)..(291): n is a, c, g, or t
  misc_feature (308)..(308): n is a, c, g, or t
  misc_feature (369)..(369): n is a, c, g, or t
aatttttccagatcaattttatttaaaaaataagttgacagaaagaagcaaaagcaacttactaatatgtcaaacaaaacacaagtaccaaacctaattcagcacaggtaacataatataaatcaacaaaaattcgattaaatatttcacactagataaaaagtagggtgttctatttcccctacaaaatatggaagctgacttttcaattacattgttttaccatgcnccaaatcntcaaggtacctacccatggtgactanttcactggtggtgcttagggtaacctantgggttagtagttttcnggaagggcttgaagcaaaatactagtggactcactattcagatgtacagagtcaacctggnggtacactggcc

SEQ ID NO: 4673 - DNA, 446 bp, Homo sapiens
  I.4673 (AA136361)
caaaaatatcccaatgctgtgaacttaaggcaatattcatttcctttctacactacttggcatggtaaccatgacaaacttttattttctctttctgatttcctaatgaaatctcattatttgcaaagctttaaaatgactagatgaaggaaaaacattgttatgacccatgaccctcggagcccaaacagcaccatgaagagcatcattaaaactaagagaaagtggctatcagaaaatgaaacagctttaaaggggttccttttaagtcttgttttctattcagaatgttctgtgttttttctcaagtgtgggaatgacatttatcttagcaggttactcaactacactggatgatgtcactctaaccagtgtacggcactgacccaagtcctggggggctccttggaccaatggactattttacaaacctgggaggtgggagg

SEQ ID NO: 4674 - DNA, 373 bp, Homo sapiens
  I.4674 (AA136273)
agggtttgtggcacataatttgtttaatccagattggatacatcaggtacagcagtggcacacgactcaatactgtaaatgatatacatgttttaacatatgcactacagtttcaaaagaagacgacaggaaactcaagggtgttttttttttttcatagaaagttttcatgttttatcttcctgcagttttgtacagtatatttcttctttgccattgtgatgttgataagcaaagcccatttattatacgaaaatagaaaagaacacacttgatgtatctcacgatgacattaatggggggaagggtgtgacctctaaggaaaacattacattggaatgtctggattatccaaaaattataccatcccctc

SEQ ID NO: 4675 - DNA, 389 bp, Homo sapiens
  I.4675 (AA135333)
atgttcaaatatttaatagcataaagttaaaactgtctgatgtatccagttctataaccaaatcagacctgccacttagcacagtcatgacgaggttggtatgaaggcatccttacccctagatagtgctgggatacacactgtccaaccaggactcacagataattctttattctaactagattgtaaagttcctgcttgaacaagagctatgtaaagtttattcccatgctcattcctgtatcctcccagtacctagcacatgatctatgttcaaatgaacacaccttcagcactactaaatttgggacaaggccaaggtttcttacctgggatggcaatttcccctcttcaaacctcaccatgtgtgtattttaagaaggtgatta

SEQ ID NO: 4676 - DNA, 442 bp, Homo sapiens
  I.4676 (AA135332)
  misc_feature (211)..(211): n is a, c, g, or t
  misc_feature (315)..(315): n is a, c, g, or t
  misc_feature (414)..(414): n is a, c, g, or t
  misc_feature (442)..(442): n is a, c, g, or t
caattattggctcatcaaggagtgtgccacatgccagatgctctgcagaacccaacagaggggttgctcctccatggaaacaacaagaagctttgatcaaagagcctgtattgactccttcagtgaaattcttgactgaaataatcaccttcttaaaatacacacatggtgaggtttgaagaggggaaattgccatccaggtaagaaaccnttggccttgtcccaatttagtagtgctgaaggtgtgttcatttgaacatagatcatgtgctaggtactgggaggatacaggaatgagcatgggaataaactttncatagctcttgttcaagcaggaactttacaatcctagttagaattaaagaatttatctgtgagtcctggttgggacagtgtgtatccccagcactaacntagggggtaaggatgccctcatacccan

SEQ ID NO: 4677 - DNA, 370 bp, Homo sapiens
  I.4677 (AA131906)
ctcatcttttattttaggctcaggggatacatgtgcaggtttgttacatgggtataatgtgtgtcattggagtttggtatacaaatgatttcatcacccaggtagtgagcatagtacctgataggtagtttttttaccctcaccatcctcccaccctcaagtaggccctagtgtctattgttctcatctttgtatccatgtgtgctcaatgtttagttcccacttataagtgagaacatggggtatgtggtctgctgttctgcattaatttgcttaggataatggcctccagcttcatccacgttgcagcaaggacattatttcattttcttttgtggttgcatagtattccattgtgtatatgtaccac

SEQ ID NO: 4678 - DNA, 471 bp, Homo sapiens
  I.4678 (AA131897)
  misc_feature (471)..(471): n is a, c, g, or t
caactctagaagatcatgtactcaaccactgatttattcatgaatctatctatttatcctttcaacattccttcactatcgactaggatgatactgtagttcatcaataagaatatataggttttggagagagattgacacctaaatttcaaactcagcttcaccacttactaactgtgttgagctaggtaaacacagcctctctgccccttagtcagatgtaagcatgataataatgtttacagttaaggattattgtgaaaattagtgataatgtacatcaaacacttggtgtgctgtaaccattcaacagatgataatggagactctggttgttatttgccagaaatcaggatgcgaagatggaaaacacataactcctccctctaaataactgaagtggaagcaaatgactacagtgtagattagagttaccaataagctatggatcagagagaagagaatgatttn

SEQ ID NO: 4679 - DNA, 521 bp, Homo sapiens
  I.4679 (AA131813)
  misc_feature (521)..(521): n is a, c, g, or t
ggttgctgctggagctcttccgttctggataatttcacagatattttcaagagttaaggagataacatttccgtcatttctatggattgtaccagctgcttcgtctgtttcccattgtataaatatttatacaaggtcaaaatgtaaatgaagtaatgcagtggttgcacagatgtagttcgtctagagcagtggttctcaagcagtgtcagcattacctggggtttggttagaaatgcaaatctttggcccaaatggattactgaatcagattctggatatggggtccaggaatctctgttcactagtcctgtaggtgattttgatgctgccaaatgtggagaaccactggttttctgtctgtacaacccttttgaatggactctttaataaataattttcactcacagacgctggcagttggtttatactactttttctaaagtcttttatgcagcgttttaaaaaaaagcctttgattttgaaaagattcctgtagtgatctaacttcttccattttn

SEQ ID NO: 4680 - DNA, 571 bp, Homo sapiens
  I.4680 (AA131674)
  misc_feature (122)..(122): n is a, c, g, or t
  misc_feature (249)..(249): n is a, c, g, or t
  misc_feature (390)..(390): n is a, c, g, or t
  misc_feature (449)..(449): n is a, c, g, or t
  misc_feature (464)..(464): n is a, c, g, or t
  misc_feature (485)..(485): n is a, c, g, or t
  misc_feature (505)..(505): n is a, c, g, or t
  misc_feature (514)..(514): n is a, c, g, or t
  misc_feature (526)..(526): n is a, c, g, or t
  misc_feature (537)..(537): n is a, c, g, or t
  misc_feature (562)..(562): n is a, c, g, or t
accagagttaactgaataaaaaccttggacatttgaagagaaaagcatttagttctatctaatttcaatatgcacgtgaattagttcatgttactctaacaatgtattcttactgtccttgnttatgaaataggaaagtaaaactgaaagaactatttcttgtgtttttaaaactagccttttctaatatttgatatctaattaaagttagataatatgtaatatgcttttgaacaataatctaaccangaaaatattgtataataaattaccaagaaatcattacattaattataaaaggaacatgtcaatacaacaaatgtttatttaacacctactgttactccaaatactgtgttagaattttgactatttcgaagatgaataatnagtctttgccctctggaaggccacaatgtagaagtaattctctgtatcagatatttccntgagtggttaagtgntattaggtaatcatgttgganatccccagtgtaagtccagnaagccaatntcaccaccaccncctccctatgnttttgtgataatttgggcgttttcnatgcctggg

SEQ ID NO: 4681 - DNA, 517 bp, Homo sapiens
  I.4681 (AA131743)
ttttggtaagactaaaaagaacttcagtctagaagctttgtgttatggatatttaagacaaaagcccaatttctagaatttttaagccacatctgacatgttcctgaattttaactatggaattggcctacttattaacagtttgaggggaaaaaatggaagaagtttagatcactacaggaatcttttcaaaatcaaaggcttttttttaaaacgctgcataaaagactttagaaaaagtagtataaaccaactgccagcgtctgtgagtgaaaattatttattaaagagtccattcaaaagggttgtacagacagaaaaccagtggttctccacatttgggcagcatcaaaatcacctacaggactagtgaacagagattcctggaccccatatccagaatctgattcagtaatccatttggggccaaagatttgcatttctaaccaaaccccaggtaatgctgacactgcttgagaaccactggctctagacgaactacatctgtgcaccactg

SEQ ID NO: 4682 - DNA, 465 bp, Homo sapiens
  I.4682 (AA131761)
  misc_feature (378)..(378): n is a, c, g, or t
  misc_feature (403)..(403): n is a, c, g, or t
  misc_feature (410)..(410): n is a, c, g, or t
  misc_feature (421)..(421): n is a, c, g, or t
  misc_feature (443)..(443): n is a, c, g, or t
tgattttaaaatcagtttattttactcattattcttaatatttaaggaaaacaatgtaaaatgggaaaaaatgtatcttctgctacatcaaaaaagcattttaatccaaaccccactaaaaattataacaagctctgcatgatttcataaaaattgaaaacatgaaagttaacaagcattgaaaatgccaaattatcacaaaatcatagggaggtggtggtggtgatattgcttcttgacttacactgggatttacaacatgattactaatacacttaacactcaaggaaatatctgatacagagaattacttctacattgtggccttccagagggcaaagactattattcatcttcgaatagtcaaattctaacacngtatttggagtaacagtaggtggtnaaataancctttggtggnatttgacctggttccctttatnaatttaatggtaatgatttcct

SEQ ID NO: 4683 - DNA, 635 bp, Homo sapiens
  I.4683 (AA115333)
  misc_feature (452)..(452): n is a, c, g, or t
  misc_feature (561)..(561): n is a, c, g, or t
  misc_feature (607)..(607): n is a, c, g, or t
tgacatcctagaacaaagaagctgttttaacttaatccccctgatcagcaggatatctgtgtgttcagtgacatcatacattctgtatctagaagtctaaaatttctgcctttctcctaaagaatgtgttcttgcattttggttgaaataacctacacagtgttaaaaatcagatacctcctttagtgaccagttcaaattttaatagcgataggtagcccctgagaaatttatcactataactccacaggaaatatgacttggaagtgctctgtgtactaaacaaaataaagcccctctttgcatttaaaaccaaagtcaaaacaaaactcttgtaatgcaattaattaactttatgtcttcccatgactcaagttttgttaaatatgcccaaaaactttgattggcagtttcttcggttaattattcctatagaatgtattttaagaaanctatacaattggatatatgctggtaattctccagtttctaggaggtaccattctaccgttccagtgatgaagtgaaataattacattcgtagtgttccgataacaaccnccttagagataggtgcttttaccttaagggaagtgtgatggtaatngaaggttgataggtgtgaagctaataat

SEQ ID NO: 4684 - DNA, 431 bp, Homo sapiens
  I.4684 (AA115245)
  misc_feature (361)..(361): n is a, c, g, or t
  misc_feature (416)..(416): n is a, c, g, or t
  misc_feature (427)..(427): n is a, c, g, or t
tttttcccaaaaggtttatttgtcacatttaaagtacaaaatcaaatacacagatccagatatgtgaaccatatatacatatctatacagccattatttagactttcacaaacctatctatacattctaatttatctatcaacactatcccttaagtaaaaagcaacatatctcttaagtaggtttgttatcagtaacactatcgaatgtaaattattttcacttcatcacttgaaacggtagaaataggtaccctccctagaaactggagaattacccaagcatatatcccaatttgtataggatttccttaaaatactttcctatagggaataattaaccgaggaaaactgcccattcnaaggtttttgggcatatttaaccaaaaccttgaggtccaggggaaggaccttaangttaattaatngcct

SEQ ID NO: 4685 - DNA, 449 bp, Homo sapiens
  I.4685 (AA115098)
gggatcgagaatctttttattttgttttccttttgttttgttttgttttgtttttgagacagggtctcgccctgtcgcccaggctggagtgcagtcgtgccatctcggctcactgtagcctctgcctccccggctaaagtgatcctccagcctcagcctccggagcagctggggccacaggaagcgccaccactgtaggctaatttttttttttttttttttttttttttttgtagagactggggtctcactatgttgcccacgctggtctcaaactcctgggctcaagcgatcctcccgcttcagcctcccaaggtgctgggattacaggtggagccaccgcgcccggcatcgataatctgaatctctaacgagctcccgggcgacgttgatgcagctggtaccgggaccactcttcgaaaatcatcggtttagaggttttaattctg

SEQ ID NO: 4686 - DNA, 378 bp, Homo sapiens
  I.4686 (AA115097)
  misc_feature (7)..(7): n is a, c, g, or t
  misc_feature (11)..(11): n is a, c, g, or t
  misc_feature (270)..(270): n is a, c, g, or t
cgcaagngggngatttcggtgcacacgatttcagacagaatatgcccgcgacttcggaccgggttgctggcgaaacagagcccagctttctgagaaaagttaggagttagtagtgctctgtccgcccaacagttttcgcaatggattcagaattaaaacctctaaaccgatgattttcgaagagtggtcccggtaccagctgcatcaacgtcgcccagggagctcgttagagattcagattatcagatgccgggcgcggtggctccaccntgtaatcccagcacctttgggaggcttgaagcgggaggatcgcttgagcccaggagtttgagaccagcgtgggcaacatagtgagaccccagtctctacaaaaaaaaa

SEQ ID NO: 4687 - DNA, 518 bp, Homo sapiens
  I.4687 (AA044763)
  misc_feature (9)..(9): n is a, c, g, or t
  misc_feature (29)..(29): n is a, c, g, or t
  misc_feature (489)..(489): n is a, c, g, or t
aacaaattngcagcaattaccctcccttnggggtctagagtgaaagctaatttgtgggtagatgagattgcagaagaatggatgtccatggctgtgaacactgcacactgcacatccatctccagtgctcacactgtgcagctaccactccctggctgcgtgccatgctgtcgggttgcagatttgcacacataaattcctcaggaagagtttgcatgagcatcacctcgcaaaattctgtactgaccaaacaagggatttgaacgtttttcagcacaaaaggataacttccgagtggtggtctgtacgcatactagcaaaggtaatggtgatctagcaaacaaaattggtttctgcagttagaagtgagcaggagcacttgtattatagtatttaaataatcctggttaactctttttaagccgagtaacccctccagattttgcctttttattattgaggctggctttattttcttctactttgttnccgttttatagcagttaattaattttgtg

SEQ ID NO: 4688 - DNA, 767 bp, Homo sapiens
  I.4688 (AA044726)
  misc_feature (584)..(584): n is a, c, g, or t
  misc_feature (607)..(607): n is a, c, g, or t
  misc_feature (654)..(654): n is a, c, g, or t
  misc_feature (684)..(684): n is a, c, g, or t
  misc_feature (692)..(692): n is a, c, g, or t
  misc_feature (699)..(699): n is a, c, g, or t
  misc_feature (705)..(705): n is a, c, g, or t
  misc_feature (715)..(715): n is a, c, g, or t
  misc_feature (725)..(725): n is a, c, g, or t
  misc_feature (742)..(742): n is a, c, g, or t
  misc_feature (755)..(755): n is a, c, g, or t
gagaatcaatacaaaatatttattttttttcaaaccacagaattcttaaccccagagccacacaataaagttctcagaattgtaagccattaacatttttctaaacaatgcagtccagagatgaagataatttccaaccagcagggatgcaatatatagtaggttcccctatgaatgaagctcaaattagcatttcctttaattctcccacagccactccatcaacagaagcagaaacagtacacatattcatgccactcggctctgaaaagaggttcaaggtgggtcaaggtgggtcttggccagtggaggaaggaaggtgtccaggactttagttaatcaacagtggggacagagaggaatgatttcccttggaaaacaacagggttcctttctcatattcttgtggccagaaactggggtgaacttcagtggggtaatgaaagaaacaggagagccatttctccaggaactcctatgacctccattttaacttctgacaaagttaacttcattatacaatcgtattgaaaacagtaatcacaaccaaaaggtctataacctgtaatagtgtcaagggatcncattccggactttaatttaaggncccttaaaagcctagcctggttaagtaccgaatattcccagctaagnggccttaaatccccaacatccaccatggtnagctagtngtgttcnttgtgnaccttcggtncgatgggggnttaaaagccggtttttnggtgaaaaagttnctaggggacttt

SEQ ID NO: 4689 - DNA, 546 bp, Homo sapiens
  I.4689 (AA043349)
cttttatgcagagtttgattatgctttatttttaaaaatcacattcttccccattcccagccaacgaacaacactattcattctgaaataagaaaatgaaagaattttgagaagtcacacaacattgctgtaaatttcattttttttttttttactaataaaacagatgcttctttctcagagatgggttttcactttcaacatgcgtcatagcatctgattttctgagccatcttgggaaatggagtctttcctaatgtcattgaatgtggtcaaagctatctacaaagcagagacagtaggctcttggtgaatcagtttgggaaattcacaattaagcagtctcagggagtgaaattccggggtctgatgagactgtggaaaccatgtggtactgtagggagagcacaggtttggatgccagacaaatatctaaatctaaccctaatccactgcttataagcttagtgattgttgcacaagttgtttagcttctctgagcttagatacctcactgtaaaatgggaataatacctctttttagtg

SEQ ID NO: 4690 - DNA, 426 bp, Homo sapiens
  I.4690 (AA044003)
atcactatatgctatgttgaggggaggcaagtctgatcttcgaataattgataaagtttaatatctttgtagccaaaatacaatttgcaaaccctaactccagatgtgtcgtatgaatcttgacaaccaggtcttgagatttgttttactgattgccaatcaggtatattatttgtgatgttcgtgggagcatgcaaattagaagacagtgttgtgggagttcctcagtattgaattacatgtgtgcactcaggcctgccagtcactgaattctgacttgtaaagggtttaacctgctgttccaatcattgaggaccaatttgctttttgataagattggaaaacatttatggagactttccccagttaaatcctatggacagtgtcccactttaaatagtgccattttagtatattccccaggat

SEQ ID NO: 4691 - DNA, 318 bp, Homo sapiens
  I.4691 (AA043930)
tttttttttaagagactgtacatttttatttaataaaccacatggcaaaacaatactttaataagtgtataggaaattacaatgtgaaagttgcaaatacagcacatatatatatatatatatatactttgatcttaattaacatggacaaaccccagcttcaaaatctttctaaaatcaatcatatgcaaaatacctggtttctgaaagggcatatgataaagtatatacaatttcttaaactgtgatatggcttatttaataacatgtatttattgagagaagcataaactttccaaatatacagtatcttccagg

SEQ ID NO: 4692 - DNA, 334 bp, Homo sapiens
  I.4692 (AA037442)
  misc_feature (89)..(89): n is a, c, g, or t
  misc_feature (253)..(253): n is a, c, g, or t
  misc_feature (274)..(274): n is a, c, g, or t
  misc_feature (281)..(281): n is a, c, g, or t
  misc_feature (296)..(296): n is a, c, g, or t
  misc_feature (313)..(313): n is a, c, g, or t
ccagagaggagtattgctcaatgcgtgctatgtgcaactcctcaggccttgtgcacctccatgctgagccctgaagcagggtgtcctgngtgcctgtgtgtcagctccctcctctctacctacctctgaccttcttgtgggtgagggtggccatgcttataggcatcttaaaactggagaggcagagaactacttatgagtctgtagaccacgtgttgtcttccatggcctgtttctcctgcctgtctgggtnagtgaagcctgcaaacgcaantgcccantgaggagtaaatgcntccttgaccttaccctngctcagcactggttctagtgt

SEQ ID NO: 4693 - DNA, 494 bp, Homo sapiens
  I.4693 (AA037360)
  misc_feature (34)..(34): n is a, c, g, or t
  misc_feature (36)..(36): n is a, c, g, or t
  misc_feature (42)..(42): n is a, c, g, or t
  misc_feature (89)..(89): n is a, c, g, or t
  misc_feature (99)..(99): n is a, c, g, or t
  misc_feature (252)..(252): n is a, c, g, or t
  misc_feature (328)..(328): n is a, c, g, or t
  misc_feature (353)..(353): n is a, c, g, or t
  misc_feature (375)..(375): n is a, c, g, or t
  misc_feature (410)..(410): n is a, c, g, or t
  misc_feature (433)..(433): n is a, c, g, or t
  misc_feature (439)..(439): n is a, c, g, or t
  misc_feature (469)..(469): n is a, c, g, or t
  misc_feature (483)..(483): n is a, c, g, or t
agtgtgctaaaaattgttttgttttgagtaaagnanaaaganatataaggttaaaaatcccaagtcaccacagccagaaaacagacgtnggaggtgccncatagctgccatgcccctaccacatgtgtcagcaggaagtcaggcttttctttcaaggccaagacactagaacagtgctggagcagggtaggtcaggaggcatttactctcatgggcattgcgttgcaggctcactcacccagacagcagganaaacaggccatggaagacaacaccgtggtctacagactcataagtagttctctgcctctccagttttaagatggcnataagcatggccaccctcacccacnagaaggtcagaggtaggtatgngaggagggagctgacactacaggcacccaggacancctggcttcaagggctcagcatnggaggntggcacaaggcctgaggagttgcacatagnacgcattggagcantactcctctct

SEQ ID NO: 4694 - DNA, 471 bp, Homo sapiens
  I.4694 (AA035568)
  misc_feature (471)..(471): n is a, c, g, or t
gcccaataaattccactgtcctcacccttcagagtgtccacatgcctaatttttcctggtcgtggcagaagaatccagatttagcttaactaaggagcaaaaattctgcatcgcttggtcatatctgatctatacacattctcaagtacgacgttccagtcaaaaccttggttataaaaccaatgcttccaattatgttctgttacgaagagaacagattcttattgaacttacataaataactttattgccatgaaaaaaggatagtcactaatagcttctgaattctggacgggtcaagtagggagaaaaagtaattcgtattttgtttataaaggagtaatctaccaagctgctgtaagcaattaggtagtctaagagaaaaaagaaaattttccttaaatctgggaaaacaaaaccagcaatggattcaaataaaatgtcatgagttcatttagtctcatggtaacn

SEQ ID NO: 4695 - DNA, 554 bp, Homo sapiens
  I.4695 (AA035428)
aagggggaatttgattgctatttggtattaaagagttttaagattcaaccacctggtacaacagcaggctctgaaggggaagccagacagggaacctagaggtacaagcaatgtctccccagctgtcagcctcaatgagaatcaccacccataaataagctaattattgacaagattataatctttcgaatatgttcaaaacaggtctgactagtgactatgagaatggagctatttagagttgatttaaaagaaaacactttattgttcagcaattaaaagttagccaaatatgtatttttctccataatttattgtgatgttatcaacatcaagtaaaatgctcattttcatcatttgcttctgttcatgttttcttgaacacgtcttcaattttccttccaaaatgctgcatgccacacctcaatacatgccgcgtgatcctagtagttttttcacaaccttctacaagtttttgggaaaacatctgttatgatgactttcatacaccttcacctcaaaggctttcttgcacctcggcagggcccagctcg

SEQ ID NO: 4696 - DNA, 409 bp, Homo sapiens
  I.4696 (AA035427)
  misc_feature (12)..(12): n is a, c, g, or t
  misc_feature (64)..(64): n is a, c, g, or t
  misc_feature (68)..(68): n is a, c, g, or t
  misc_feature (74)..(74): n is a, c, g, or t
  misc_feature (202)..(202): n is a, c, g, or t
  misc_feature (203)..(203): n is a, c, g, or t
  misc_feature (384)..(384): n is a, c, g, or t
gattcggcacgnggggcgagggaggaagaagcgcgaagaccgtgtagtcatgccggtgtggtgntttnggcggngactgcgggcccgtagctgggctctgcgaggtgcaagaaagcctttgaggtgaaggtgtatgaaagtcatcataacagatgttttccaaaaacttgtagaaggttgtgaaaaaactactaggatcacnncggcatgtattgaggtgtggcatgcagcattttggaaggaaaattgaagaccgtgttcaagaaaacatgaacagaagcaaatgatgaaaatgagcattttacttgatgttgataacatcacaataaattattggagaaaatacatatttggctaacttttaattgctgaaccattaagtgntttcctttaaatccactctaaatag

SEQ ID NO: 4697 - DNA, 143 bp, Homo sapiens
  I.4697 (AA035058)
gttctcacaagatctgatggttttgtaaggggcttttccccctttgctcggcaattctccttcctgctgccttgtgaagaaggtgcctgggtttcccttcaccttctgccatgattttaagtttcccgaggcctccccagcca

SEQ ID NO: 4698 - DNA, 487 bp, Homo sapiens
  I.4698 (AA031731)
  misc_feature (84)..(84): n is a, c, g, or t
  misc_feature (460)..(460): n is a, c, g, or t
  misc_feature (487)..(487): n is a, c, g, or t
accagtatgcatatattttatacataatatatctttaaacataaacctaatacatacatatatacatgtgtagctgcacttgtnaactcaacagtttttagtgcaaacagaatcttagtaatggaggtaaataaagaatgaataagaggtaaaaatggatatagaagtaaaacacaagacatgggggtataaataaattaaaactaagttctgaaaagtgacttttagtaatagaaacctaaaaacatttcatagaaggcaagaacaaagtctgacaacagagtttagttttagtggacattgtggtagtaaatatgtaagttacttctctcttcagaatacaacagatctcactgggccttccagggtcattattcctagaaataatcccactaaatgcccatcttagcaacgcacatttccatgtgtgagttatttctctctcagccccatttaaaantgtgaaatttggatttaggaaggggan

SEQ ID NO: 4699 - DNA, 507 bp, Homo sapiens
  I.4699 (AA031832)
  misc_feature (497)..(497): n is a, c, g, or t
  misc_feature (507)..(507): n is a, c, g, or t
aaaacattctttattccatcttttgaaatttggaataagacaaagttttcatgcttaaaaatcacagaatctactgaaggtatgctattattcctcgagtatttatgcaagctgtctgcatgatatcctgacactattctattaattgaacttgaatccgagcatttgtatctatcataggagtgaagtaatttattggccattgataagtggtttggctgcaatgtagaaactacagtatgaagtgttttatgtctgcattgtcttaataataaaaacaagaggtatttatagaaatatctattttcatgacattaatttcatggtaaaattgctccattatttgtgtggcacttctcttccttaaatacatgtccccttctaaatccaaatttcacatttttaaatggggctgagagagaaataactcacacatggaaatgtgcgttgctaagatggggcatttagtggggattatttccaggaataatgacccngggaggcccn

SEQ ID NO: 4700 - DNA, 465 bp, Homo sapiens
  I.4700 (AA031463)
  misc_feature (90)..(90): n is a, c, g, or t
  misc_feature (92)..(92): n is a, c, g, or t
  misc_feature (151)..(151): n is a, c, g, or t
  misc_feature (235)..(235): n is a, c, g, or t
  misc_feature (236)..(236): n is a, c, g, or t
ctggcggttccgggagagaacctcctacaacaaacaccgccgaagtttccctctccagcgcgatcgccaatcccaggagcgcccggcgtngnggctgggaaggagccgagcggaaacctggaagtgagccgcggcgcaggcgaatcctgcnggttgctggtggcagcgccaagagaccccgcacagaaagtgggctgggagtctcgcttgctgtacccgcacctaagtgctcagnnagcggcctttcgctctgcagagggggggtcttagaagcttggggaagaagcacattgtttcggagttccttgttgcgttctttctccttgggaggagggaattgcacaaggaaaagaagagaagcctttactttgtaactgaaattctccagagttgagtttgcgtcgtacagactccggtgcatattttaatacaaaactaagggaagaggccatttgatacttggct

SEQ ID NO: 4701 - DNA, 505 bp, Homo sapiens
  I.4701 (AA031484)
  misc_feature (50)..(50): n is a, c, g, or t
  misc_feature (56)..(56): n is a, c, g, or t
  misc_feature (59)..(59): n is a, c, g, or t
  misc_feature (363)..(363): n is a, c, g, or t
ggtgagcgatttccaccaggggcccgagctgccagcatcgccgctgtcgncatggngangggtctaggggctcccggcacccagatggaagggccaaagcggccctttctccacgtggtctccggccgttcactccaccccttccccggcttgcacacgtgggctgcggggtggatgctgaggcagcggctgtgctgggaggagggcgctgggaaccaagtgcatcctctctacaggtgaacggtattaattagtccatggtcaaacaagtcacgaaatttccctccaagatttgcccccatcgactttcgtcccaaggagccttttcgatgagatacttaggagaattttatatcccagtangagagaaggacaagcttatgatattttgtttttggttcttttaaattcttgcttttgaccaattctgccttgtgactttcaaagaagcatgtctagacttaactttcccttgaaaaacggcatcctaaatcttccctttact

SEQ ID NO: 4702 - DNA, 445 bp, Homo sapiens
  I.4702 (AA030027)
ctttaatttgcctttgtttcacaataactggcttttgttttccttttcatggtgtgttgttggctatatagaggcatttattggtaaattataatcagcagttgcaccatggaagtattcttggtgataaattcttggggttacatagtatagttaacatgttattttcaagaaacatgagtgtgtgtgtctgtgtgtgtgtgtctgaagagtatcacttatatgcagtgcatatacatgtaagtgcattactttgctcaaatatcttctgacctattacagtcaactcatgcatgagtgtgaacatgtattacagaaggtcttacagccttagtttctgttttagattttatgtgctgcttcctttctcaaacaaaagcatgaaaggaaagaggataagtactagaaatattcatttttttccttcacaaatctaaatgttgct

SEQ ID NO: 4703 - DNA, 454 bp, Homo sapiens
  I.4703 (AA030026)
  misc_feature (158)..(158): n is a, c, g, or t
accacacttaccatctgtgggctgagagcgggcaaatgatttattagtcttggtttctaacggtgctgagcagcttgggatcgatcttgctggtgacacactcggcagatgcaccgatgggtgggagggtcaatgtcaggatgaagcttcttgcggantgacatgcacgtggggaccccaggtgtggtgtttagttggtagactgtgacattgcaaaagtggagtctcaagccatggcggaataacaggcggcagaaaaagcagtgagggagcttcttgggatgttttactttaagtagaaagtaaaactgtgcatgaaaagaggggacagagtatgcaacccaaatcatccgccaaggctcttggtttcttctgtggcacactgcctgccctgtatccaagcgtttgactgtgcagaggccagtcatactggggggaccctgaagcactaccc

SEQ ID NO: 4704 - DNA, 476 bp, Homo sapiens
  I.4704 (AA029888)
  misc_feature (423)..(423): n is a, c, g, or t
tctggtagtgatttatatatatttattatagatttataataaaataaaaaatgctattggaattctatatttacacatgctccatttatatacacgcaaacaaatgtcaatatcaatggtaaaattttaggattttaaagaggcacatttcctcctacctacccacttccacatattcattactctaagatgagttttcataagcaacatttagatttgtgaaggaaaaaaatgaatatttctagtacttatcctctttcctttcatgcttttgtttgagaaaggaagcagcacataaaatctaaaacagaaactaaggctgtaagaccttctgtaatacatgttcacactcatgcatgagttgactgtaataggtcagaagatatttgagcaaagtaagcacttacatgtatatgcactgcntataagtgatactcctcagacacacacacacagacacacacactcatgtttcg

SEQ ID NO: 4705 - DNA, 484 bp, Homo sapiens
  I.4705 (AA029887)
  misc_feature (82)..(82): n is a, c, g, or t
  misc_feature (139)..(139): n is a, c, g, or t
  misc_feature (449)..(449): n is a, c, g, or t
  misc_feature (469)..(469): n is a, c, g, or t
tttaggggaaaacattttaatatgtactatgaataatctcatctttataccaatatgtcttaaaatacattttttatggaangtgcagaggagggaggtccaaaagtgccaaaagcccatggaagtcacaatacatttnttcttttctccccacatgagtttctccatgttccaggaattttattatcagtctcagccttgctgttctgggcaggaagaaatgaaagaagaagaaaggaagccacgtctcctgaacactgccccgtgtgcccagcacagtgactgctgttgtgtagtcagcatctcttcggggaggacaggtgagtctccgagaagacatatccaatcagccgagcagcaattcaatcattgatctttaaaaaactagcccccaaaacataatgtcaagcagtggaaatggctatattggtcagggtataccccaatgncaagggtagtgctcaggggnccccagtatgactgg

SEQ ID NO: 4706 - DNA, 440 bp, Homo sapiens
  I.4706 (AA026871)
  misc_feature (427)..(427): n is a, c, g, or t
tggtttggcatagtttattacaattagtgtgcgcataaaaccatgtaaactctacaaagtaaaccacttcccctccacactaaccagcagctagtctgccatgaccttccagcacccccattattttaacatatatacatttcacaggatgtaataaccacacaaatagggttataatacattcttcagggaaaaaaatttttggtccatattttctattaaaaaaacacacacacttccctctttggcaaaagaggttaaatctcccatagttaactcacaaaagaaactcaaataaaaactactgagcatgaggtacagctgatgtctggactgttctggaattacagacgcctccttgaggggggaaaatccatttcttattaaaatggagatcagtttccaacagttttccatggtccagttngaaaggccccggt

SEQ ID NO: 4707 - DNA, 211 bp, Homo sapiens
  I.4707 (AA026890)
  misc_feature (98)..(98): n is a, c, g, or t
  misc_feature (122)..(122): n is a, c, g, or t
  misc_feature (127)..(127): n is a, c, g, or t
  misc_feature (146)..(146): n is a, c, g, or t
  misc_feature (161)..(161): n is a, c, g, or t
  misc_feature (175)..(175): n is a, c, g, or t
  misc_feature (188)..(188): n is a, c, g, or t
acaatttaacagaatatttattgcaaggtatgatgtacagtgacatgccatcttttgtctgtatgaacttcattactgggggacagcaactgttgaantgttttgctcttacaccttttatntcgtncaaaactcaattccctagntcaattttttccatncactaaaagctgcnagacttgggacanagcaggaccacatcagcgaacca

SEQ ID NO: 4708 - DNA, 422 bp, Homo sapiens
  I.4708 (AA026889)
  misc_feature (350)..(350): n is a, c, g, or t
  misc_feature (369)..(369): n is a, c, g, or t
ggctgagacaggagaatcgcttgaacctgggaggtggaggtttcagtgagccaagattgtgccactgcctccagcctgggtgatggagcgaggctctgtctcaaaaaagaaaaaaaatatatagcatataacatacaaaatgagtttatcaactgtttgttattggtaagtcagcagtgggctattggtggttaagttttggggggagtcaaaagttacatgcaaattttttacctgtgcggggtgtcagcatccctaaccccatgttgttcaagggtcaactgtaagtttaaaatgactcctgtctcaaaaaaccaaaggataacctttaaagggattgggtaactttngactcaaaaactgcttttngtaatctttttccacaattgtactggaaaaggtgtgggcctaggttatggttt

SEQ ID NO: 4709 - DNA, 516 bp, Homo sapiens
  I.4709 (AA026810)
ctgatactgtgttagcagcaggtctgcttaaacctagtcttgttgttattgagtcatttcctctcctttgataactagaactgaaagcatttttaacattcttctcctggaagaaatgaattacttgaagcatgaaaagcacaccagggtggttgtttatttagcaattatgactgtagatttaaaaacaagcaaagaaacaacacctcagcagctgcccgtttccttagtctccacttcagagggggatgcgaagaggtcggcccagctccggtgaccatgaaggtggcacaggaattacagtgtgaatggctgtgtcagatgttttcgtacctcagattaaaaatattgctgaggtcagacgccacaattttcatgactttcttcagaagtagcacattttccgtgacttccgctgtcctctgaaaaacaaagttatttggaacatgttcatgcaaaagtgattctgaccaagtctaaatcgagcttttctactgacatgaaactgttggaact

SEQ ID NO: 4710 - DNA, 409 bp, Homo sapiens
  I.4710 (AA026240)
agatccaaacagtggtttttaatttcagtacaaaagtaaaagcagatttaaagcaggcagaaaatatagagaagaagagaacttaggaactctatagtgtacaggttgaccttagggctcttttccttaatgtaaatgtgcacaaggatcattatatttccattttacataagctctggcaagtagaggcaccataaaaccaacagagtgcccgaaatgaggtcattctccttgttttctcctcattcttagatcatttgtttcccacctttttttttcttagaagtaggaactgagctgtggcctagggttttgtgtgtggtggatcaatgtgtgctgcttgtgggcaggaccccaccatgtgtcaccactggagttgtttccaccctgttacatgtctcagtttctc

SEQ ID NO: 4711 - DNA, 228 bp, Homo sapiens
  I.4711 (AA026239)
  misc_feature (62)..(62): n is a, c, g, or t
  misc_feature (206)..(206): n is a, c, g, or t
  misc_feature (214)..(214): n is a, c, g, or t
ctcccaaaattaatcttgattcggcttgtctgcgcatttgtgtgaggaattgaactgttgtnttcgtaggtaaatgagagactgagttttctcaactccaaagagaaaggcatttgctcctccccagccaaaaccgtgctcctgggtgactgggggccttgtgggagtgtctggggggggttgacatccctgtgacatgcagcagnccctaatngggaaaaattcccc

SEQ ID NO: 4712 - DNA, 440 bp, Homo sapiens
  I.4712 (AA011562)
  misc_feature (351)..(351): n is a, c, g, or t
  misc_feature (364)..(364): n is a, c, g, or t
  misc_feature (440)..(440): n is a, c, g, or t
caaactaatggctttttttttcagattatattaacttcaacttacattgtgataagaacagttctcgttaagtgatataataacacttcttgtttgagccagtttgaattgcttctaaaacaactgccactaaaagcatcttaagtgacagttatgtttagatatggaaacatagttaaatattactttaatttttctacctactttggtttaggacagatgcctctgacttcaacagaccatcagagatgtgtaacattaattttagaaaaccactcagacagagagtgctgagctcccttaggaaacaacacaagtctctgctttcccatcaccaatgctctgggcctngcgctcatgggtngaagtcctctgttatcaggctgggcttcataagtcagtcccagcatctttgaaggcatattggatggctgaaatgn

SEQ ID NO: 4713 - DNA, 440 bp, Homo sapiens
  I.4713 (AA011367)
  misc_feature (112)..(112): n is a, c, g, or t
  misc_feature (375)..(375): n is a, c, g, or t
cctcggcctcccaaggtgctgggattgcagatgtgagccaccgcgcctgccctggctaaaatttctttgcaaagaattatttaaaatgttcagttatccgggcacgatggtnatgcctgtagtcccagctattctggaggctaaggtggaaggatcacttgagcccaggagtttgagtctagtctgggcaacatactgataccttttcatttaaaaaaaaattttaatagtaataagaatgttcagtcaatatcaatagaattaggaagaatttctatttccttccttcattaattcaacaaatatttattgagcaaacatctgtgtgtcgtctggcgctggttgcacaggtcaaactggcttcttaagaatganatcctaagtgtgaggaagaaattgcattgtatgtgtggtctgactgcagaaaaacctaaaatttg

SEQ ID NO: 4714 - DNA, 434 bp, Homo sapiens
  I.4714 (AA011379)
gtagatacgaggtttcaccatgttgtccaggctggaaaagtaaattgactttaaaaaaaagtaaactggttaatatttaaactactgcttgaaaagaaatgtaatacactactctcattaataaaccaacttttaaaactttttatatacctacaaagtgactttaattttgtaaaatgtactaagtattgtttgcttacattccccctccccacattttcttttccctatgaaattcctcccaaacctttctccccatagcttcaaaattttaggaaatattacatcgtgactgaaacatgccttttcacttgtcttactaacatggaaaagccaacttactccttgacttttcatcatggcagcagtttacttattttaggttttctggcagtcagaccacacatacaatggcaatttcttcctcacactta

SEQ ID NO: 4715 - DNA, 331 bp, Homo sapiens
  I.4715 (AA009833)
  misc_feature (289)..(289): n is a, c, g, or t
catgcacaaagctttcttctctctgtaaggagaaggttgttgtttgtttttattttctcctgccccatgcactgtcactgtttctccggtgtgccttttttcctctttaatctggtctctgacactgtctgtcctggaagccattcccaaaccttgaggatccttgtctgtctgctcatatttaaaagtgaggcataaaaagcagattggatgctctggtgcataggtgggtctatcaaatggtgaaaggtccacacagtgaacctggaaggggggaccaacctcacanggtcctttccccctttgggggttggaccatcccttggggttg

SEQ ID NO: 4716 - DNA, 465 bp, Homo sapiens
  I.4716 (AA009704)
  misc_feature (39)..(39): n is a, c, g, or t
  misc_feature (46)..(46): n is a, c, g, or t
  misc_feature (50)..(50): n is a, c, g, or t
  misc_feature (114)..(114): n is a, c, g, or t
  misc_feature (117)..(117): n is a, c, g, or t
  misc_feature (118)..(118): n is a, c, g, or t
  misc_feature (119)..(119): n is a, c, g, or t
  misc_feature (120)..(120): n is a, c, g, or t
  misc_feature (122)..(122): n is a, c, g, or t
  misc_feature (123)..(123): n is a, c, g, or t
  misc_feature (130)..(130): n is a, c, g, or t
  misc_feature (131)..(131): n is a, c, g, or t
  misc_feature (132)..(132): n is a, c, g, or t
  misc_feature (133)..(133): n is a, c, g, or t
  misc_feature (134)..(134): n is a, c, g, or t
  misc_feature (135)..(135): n is a, c, g, or t
  misc_feature (136)..(136): n is a, c, g, or t
  misc_feature (137)..(137): n is a, c, g, or t
  misc_feature (138)..(138): n is a, c, g, or t
  misc_feature (139)..(139): n is a, c, g, or t
  misc_feature (140)..(140): n is a, c, g, or t
  misc_feature (141)..(141): n is a, c, g, or t
  misc_feature (142)..(142): n is a, c, g, or t
  misc_feature (143)..(143): n is a, c, g, or t
  misc_feature (144)..(144): n is a, c, g, or t
  misc_feature (145)..(145): n is a, c, g, or t
  misc_feature (146)..(146): n is a, c, g, or t
  misc_feature (147)..(147): n is a, c, g, or t
  misc_feature (148)..(148): n is a, c, g, or t
  misc_feature (149)..(149): n is a, c, g, or t
  misc_feature (150)..(150): n is a, c, g, or t
  misc_feature (151)..(151): n is a, c, g, or t
  misc_feature (152)..(152): n is a, c, g, or t
  misc_feature (153)..(153): n is a, c, g, or t
  misc_feature (154)..(154): n is a, c, g, or t
  misc_feature (155)..(155): n is a, c, g, or t
  misc_feature (156)..(156): n is a, c, g, or t
  misc_feature (157)..(157): n is a, c, g, or t
  misc_feature (158)..(158): n is a, c, g, or t
  misc_feature (159)..(159): n is a, c, g, or t
  misc_feature (160)..(160): n is a, c, g, or t
  misc_feature (161)..(161): n is a, c, g, or t
  misc_feature (162)..(162): n is a, c, g, or t
  misc_feature (163)..(163): n is a, c, g, or t
  misc_feature (173)..(173): n is a, c, g, or t
  misc_feature (174)..(174): n is a, c, g, or t
  misc_feature (175)..(175): n is a, c, g, or t
  misc_feature (262)..(262): n is a, c, g, or t
  misc_feature (310)..(310): n is a, c, g, or t
  misc_feature (311)..(311): n is a, c, g, or t
  misc_feature (429)..(429): n is a, c, g, or t
  misc_feature (436)..(436): n is a, c, g, or t
  misc_feature (460)..(460): n is a, c, g, or t
ttcattcatcagacattttaatgagacccaatctgatangaccccntctngggggtagctcatcatccaaggagaaacaaacagttacaatgttacaatgcaacttgctaaatnttnnnntnnccccccnnnnnnnnnnnnnnnnnnnnnnnnnnnnnnnnnncccccttttnnnatcaggagagctgtaggaaggagccacaggggtaaaggatgacccactccagctgttggaatatgagatgagtcacatctggaaatnctaatttggtgcagctgcccaaggcaaagtggtaggccttgttcacanntaactcggtaaagctttatgaagcaccgacccagtgggtgccatggaggtggatcagattgagccacgctgctgccacctctgtggagggaggctggcatggatacaacttgatgacnatagacncttcctctctggattcagttcccnccttc

SEQ ID NO: 4717 - DNA, 270 bp, Homo sapiens
  I.4717 (AA009703)
  misc_feature (109)..(109): n is a, c, g, or t
  misc_feature (152)..(152): n is a, c, g, or t
  misc_feature (153)..(153): n is a, c, g, or t
  misc_feature (158)..(158): n is a, c, g, or t
  misc_feature (159)..(159): n is a, c, g, or t
  misc_feature (160)..(160): n is a, c, g, or t
  misc_feature (161)..(161): n is a, c, g, or t
  misc_feature (162)..(162): n is a, c, g, or t
  misc_feature (163)..(163): n is a, c, g, or t
  misc_feature (164)..(164): n is a, c, g, or t
  misc_feature (165)..(165): n is a, c, g, or t
  misc_feature (166)..(166): n is a, c, g, or t
  misc_feature (167)..(167): n is a, c, g, or t
  misc_feature (168)..(168): n is a, c, g, or t
  misc_feature (169)..(169): n is a, c, g, or t
  misc_feature (170)..(170): n is a, c, g, or t
  misc_feature (171)..(171): n is a, c, g, or t
  misc_feature (172)..(172): n is a, c, g, or t
  misc_feature (173)..(173): n is a, c, g, or t
  misc_feature (174)..(174): n is a, c, g, or t
  misc_feature (175)..(175): n is a, c, g, or t
  misc_feature (176)..(176): n is a, c, g, or t
  misc_feature (177)..(177): n is a, c, g, or t
  misc_feature (178)..(178): n is a, c, g, or t
  misc_feature (179)..(179): n is a, c, g, or t
  misc_feature (180)..(180): n is a, c, g, or t
  misc_feature (181)..(181): n is a, c, g, or t
  misc_feature (182)..(182): n is a, c, g, or t
  misc_feature (183)..(183): n is a, c, g, or t
  misc_feature (184)..(184): n is a, c, g, or t
  misc_feature (185)..(185): n is a, c, g, or t
  misc_feature (186)..(186): n is a, c, g, or t
  misc_feature (187)..(187): n is a, c, g, or t
  misc_feature (188)..(188): n is a, c, g, or t
  misc_feature (189)..(189): n is a, c, g, or t
  misc_feature (190)..(190): n is a, c, g, or t
  misc_feature (191)..(191): n is a, c, g, or t
  misc_feature (192)..(192): n is a, c, g, or t
  misc_feature (193)..(193): n is a, c, g, or t
  misc_feature (194)..(194): n is a, c, g, or t
  misc_feature (195)..(195): n is a, c, g, or t
  misc_feature (196)..(196): n is a, c, g, or t
  misc_feature (197)..(197): n is a, c, g, or t
  misc_feature (198)..(198): n is a, c, g, or t
  misc_feature (199)..(199): n is a, c, g, or t
  misc_feature (200)..(200): n is a, c, g, or t
  misc_feature (201)..(201): n is a, c, g, or t
  misc_feature (202)..(202): n is a, c, g, or t
  misc_feature (207)..(207): n is a, c, g, or t
  misc_feature (211)..(211): n is a, c, g, or t
  misc_feature (212)..(212): n is a, c, g, or t
ataaatgccctaaacttaaaaaaaaaaaaaaagctataaaactaagtcttcatcttgtatttggaaaattggttcaagctgggtatgagacataagtgtagtcagctcngggagaaggttgctcttaaggagaagcagggacctgtggtttnnttggnnnnnnnnnnnnnnnnnnnnnnnnnnnnnnnnnnnnnnnnnnnnnccttntttnncttcaggcagccagtgcctggaaaagcctggagaattgggccgtacttgaccctgatt

SEQ ID NO: 4718 - DNA, 528 bp, Homo sapiens
  I.4718 (AA007682)
  misc_feature (512)..(512): n is a, c, g, or t
  misc_feature (525)..(525): n is a, c, g, or t
agaacatggctcgcctttgcttcagggcctagcagtttattttagccataagggtaagggagcaggtcagaaatgacttttagtgtaatcctatctgtaattaaaaatacaaatgctgtcataagatcaaatgttatcaaaaatcagtatttaaaattaaatttacccccaaatttctttcaaaaaaaatttgtaatgttctttttcagtgaagcctttgcactgctagagctgaagaatgtgatcaatcggcttgttgaataatcctgcacagtaggtattccgctgaagccaactctagctgggggctcgagagcgaaagacacagatggggccctgccgcccctcgaagagtcggatgggcgcgccgtccccggtgcatcaagaggctggcccggccaggggccgaagccggctggcaccgaaccccgcgcacttcgccgcggggggggctgggccgtagtcgctccgatttaaggctggtatccaaggctgcggccgttaaggaagcnaagccaagcgacntaa

SEQ ID NO: 4719 - DNA, 458 bp, Homo sapiens
  I.4719 (AA007681)
  misc_feature (9)..(9): n is a, c, g, or t
  misc_feature (61)..(61): n is a, c, g, or t
  misc_feature (63)..(63): n is a, c, g, or t
  misc_feature (88)..(88): n is a, c, g, or t
  misc_feature (93)..(93): n is a, c, g, or t
  misc_feature (95)..(95): n is a, c, g, or t
  misc_feature (97)..(97): n is a, c, g, or t
  misc_feature (265)..(265): n is a, c, g, or t
  misc_feature (311)..(311): n is a, c, g, or t
  misc_feature (337)..(337): n is a, c, g, or t
  misc_feature (359)..(359): n is a, c, g, or t
  misc_feature (380)..(380): n is a, c, g, or t
  misc_feature (416)..(416): n is a, c, g, or t
  misc_feature (444)..(444): n is a, c, g, or t
aggtaatgnaggaagaatgtagggagtcctccagtggaccacactccttctagcgagccgngnaaaccatagagatcagggctcagcngaggncngnccactgctgtcacgtggcctccatccgtgcgctttattggctggtgctggctttacggggttgaattttggacgctgcctgccattcgtgggaccgagtttcaggcagctggaataaagagagacatcgggggaaagccgcgagaaggccagcgtccctggctgggancagagctatgccgagtagggcgcccggctgtcaaaactggccggcncagtgcacgcttgggccgccccggancggtctcagatcccgtctggangtcgtagtccgggacggcccncatcattgtccgcgacgcagctcgggatccgcgtcngggtttgtcggccgggtttctgccaggnaccgtctgagcgtt

SEQ ID NO: 4720 - DNA, 375 bp, Homo sapiens
  I.4720 (AA007535)
  misc_feature (263)..(263): n is a, c, g, or t
aaaacaatgactttctttcaaaatgcacaccaaaatcttaacatggaattgtaagccacaaaacagaagtgacaacactgatctggtccgcaggaaggaggggtccctcagaaccctccctgctccatctcccacgtggccctaccttcttggggcctctagggtgctccggaacccagtttgaaaacctggaccttgaacctcagctgggcgctgaggtccgcatggggaccgcggggcttggaggctggtagaagtggttnggggaggtgggacgcagacaggagaccgtgttccctaaggaggctgtttcaagttgtgggacaaagattcattcataacgctttcacttcatgcaaaattccccggaaaggg

SEQ ID NO: 4721 - DNA, 357 bp, Homo sapiens
  I.4721 (AA007534)
  misc_feature (112)..(112): n is a, c, g, or t
  misc_feature (139)..(139): n is a, c, g, or t
gggtcatgtacccctgtcgcctatcccagactctgggttaagaaggcttggactagatacaatcaaaacccatccaagtcctacaggctcagatgcaggctcagggcgagantcgtgtgagaggcagggaacgccctcntatcctgtgacactcaagccagggcaagctcagggtggagagtacagatgtgtggcttggtgcttaaggccaccagtggtcagcctggtgaaggccactgggcccagcctttcttacctcattggccatccctacttcaagaaatgtggccttaaatcctcttttcagcagccttttcggggattttgatgagtgaagcgtattgatgatcttgtcca

SEQ ID NO: 4722 - DNA, 370 bp, Homo sapiens
  I.4722 (AA007494)
  misc_feature (29)..(29): n is a, c, g, or t
  misc_feature (160)..(160): n is a, c, g, or t
  misc_feature (177)..(177): n is a, c, g, or t
  misc_feature (237)..(237): n is a, c, g, or t
caggcatatatgcatgtgttcacaaagtnacatcaaggacatagaaacatgtttgtgatgtaatgttgagggaaacaagcaggtcacagaatgttacaggattttataaagatgtaaaggaattttactaaattatgggcaatcatactatggcatcctnttttctgcacctttatnactttctcttccttaaaagtatttaactgtgagatgtattttgtcaggaaaaaaagaaanaaagaacacagtgctagcattaaacattaaacattttttaaaaaacatttttacacttttaaattctaatggatatctactttgggccagtagagtaagagggaccagagttactttcccatctgaaacaaat

SEQ ID NO: 4723 - DNA, 475 bp, Homo sapiens
  I.4723 (AA007476)
tataagcccatttttgtaggcaagaattaagtattgatgtgaagattgtttatgtttcagtgatacggtctccttcaccccaattatatggcctttttgagagagattagaaaaattgtggcttagttcaacaaagattgagttaactcgtgtgccaggttactagaattatggattagcatctaccttcaagactcttacagtctagtgcaattaaagagaaagaaacagattatttaatacaatttaagagctaaattagagataatcacagggtttacacaggtttgaggctatagaggtggttacttatacatgatacttgggctgagttttaaacaatgaagataatagttaattgaaagaatgaggtaaaaagagcagaagcatgtatagagcacagtgtgagccaccgcgcctggccaggagagttaagtttttatgcactggctgtgattagaaggggtgtagaata

SEQ ID NO: 4724 - DNA, 447 bp, Homo sapiens
  I.4724 (AA007471)
  misc_feature (25)..(25): n is a, c, g, or t
  misc_feature (33)..(33): n is a, c, g, or t
  misc_feature (112)..(112): n is a, c, g, or t
  misc_feature (254)..(254): n is a, c, g, or t
  misc_feature (266)..(266): n is a, c, g, or t
  misc_feature (300)..(300): n is a, c, g, or t
  misc_feature (379)..(379): n is a, c, g, or t
  misc_feature (398)..(398): n is a, c, g, or t
aggcatgagcaccgtgaccggccanctgtcatnatttttaacattaacaattcatctattaccttagctatggatggtgctatgtaatttgccctgcctgctccttcacctncacatcctgccactctcccctgttaagtcagaaactgtgaagtgtcttagagtttgtccttcttgcaagctaataggttagcttgccacagtttcatatacatatactgccagaagacaccagactgctgggctggtgccanaaaagatttgcnactgaaagcacaaagcatttacaacaccttgtgncatttccccatgccccatttcccgtaatgcaacagatgtttcctgtgcagtgggttgcatcacaggagaagaatcttanatttagaagcctccaagcntttatcaaagctgctggtgacctacccattcctcccattcatggagaga

SEQ ID NO: 4725 - DNA, 365 bp, Homo sapiens
  I.4725 (AA007451)
caagagcagagtttagggcttattttgccccactaccgaggcaaaccatctctgagtgttctacttgataccccctgaattatgaggttttctactctggctggtaggaagaggaactggccctgtatgaactttgaagatggttccctcttatcttttcaggtggttttctctggccttgatttgtacacacaaacacgcatgcccgcgtgcgcgcattcagctctcagctgaagacttgaatgggaccctctgcatatcctacaattctctgtggtagtgctatcctctctggtattgtgccctgctacctctaggtgtcttggctttcccagactgccagctccacctcctcagctcaggga

SEQ ID NO: 4726 - DNA, 470 bp, Homo sapiens
  I.4726 (AA007396)
tttctttgagacagggtcttgctctgttacccaggctggaagacttcatctcaaataataataataataataataaaataataatataggaacatatggatatcacaaaatacatagtccctagtacagtcaactggcctattgtgaccttcattaaaatatttgtctttaaggtcttacaattcttcttggggccacactcagtctcactattccttactgtcaggatcccaaaggactccaagcagccaaagcttcccaccacaattctatccccaccatgcctgtcatctttccgagacaatgctcctatattctacaccccttctaatcacagccagtgcataaaaacttaactctcctggccaggcgcggtggctcacactgtgctctatacatgcttctgctctttttacctcattctttcaattaactattatcttcattgtttaaaactcagcccaagtatt

SEQ ID NO: 4727 - DNA, 458 bp, Homo sapiens
  I.4727 (AA007309)
gtttgtttgctttgtaattttggaccgtatcatggatattttgaatattctgttttgagatgctggatcttatttaaatcctattaagaatgttgatatttttgttttagcaggcaatcaagctggctaggttcctgccacaagttcagactagtcttctgtaggtgagaaagcgcataatgatattaatatccacctcccaaaccccagagtgtgttacattccatgggtgataaacctagaggggccttcttcctcttcccagaggaaattcacttacatttcaagataatgaataatttctctcctgaatgggaggaatgggtaggtcaccagcagctttgataaaagcttggaggcttctaaatttaagattcttctcctgtgatgcaacccactgcacaggaaacatctgttgccttacgggaaatggggcatggggaaatgacacaaggtgt

SEQ ID NO: 4728 - DNA, 288 bp, Homo sapiens
  I.4728 (AA005039)
  misc_feature (256)..(256): n is a, c, g, or t
aaagatgggctttttatttatttgtaggaatcattatggctgctgctttctagagattctgggaaagagggtttctcagctatcaactgaaagtcttaaatttccaagaatgacagacatgtattttaataatcagcattttcttcacaactattttaaaatgaacagattcaaaaaagatatattagattacaaaatgggtaacttccaaatcaatctattccatagggcaaccgtttcaccaattttttgttgnttttttaaaaggcaccctattggaggtaaaag

SEQ ID NO: 4729 - DNA, 286 bp, Homo sapiens
  I.4729 (AA005182)
  misc_feature (28)..(28): n is a, c, g, or t
  misc_feature (145)..(145): n is a, c, g, or t
  misc_feature (198)..(198): n is a, c, g, or t
  misc_feature (234)..(234): n is a, c, g, or t
  misc_feature (283)..(283): n is a, c, g, or t
aatgaactgaatctgttggaattgatanggatggtgtggagtggcttgttacatgagtttgagtgacacaaacatgtatgaggaaaaactttcaccatttcagctatatacatattctaggaaattaaaggcaaaaaaaaaccanaaccttagattagacattcaacatttaattgaagtaatttatgggaattgctnaactctttatagatgaatattgtatggtaatttatntatttattcaatgcagctaatgtgggggtgagcacctttcctattgttnccc

SEQ ID NO: 4730 - DNA, 350 bp, Homo sapiens
  I.4730 (AA004294)
  misc_feature (8)..(8): n is a, c, g, or t
  misc_feature (22)..(22): n is a, c, g, or t
  misc_feature (25)..(25): n is a, c, g, or t
  misc_feature (34)..(34): n is a, c, g, or t
  misc_feature (44)..(44): n is a, c, g, or t
  misc_feature (58)..(58): n is a, c, g, or t
  misc_feature (66)..(66): n is a, c, g, or t
  misc_feature (67)..(67): n is a, c, g, or t
  misc_feature (69)..(69): n is a, c, g, or t
  misc_feature (73)..(73): n is a, c, g, or t
  misc_feature (80)..(80): n is a, c, g, or t
  misc_feature (91)..(91): n is a, c, g, or t
  misc_feature (93)..(93): n is a, c, g, or t
  misc_feature (113)..(113): n is a, c, g, or t
  misc_feature (115)..(115): n is a, c, g, or t
  misc_feature (132)..(132): n is a, c, g, or t
  misc_feature (133)..(133): n is a, c, g, or t
  misc_feature (135)..(135): n is a, c, g, or t
  misc_feature (146)..(146): n is a, c, g, or t
tatatcantaggcttggcatgntgnctcacactngtaattctancactttgggaggcnaaagcagnngnatcngtagagnccaggaatttnanaccagcctgggcaacatggnanaaccctgtctctacaannantacaaaaacancaacaacaacaaaaattagccaaaagtggtggcatgtgcctgtagtcccagctactccagtggctgaggtgggaggatcgcttgagcctaggaggttgaggctacagtgagccgtgatcacaccactgcactccagcctcaatgacagagcaagactctatctcaaaaaattaaagaattaaaatacatcaccaaataacatat

SEQ ID NO: 4731 - DNA, 355 bp, Homo sapiens
  I.4731 (AA004293)
tggtgatgtattttaattctttaattttttgagatagagtcttgctctgtcattgaggctggagtgcagtggtgtgatcacggctcactgtagcctcaacctcctaggctcaagcgatcctcccacctcagccactggagtagctgggactacaggcacatgccaccacttttggctaatttttgttgttgttgttgtttttgtattttttgtagagacagggttttgccatgttgcccaggctggtctcaaattcctgggctctactgatcctcctgctttggcctcccaaagtgctagaattacaagtgtgagccaccatgccaagcctagtgatatatttctaaataactga

SEQ ID NO: 4732 - DNA, 299 bp, Homo sapiens
  I.4732 (AA001834)
  misc_feature (270)..(270): n is a, c, g, or t
  misc_feature (280)..(280): n is a, c, g, or t
  misc_feature (288)..(288): n is a, c, g, or t
aatgtgttatggatggaggggtgggcattttttaatcctctataccaaggattgtaaactatgggccaaatcaggcccgcccacctgtttttgtaaatgtggaacatagccgcacacattcacttacagttatctcgtggctgttttcacattcagagttgggtggtatgacagaaactgtgtggctcttaacagaaaaagtgtgctaacctgtgttctctactgttcattgttgttgttgttgttgctgttcttttaatttttgttttnttttaccttntttccctngctttctgcat

SEQ ID NO: 4733 - DNA, 478 bp, Homo sapiens
  I.4733 (AA002008)
aaaaagtccccgattgataaacaccttaaattttgagaaacagggatctggttcttttaatatatcaccatccaaactgcatttgaactttattacttttaggcatcatttactgaatccttatgatgtgctaattacagtgctaggccttaaacacagtatctcatttaactctcaaccctgtgaagtcatatcattatctccattttaagaatgtgaaaattgaggctcaagtgactaaatcacctgctcaaagagcccatcagttccaaagttagcatttgaacctcatctgtctaaccacaaaccttttttgccaaattgcaccaattcccttcaattccaaaatttgtatttcgaaggctatgctggcagaattaattactctggttgcctgtattttctaatcaacttaaggcagattttggtggtttattataattcttgccggcaacctatctaaagacacagcagatca

SEQ ID NO: 4734 - DNA, 284 bp, Homo sapiens
  I.4734 (AA002040)
  misc_feature (19)..(19): n is a, c, g, or t
  misc_feature (62)..(62): n is a, c, g, or t
  misc_feature (65)..(65): n is a, c, g, or t
ttgggtgtgttgttatganagaaagcagtgagctccatggtaatacttgttccctgtgacanaanaaagggacaaagatgtgacatggtcataacccctgcaacctccgaagatgctgctgtgtcctgtcccaggagggctccactctttttagggaatggctatatttacccagtttacagcttacgagaaacacgttgagggcaagactcaaatgaaactaatggggggccgtgaaaggctattttaagaatgcatgaaagcagggaaaaaaggtaaaaaaa

SEQ ID NO: 4735 - DNA, 450 bp, Homo sapiens
  I.4735 (AA002205)
  misc_feature (286)..(286): n is a, c, g, or t
  misc_feature (346)..(346): n is a, c, g, or t
  misc_feature (404)..(404): n is a, c, g, or t
  misc_feature (414)..(414): n is a, c, g, or t
aagcaatccatttggtaaatgagcaaagaatgtgaagagacatttcaccataaaggacatgtagatgacaaataagcacatggcaagatgttctacatcattagctatcagggaaatgcagcctcccctgggccttagtcatttcttgctcttcttgggaaaaggcaaagacagagacctatgagtcagagctgggggcaggaagttggatggaaaggagagaagattcaaatgcagacataagagacacagtccatcttcacatcttgggagctggaaacaagcntgacttgtgtctcctcatatctcccagaaagcaccagccttgaaaaatgttgcacccatnaagccaggtttaagaggtcgccagttggaagccaggggagacccaccttggtttagangcccccaacntctggaattggttggacaggcattgtacagagcagg

SEQ ID NO: 4736 - DNA, 459 bp, Homo sapiens
  I.4736 (AA001367)
  misc_feature (338)..(338): n is a, c, g, or t
  misc_feature (420)..(420): n is a, c, g, or t
aaaagaaaaaagtaaggctgagcgcggtggctcatgcctgcaatcccagcactttggaagggtgaggctgaggtcaggagttcgagaccagcctggccaacacggtgaaaacctgtctctactaaaaataaaaaaagttagccagtcgtgatagcgggcgcctgtaatcccagctactcgggaggctgaggcgggagaatcgcttgaacccagaaggcggaggttgcagggagcagagattgtgccactacactccagcctgggtgacaatgaacgagactccatctcaaaaaaaaaaaaaaaagtagcaaaaaattcaaacatagaggcatatagantaaaaacacacctcagatcacacacctcttttcagaggtaacccctccaaacactctggattatataccttcagatttgttngagatgcacatgtacatacttagcatattgggtacctat

SEQ ID NO: 4737 - DNA, 357 bp, Homo sapiens
  I.4737 (AA001251)
  misc_feature (27)..(27): n is a, c, g, or t
  misc_feature (222)..(222): n is a, c, g, or t
  misc_feature (233)..(233): n is a, c, g, or t
  misc_feature (272)..(272): n is a, c, g, or t
  misc_feature (329)..(329): n is a, c, g, or t
cacatggtatggacatcctaaagtatntactatctggccttttacagaaaaggtttgccaacccctgctctgtacaatgcctgtcaccaatacagaggttggggctctaaccaggtgggtctccctggcttccactggcgacctcttaacctggcttatgggtgcacattttcaggctggtgcttctgggagatatgagagacacagtcagcttgtttccangctccaagatngtgacgatggactgtgtctcttatggtctgcatttgaantcttctctcctttccatccaacttcctggcccccagctcttgactcatagggtctcngtctttggcctttttccaagaatatgca

SEQ ID NO: 4738 - DNA, 243 bp, Homo sapiens
  I.4738 (W92703)
tctgctcagcggttgaaattaaaaattgtaaatttattttacagttatatttgacatgttgttatttgaacagtgtatataaatccaaaatgtctgataagttaccaggttgagccacttaaagtagctgccattctatttggacccataaaaatggcaattttataatacagtgcgttatctaaaaacaggtcacatatacttatttatcagttgaattttgtaaaaaacagaaccattttt

SEQ ID NO: 4739 - DNA, 67 bp, Homo sapiens
  I.4739 (W92702)
  misc_feature (14)..(14): n is a, c, g, or t
  misc_feature (18)..(18): n is a, c, g, or t
  misc_feature (39)..(39): n is a, c, g, or t
aagggagctgcganaganactgaagtgcaaaagtttcanatggtacttggagaatgtctttcctgac

SEQ ID NO: 4740 - DNA, 462 bp, Homo sapiens
  I.4740 (W90250)
  misc_feature (19)..(19): n is a, c, g, or t
  misc_feature (410)..(410): n is a, c, g, or t
  misc_feature (462)..(462): n is a, c, g, or t
taggaacaataatttaganttttgtgtaacttcaaagcttactgcagaagaatttatgctacagtatgaaagaaagcagcttaatcactagaaaaatttacagcacttaggttaacagcagcttaaagacaggtctcacaagttggcattatgtttaagaagctattctcatctatcggctaagataaggcaacatgttttttctcttacattgaatacagaaaatgttaattctttaaaaactttaaacagacacaatggtatctaattaaatggtatcctgaggaaaaattcagtatgggaggggttgttggtagcgcttcttcaccctcccatccccccaactcaggcaggctgaaggaatcagatgtgagactctgattttaatcatgttttttgctttgacgaanaggatcctctaaaaaccatttaaaaatgttctacagagagacagctagtaan

SEQ ID NO: 4741 - DNA, 342 bp, Homo sapiens
  I.4741 (W90248)
  misc_feature (293)..(293): n is a, c, g, or t
  misc_feature (315)..(315): n is a, c, g, or t
acggatggtctggtctggaagatctaagatggcttctcttaacaggtctagtgacttggcaggagatggccagatctgcgacttagctgggactgttgactagaacacctacatgtagcctctctagcatagccatatcagggtaactggacttctcacatggtaactatattcccccagagtgaacattccaagagaaccaggcagaggcttatgtctttgttgcctggtctcagaattcacgtagcattattactaccatactctgttggtcaaaagcagtcatgaatctncccagatttaaaggggagaggnatagacccctaccactttgataaggga

SEQ ID NO: 4742 - DNA, 386 bp, Homo sapiens
  I.4742 (W90627)
  misc_feature (45)..(45): n is a, c, g, or t
  misc_feature (48)..(48): n is a, c, g, or t
  misc_feature (49)..(49): n is a, c, g, or t
  misc_feature (51)..(51): n is a, c, g, or t
  misc_feature (128)..(128): n is a, c, g, or t
  misc_feature (328)..(328): n is a, c, g, or t
  misc_feature (365)..(365): n is a, c, g, or t
agctgcatggtatattcttaacatccttttaatcttcacaatttnttnnanagtttaacccctgatttaaaaataccataggaggtgaacatgggaaaaaaaaaacaagctgggggtctaattgcctnataacattcactattcgtcttagtgtccttttttgatgtatgaatttactcaccctatcttcagcagttactagctgtctctctgtagaacatttttaaatggttttagaggatccttttcgtcaaagcaaaaaacatgattaaaatcagagtctcacatctgattccttcagcctgcctgagttggggggatggggagnggtgaagaagccgctaccaacaacccctcccatactngaatttttcctcaggatacca

SEQ ID NO: 4743 - DNA, 394 bp, Homo sapiens
  I.4743 (W90625)
  misc_feature (317)..(317): n is a, c, g, or t
cactaaccctcatggtagttagccatacttgggcaaattgcaatgaacgctcttggaattctatgtttttcctactgatcccacagaattcaggaaaaatattccctgggaaactttaatatagcttataaactggcagattgtattttccaaatccagatcgtattttccaacaatatcttctatcccatatgttctttgccaaagttaccatgccactcccttatcaaatggtagagtctattcctctccccttaaatctgggcagattcatgactgctttgaccaacagagtatggtagtaataatgctacgtngaattctgagaccaggcaacaaagacataagcctctgcctggtttctcttgggaatgttgcactctggggggaatat

SEQ ID NO: 4744 - DNA, 326 bp, Homo sapiens
  I.4744 (W90508)
  misc_feature (16)..(16): n is a, c, g, or t
  misc_feature (22)..(22): n is a, c, g, or t
  misc_feature (24)..(24): n is a, c, g, or t
  misc_feature (55)..(55): n is a, c, g, or t
  misc_feature (63)..(63): n is a, c, g, or t
  misc_feature (66)..(66): n is a, c, g, or t
  misc_feature (68)..(68): n is a, c, g, or t
  misc_feature (154)..(154): n is a, c, g, or t
  misc_feature (209)..(209): n is a, c, g, or t
  misc_feature (214)..(214): n is a, c, g, or t
  misc_feature (231)..(231): n is a, c, g, or t
  misc_feature (242)..(242): n is a, c, g, or t
  misc_feature (265)..(265): n is a, c, g, or t
  misc_feature (267)..(267): n is a, c, g, or t
ggtgatcctatcaccncggccncncgagtacctgggaccagatgcataccaccangcctggcnaancnttttgtgtttttagtagagacgggctttcgccacgttgcccaggctgattaatattcattcaataatttcaaaatcataaaaatanacatttcttcagaaaataagaactagcgttagactttggaaggaactaaattgtnttccntaacagaattaccattnttaactttatnaacattacatattgcaatttcanangtctaaattcattaaatacaattcctctcaaaatcctagaacagtttttggtagttata

SEQ ID NO: 4745 - DNA, 431 bp, Homo sapiens
  I.4745 (W90507)
  misc_feature (19)..(19): n is a, c, g, or t
  misc_feature (64)..(64): n is a, c, g, or t
  misc_feature (237)..(237): n is a, c, g, or t
  misc_feature (420)..(420): n is a, c, g, or t
  misc_feature (426)..(426): n is a, c, g, or t
gtctactgacatggttttntgcacccttgtgaaaaatcattgaatatatttgtgtaaatctgtntctgggttctcttctgttccgttgttttgagtatctgttgctctgtcagtatcacactgtcttgattactgtagctacatagtctgacttaatgccaggtggagtctattcaccttatttttcaacagttttagatgttctaaggcttgttcctttccatgttaatttttaanagaagcttgtctataactacaaaaactgttctaggattttgaggaggaattgatttaatgaattagacttttgaaattgcatatgtaatgttaataaagttaaaaatggtaattctgttaaggaaaacaatttagttccttccaaagtctaacgctagttcttattttctgaagaaatgtgtntttttntgatt

SEQ ID NO: 4746 - DNA, 470 bp, Homo sapiens
  I.4746 (W90435)
  misc_feature (347)..(347): n is a, c, g, or t
tttaaaactgcctgatatacttgggtgatattcttccaggaatgataaaatgagacagaaatggcctttgagtgttttcaggaagggaaaatggaaaatgaaagctggactaaaaggtgttacaaaagcaaactagttaatacttccaagaaatgaatatgctaagatattgtttgctgatcaacatttattaaacatttactgtgtaccactgatctaggctcttggccagatatgagcaacaaaaagaagatagtgtagtgcttgccttccaaaatctagcacagtcctagaaagaattcaggtttcactaaggctacttagggagagagttctctaggttctangaaattaaggcaggcacccacacaaagactcagttgcaaatgggtggaaagaatgatttttattaatcagcacaatatcttaaaaatcccagtgtagccttctttgataaaagacagagtact

SEQ ID NO: 4747 - DNA, 577 bp, Homo sapiens
  I.4747 (W89196)
  misc_feature (408)..(408): n is a, c, g, or t
  misc_feature (469)..(469): n is a, c, g, or t
  misc_feature (559)..(559): n is a, c, g, or t
  misc_feature (571)..(571): n is a, c, g, or t
accaaagaaacaattgtatatgtgtttagagactcaatcacaatcaaatcttcaccgaagaagttctgtatacattaacttggctatacagcctttatccagctgtctcttttcaaatatacccagccaccccaccccccaaaaaagatgtaaactaaaaatatcataataactggaggctgacatctgaaatcctcttaaattaaagcatccaagtccatgcaacaaatatttacattaagcatagaaatgctgggaaatggctcaaaaaatctgatagggctagtcattaacagacatcttcaaactgcacaattcatactagataaaataccgtatctactaaatatctgctttctggatattcttcagagaatgtctgatgggtaatatccttatggccatggncaatcaacataaacctggcaggaatctgcgggacagagaagtagaagaggatgagagccantctggcactggtggcctgacaagctctggggacacatactctctcaggaccatcatccccctcctggctgtctcccggagaggtttgggnggaaatagaggnctgaag

SEQ ID NO: 4748 - DNA, 436 bp, Homo sapiens
  I.4748 (W88785)
  misc_feature (36)..(36): n is a, c, g, or t
  misc_feature (373)..(373): n is a, c, g, or t
  misc_feature (406)..(406): n is a, c, g, or t
  misc_feature (429)..(429): n is a, c, g, or t
cggtcgtatgggagggcatagcaaagacacggcagncgtggaacgggaagtatagcacaagctgaggaagtctggcatttgaaaagtatcgcctttaaacatgcacgtataaattcctgcctgtaaaagaaagaaaaaattttaagatgcatttataagttttagataatctggttatattttataaatctatatataagtatagatgtttactaatctagatttgtttcaaaactcaatctctgcatttgaatcaaaaataaacttttacggctgagtagcaggtgaaatgatggggaaaccagaaaacagaaactgctaattcgattaataataagccagtcacacaatttctaaactgcctctaatccanaaaacctctaccttttctaatctcatactgatnattctacgagatgacaaactccncaatatg

SEQ ID NO: 4749 - DNA, 375 bp, Homo sapiens
  I.4749 (W88665)
ctaaagtgggctgctctcccacaaaaacagcatgggaggcaggtcccaactgggcatgcatgcccagccacacactgtcagactgaggccaggactccggtctggaccttgatgtgtgtgtactttggatgtgctgagcttaggggcagtgtagataaagatgttctctaacacaagaggcccaggtcccagggtcaacactcggttttcacactgaagtccccactaataaaatggtctttcaaagtcccttatctgtatatttatctctgtggtcccaacaaaggagtgaggaagtattttgggattcgtgaataaacataccccctggctgaaaacaatcacaagcaccttggatatcaccccaaatgggct

SEQ ID NO: 4750 - DNA, 398 bp, Homo sapiens
  I.4750 (W88960)
  misc_feature (62)..(62): n is a, c, g, or t
  misc_feature (235)..(235): n is a, c, g, or t
  misc_feature (239)..(239): n is a, c, g, or t
  misc_feature (258)..(258): n is a, c, g, or t
  misc_feature (308)..(308): n is a, c, g, or t
  misc_feature (335)..(335): n is a, c, g, or t
  misc_feature (377)..(377): n is a, c, g, or t
  misc_feature (386)..(386): n is a, c, g, or t
  misc_feature (393)..(393): n is a, c, g, or t
atatccaagtggtgcctggaacaccagtgggacagaaccgttcactcccctggaaaggggantgaagccagggagccaagtgatctagctcagcagatcccacccctgcacatgtatcccagaacttaaagtataatttaaaaaaagaatgagtacaaaatgtcagatatatatcattgatgaatccttccaaaagaagagctgtgagtcagaattttatatgtcttatctctcngganatgaaaatactctgtagcntctatatctattattcagatcttgaatgtatggaagtagggcatttcctngcagataaacttgcttttgctttgacnctgtgtttgaaatagaaaatcattaatttgtaggcaacagtntcagaattngaaacanttaac

SEQ ID NO: 4751 - DNA, 458 bp, Homo sapiens
  I.4751 (W88432)
  misc_feature (121)..(121): n is a, c, g, or t
  misc_feature (358)..(358): n is a, c, g, or t
  misc_feature (445)..(445): n is a, c, g, or t
  misc_feature (451)..(451): n is a, c, g, or t
aacaaatgttgcaaacgaaaatcaccctgccaaagcaaatcatacagtttcacaaaagtagtaaatttggcactcgttcacaactgacagtgcagattattcagacaatgtgttctgtttntattgtttatgttaaattgttatcattatgtttcccataattacctagattgaacattagtacaacctacatttcaacggacttaagagtcttttatcatcttaaaatgaaagtgataaattaaaatttacccctaaacgtgctactgctactttaacaccattagtctgtactgctctgtgttctaagggcccctggatatttattcaggaatgtgaatcagcttcagtcctcttnattgcgcccaaactctccaggagacaggcaggagggggatgatggtactgagagagtatgtgtcccagagcttgtcaggacacagtnggcagnattgctc

SEQ ID NO: 4752 - DNA, 447 bp, Homo sapiens
  I.4752 (W88420)
  misc_feature (50)..(50): n is a, c, g, or t
  misc_feature (63)..(63): n is a, c, g, or t
  misc_feature (65)..(65): n is a, c, g, or t
  misc_feature (382)..(382): n is a, c, g, or t
  misc_feature (427)..(427): n is a, c, g, or t
ccggaatgagacgagacgatgaaaaccttaagtgtggaactgcgtctcangccagtgttctgntngaaagagtcacccctagtcacccctcgtgccctaggtcggccccgctgtccccaggggcaggggctgccgtatgctgggtcagcttaaagcgatgctccacaaacttggacaactttctagtcgttctcacatcagtactttgggaaaatacaataagggtgaaatactagaaaaatgttcacgtgcttcgatgccatgtaatggtaaactgctataaaagttttcaaaatcttggcaatttctgctgcagacagcacgcgtttcccagaactgatgggccacactgttaatattaccttagtgcagcgcttctcanagtgcccccacctgccgcagcagcagcagcatcaccacctgggtngggcgttcccccattactga

SEQ ID NO: 4753 - DNA, 483 bp, Homo sapiens
  I.4753 (W87905)
  misc_feature (340)..(340): n is a, c, g, or t
  misc_feature (359)..(359): n is a, c, g, or t
  misc_feature (416)..(416): n is a, c, g, or t
ataggcctttgaggtctgggattctagcagtctcctttctggtttccttccctccccatcatcactccagtcccccacaaatccatgtgtctgggctaaaagagatgttggcccaaaagagatgttggcccttaactggtgagttgatgtagacaggacctgtgatgcttcctgaatcagtctgtgaggcattgctagtgaatggtatctgtggttgatttcctgagtgagcccttcccatgagagtgtctcctcgagtgtccccacaggccgatctttcatttgtttctgctttacctctggcttcctggaacagttctgttatgtgactttatagcangcgctgaagagctggatgngtaagcctttctgagacacagaggcttggggtttttacgtcagtggcccttgtaggncaaagggagtgaaaagtaaaggaattgagataaaatgctgtcctttgccaaatttgtgggtttctgg

SEQ ID NO: 4754 - DNA, 355 bp, Homo sapiens
  I.4754 (W87804)
ttcggtgtttgtgtctttatttggagaccaggagacagattacagcttaatgagaggaacaacgactcaagtgatctgatgggaagggtgagtttcctggcccttaggaagcaacagatgtgatttctaatcaacaaaaactagtaagtctcggaacttttcagacaggaagctgagaggctaccaaaactaaaagtgaaagtgtctgccatcaatgtgtaagtctaaattacaaataaataattaataaagcccctaacaggggttacaaaatttgtatgactgtaataaagcacagaatataaaatctgaaaagcttaactacgctgggctttttgcaccccattctctgaga

SEQ ID NO: 4755 - DNA, 529 bp, Homo sapiens
  I.4755 (W87747)
  misc_feature (529)..(529): n is a, c, g, or t
aggtttgaggggggatgctgtcatgaaaaggaactttcgcttttcaggttatgtatgtatagttttctgaactggtatcacaaccacatgctgcttctgtgtaacactgatttggtcaaaaagccctgttcctcctgagaatcaccaaattgcttcccaaagatgctatatccttcacaccaaacttaaatcactggctactgagaatatgcagtctttgcgcacaattgcgtcttctgtctgcccctcccgcaggtcccagacacaatttcttcatggcttcttcagcctttccaccctcagcctctgtctccaaattgtaacccattttacatgaccacacagggacacatcatcattctttatggaagaaggtgagatagaaacaaataatgaggtgttgattgattgaatttcctgaatcctagaccttaggatcttgaaatggccccttttcctgctacgatagcccatccaatgccttccggctccaccggctcctctggagagctcaaactcatgaataacn

SEQ ID NO: 4756 - DNA, 518 bp, Homo sapiens
  I.4756 (W87548)
tttaaatagggacaccataatgtttaactggtataggtgctgaaggtctagttatcaacatctatcagcttgtctctgtaggtgggcaaactttaaataactagtttttgtaccctgattttcttttcctcttaaagtagatactcattcttgaagacaatctgtttctttcaatgctaatcgtaagtgcttataaccacttgtgacatgttctctacccaccgatccactaaaaatgatgagagtttcgaagattcgggtcatgtcttacgttgcttcttcagagcctagcctggtcccaatgaatgggtgcctgttggttgctgaattgaaagcttctaaggctgggcatggtggcccatgtgtgtattctcagctactcagcctacttaggaggctatggcaggaggcgcttttgagcccagggtgtttgggaattttagtgtgcaatgagttgctcctggtgaataaccactgcaactaagcctgggtgacatagcaagacccatctctaatgt

SEQ ID NO: 4757 - DNA, 523 bp, Homo sapiens
  I.4757 (W87449)
  misc_feature (492)..(492): n is a, c, g, or t
  misc_feature (507)..(507): n is a, c, g, or t
acatagagatgggtcttgctatgtcacccaggctagatgcagtggttattcacaggagcaatcattgcacactaaaatcccaaacacctgggctcaaaagcgcctcctgccatagcctcctaagtaggctgagtagctgagaatacacacatcgggccaccatgcccagcctagaagctttcaattcagcaaccaacaggcacccatcatgggaccaggctaggctctgaagaagcaactaagacatgacccgaatcttcgaaactctcatcatttttacgtggatcggtgggtagagaacatgtcacaagtggttataagcacttacattagcattgaaagaaacagattgtcttcaagaatgagtatctactttaagaggaaaagaaaatcagggtacaaaaactagttatttaaagtttgcccacctacagagacaagctgatagatggttgataactaagaccttcagcacctataccaggttaaacntttatgggtgtcccnaatttaatctcgtgcc

SEQ ID NO: 4758 - DNA, 329 bp, Homo sapiens
  I.4758 (AA235576)
tactgttctaatttactgtattttcacagcttgttgttatatctgttacaatacatctcacaccactgtatttttttcacaatttttttggctatgaattttaaaaatcaacttgtcaaagcccattcttaaatatcttgcagcctggtgcggtggctgatgcctgtaatcccagcactttgggagggtgaggtgggcagaacagcctggccaacatggcgaaacctcatctctactaaaaatacaaaaattagctgggcatggtggggcgcacctgtaatcccagctactcgggaggctgaggcaggagaatcacttgaacccgggag

SEQ ID NO: 4759 - DNA, 222 bp, Homo sapiens
  I.4759 (AA074258)
  misc_feature (4)..(4): n is a, c, g, or t
  misc_feature (176)..(176): n is a, c, g, or t
  misc_feature (186)..(186): n is a, c, g, or t
  misc_feature (196)..(196): n is a, c, g, or t
  misc_feature (218)..(218): n is a, c, g, or t
taantctggaagctgtagtaacatatttatgaagttaaatatttttagttcagcaaaaatggaaataattgtcattacaagattacttaagtcttttctgtcttttatgatcctatcatgatcaactttaaatttagtgaagtcatttgagatatgcttaagttgaactaaagacntattaattgncccaattccnggtaaatatgggggaattagantccc

SEQ ID NO: 4760 - DNA, 255 bp, Homo sapiens
  I.4760 (AA074227)
gctttctgccttctaaagtgcaacagtatatatcttgtagaactgtgggaggagagaagataatttttctaccttactccatattcttacttcaaactattttgaatagaggttcactgagccattgctgatagactgtgcatagctactagctgtcacactattgtaggttttttgtagagattcatagggaagtgaatgtaaccaggaataaaggctctcactttagctctgggactatgcaagtggatcttg

SEQ ID NO: 4761 - DNA, 453 bp, Homo sapiens
  I.4761 (AA062557)
cgagaccagcctggctgcttagcatggtgagaccgtctcccaagtagctagaattataggcacctgccaccatgcccagctaattttgtatttttagtagagatggggtttctccatgttggtcaggctggtttcgaactcctgatctcaggtgatccgccagcctcagcctcccaaggtgtcaggattataatgtgagccactgtgcctggcctggggttaatttttgaaagcaagttataaaatggaaagcactataattttactctttgaaaatacatcgagaaaatactggaattatgtgcatcaaaatggatggtgagagtatagctgtttttaaattttctttgtacttgtatttctcaacttttatagtaataatagctaacatttactgagaactaagcacttacatatggtattttattcgaaaactctttgaggtaaatatta

SEQ ID NO: 4762 - DNA, 421 bp, Homo sapiens
  I.4762 (AA063164)
taaaaacagctatactctcaccatccattttgatgcacataattccagtattttctcgatgtattttcaaagagtaaaattatagtgctttccattttataacttgctttcaaaaattaaccccaggccaggcacagttcttactaaagcatgaaacattttccctttccttttctacttattccttataattaaaataataataatacatgtgcagggagatggtagacagtagtgacagagatgcatagactttagccaccgacctgaattcaacacttgattccagcacttagtggctgtgtgaccatggatgagttacccttctgggttctagtttctgaaactccataatgaaaataatagtaatatttacctcaaagagttttcgaataaaataccatatgtaagtgcttagttc

SEQ ID NO: 4763 - DNA, 245 bp, Homo sapiens
  I.4763 (AA054208)
ttttggacagattagctagagttttgagacatgtcttttcacaaacaacatcgtaattcacccgagtttccatttttgttcctctaaagcagaacaaaaatctgaaggcagtttcaaatctgagagcagaattatcatcaatgttaaacatttttccccaatgtcatacccagttaagtactttgcaaatatagcctttttatgaatccaaagcattctatttatttttcataaaaataataatg

SEQ ID NO: 4764 - DNA, 416 bp, Homo sapiens
  I.4764 (AA054173)
  misc_feature (69)..(69): n is a, c, g, or t
agacagtgttttgcaatgttgcccaggctggtctcgaactcctgggcttaatcgatccacctgccttgnctcccagtgttgagattacaagcatgagccaccacacctgtcctgtctcatgggattgttagtggctttgtgtttccaaaccaaaaaaaaaaaaccacccagctaaattaaattcccctccacacagaacctggataaagttgtagaacagtggggcaatctcagctcattgcaaacttcacccaccaggttcaagcgattctcctgcctcagcctcccaaagttcagggattacaggcctgagccactacacctgggcccagaggctcttttctaagttttttttttttttgtcaatgtacaacatgctaaagagggaaatgggccccaataaatggttgatgttg

SEQ ID NO: 4765 - DNA, 403 bp, Homo sapiens
  I.4765 (AA054138)
  misc_feature (209)..(209): n is a, c, g, or t
  misc_feature (353)..(353): n is a, c, g, or t
cccctgctgcgtgagaggtgtcggcggctccgggccgggatcgaggtggcggggcgagggaaggaggtggggcgcaggctgcattgcgcttctgtccggggccctgggtcagaggggccggcggacgaggcctcgggtccgggcttggggagggggcggtctgcggggtcggattgagggccgggaacccgcggagtcttgcccctggnaccctgtggggccgatgatcccgagccacctgtccacacacccccttcccccagtgccctgcgttgggtccagctggccccagacctaggcctttcccagcctcggcgatttataagtttattttgaaaacgttttgatttttngtgttaatgattcttttactaccgccgtgcaacagttgtgtaaatgtggg

SEQ ID NO: 4766 - DNA, 282 bp, Homo sapiens
  I.4766 (AA054128)
  misc_feature (146)..(146): n is a, c, g, or t
  misc_feature (157)..(157): n is a, c, g, or t
  misc_feature (181)..(181): n is a, c, g, or t
  misc_feature (204)..(204): n is a, c, g, or t
  misc_feature (250)..(250): n is a, c, g, or t
tttgcaccatttgcactccatccttgggcaatagagagactccgtctttaaaaaaaaaaaaaaagagtaacaaggtctggaaataaatacatcaaatttgctatagaaacagcaaatattagaaacttgaggatgatgaaatttcntccttctaccntttccacatttttccaaattcacnatataatatttataataactggngaaaactttaaaacaaacaacattttcctaatcacctctatcaggncatagctatgagttccgatcaaacacaggacc

SEQ ID NO: 4767 - DNA, 605 bp, Homo sapiens
  I.4767 (W92113)
  misc_feature (3)..(3): n is a, c, g, or t
  misc_feature (5)..(5): n is a, c, g, or t
  misc_feature (559)..(559): n is a, c, g, or t
  misc_feature (577)..(577): n is a, c, g, or t
  misc_feature (602)..(602): n is a, c, g, or t
cgntntcagctgttaataaatatgtgggtaaatatctgtttggggctctcagctctgaagactgtgagacccccaatttcccacttcacacctctatatttctgtgtgtgtgtctttaattcctctagcaccactgggttagagtctctctgactgacctggtcttggcaagtggtgtccatttgtgggggctcatatccaggtcgaagggtcaccagagcaatggttggaatgggaaactagctggaggacacccgagtactcttaaagcaatccctgtcgtgcgtaagaacggggagctcggaagtgtcagggtaacaatgggacaggtatgggggtctggttcatttcaccttggaactttttcacactgggtaattgaggaggaacaagagtatagcgaagtaacagaagaggttacagagcatgtttattttgccagctaaagctaaaagcagcaaaggaaggaagagattcatccctacccttcttgcaccccctcccttattaattttgatgaagatgaccccccaaaatctttcctttcctggaggacacnggggccaaaagtaattgnccccagttgactgtttcgagcaacncct

SEQ ID NO: 4768 - DNA, 331 bp, Homo sapiens
  I.4768 (W91984)
agtatgaatagcttgtttaaattctttgagtaatttaaaagggaaaggctcaaatgtagctataatatttccctgttgatctggggggtgtattctaacagggaactgccaagcctctaaatcaccctcttgtctagcttgctcgaattcctgcctgaatagaactaagagctgtcacatgaggcgctgctcgaacagtcactggggcaattactttttgcccagtgtcctccagaaaagaaagatgtggggggtcatcttcatcaaaataataaggagggggtgcagaagggtagggatgaatctctccttcctttgctgctttagcttt

SEQ ID NO: 4769 - DNA, 565 bp, Homo sapiens
  I.4769 (W95003)
  misc_feature (464)..(464): n is a, c, g, or t
  misc_feature (502)..(502): n is a, c, g, or t
  misc_feature (515)..(515): n is a, c, g, or t
aagcattcagagcaacagaaaatgtaagagcatggtgaatgatccctacagccagagcttgaagcaaatgtaacttttttggcaggacagtcttatcttaaatgataacagcatcaaggaatgagggtttattttctatacaatccccttttctttataatccactatgggttcctttgtcacaactttgattttagagctacatgtgactgtgtctgtcatgtagctcagatgaggaaattgaagctcagaataaatgatttgcccaaaattacatggtgatctcagttcagttctagactgaactgagactagaactctacttcttttcatcctgcataatgtcatgggatctcctgtttgaatttactgctagggcttacctaggaccactgtcctaaatacctctgaagataatggaatgagagtgaggttttaattagtttgggctaattggttatggnattaccgcatgtagtataacctgaattttaaaggggtnaagaaaaaccccnttaaagccttgagtagtaatttttttccggatccttaataaattaaaaaa

SEQ ID NO: 4770 - DNA, 544 bp, Homo sapiens
  I.4770 (W95002)
  misc_feature (120)..(120): n is a, c, g, or t
  misc_feature (361)..(361): n is a, c, g, or t
  misc_feature (409)..(409): n is a, c, g, or t
  misc_feature (513)..(513): n is a, c, g, or t
  misc_feature (522)..(522): n is a, c, g, or t
ggcacgagcaatacctgacaaatactaattaaggaattcaaaggccaaggaatgaacttatgcctctgacttgctttaagaaatgactatatccacaatggaatggaaaatgccaggtgnctagtaataaagtctttcattacattattaaacaatgtgttgacaatactttagggcctgtgcacaagccacacacattcctggtttttcttttgtggaaaagaaaaaaaaagtactccccagggtccattaaataggcacgacatagacaattcttcgaactctcctagagaaagctaggtgagaccctattctcacagtcatctgaacaacaataagcacaagatttaaaaaaattaanaataatttttaaaaaagataaaatagcataaaacttcaaattaaaganaccatttcatataaaatgggacactagcaattaataagtacctatattttatttgcctgaattagatgggacattacttaaaaagtagatgatccaatcatggnttaagcagnatgagatgcctggtaggtatat

SEQ ID NO: 4771 - DNA, 404 bp, Homo sapiens
  I.4771 (W87266)
  misc_feature (380)..(380): n is a, c, g, or t
gctactttctggcaagcagccatcaaattatcccctttgtgtttttctgccttctagaaaactgaaaatgctgtctgatatggtcactttttcagtttccgtctgatacactctaggattagcagggaatttcatggaatgcagttgacagggagatcaataactgtagaagccagaagttctaggaagataggaaaaaacttaattttgcaggcagtaggaggggagacgtcctgaatactgggtatggtgcttgattctgtgcatatcatctcatttttccatccacaatagccagaagtaggtactacttacctttacattttgatgaaatcgtggctcaacttaatgacttgccatggggtcctagtacctacttntttcttatagtgtgatactatgtc

SEQ ID NO: 4772 - DNA, 456 bp, Homo sapiens
  I.4772 (W86832)
cctattatgtttttatttttatttttaaatttgtatttccatgatgttgtatctaaacacatatattgttgctatttgacacatactgaacaattagatatgcattatggattgtatcttttattattataaagtatacatcctcatttctcaggggctttgcttttttctttttgtcactgccctatatttatcctctaggcccaccttcttcactctctgctgacacattagctcagctgaccccacatgtggctctagggtaggaaggtgacccaaaaacagccagtgagagtttcagtagatgcttcatagagcagacaggagattttaattgatgggaaataagatctttttgttgttaatgttgctaacctggcagattttaggcctacagctactgaggtactttgctcccacttggaggcagcctgcctgggaaagaaacccacagat

SEQ ID NO: 4773 - DNA, 432 bp, Homo sapiens
  I.4773 (W86767)
  misc_feature (321)..(321): n is a, c, g, or t
  misc_feature (330)..(330): n is a, c, g, or t
  misc_feature (411)..(411): n is a, c, g, or t
  misc_feature (432)..(432): n is a, c, g, or t
gctatgaaaaaaagacgattgccttgctttctccaggaatcttaagaataaagccaatatttctaattctaaacttaccagagatcttcttccaaatggagaaccattttttctaatatgacttgattcgcagtccctgaattcctgcactcatttgatgattcagtcattacatgtcagattgtgaaccagacactgagcccagggcaggaagaaaaatgggctcccatggaggatacacggaggttgggcacagtggatggtgggagggaacgcagataataaatggaaaaacaactatctttattaaaataagataanaacagtcanaaataatacaaagcatataaaaccaggttaagatggataaacatggaatgccgaaaacttgctttaagaaaaggttagcanggtatttgaagctcctagctn

SEQ ID NO: 4774 - DNA, 352 bp, Homo sapiens
  I.4774 (W86563)
  misc_feature (347)..(347): n is a, c, g, or t
acaccttggtcattctgactggctgtacaaatagctctcctggctccccaggggacatgttcatcaagatttaggccacaaagtagggccgtttgttccccctcttgcccctctccccagtcagctgacgacagctccagtgttgcagcccagcaccccaggatggatgacacacctccctggtgctccattgtcagggctctctgatttgcagaaacaggtaatagtttctgtctatggtttggaatcatgaagtagggcaagacaagtttctttggagttaaatttagggcttagaatccaagggggtggctgagtaaagctgtattttaactcctaactccaancctca

SEQ ID NO: 4775 - DNA, 171 bp, Homo sapiens
  I.4775 (W86709)
  misc_feature (164)..(164): n is a, c, g, or t
agttgacttttgctgatggagcctctctgaagggcaaattcaaagtacagctgggtgctgcagcactgcgagtcgagacttgtggctgtggttatgaaggagcctcgtcagctatgcctttagcccctggtgaagcagtgccagtcacactttgccagtcaaanggagaga

SEQ ID NO: 4776 - DNA, 329 bp, Homo sapiens
  I.4776 (W86677)
  misc_feature (304)..(304): n is a, c, g, or t
gagggtggagtaggagttaaatacagctttactcagccaccccctggattctaagccctaaatttaactccaaagaaacttgtcttgccctacttcatgattccaaaccatagacagaaactattacctgtttctgcaaatcagagagccctgacaatggagcaccagggaggtgtgtcatccatcctggggtgctgggctgcaacactggagctgtcgtcagctgactggggagaggggcaagagggggaacaaacggccctactttgtggcctaaatcttgatgaacatgtcccctggggangccaggagagctatttgtaacagcc

SEQ ID NO: 4777 - DNA, 410 bp, Homo sapiens
  I.4777 (W86575)
aaaatatcagctttattaccaaggatgactgtgctgcaggaggcggctcagtgtgaagaactacgggtttcctgatgttgaagctcagaattagccacactgaccttctcagtcatgcatgatgccaggaaaatcacaggcttccattctacagtgaagggcttggaggagcaggcaataatctgtagtccccagctacttggaggcagtggacgggaagatggcttgagcccacggagttccaagttgtagtgcactatcatcatgccactgcatctgcactccagcctgggtgacagaatgaaactctgtgtctccattccccgtggtttgcttggtttggtttgatttgggtctggtcttactactgctgcctctccgtttgactggcaaagtgtggactgggcact

SEQ ID NO: 4778 - DNA, 478 bp, Homo sapiens
  I.4778 (W86549)
  misc_feature (2)..(2): n is a, c, g, or t
  misc_feature (12)..(12): n is a, c, g, or t
  misc_feature (30)..(30): n is a, c, g, or t
  misc_feature (32)..(32): n is a, c, g, or t
  misc_feature (34)..(34): n is a, c, g, or t
  misc_feature (37)..(37): n is a, c, g, or t
  misc_feature (120)..(120): n is a, c, g, or t
  misc_feature (346)..(346): n is a, c, g, or t
anttcggcacgnactataattagaacactnanantgnaagtaaaaacgttgtttataagtaattacttgtaaaattttaagtgaaatgtttttcttcaggcatgtcttcaggcttttganaagttcacaaataagaaaacctgtcctctctgtagaaagaaccagtatcaaacccgagtgatacacgatggggcccgcctgttcagaatcaagtgtgtgaccaggtgaggacgccaggcccgtttggcgctaagcagacacagatcaggctatgacaactaacttgttttttgaatagtgggattttatctctcttcttggccaccataatttccccagggccttngtacatgcacagggcttataacaactactgaagtattggttgacataagagtcatcataaattaagtcattttcaaatatctgtgttttagaatccaagcctactggagaggatgtgttgttagaaagtggt

SEQ ID NO: 4779 - DNA, 471 bp, Homo sapiens
  I.4779 (W86472)
gtgtctgaagagataagtttatttaaacaattagcacaaaatggccaaacagaagttgctttgatttaacctaattttatgatttaactagaaaagaaagtctagaagtatttgaacatctaggttggaaagccaactaaagttaaacaggatttttagcagcatctcacccatttttaaaaagccctcaaagtgaagtaagtctcaaagttttaccacctctgttagccttcctgaccccaagtgaaccacccgcacggagaccatatctggagaacataatgatctttacctacctttttttcaaagaatttttttcttaacttggcatctgtgggaggtactgttttcctcaggtttctgtaccactttctaacaacacatcctctccagtaggcttggattctaaaacacagatatttgaaaatgactaatttatgatgactctatgtcaaccaatacttcagtagt

SEQ ID NO: 4780 - DNA, 406 bp, Homo sapiens
  I.4780 (W86357)
tgtctcatcgacaaaactggcagaaaaaaacgctttcgtatatttttcctgctgggtggtcagaaggaaaggccgtgaagctaaaggtctcccactgagacgctgttctgcaaggagccgacctcacgtgccgccgccgccagagaagagagcacctgttcatctcggctcactgtgaggctgagctcagcgctggcaggcgaggggccgcaagcatcccccacagccaccgagagggcatccctgcagggaaatcatatccgacatgcctgtgcccacagcagacttaagactgcctctaaaatgtccatgaagccattgtccagtagagcttgttagttttaacaccagtgaagtattaccttttggttaaaaggatgcatgtgtataggtgtatgtgtgtgcg

SEQ ID NO: 4781 - DNA, 473 bp, Homo sapiens
  I.4781 (W86242)
  misc_feature (323)..(323): n is a, c, g, or t
  misc_feature (351)..(351): n is a, c, g, or t
  misc_feature (357)..(357): n is a, c, g, or t
  misc_feature (366)..(366): n is a, c, g, or t
  misc_feature (383)..(383): n is a, c, g, or t
  misc_feature (389)..(389): n is a, c, g, or t
  misc_feature (418)..(418): n is a, c, g, or t
  misc_feature (455)..(455): n is a, c, g, or t
atacttaataattttattacatgtacacacaaaatcatagcaaaatatgatatattttataggatttttttgtcttttcatgatgccatcgaatatttgcaaatgcctaaatggaaccctttcttcattctccacacaagtccaaaaacacaaacacacacgcacacacatacacctatacacatgcatccttttaaccaaaggtaatactcactggtgttaaaactaacagctctactggacaatggcttcatggacattttagaggcagtcttaagtctgctgtgggcacaggcatgtcggatatgatttccctgcagggntgccctctcgggtggctgtggggggatncctgcnggcccctcngcctgccagcgcttganctcagnctcacagtgagccgagatgaacaggtgcnctcttctctggcggcggggggcacgttgaaggtcggntccctggagaaaacgttc

SEQ ID NO: 4782 - DNA, 522 bp, Homo sapiens
  I.4782 (W85706)
  misc_feature (499)..(499): n is a, c, g, or t
aactcacaaaaagtattcatttttcctcatgattttaatgggcttttggtagttttaataaaacagtgttggggctctgttttatttataacatttagagcttatgttagcctattaatgtcatttatgctgaataaagtggaaatatttcatggaatgtggaataatgtaagtcatttttatatctttctaaataaaaaggattgattaaacagaaatacctataaactattcttttggaacttccgtaatgggactatcagggtgtcttgcacctagtaagtgttcaatatgtactccttgaatatgtaaatataaataaacccagaactaggccattaggtgaactagacatgaggtgaaatggagcattcgtggtgggtgccgctcttctgggagaacaatgggcagaagttcatttgtccctgtctataggacttttggtgagacaggatcacctccatgcattggcaggaagaaggaagacagagtgccccanaccagcttataagtattgtgcac

SEQ ID NO: 4783 - DNA, 385 bp, Homo sapiens
  I.4783 (W84866)
tataacatttatccatctatgctgcagaaaaactcgggaagcacaaagaaaaaaattaaaatcacccatcatcttgcctccagagagccagacatacacacacacgtatgtgtatgtaatgttggatagaaactgtgatggttatcctatgcattgttttagaaaataaaaaggaggtgatacatggtacagaggcagaggtgcctagtggttaccactcactctgtgaacttgggaaaacacgcatgtagtttttgaggatgaaatctatgaacatatgtgtctggcacatcgtttatgctcagtaactattacccagcatttttattaaacactttccagtgtctctatgttagtctgttttgtactgctatgaagaaatacc

SEQ ID NO: 4784 - DNA, 429 bp, Homo sapiens
  I.4784 (W84816)
  misc_feature (1)..(1): n is a, c, g, or t
  misc_feature (25)..(25): n is a, c, g, or t
  misc_feature (27)..(27): n is a, c, g, or t
natgtttttattgctgcagccttgnangcgaatccagaagtttcgggttggctttgaggtagccattctgttgtctgcacatctaacgtgcattcccatgcctgtttaaggtggacttttaataatctaaatggccccagtagaagacatttcagtaaattggggaatgcctatacaatgtaacagcatgtagccatgtcaaagtcccgttgaggaagaatacttagtgactgacatggtttgcacctgttccctccaaacctcatgttgaaatgtggcctccagggttggaggtgggcctagcaggaatgtttaggtcatgggggcagatcccttatgaatggctttgtgtcgtcctcacagtagtgagtgacttctcactttgttaagttcaggcagagttgggttgtttaaagagcctgggaccac

SEQ ID NO: 4785 - DNA, 617 bp, Homo sapiens
  I.4785 (W80624)
  misc_feature (577)..(577): n is a, c, g, or t
  misc_feature (605)..(605): n is a, c, g, or t
tagagacaaggtcttactatgttatccaggctggtctccatttcccctgctcaagcgatcctcccgccttatcctacctaagtgctggaattataggcatgagccaccgggttaggctatttttctattttaacaatgatttctccctcctcgagtaatagtcctgaaattttttattcctgaaatttaattcatgttaggttcaagatgtgccaaatcgatagaaattgcagatagctttggtggttcacatttggaatagattatagagaacactctctgggaaggtgaaatggtgttcacttctcagaaagaggctctgtgttgcaaagggatgcacagtttccgtgaattatcctaatcagcacttcaggcaagtcagctgtaaaacacactggacttcatgaagctctgagccaacttgtggccagtaggcactaaggtcagagacacatatggaaaagcacatgatgaagcctctgggattggagtagtgcctacagccctgcccaaggcctggatatggggattgaaggcaaagaagatcatgggtccggagcccccgttgaggaatggncctcccccagggaatggggcccattggngaaggtaaaccc

SEQ ID NO: 4786 - DNA, 644 bp, Homo sapiens
  I.4786 (W80363)
  misc_feature (458)..(458): n is a, c, g, or t
  misc_feature (488)..(488): n is a, c, g, or t
  misc_feature (516)..(516): n is a, c, g, or t
  misc_feature (522)..(522): n is a, c, g, or t
  misc_feature (549)..(549): n is a, c, g, or t
  misc_feature (570)..(570): n is a, c, g, or t
  misc_feature (592)..(592): n is a, c, g, or t
  misc_feature (623)..(623): n is a, c, g, or t
  misc_feature (636)..(636): n is a, c, g, or t
ccttttcgtctagttgatataattttatgtaatctctttggcagtttagtcaggacaatgaaacttgcataacagtggccagctctcccatcaacatttagaagaaaacttacctagatagtttgtgcctttgtgaatcaacacaggacatttataagccaataaatcccattttgaggatgccaggagtttagtttctggtcagccactaagtgtttctgggtagttttacttcaaacgtttaaaaagaaaattttttaatactcagatacattgtaagtaacccaagagcaaatttctatcgtcacaatttcggggaatcactgttttcatttccctccagggacagctgttccatcattgcaactattcaaatacagagggaatgaggttcccctggtgaactaaaaagcaaatctaacagagacaaagcgttaactggccgtaatgtaaaaggncttcaaatcaaataaagctaatccaaggtncaccaaccccagaatggctttaaatacngattgnaatggtgggaatatttgccgaaactgncctgggaaaccttccgggccngggaacttaacccgggttccgnactccggctaaagggcccgcctaaggttatncccggaagggccnattaatcg

SEQ ID NO: 4787 - DNA, 428 bp, Homo sapiens
  I.4787 (W80385)
  misc_feature (419)..(419): n is a, c, g, or t
attcttgttggatgcagtagtgtccttcatttcttctctgggtgtgtgcagtttccccatatacattaaagcacccgaaaacagggccctctagcttttcgttcttttgtatgtcccccaaggcattaaaaaagtagagattggctttacacatcccaccccaaggctttattcttaagtgtgaaactcactgtctgacagcttcagggatgtggacttgatccagggatatgagttgggccagctcccccaggctgtccagaaaacggatttttcgtgtgaatttggaactgaaaagagagaataaatcaactgtgttttgtattgggagaagggttcccaaaaatccttgcaaagaaaaatgtagaagtagagtggttaaggctagaaagaatcaaggtggagaaagatcttaatcntgattttga

SEQ ID NO: 4788 - DNA, 394 bp, Homo sapiens
  I.4788 (W78939)
ttggaagaatctcttatatatatccacaaaattagaatgtaatagggtgaggccaaatggaatattggagaatcagttttcatttgttccacggcaccccatctttcctgtgatacccgtgaaacgtctgcacaatacttataagctggtgctggggcatctgtcttccttcttcctgccaaatgcatggaggtgatcctgtctcaccaaaagtcctatagacagggacaaatgaacttctgcccattgttctcccagaagagcggcacccaccacgaatgctccatttcacctcatgtctaagttcacctaatggcctagttctgggtttatttatatttacatattcaaggagtacatattgaacacttactaggtgcaagacaccctgata

SEQ ID NO: 4789 - DNA, 435 bp, Homo sapiens
  I.4789 (W78742)
ggcacgagcttcctgatcgcttaatggttaaattcttcaacaaaataaatttattttcagaaatagctcctccttcaaagtcttcagaataccactcactgcttagtatttatagttgtgctggtttggagtgggatatggcgtcactttcagtgctgatcccaaaagggtgtcctccacccagatgactgtctgtaaatctccattctagaaacaaaccaagatagctggggttagaaaggtaaacactaaaaacattgaaggtaacagcacagaaatggggtgacaggtcaaatcaaggaaaacctagtctccttcaattgccaaagacaggaagaagcagtgcaaaagaattcacaaatgaactcagcaaagcaaagagaacttcctgaagcccttcacttctgctgtaagtacagtatgtgttttaccttg

SEQ ID NO: 4790 - DNA, 440 bp, Homo sapiens
  I.4790 (W79032)
  misc_feature (46)..(46): n is a, c, g, or t
  misc_feature (180)..(180): n is a, c, g, or t
  misc_feature (217)..(217): n is a, c, g, or t
  misc_feature (249)..(249): n is a, c, g, or t
  misc_feature (363)..(363): n is a, c, g, or t
  misc_feature (371)..(371): n is a, c, g, or t
  misc_feature (396)..(396): n is a, c, g, or t
  misc_feature (410)..(410): n is a, c, g, or t
  misc_feature (438)..(438): n is a, c, g, or t
acatcttcctaatctacatctgtgccaaccctcattccctggcgcnatggaccatcacatgcccgccattgttcctgatctctgctgctcatgacctgctctccagcgctccttctcatgctcacattccagttggcctgacctagataagtggaggtttatttgaccccaaaaattaancttctacaaacgaatataatagtgtccattacagagnataaacttagtgcgggtcccatttaaagcagnaagttactgaaagccctgagtttaaagtttccagggcctgaaaagttttccaatgacagttttcctgcataatattaccctacaatttcaaacctgttatttaaaagccattcnttgtggtntgttgtactttggattaagccttantttgatttgaagtncctttacaatacggggcagttaacgccntg

SEQ ID NO: 4791 - DNA, 353 bp, Homo sapiens
  I.4791 (W78983)
  misc_feature (295)..(295): n is a, c, g, or t
  misc_feature (308)..(308): n is a, c, g, or t
  misc_feature (335)..(335): n is a, c, g, or t
  misc_feature (342)..(342): n is a, c, g, or t
gatcatggagggctaaataagatgggtggagctgagattacagctgacaggaatggggattagacccaagtaccagataaatctagaaactagagaagtgaatgaaggaagttacagtacagaaaacagttccacgtgatcttcacacataaaggtggaagaagaaataggatgatctcatgttgtttttcaggctacggaaaaacctgcgagccctggtggttgtccatgctacatggtatgtgaaagcatttctggcactgcttcggcccttcatcaggtactaagttcttcngggaaagggatcnccttttcccctttccccccaatttttnaaaatcngggttaaagat

SEQ ID NO: 4792 - DNA, 473 bp, Homo sapiens
  I.4792 (AA063595)
  misc_feature (456)..(456): n is a, c, g, or t
  misc_feature (467)..(467): n is a, c, g, or t
ttttttccataataagtaaaatttttatttgaaatccttaagtcatccatacatttttcataaagctttttataaacatctttaaccattctagcttttccaggtagaattaacagtaacaagttatttgattataatcacagtctgcataatgtaaataagttgaaattagttggcaagtaattgatattcacaaatgaaaacgttggttgtcccgtagtaatcaatgcatagctacagctggttgaaggggaccaaatccattgaagaggcgatttggttccattttaccagctctagcaaagcattgtagtgctgctagtttggaatccaaaacagttaaatgcttttcattgggtaaaattacagtcatggaccttctacaagtgttagaaattatcataccaatgcttcagtcactgaatgtcaaattttccattttgaagtcactttccnactgttttccngcgctg

SEQ ID NO: 4793 - DNA, 410 bp, Homo sapiens
  I.4793 (AA046461)
  misc_feature (242)..(242): n is a, c, g, or t
  misc_feature (296)..(296): n is a, c, g, or t
  misc_feature (399)..(399): n is a, c, g, or t
tacaagatttattaacaaccacatagttaatagaagcattttattacatcagcactaatatatgcaacaacagacttcatggcaaaggtgtgcgtttcaaaataggtggccatcttgaaattcataatgttgaataactacaaacgtacatttattttaatcaatataaaccctataacataaaaatttgaaaaggtttgaacctttaaaaaaaatctctatttcatttggtaattgatttnccatactgaaaaactcatttttaatgcaaataacgtttcttatggctttgccangctgctaccatatctcattacttctactcagagtgggttattttctaaagaaggctttgcaagctgagtgtgtgtgtgtataaatgtattgcaaaggttttangggcaaaaata

SEQ ID NO: 4794 - DNA, 621 bp, Homo sapiens
  I.4794 (AA046741)
  misc_feature (458)..(458): n is a, c, g, or t
  misc_feature (558)..(558): n is a, c, g, or t
  misc_feature (569)..(569): n is a, c, g, or t
  misc_feature (581)..(581): n is a, c, g, or t
  misc_feature (592)..(592): n is a, c, g, or t
  misc_feature (606)..(606): n is a, c, g, or t
  misc_feature (613)..(613): n is a, c, g, or t
  misc_feature (618)..(618): n is a, c, g, or t
aaaatttaaggattgggaatattcctcttgtgccaattaaaagcagtcgttggaagcagaaatgaatttaaagcattacacgttatcatggcggccttgctttttccttccagtattcatccaattgcgctgatctcctgcatccacatcttgcgtaatccacaaagcagctatggtccagggctgcaaaatcgtcctgcctgattcctttagaattcatactacctcagaggagcaaacctaatcccctcagcctaatcctacctgtttaggatcatctaaacttgtccttcagaaagcttgatcagtttaaaattgctttctaaatagaaatgaaatacgtgatatgagagaggttaaaatactgcttaaaaagggaaacactcaatttagtaattcggttgcctagatgaaatcgagtggctattgatccgtgatgttctagatttttaggacangtacttcctattctttggaaaataatcatccagtttgatgcccattacaaattttcctgctatgaaagaaatctatgcgcggcagttttgcaataaaacnacccgggttcnaatgggagactnggtgcggcgtncgtgagagtccttnacaacgnacttncac

SEQ ID NO: 4795 - DNA, 510 bp, Homo sapiens
  I.4795 (AA036675)
  misc_feature (422)..(422): n is a, c, g, or t
aagattagaaaaagaaaaagaagcaaagatgttgaaaacaaagacgtacattgatcattccttaatgcagtaatgtgttaaaaggaaaagatttttaaaccattaagcgcaggaaaacagtaggaaagtgacttcaaaatggaaaatttgacattcagtgactgaagcattggtatgataatttctaacacttgtagaaggtccatgactgtaattttaccaatgaaaagcatttaactgttttggattccaaactagcagcactacaatgctttgctagaagctggtaaaatggaaccaaatcgcctcttcaatggatttggtccccttcaaccagctgtagctatgcattgattactacgggacaaccaacgttttcatttgtgaatatcaattacttgccaactaatttcaacttattnacattattgcagactgttgattataatcaaattaacttgttactgttaattctacctgggaaaagccagaatggttaaggatggttta

SEQ ID NO: 4796 - DNA, 177 bp, Homo sapiens
  I.4796 (AA026304)
  misc_feature (176)..(176): n is a, c, g, or t
aactggagaccatggtctcgtgctctagtcatgtatgctccctctccttgcctggttgatctccttagcaactcatggtcttttactctagcagatggatgcctcatctagagactctggaggagctgattttctgtctgcccacccactaagggccttcaagctaataaagagtng

SEQ ID NO: 4797 - DNA, 412 bp, Homo sapiens
  I.4797 (AA026649)
  misc_feature (326)..(326): n is a, c, g, or t
  misc_feature (335)..(335): n is a, c, g, or t
  misc_feature (354)..(354): n is a, c, g, or t
  misc_feature (381)..(381): n is a, c, g, or t
  misc_feature (390)..(390): n is a, c, g, or t
  misc_feature (408)..(408): n is a, c, g, or t
ttttttttgaactgggaatctcaatttattgaaaatacatgttttggttgacaaagatctgaagaacagttctgtacacttctgaagattaagaacaagttttaaaaatttataaaatacccgtgaatagggaacttatagcaatattttacctatttataataatcacccaaaagataacttggaacatcaaaaggaaaaatgctcagatttcagtttgataactgtaccttcagcaagtatttctgagtgcctaatacgaagagggactgcttcatgtgtttgagatacactgtgaataaaacagacaaaaattcctgccttgntttctatcnttattaagcttgaaggccntagtgggtgggcagacagaaaatcagntcctccagngtctctagattaggcatnccat

SEQ ID NO: 4798 - DNA, 461 bp, Homo sapiens
  I.4798 (AA025573)
  misc_feature (133)..(133): n is a, c, g, or t
  misc_feature (209)..(209): n is a, c, g, or t
  misc_feature (213)..(213): n is a, c, g, or t
  misc_feature (215)..(215): n is a, c, g, or t
  misc_feature (221)..(221): n is a, c, g, or t
  misc_feature (229)..(229): n is a, c, g, or t
  misc_feature (232)..(232): n is a, c, g, or t
  misc_feature (233)..(233): n is a, c, g, or t
  misc_feature (238)..(238): n is a, c, g, or t
  misc_feature (240)..(240): n is a, c, g, or t
  misc_feature (241)..(241): n is a, c, g, or t
  misc_feature (242)..(242): n is a, c, g, or t
  misc_feature (243)..(243): n is a, c, g, or t
  misc_feature (247)..(247): n is a, c, g, or t
  misc_feature (254)..(254): n is a, c, g, or t
  misc_feature (259)..(259): n is a, c, g, or t
  misc_feature (260)..(260): n is a, c, g, or t
  misc_feature (266)..(266): n is a, c, g, or t
  misc_feature (278)..(278): n is a, c, g, or t
  misc_feature (283)..(283): n is a, c, g, or t
  misc_feature (285)..(285): n is a, c, g, or t
  misc_feature (286)..(286): n is a, c, g, or t
  misc_feature (289)..(289): n is a, c, g, or t
  misc_feature (301)..(301): n is a, c, g, or t
  misc_feature (302)..(302): n is a, c, g, or t
  misc_feature (337)..(337): n is a, c, g, or t
  misc_feature (342)..(342): n is a, c, g, or t
  misc_feature (433)..(433): n is a, c, g, or t
gaggccgggcaggatccggcggcggggtctgggcagggagaggccgccgcaacagtcaccgaggtggggtggggaagagaggttcgccgcggcttcgaggcctgcgccctggccagtggcagccacagcgggnccccccgtgtctgcagggcagagggcgcacagtccggggccccctagctcatctccccatctcacccgccggcctngaangntttttngggatagngcnnccctntnnnngttnttctttngaagnntttttntgccgggccggnaattnannganttaacaaaattnnagttcaaattaggttttacaaattttaaaaaaagnaagcnttgacaaccactttaacctgttaaaaggatactacaaggagtggcagagaattcctcaattcttctgcttctgtgctgccagggctaaaanctgcttgaacctcgtgccgaattcttgg

SEQ ID NO: 4799 - DNA, 188 bp, Homo sapiens
  I.4799 (AA025536)
  misc_feature (27)..(27): n is a, c, g, or t
  misc_feature (124)..(124): n is a, c, g, or t
  misc_feature (181)..(181): n is a, c, g, or t
cagcttttagccctggcagcacagaancagaagaattgaggaattctctgccactcctgtagtatcctttaacaggttaagtggttgtcaagcttcttttttaaatttgtaaacctatttgaancaatttgtgactcctgcattccggcccggcagaaagagctcgaagagactgcagagnctggctc

SEQ ID NO: 4800 - DNA, 383 bp, Homo sapiens
  I.4800 (AA009562)
  misc_feature (369)..(369): n is a, c, g, or t
ttctgttttgctggaacttttaataaggaatctcaggttagactttccaagtctctcaagaatacaaagagaacttgtctggcttgtttcaactttgcctgcaatatctgtagactttgatgaattattcttttcttgatgtccccaatatacctgaggtctgccaggaagtgacctttcttactcatctgttgccagattctgtcacttttccagggatcccaattgtagagcaggcagggtgtcccagagatcccatctgggtcaccgaaactgtaggggcagaataataattttctccatatcctttctgtgtttccggctgggacttcctgttggtttcttagacgtctacaccggcccatagcnttgtctccgccacc

SEQ ID NO: 4801 - DNA, 398 bp, Homo sapiens
  I.4801 (AA009561)
  misc_feature (36)..(36): n is a, c, g, or t
  misc_feature (60)..(60): n is a, c, g, or t
gtcatgaaagggcagctgcacctcaggccatggtgncggagaaaaggctatgggccggtngtagacgtctaagaaaccaacaggaagtcccagccggaaacacagaaaggatatggagaaaattattattctgcccctacagtttcggtgacccagatgggatctctgggacaccctgcctgctctacaattgggatccctggaaaagtgacagaatctggcaacagatgagtaagaaaggtcacttcctggcagacctcaggtatattggggacatcaagaaaagaataattcatcaaagtctacagatattgcaggcaaagttgaaacaagccagacaagttctctttgtattcttgagagacttggaaagtctaacctgagattccttattaaaa

SEQ ID NO: 4802 - DNA, 377 bp, Homo sapiens
  I.4802 (AA021381)
tgtgcaagtaatccttaaaattgcaattgtattaggtgttaaaataaagtttttaaaaaattacttgtatttatactttacatacttaataatgaaaatttctgaattccaattaactttcaactttcataatctaaaaagaatcagagacccaggacacagaatactgtgtaatctgtgatgtctttaatgatgtttagagtttgtgatataagaatacaggaaagacatttttaatgtaaatttgaaatgccaatgtattttttttaagaacatcatctggcttttccttcagtctaaaagacatgaaagaagtgtaagtatagcagttaaaacgaaaataatggttatgggtgttttgattggaggcaatgtag

SEQ ID NO: 4803 - DNA, 406 bp, Homo sapiens
  I.4803 (AA021367)
  misc_feature (252)..(252): n is a, c, g, or t
  misc_feature (255)..(255): n is a, c, g, or t
  misc_feature (350)..(350): n is a, c, g, or t
  misc_feature (376)..(376): n is a, c, g, or t
  misc_feature (396)..(396): n is a, c, g, or t
ctgtcgcccaggctggagtgcattggcgcgatctcggctcactgcaagctccgcctcccgggttcaggccattctcctgcctcagcctcccaagtagctgggactacaggcgcctgcaaccatgcccagctaattttttgtatttttagtagagacggggtttcgccgtgttagccaggatggtctcgatctcctgatctcatgatccacccgcctcggcctcccaaagtgctgggattacaggcgtgacanccngcgcccggccaagagctccttcttaaccgcacaggcatgtgaggcccagaagacttggctcttgcaccaagaaaggaagggattggttttccttnaaccaacccttttgggttggctaacnaatttccttggtcctttgangaaaaggttg

SEQ ID NO: 4804 - DNA, 272 bp, Homo sapiens
  I.4804 (AA021303)
  misc_feature (206)..(206): n is a, c, g, or t
  misc_feature (209)..(209): n is a, c, g, or t
  misc_feature (212)..(212): n is a, c, g, or t
cattttggcatttaattaagccatttattgcttcaaatgtgtcaccatgaacattttgatatacactccatagcagtaaggcctcaattttcaccacctgtgaactgtgaacccacatttggatattttgtcccaactgttacatgagttttgtacaacagagattttgaatgtgtattttataataccaaaaatacttactatgnccnccnccccttggtgtaaatgtcacaaagaatattaatagtttggccacatttttgggggggtga

SEQ ID NO: 4805 - DNA, 325 bp, Homo sapiens
  I.4805 (AA021252)
  misc_feature (4)..(4): n is a, c, g, or t
  misc_feature (12)..(12): n is a, c, g, or t
  misc_feature (21)..(21): n is a, c, g, or t
  misc_feature (24)..(24): n is a, c, g, or t
  misc_feature (30)..(30): n is a, c, g, or t
  misc_feature (34)..(34): n is a, c, g, or t
  misc_feature (57)..(57): n is a, c, g, or t
  misc_feature (66)..(66): n is a, c, g, or t
  misc_feature (244)..(244): n is a, c, g, or t
  misc_feature (250)..(250): n is a, c, g, or t
  misc_feature (293)..(293): n is a, c, g, or t
  misc_feature (318)..(318): n is a, c, g, or t
gcgnccgcggtngaagcggangtngcggcncggngcaccggggccgggccggggctngcagcgcanggccattgggggcctgacgagccggcagcacgcgggcgtggaaggaggtggacatcccgtctaattccgtgtaccgctacccgcccaagtccggaagctattttgccagccacttcattattgggaggagagaagtttgactcaactcatcctgaaggttacctgtttggagaagggnaaaaanagcgatctgaactttctgggggaacagaccagtttgtgtttcnttacgccgccccaccttccccaagnaacccgt

SEQ ID NO: 4806 - DNA, 362 bp, Homo sapiens
  I.4806 (AA019220)
  misc_feature (312)..(312): n is a, c, g, or t
ttttttcactttatcttttctactttattacttcaaattaacaaccacgataaagctcaaaaaagtccaatatttacacaggaaaaaagtacaaaattccccccaaagttcttcagttttttttttttcagttttttaaattacaaagtaataaaaagctttgctctttaattaaaaaaaaaaggaaaaaggggaaacagaggtaaataaattaggaaaacacacacacggagaaaacaaacaaaaataaaataaaataaaaacaaaaaggtgttaactaggaaggatgggttaatccaaaacccagccctngactccaggctcctcctcagaaaggtggaaccagggagaggggggacccc

SEQ ID NO: 4807 - DNA, 289 bp, Homo sapiens
  I.4807 (AA019219)
  misc_feature (109)..(109): n is a, c, g, or t
  misc_feature (255)..(255): n is a, c, g, or t
  misc_feature (267)..(267): n is a, c, g, or t
  misc_feature (286)..(286): n is a, c, g, or t
taaaaaaaaaaaaaaaaaaaaggcaaaaataaaccactcaaaagaacaacaaaaaaacccagcacaaaaccgacgatggagtttgtttctttgatttctttgccaatgnaagaagatgagatgccctcagcactgaggattcttgcccccttgtggtgcccgctgcccccaaccttcaggctgccagatgctcccctgacaacaccaggctacaggagccagacgccagggcctgcccggcctcctgttcctgcncccacccaccanctgcctggataggaacggntcg

SEQ ID NO: 4808 - DNA, 410 bp, Homo sapiens
  I.4808 (AA018958)
  misc_feature (402)..(402): n is a, c, g, or t
ggtggagatggggttttgtcatattggccatgctgatgtcgaactcctgacctcaggtgatctgccttcctcggcctcccaaagtgctgagattacaggcatgagccaccacatcaggccgacaatattactttcaaataataacctttatgtgtcagtctgtttgcttttacaaatttctgtcactggttttaagcagtatgatgattgtgtgccttacaattttttcttcacatttcttatgattagagtttgtcgagtttcttgaatctgtgtgttttagatttcactaaatttcgaaatattttggcaattatttcttcaataattgcctcccctttttttataattacagttacttattaggccggtatggaaagttggtttgacacccccaaatcnggtggttt

SEQ ID NO: 4809 - DNA, 316 bp, Homo sapiens
  I.4809 (AA018938)
  misc_feature (24)..(24): n is a, c, g, or t
  misc_feature (25)..(25): n is a, c, g, or t
  misc_feature (245)..(245): n is a, c, g, or t
  misc_feature (267)..(267): n is a, c, g, or t
  misc_feature (306)..(306): n is a, c, g, or t
taagataaggtctcgctgtgttanncaggctggagtgcagtggtgtaatcgtggttcactgcagcctcaacatcccaggctcaagtgatcatctcacctcagcctcacaagtaactgagaccacaggcacatgccatgaatttctgtatttttaggagagacgaggtttcgccatgttgtgcagactgttgtcaaaatcctgggctcaagccatcttgcctgcctcagcctactaaaagtgctanggattccaggcattgaagccanctgcaatctaagctcaaattctctttttacttccctaantttagcacaa

SEQ ID NO: 4810 - DNA, 388 bp, Homo sapiens
  I.4810 (AA018863)
  misc_feature (56)..(56): n is a, c, g, or t
  misc_feature (127)..(127): n is a, c, g, or t
  misc_feature (147)..(147): n is a, c, g, or t
  misc_feature (342)..(342): n is a, c, g, or t
  misc_feature (367)..(367): n is a, c, g, or t
  misc_feature (376)..(376): n is a, c, g, or t
gagcgggtggcggaggcgattgaagctgctggcccagcatgtggtgcgcgacccangttgctgtggtggccttttgcgccgggcttttggtctctcacccggtgctgacgcagggccaggaggcggnggggcggcaggggcacctcntgaagtatgtaaagaattcttgaaccgattctacaagtcactgatagacagaggagttaacttttcgctggacactatagagaaagaattgatcagtttttgcttggacaccaaaggaaaagaaaaccgcctgtgctattatctaggagccacaaaaagacgcagccacaaaagatccctaagtgaagtcactcngcccaattgagtgtgcatatgcctngcaattgangattttgtgaga

SEQ ID NO: 4811 - DNA, 478 bp, Homo sapiens
  I.4811 (AA019552)
ttttttttttgaagatataattcaaaataaagtagatgctttacaaatgataatcgagctgccaaaattcagaaacaataattactttgaccattcattacaccacagctttgtattctcacctttcagttacatcatatatatatttccttaggaaccactaactctctgacatatcagcttcccagctgaaaatgcatttacctctgcagcatttagaattaaaaattatgttttcgatgtatattttcagtctgaaaatgtctcctccactccctgaaaacaaccccagccagtaaatgcaattctttgaataaataaggtgggcttttttgtttgttttttcatatattctggcagggtcttgctctgttgcccaggctggagtgcagtggcaggatcacaggctcactacagactccacctcctgggctcaagcagtcctcccacctcagcctcccgagtagctgggactaaa

SEQ ID NO: 4812 - DNA, 477 bp, Homo sapiens
  I.4812 (AA018655)
  misc_feature (55)..(55): n is a, c, g, or t
  misc_feature (58)..(58): n is a, c, g, or t
  misc_feature (60)..(60): n is a, c, g, or t
  misc_feature (63)..(63): n is a, c, g, or t
  misc_feature (149)..(149): n is a, c, g, or t
  misc_feature (306)..(306): n is a, c, g, or t
  misc_feature (323)..(323): n is a, c, g, or t
  misc_feature (328)..(328): n is a, c, g, or t
  misc_feature (348)..(348): n is a, c, g, or t
  misc_feature (355)..(355): n is a, c, g, or t
  misc_feature (368)..(368): n is a, c, g, or t
  misc_feature (400)..(400): n is a, c, g, or t
  misc_feature (417)..(417): n is a, c, g, or t
  misc_feature (460)..(460): n is a, c, g, or t
  misc_feature (469)..(469): n is a, c, g, or t
gcggccgaatctccgcacgcgtagggccgctcgcccgttgtgcgtgcgcaggttngcnancanggctgcagttgcgcacgaaggccttgccgcaagtcgcgaggattgtagggcttctcgcccgagtgcaggcgctcgtgctggcgcantcaggagcagccgcggaaggtctttccgcactcggagcagccatagggccgctcgccggtgtgcgcgcgctggtgttgcaccaggcccgagcggcccttgaaggccttttcgcacagtgggcacgcgtagggcttggcgctgctgtgagtgcgctgntgccggctcaaggttcnaagcngctggttgaagggccttgcngcactcnggggcacgcgtanggctttctcagccggtgttcaacgcgccggtngctccaacgaagttgcnaaaaacagcccgaaagcctttggcgcaagtcggcgcacttcgnaacggcttntcccccgg

SEQ ID NO: 4813 - DNA, 260 bp, Homo sapiens
  I.4813 (AA018654)
  misc_feature (240)..(240): n is a, c, g, or t
  misc_feature (245)..(245): n is a, c, g, or t
  misc_feature (257)..(257): n is a, c, g, or t
gtagtgtgtgtgtatctcagcaaagtccactgttgtaagcagaataatggccccctgaaagatctgcacgtcctgtttcctagaacctctgactatgttacttcacaaggcaaaagaactgagtgtgatgaagttttggatcttgagatggggagattcctggattatgtgtggttggcctagtgtgatcacaagaggcagaagggtcagaatcctataaggagtataaggagattttgncaacnaacccaggaagnggg

SEQ ID NO: 4814 - DNA, 500 bp, Homo sapiens
  I.4814 (AA018509)
  misc_feature (419)..(419): n is a, c, g, or t
  misc_feature (445)..(445): n is a, c, g, or t
  misc_feature (499)..(499): n is a, c, g, or t
caggcatttattgagcatctactgtgtgccagatgcaaagaagacagtgggataactgggcaaggagcattccaggcagagggaacagccagtgcaaacatgggagatgcgggtgcagtgagaagcagcagaggagaccaggagttgaggcgactgcagagcgattgcagagctcatagacgtgatgaagaccagctgggcactgcagcggctctggcttctgctgtgagggacggggagctgtggagactccctctgtttggtcccatttccatattgctgagacctgctgcatgctctctgtcctgctcagagccaagtacctggaatggaaggctgtgtgttctgggtggactgggggagaatgcattctttgcagaagagacaaccaggtgcttgaggcctgaagtcataaccangacctggggcactcagacaaggactnggtggccaggccagaggaagcagagctcaggggttgtgcacagaactcagaagng

SEQ ID NO: 4815 - DNA, 201 bp, Homo sapiens
  I.4815 (AA018461)
  misc_feature (99)..(99): n is a, c, g, or t
  misc_feature (111)..(111): n is a, c, g, or t
  misc_feature (125)..(125): n is a, c, g, or t
  misc_feature (164)..(164): n is a, c, g, or t
gctccaacctggccgagcacctgaagatccacgcgggcgcacggcacacgcctgtcccgactgcggcaaggcttcgtgcgtgtggcggggctgcggcanaccaggcgcacnacagcagcgagaanccttcccctgcgccgagtgcggaaaggctttcgcgagantcgcaagctcctgcagcaccagcgcacgcacacttgg

SEQ ID NO: 4816 - DNA, 447 bp, Homo sapiens
  I.4816 (AA017344)
  misc_feature (364)..(364): n is a, c, g, or t
  misc_feature (371)..(371): n is a, c, g, or t
  misc_feature (385)..(385): n is a, c, g, or t
  misc_feature (401)..(401): n is a, c, g, or t
  misc_feature (410)..(410): n is a, c, g, or t
  misc_feature (420)..(420): n is a, c, g, or t
  misc_feature (431)..(431): n is a, c, g, or t
gaatttgtctattgaagaaaaacattatgtgcagttgcttaaagttctgtagagacagtctggagcttaggttaattcgcagacactaacctcctgcagaagccacaaaaggttattacgcataacccatggttcccacaggcaggcatccttgatatggaaaattgagacaaagcaggagaaggattaaaacaggctcatcgaaaaggtcttagctgattcttagttgattcttctgttttctccacttggagtttaagtttgtactgtacttctaccattatctccttattattcctgtgggacaacaagcctgaatctaaaaatcctgaaagaatatgttgtcccacccacaagctccgantttgggnatggaaaaaccagngagggctaaaaaattnggcctatancggcctcctncccaatttgcngggaacatcttgtact

SEQ ID NO: 4817 - DNA, 418 bp, Homo sapiens
  I.4817 (AA017263)
  misc_feature (295)..(295): n is a, c, g, or t
aaaattttctttttaattctcagcaagtcaatgtacttctacagaagggtgcgcccttacagatggagcaatggttgagtgcacacctggacaagggaggggaaagggttcttatccctgatgcacatggcccctgctgctgtgtcattcccctattggctagggttagaccacacaggccaaactaactccaactggctaatttaaagagagtgacagggtgagtggtttggcgggaacaatggttatggcagagcatggaaatcggaatgagtcaggatggagcaggtaatcngaaaaaggttgctttatgaggaagttaagtttacaagtagaaggcaaagaatttgaacatactgacattactggattctttaaagagaaatttagaactcatatctaacacactgatggctat

SEQ ID NO: 4818 - DNA, 308 bp, Homo sapiens
  I.4818 (N75905)
  misc_feature (121)..(121): n is a, c, g, or t
  misc_feature (123)..(123): n is a, c, g, or t
  misc_feature (131)..(131): n is a, c, g, or t
  misc_feature (234)..(234): n is a, c, g, or t
  misc_feature (248)..(248): n is a, c, g, or t
  misc_feature (258)..(258): n is a, c, g, or t
  misc_feature (281)..(281): n is a, c, g, or t
  misc_feature (302)..(302): n is a, c, g, or t
aaaccctataggcaaattatatgtgtatcatttgtatataattgtacacaaatatgtatatatctgagctccaaaatgaagccatttgaaattttatataaaatttaggaacaaattaagngnatgtgtgngaaataattaccattattatgaatttaaaaatgcaaattaaaatgaggtggcatttttttttgtacacatcattacgcactggaaaaattaagtgatgggtgncaattgtggtccangatgaaatcnccctagggcaatcattttggcgnttaaggaaattattattatcntcccgg

SEQ ID NO: 4819 - DNA, 403 bp, Homo sapiens
  I.4819 (N71839)
  misc_feature (365)..(365): n is a, c, g, or t
  misc_feature (380)..(380): n is a, c, g, or t
gagtttgtttgaagcacacctttaactcagaattgaggttgactgataaaactcagctttaagtaaccctctgggcaagttctgagcagagatccagtgagctgaatgtcaggcaccacctccctggagtctgtatcagtcacatcagcattctcctctgattagaatcaggtttcaagggtcttgttcaagagtttattctctcctttaaagatgccacaataccgtataaggaatgtctcttggtcccaactaatctacaataagagaggagcacgtatagtcagagggcaagaaaacaaccgcagtttctaagtttcaggttatattctcttgggaacagactccttgctggagggggttcnaggaaaagggaatgnaatgggtccacctctttctaagt

SEQ ID NO: 4820 - DNA, 442 bp, Homo sapiens
  I.4820 (N59450)
  misc_feature (433)..(433): n is a, c, g, or t
  misc_feature (438)..(438): n is a, c, g, or t
gtcatgtcagtaatttatttcagggtctaacaaatattaccacagcagtttagtctcaaagtgatacaaaactgaactcagggtggttactgggtagtccctagtccaaaagattaagacacacctctaatacacacacaggctgtgttcaaggccttttccttcccatcttctggttctgtctccaccctttccaactgatagcacttcattggtgtgtgtgatatatgtgattatcttaagctagaaagtacaacagaaggagaggatggttgtcacttggggattagacagttgagaggataggaaaggagttatatccaccaatacaagcccttcttcccctcctacttagaaagagggtgggaccattggcattccttttctaagaagcccctcagcaaggagtctgttccaagagaatataacccgnactangaac

SEQ ID NO: 4821 - DNA, 446 bp, Homo sapiens
  I.4821 (N59170)
taggtctttgtaatttttattattcattaagtttcccattatagaataacataataatattgcagcaccctagaacatagagaagagaggggaaaatcattcacaatcattatagcctgacattaacagtattagcatttttgtgttttctgagccagtatttttcctgttgatgttaaaccaggctctagctataatcattatgtatgaatatttctatgcatattttataagtatctaatcttagtgtgcaaataattttctaccttttccacagtattttcttttgtaagctatatatatataattgtataggctcactaatatcatttagtggttaaataattttccatcttgtgatatcatacacatacaatgccatagtgatcactcaaaacattaatttagtgaatgaaattgaacgactcatagtggcaacatcccct

SEQ ID NO: 4822 - DNA, 500 bp, Homo sapiens
  I.4822 (N78227)
  misc_feature (321)..(321): n is a, c, g, or t
  misc_feature (351)..(351): n is a, c, g, or t
  misc_feature (500)..(500): n is a, c, g, or t
gcacaaagtagataaatgagaaagtctttcttaaaaaatgcttctttaactgtaacagcaaaactaaatgcatattttatcaaccccttatttctaattgctgtattcatttccacccttaaactatttaagcatttcatctgctgaaagtccttatatacatggtagacggaatatttctccattaatgatagatcaaaatgaagatatttaaaaattaacaaaatcaggccaaggcaggaggatcactttagcccaggaggtccagaccagcctgggcaacacagcgggaccccgactccatttaaaaaattaaaaaanaaaaaaaaacttttaacatttaaaaaattnaaattaaccaaattttcacttattccaggacacgctgggcatttggactcagtgaaaaggggcccctaaaggaaataaggctgactggatggtttccataattttcacccataacagtccctttctatccgctgccttccattatctcn

SEQ ID NO: 4823 - DNA, 338 bp, Homo sapiens
  I.4823 (N77984)
  misc_feature (3)..(3): n is a, c, g, or t
gcnggcacgaggtaatctggctcttcccaaaattatggtgaccacgttgtcattaatataattggtaacaggtatttggtctgcaacatgtttgtgggttttgttgttgctgttgtttgagaaagggtgtccctctgtccagcccaggctgcagtgcagtaagtgtgatcacagcttgttgtagcctcaacctcctgggctcaaatgatcctcccacctcagcctcccgagtacctgggaccacaggtgttgccactacacctggctaactttttaatttttttgtggagatgaggtctcactgtgttgctcaggctggtcttgaacaccccgtggct

SEQ ID NO: 4824 - DNA, 408 bp, Homo sapiens
  I.4824 (N77676)
  misc_feature (317)..(317): n is a, c, g, or t
tgaaagccgctggatttccaacagcctctgtgtgtcacactaaaggagacaacacagcttctctcgtgtctgtagatagtggctctgaaatcaaaagctacttggtgaggctgctgacttacctcccaggaagacccatcgctgagcttcccgtcagcccccagctattgtatgaaattggaaaactagctgccaaattggataagacactgcagagattccatcacccaaagttaagtagtcttcatcgggagaacttcatctggaatctgaaaaatgttcctcttctggagaaatacctgtatgccctgggccangaatccgaaaccgagagattgttgagcatgtcattcatctgttcaaggaggaagtaatgaccaaattaagtcattttcgagaatgacctag

SEQ ID NO: 4825 - DNA, 171 bp, Homo sapiens
  I.4825 (N76881)
  misc_feature (44)..(44): n is a, c, g, or t
  misc_feature (149)..(149): n is a, c, g, or t
  misc_feature (163)..(163): n is a, c, g, or t
tcacgcaggtcaatcttattcaagtccatttgagaagcggtganaaattggctaggcctttattgttgatgtcaaattctctttccttgctcaccctataggtccaggccagtttcctttcatcctcccaaagctattaacacgatagntcgaattttgatgnctggttga

SEQ ID NO: 4826 - DNA, 380 bp, Homo sapiens
  I.4826 (N76614)
  misc_feature (277)..(277): n is a, c, g, or t
  misc_feature (317)..(317): n is a, c, g, or t
  misc_feature (345)..(345): n is a, c, g, or t
aaataactgagagctctatttatttatgggattattaagttctgatgaaaatataaatgttgacttaatcagcatagtaaactgatgtttaaaattccatacttcatgcccacactaatttttaatgttattttcagtggttgcccgatttcccatttgatgaagaactatacagcttaaaaaaatacgttagttatatctatctagtggttgtctgttttacccaggaattcttggatatttagttttctgggtactgaagtggatgggagggggnatgattaaaggaacaaattataaaaagtttgaaccaatcntttccaattaagtatataaaagtaaacntttaagaaaaacctttttaaatggagattttaata

SEQ ID NO: 4827 - DNA, 470 bp, Homo sapiens
  I.4827 (N76597)
  misc_feature (329)..(329): n is a, c, g, or t
  misc_feature (341)..(341): n is a, c, g, or t
  misc_feature (409)..(409): n is a, c, g, or t
  misc_feature (423)..(423): n is a, c, g, or t
  misc_feature (443)..(443): n is a, c, g, or t
ccgttaatattttcagtttattttccagatatattaaaattctgtatagttccatccaaatattggaatttaggaatcatcccagataattttccctgtcctttatttctctgttccacccttcctttggtaagtgttcacattatttatcatttttctttctcttgcttataagctgttactctcctgtattaaaaccattcttctagttgctttacatatttacatattatgttaaaataaagactcacaaaatgctgcaaatatagtaccgtttacacataccactcaattttccccagtggtgatattttccattaaacattggnacaatatccacnacccagcacattggcaatgggtgaaatggggcacatttacatggacattttaaccacatggtatacanttttgggaaccacnggaaggaatccggaatggcngaaccccatcccatcatttaaaaacgg

SEQ ID NO: 4828 - DNA, 289 bp, Homo sapiens
  I.4828 (N76265)
  misc_feature (212)..(212): n is a, c, g, or t
ttttttttagagatggggttttgccatgtttgcccaagctggtctagaattcatgagctcaagtgatctacctgcctcggctcccaatgtgctgggattacagacatgagccactatgttcagccatacctggctaatttttaaaaaatgttttcaagagacagggtctccctgtgttgcccaggttggtctcaagttcctgggattactgntgggcttcaaaagtaaatgtgaaataattagttaatttctcctcagttgacaaataatgccaaaagtgataaagatt

SEQ ID NO: 4829 - DNA, 425 bp, Homo sapiens
  I.4829 (N73153)
  misc_feature (268)..(268): n is a, c, g, or t
  misc_feature (293)..(293): n is a, c, g, or t
  misc_feature (356)..(356): n is a, c, g, or t
  misc_feature (366)..(366): n is a, c, g, or t
  misc_feature (371)..(371): n is a, c, g, or t
  misc_feature (384)..(384): n is a, c, g, or t
ggttttagtgtcagagtaaaatcagttttataaaataaatagggaagtgttacatctattttctgcaaaagatggtctagaattggtgttcattccttttttaaacgtctggtagaattccgcagtgaaaccatttggacctagaggtttcgtttttggggagttttaaaactatgaattcaatttccgttgtagtttatagggctattcaatttttttcttttttgtgagacgtagtttcactcttgttgcccaggctggaagtggnaagggtggcctcctcgggtcactgnaacctctggcctcctggggttcaaagcgattttcctggccttaagcctcccgaagtaagcccnggaattacanggctncccgggtaaccanggccccaggctaaactttttttgggaatttttcccaggtta

SEQ ID NO: 4830 - DNA, 434 bp, Homo sapiens
  I.4830 (N73117)
  misc_feature (263)..(263): n is a, c, g, or t
  misc_feature (369)..(369): n is a, c, g, or t
  misc_feature (417)..(417): n is a, c, g, or t
  misc_feature (424)..(424): n is a, c, g, or t
  misc_feature (433)..(433): n is a, c, g, or t
cttagaataaaaaacttttaaagtcagcaatatgtgaaatatgtattgaatatattatgctatatttatctgagtattttggtttaacaaattaaatgcatatttttttctttttaaaaaatgtattgaccatatttatataactacttatctttttatttggtagatttaagtaaaatttattatttatttaacacttttgaatttatattatacttgaagtggtttatttatccttggccagctaccccccttgagacccngggctttctattttatagaactaattttaatgatagtttaaacatgtatacctgttactgggttattttctggttccccttaatcttgggagttcagcataatgcngtgcggattcaggataacaaggtcccccaaccttgagggttggaaaanggggaangggggggant

SEQ ID NO: 4831 - DNA, 499 bp, Homo sapiens
  I.4831 (N72790)
  misc_feature (265)..(265): n is a, c, g, or t
  misc_feature (270)..(270): n is a, c, g, or t
  misc_feature (272)..(272): n is a, c, g, or t
gcactggaagaagggacaagcagttctgtatgaaggtggaaaaggctatggaaaaagccagctgttggctgaaataaactttctggcacagaaagaagggcatagctacccttcacaggtgctttggaaacccactttattgtgaggtcctatgccaggaccttctctctaaggacgtgttgctctttcatgtcctacaaaaggaggaagaggaaaacagcaagtgggaaaccctctcagccaatgccatgaaatccataatgtntagtntntctcccctgccaactctgagggaaggccaggaactttatgtcttgcacagtcaaggatgatgtgaacttggatacagtacttctcctaccctttttgaaagaaatagcagtaagccaactgggatcaactgagcccagaggaacagttgctggtcaagtgtgctgcaatcattgggtcactccttccatatagatttgctgcagcacctcctggctggctggggata

SEQ ID NO: 4832 - DNA, 271 bp, Homo sapiens
  I.4832 (N72506)
gcaccacgtcggtgagggaccctgggaccctctggccttttagggttcagctcctttcacattctgtcattctgcttcagaccccatccctgtgcccacaccctgcccttttgtcgctataagctctgcagattctgagacccatccactgaccacagcttccctccttccccttcccttcctgcctccgccaatcctgttcctctgttcttctcctcacagacccccaagccctcaagcccaccctaatctccccactttctcctaggct

SEQ ID NO: 4833 - DNA, 395 bp, Homo sapiens
  I.4833 (N72483)
  misc_feature (326)..(326): n is a, c, g, or t
  misc_feature (379)..(379): n is a, c, g, or t
ttctaggatactattaatgaaattttaatttaattcttattttgtttattcctataatataaaagtactatctaaccttgtatgttatcttgtggcattgatgaacttctatattagctcaagtaggtttttatttatttattactttattttattttattttattattatttttttttgagacagagtctcactctgtcacccaggctggagtgcagtggccggatctcggtcactacaagctctgcctcctgggttcacgccattctcctggcctcaacctccccgagtaagctggggactaaaaggcggcctgcaactggtgnccgggctaatttttttggaattttaagtagagacaggggttcaccatattagncaggatgggtctcgat

SEQ ID NO: 4834 - DNA, 264 bp, Homo sapiens
  I.4834 (N72461)
  misc_feature (37)..(37): n is a, c, g, or t
gcggggctactcgactgctctggaggtagcggccggntcgaggagagccatgggacgggcagtcaaggttttacagctctttaaaacactgcacaggaccagacaacaagtttttaaaaatgatgccagagcattagaagcagccagaataaagataaatgaagaattcaaaaataataaaagtgaaacttcttctaagaaaatagaagagctaatgaaaataggttctgatgttgaattattactcagaacatctgttataca

SEQ ID NO: 4835 - DNA, 482 bp, Homo sapiens
  I.4835 (N59766)
  misc_feature (379)..(379): n is a, c, g, or t
ttgactaaagcaacttttttatttacagtataaaggttacaaaggtatatatgtatttatatatataatacccttaagttacacattttcattgtaatgtacaatgctgtatgttgatgtgctactcaaggggaagtgttgtttatgcatctatatttatagagtatacataaagctttttaaaattaggaacacaaatactgccctgttttacgcgttgggtttttgatttggtatccagaagatctgagacttaaatttcaaacaagacttaaaaagaaggcttgtttaaatacagggttctaaaaagaaggaaaaaacccagaacatcacatacttttaattatttgtaaaagcattattctagttttctaagtcnttatacttaaaaatgaaagcagtgtgggaaaagaatccacataagcagggtatcatcagagtttgcacagattagccaaaacaggccttccataggtagtggg

SEQ ID NO: 4836 - DNA, 399 bp, Homo sapiens
  I.4836 (N59742)
  misc_feature (96)..(96): n is a, c, g, or t
  misc_feature (259)..(259): n is a, c, g, or t
  misc_feature (304)..(304): n is a, c, g, or t
  misc_feature (320)..(320): n is a, c, g, or t
tcacaggcagtatcagactcacagtagtaccaactcaaaacagaccttcccctccgcagcattccgcatgccccacattatgctagaacctctatntgaatttttcttctagagcaaattcctagcctctcctctaggaaggggagggctggggaaagagcccttggggtcttttcaaggggttcactgaccctacaagctctaagctctctctacagctgtgctgtccaatatggaaatcatgagccactgagtgtanctgggcacttgaaatatggctagtgcaactgagaaactgaatttnttatttaatttaatgnaacttaaacagccacatatggctaatgactacaatactagaaaccagatataaaacatttccatcatcacaggaagcat

SEQ ID NO: 4837 - DNA, 330 bp, Homo sapiens
  I.4837 (N59740)
  misc_feature (17)..(17): n is a, c, g, or t
  misc_feature (20)..(20): n is a, c, g, or t
  misc_feature (21)..(21): n is a, c, g, or t
  misc_feature (22)..(22): n is a, c, g, or t
  misc_feature (28)..(28): n is a, c, g, or t
  misc_feature (44)..(44): n is a, c, g, or t
  misc_feature (45)..(45): n is a, c, g, or t
  misc_feature (47)..(47): n is a, c, g, or t
cttatagtgagtcgtanagnnnaagtanagtatatatcagtagnntngatattagtatcatttagctattaagttcttctaagaaccgtacaaggatatgaatgtcctgccaggaagtgactaatagaaagattatgccagtctctccccaacctggccatacaagtgaaggctcacttaggcaccgaggattatagccacagaggggatgttcaagaagaaccacgatgcaatgtcaatgtcctgaagatcctgaacactttcctcttcatcaccaaaacactgtacggctccagcctgggagacagagcaagactctgtctcaaaaaa

SEQ ID NO: 4838 - DNA, 481 bp, Homo sapiens
  I.4838 (N59054)
  misc_feature (1)..(1): n is a, c, g, or t
  misc_feature (2)..(2): n is a, c, g, or t
  misc_feature (19)..(19): n is a, c, g, or t
  misc_feature (27)..(27): n is a, c, g, or t
  misc_feature (28)..(28): n is a, c, g, or t
  misc_feature (52)..(52): n is a, c, g, or t
  misc_feature (53)..(53): n is a, c, g, or t
  misc_feature (55)..(55): n is a, c, g, or t
  misc_feature (57)..(57): n is a, c, g, or t
  misc_feature (60)..(60): n is a, c, g, or t
  misc_feature (62)..(62): n is a, c, g, or t
  misc_feature (68)..(68): n is a, c, g, or t
  misc_feature (74)..(74): n is a, c, g, or t
  misc_feature (77)..(77): n is a, c, g, or t
  misc_feature (78)..(78): n is a, c, g, or t
  misc_feature (79)..(79): n is a, c, g, or t
  misc_feature (82)..(82): n is a, c, g, or t
  misc_feature (152)..(152): n is a, c, g, or t
  misc_feature (153)..(153): n is a, c, g, or t
  misc_feature (174)..(174): n is a, c, g, or t
  misc_feature (176)..(176): n is a, c, g, or t
  misc_feature (195)..(195): n is a, c, g, or t
  misc_feature (274)..(274): n is a, c, g, or t
  misc_feature (451)..(451): n is a, c, g, or t
nnccctatagtgagtcgtntagagaannaggccctatagtgagtcgtattcnntnanatngnacttcnttcccnacnnnggnaccgtgtagctaggacaatagtcttagtgtttagtgggcttctagttcgctctgtttgggggagctttgnntctgctttcttccctcctctncnccctgcccttgacggtgcntgtcttcctctcgtcctgtagaaattccttgtttaaaaggctcagtagctaaagttgagcagccctgttgggggctgtntattgagtttgcggctggcttctggcacatcatttaaaaccacagtgattggaaatgggtcttggggtcaggcctccaagcatctgcctggatggcagaggatgtttgtctttatatgtatgggagtgtatctgtgtatgtcccagcacgaggctgtgcgtgcacgtgctgggtggntgagagaagcccagggtagggaacatggcg

SEQ ID NO: 4839 - DNA, 264 bp, Homo sapiens
  I.4839 (N58392)
  misc_feature (223)..(223): n is a, c, g, or t
  misc_feature (247)..(247): n is a, c, g, or t
  misc_feature (253)..(253): n is a, c, g, or t
  misc_feature (262)..(262): n is a, c, g, or t
tagcaggtcataattctacttttattcccacattttgtatctcaggcaacatgaactaaatagatccacctcagcagtggaaaaaggttttcatgaagtttttctaagccatgaaaatggaagattcactctcaaatgctgcattctattcccagtgaaaaataacaatcttatctgtcaggtagaaaaatttttgtaacgacaatctgaaaaacagggactnaaaaacaagtaggggagtttaacnttctcncacatatancg

SEQ ID NO: 4840 - DNA, 513 bp, Homo sapiens
  I.4840 (N58310)
  misc_feature (432)..(432): n is a, c, g, or t
  misc_feature (459)..(459): n is a, c, g, or t
  misc_feature (477)..(477): n is a, c, g, or t
  misc_feature (502)..(502): n is a, c, g, or t
ttcggtgtgttcattcttacagtttattcaacagatctttactgggtcttctaggggcctggcacggtgctaggtcattctcgaaaatgacttaatttggtcattacttcctccttgaacagatgaatgacatgctcaacaatctctcggtttcgattctggcccagggcatacaggtatttctccagaagaggaacatttttcagattccagatgaagttctcccgatgaagactacttaactttgggtgatggaatctctgcagtgtcttatccaatttggcagctagttttccaatttcatacaatagctggggggctgacgggaagctcagcgatggggtcttcctgggaggtaagtcagcagcctcaccaagtaagcttttgatttcagagccactatctacagacacgagagaagctgtgttgtcnccttaagtgtgacacacagaaggctgnttggaaatcccaggggcntttcagaaacatgatgaagggaatnccggaacttaa

SEQ ID NO: 4841 - DNA, 191 bp, Homo sapiens
  I.4841 (N58168)
  misc_feature (186)..(186): n is a, c, g, or t
tgagtataaagggctgggtgcagcagttcatgcccataatcccaacaccttggggactgaaacaggaagatcacttgaggccaggacttagagatcagcctgtgcaaaatagcaagaccccgtctctactaaaaatataaaaattagccaggcgtggtggtgcatgcctatagtcccagctattcnggaag

SEQ ID NO: 4842 - DNA, 140 bp, Homo sapiens
  I.4842 (N57995)
tgatgattcatttttatccattctgctgttgatggaccttcgggttacttaacttttaaaaagtatgtatctttttgtctctccagctagaatgcaagtttcttgaaggcagggaccatatactatactattttataaat

SEQ ID NO: 4843 - DNA, 352 bp, Homo sapiens
  I.4843 (N57917)
  misc_feature (155)..(155): n is a, c, g, or t
  misc_feature (156)..(156): n is a, c, g, or t
  misc_feature (245)..(245): n is a, c, g, or t
  misc_feature (282)..(282): n is a, c, g, or t
aatttcatgtggttttattaggcatcgtccattttttaaaaatgagtgtagtcagttccaattaggaatctagagcttctgtattttttttatcaacttctctttagtttttcaaaggaatcaagttttgtgttccagtatgtcaaagggtatanngaataaaacttcttttagttgacaaacattaagaaaagttaaatgtaatagacacatttaaatggtttacaaattaggggcagtccatngttttttttcttgagctggagtcttcctctgtcgccnaggctgcagtgcagtggcgtgatctcggctcactggaaacctccgcctccccggttcaagcaattccccc

SEQ ID NO: 4844 - DNA, 526 bp, Homo sapiens
  I.4844 (N57906)
  misc_feature (162)..(162): n is a, c, g, or t
  misc_feature (392)..(392): n is a, c, g, or t
  misc_feature (405)..(405): n is a, c, g, or t
  misc_feature (411)..(411): n is a, c, g, or t
  misc_feature (424)..(424): n is a, c, g, or t
  misc_feature (429)..(429): n is a, c, g, or t
  misc_feature (444)..(444): n is a, c, g, or t
  misc_feature (478)..(478): n is a, c, g, or t
  misc_feature (503)..(503): n is a, c, g, or t
  misc_feature (509)..(509): n is a, c, g, or t
  misc_feature (516)..(516): n is a, c, g, or t
  misc_feature (524)..(524): n is a, c, g, or t
aaacattgaaattttttattacaaatttaaatctaaattttactataatttaaacaaaaagcaatggctagactgaggagagccagtttcaatgcttcactaggcccccgaccagctgtgagcagatctggaagatggacggttgtgctgtcttctaaatgnaaaaattgcgcaattttgggcatttgctatcccacttactcctcacaataattatgtgagatacgtacggcagaaaactccatttttaagattaagtattgaaaaacagaaaattatttaaaaactatatcaaaagttatccccttaaaagagattatcttggaaatcaaaagagagccaaattaataatccgtcatcattaaaagggcccaggtaaaacctggggtccncctaaccggtagnccaagnggaagccatttcnggatnacatccccatttcantccccccttatcacctcctccgggccttcctggnccccctccccaggcattaaaatccnccctantaccctnaaagagtncg

SEQ ID NO: 4845 - DNA, 483 bp, Homo sapiens
  I.4845 (N57777)
  misc_feature (140)..(140): n is a, c, g, or t
  misc_feature (162)..(162): n is a, c, g, or t
ttagccaggtgtggtcgggatgtgtctataatcccagctactgggaggctgaggcgggaggattgcctgagcccaggaggttgaggctgcagtgagctattattgcgccacggcatgccagcctcggcaacattgtgagnccctgtcattcatttcattcantcatttatccataaataaataattaaatgtatacttatttatcataatatttctttattaagaattaaatgtcttttaaaaatcacgctagttttaaaagttgggattcttactttttagggatttggttataatactgtatagagtttgagtgttctgccttatgagccctcaagttataatattttatataccacatttttcaggaatgtatatatccaattataataagtctttactctgtagagtagtgctttctgtgatgatggaaatgttttatatcctgtttctagtattgtagtcattagccatatgtggctg

SEQ ID NO: 4846 - DNA, 368 bp, Homo sapiens
  I.4846 (N57775)
cacttagtcagtcaagcagtgtaatcttttttttttttttttgagacagagtcttgctctgtctcccaggctggagccgtacagtgttttggtgatgaagaggaaagtgttcaggatcttcaggacattgacattgcatcgtggttcttcttgaacatcccctctgtggctataatcctcggtgcctaagtgagccttcacttgtatggccaggttggggagagactggcataatctttctattagtcacttcctggcaggacattcatatccttgtacggttcttagaagaacttaatagctaaatgatactaataatagctactgatatatactttacaaaactcttaacatctgtcatccttttc

SEQ ID NO: 4847 - DNA, 431 bp, Homo sapiens
  I.4847 (N55272)
tccattttttaatcttcttcatttaactaaaacatacatacaatagtctacaaatcttaaatgtacagcttaatacattttacatatgtatatactcatgtaactaccacctagattaaatatatttccagtgcccctgcatctctttctggtcaatattactccaaaaataaccacttttctgacttctgttaccctagaatagttttgcctattcttgagcttcatgtaaatggagccatgtggagcccagactttttgactcaatataatatttttgagattcatgcatgttgttgcacatatcagtcatctgtccttctctattattgcttagtattccatgggtatgtatttactacaatgtcttaatccatttttctgttgataaacacttgagttatttccagttttgcaaaaagctgtttcct

SEQ ID NO: 4848 - DNA, 504 bp, Homo sapiens
  I.4848 (N54935)
  misc_feature (497)..(497): n is a, c, g, or t
ttgtggagatgaggtttccctatgttgaccaggctggtctcaaacttctgagttcaagtgatcctcctgccttggtctcccaaaatgctggaattacaagtgtaagccaatacaatcagccttaagttatttaaattttacctcttttttttttttttttaatgagacatttcattaatctttatcacttttggcattatttgtcaactgagggagaaattaactaattatttcacatttacttttgaaggccagcagtaatcccaggaacttgagaccaacctgggcaacacagggagaccctgtctcttgaaaacattttttaaaaattagccaggtatggtcgaacatagtggctcatgtctgtaatcccagcacattgggaggccgaggcaggtagatcacttgagctcatgaattctagaccagcttgggcaaacatgggcaaaaccccatctctaaaaaaaataaaaaattagatgggtgaggtagcgccngtgccag

SEQ ID NO: 4849 - DNA, 456 bp, Homo sapiens
  I.4849 (N54502)
  misc_feature (213)..(213): n is a, c, g, or t
caaggcagtcaactcaagctgtagctttaaccacagaggttaaacaattcacagtcctgttgttgctgtcagaaacccaagttacactgtacctttgtctaatcaatggtgccctagtttggtgggagatggagaggaagggacctgttggcaaggaaacagctgcttccttcctgaacaagggaaaaccagtaaggtgacagatgggcaganagaaaagtagccaaaaattgctgtggctcctgtttggcaataatttctggaactgaggcacaactgaatattttaaagtatatcaacaattgagagagtattgtttacctgagtgcgccaaagttcaacaagccttcccacacgtttcccacatttgaaaaacttttaagtttgcagtagtacaaagagcttagccttagcctatggtacagtgggcaaagactggcaaggcactgtcccatt

SEQ ID NO: 4850 - DNA, 456 bp, Homo sapiens
  I.4850 (N54485)
  misc_feature (422)..(422): n is a, c, g, or t
  misc_feature (435)..(435): n is a, c, g, or t
  misc_feature (448)..(448): n is a, c, g, or t
aagatacagagtatccttatattgcctaggctggtctcaaactcctgacctcaggtgacccacctgcctcagcctcccaaagtgctggaattaagaggtgtgagccaccacacctggcctacagcagatttatttcagtagctgaaatagttaaaacataatgattccaaaggctgagaagcatgcagaaaaaattgaatctttattgctgatgggaatataaaactgtataccacattggaaaataatttggcaatttcttttaaagctaaacacacacatacagttagttaggcttagcaattgctgtcatggcctatttcatagaaatgaaaatttatgtgtagaccaaacctgcacttgactgttcacagaaattttattttgtaatagtccagaaccgggaaccactcacatggtantcaccaggtaacngtttaataagtcnggtaattc

SEQ ID NO: 4851 - DNA, 132 bp, Homo sapiens
  I.4851 (N54085)
taaatccaagtatatatttaataaaaggtggacagtgtgtatcacacggcttgatttgtataaactgtatacactcatacatacacacaaacttgtgtatcattatatatttttctgaaaggatacataaac

SEQ ID NO: 4852 - DNA, 494 bp, Homo sapiens
  I.4852 (N53973)
  misc_feature (142)..(142): n is a, c, g, or t
  misc_feature (145)..(145): n is a, c, g, or t
  misc_feature (148)..(148): n is a, c, g, or t
  misc_feature (152)..(152): n is a, c, g, or t
  misc_feature (153)..(153): n is a, c, g, or t
  misc_feature (155)..(155): n is a, c, g, or t
  misc_feature (335)..(335): n is a, c, g, or t
  misc_feature (432)..(432): n is a, c, g, or t
  misc_feature (469)..(469): n is a, c, g, or t
  misc_feature (493)..(493): n is a, c, g, or t
gagaagcagggttgagctccctgttggccgtgcatcgacacagtggctcccctggggttgtcttgagtagaactgagcatggctgggctggcccactgctcctggcagagatcatggcggagtggtcagccccgtgccacangangangcanntngggacggcctcttgacagagcaggcaccttggccgggagctggcttaattccagctgttctccaaaggctctgcaggttagcatggcctttttaactccagacttttgtcaaaacatgaagtcagcagcatcacagccccaggcccgagggtgaagcattgggggggtcccaggtgattncatacacatggagccagataagggaagggattgcggggcttgcaggggtctatgttggggtgaaccctgttggctttatttgatctctcggtgtttnaacctcctgaggcaattgtgggaatttagatgtggcncttcggtctgagcccacggtctana

SEQ ID NO: 4853 - DNA, 356 bp, Homo sapiens
  I.4853 (N53790)
  misc_feature (243)..(243): n is a, c, g, or t
  misc_feature (248)..(248): n is a, c, g, or t
  misc_feature (252)..(252): n is a, c, g, or t
  misc_feature (258)..(258): n is a, c, g, or t
  misc_feature (260)..(260): n is a, c, g, or t
  misc_feature (265)..(265): n is a, c, g, or t
  misc_feature (267)..(267): n is a, c, g, or t
  misc_feature (282)..(282): n is a, c, g, or t
  misc_feature (284)..(284): n is a, c, g, or t
  misc_feature (319)..(319): n is a, c, g, or t
  misc_feature (321)..(321): n is a, c, g, or t
  misc_feature (354)..(354): n is a, c, g, or t
aaaacttcagtaaaattggcagacctctagcaaaactgacagaaaaggtgcaagttaccaattatcagtaacaaaacagaagctatcactacagattctccagacataaaagaggtaattagggaatgctgtgaatagctttacccacataaatgtgacaacttagatgaaatagaccagtttatccaaaaacacaaattgctacacccagccagtatgaaaaagttaatttgagcctgggcnacatngtgnaatccngnccccncntgaaattccaaaagntngctggccttggtaccaggagcctggtaatcccggntnctcgggaggctaaggcaggaaaatcgcttgaancc

SEQ ID NO: 4854 - DNA, 453 bp, Homo sapiens
  I.4854 (N53758)
cacctaaccttccttggtacaaaaattaaatctttcttaatatagaataggaagaatctgctaattcaataatactaatttcttttttgctgattaaaaaaggaatgaaaaaaatctcctcatctagtcacttcctataaaatgcttgaaatgctttgttcaccattggctttaataattccttccttcagttggtggaaaatgtatctgaatcagtaagaatctacttctgccaattcctttcaggaagacaaccttccacctactgaaatcacacctccactccaggctgtagcattcccagcctccctccttcacctcagtgggaccttgttatcctgatccgcacagcattatgctgaactcccaagataaggggaacagaaaataaccagtaacaggtatacatggtttaaactatcattaaaatagttctataaaatagaaagccag

SEQ ID NO: 4855 - DNA, 459 bp, Homo sapiens
  I.4855 (N53548)
  misc_feature (364)..(364): n is a, c, g, or t
  misc_feature (394)..(394): n is a, c, g, or t
  misc_feature (435)..(435): n is a, c, g, or t
ccttcctttcttttttattgatgcatagtagatgtacagtttcaaggtaatgcaataatctaatacattcatataattggtaaagatcaaatcagtatacttggaatatccatcaccttaaatatttgtctttactttatactagaaccactcgaattcttctcttctaactatagatctaattttaagtgcatagaaagtagaccattggattgatcctgagtagcagggaggtggatgcagggaggtggccaaaagaaaaactggacctcctcaatccaatgatcaagcccttaggcctaattttgagtgtgcaggggataggaaaacaaacatgaagcctaggagaaagtggggagattanggtgggcttgagggcttgggggtctgtgangagaagaacagaggaacaggattggcggaagcaggaagggnaagggggaaggaggggaagctgtg

SEQ ID NO: 4856 - DNA, 506 bp, Homo sapiens
  I.4856 (N53480)
  misc_feature (454)..(454): n is a, c, g, or t
  misc_feature (480)..(480): n is a, c, g, or t
  misc_feature (487)..(487): n is a, c, g, or t
  misc_feature (493)..(493): n is a, c, g, or t
ttgaggttataaacattaacttgatttaatcattttacaacataaacatatatcaaaatattacactgtagacagatatatacaactattatttttcaattaaaaatagaatttttttaaaatttaatttttctttttcaatgaatctttgatttcttcactttaaactcttaggtattaagcatacaaatgtttaatggcttagaatagttacctaacacattatatgagccaaatactaactactcctccaaactatcttttttcatagcattcttcaaatacaagattattctgtatatcttattaaaatttatttgtctgccttatctaaatattgataaaaatagaaggtaggggcatttgcctggcttcatacattccaaaatcaaagggcagttttactaattatttttacattcagtaactcatttggtctcacacagtaaacacnaatattacgtaacaggactatattcntattccncatccnaaaaatgggaaaa

SEQ ID NO: 4857 - DNA, 637 bp, Homo sapiens
  I.4857 (N53458)
  misc_feature (486)..(486): n is a, c, g, or t
  misc_feature (569)..(569): n is a, c, g, or t
  misc_feature (577)..(577): n is a, c, g, or t
  misc_feature (599)..(599): n is a, c, g, or t
  misc_feature (637)..(637): n is a, c, g, or t
atgtagccaccgattacatttcacactaaagtctaactttgtctaaatacagctaattctactaaggccatattaaatagtttgatcaagggccactatttcctctttaaactaggatttctttattccatagtgaccctaggtgactataatattttattcatctattttcagaaaactgataaaaaatgtcttcataagaacacagagatactctctatctctaaaaagaaactgtacaattatatattagctacagaaataatcccagtgctttagaaaacaaaggccactttctgtagagagctggcatacactgtgatttttttgaccaatttaatatttttcaggactaaatatcattttaatctaacaatttaaatgtaataattgcatttcacatgggcaggaaaactcaccaatttggtaaaagcaccacattctcaaatagctatgggtaagatcaaatactcatcaagggtcaangattggaatatatctccctaagcatttactttggccttaaggaaatttggattttccatggaaaatggaatggtttcctatcnaatttccnttaggaaatacctaattaaggntcctttaggttccccggtaatggcccttttaccaggan

SEQ ID NO: 4858 - DNA, 609 bp, Homo sapiens
  I.4858 (N52915)
  misc_feature (375)..(375): n is a, c, g, or t
  misc_feature (450)..(450): n is a, c, g, or t
  misc_feature (486)..(486): n is a, c, g, or t
  misc_feature (500)..(500): n is a, c, g, or t
  misc_feature (534)..(534): n is a, c, g, or t
  misc_feature (566)..(566): n is a, c, g, or t
  misc_feature (589)..(589): n is a, c, g, or t
acttttttgtaacaactttattgagatatgatttatacaccataacatttactcttttaaagtatacaaatcaatcatttttagtatattcacagacttcagcaaccatcagcaatgatctgattttagaattttcatcacccttgaaagaaaacccatacctgttagcagtcactcctcattcgctacttcctctagcccctggaaaccactaatctactttctgtctctatgaatttgcctattctggacatttcatataaatggaatcatacaatatatagtgttttatgactggcttcttatacttagctccttttctaagtccatccatgtcattgtgcagtgtatcagcacttcattactttttatggnttaataatatgccatgggtttggggctggggtgcggtggggtcacacctggcaaatcccagcactttggggaggncgaggccgggtggggcacccgagggtcaggagttcnagaccagcctgggnaacatggtgaaaccccggctccactaaaaacgcnaaatcagctgggcacggtgggacgtgcctggnatcccagcactcgggagactgangcaggagagttgcctgagcc

SEQ ID NO: 4859 - DNA, 626 bp, Homo sapiens
  I.4859 (N52545)
  misc_feature (412)..(412): n is a, c, g, or t
  misc_feature (437)..(437): n is a, c, g, or t
  misc_feature (469)..(469): n is a, c, g, or t
  misc_feature (554)..(554): n is a, c, g, or t
  misc_feature (612)..(612): n is a, c, g, or t
  misc_feature (625)..(625): n is a, c, g, or t
ctggaacaggaggctaaatttaaggggatcatatttaataaggataaatataaagtcataagcttagaacaaaaaaatcaacaataacaacaaaatggcacaggacagtgagaaacaactaggcttttaaaaaagtctatttcaaagagacatacagcctgttacagctgccaaaatcactggtatcaggtttcattaaaaacaaagtctgaatgaagaaaatgtcattctctatgcaaatcagactacatttgaatatacttagttctgagtgtacaaatttgagaggacttaaaaaatctaaggagaggccaggcacggtagctcatgcctgtaatcccagcactttgggaggctgaggtgggcggatcacgaggtcaggagtttgagaccagcccggccaacatgggtnaaaccccatctctactaaaaatacnaaaaattagctgggtcattttgggcaggcgcntggtaatcccagctactcaggaggctcaggcaggagaatctcttgaacccaggaggcggaggttgcagtgagccgagatcgtgcnctgtgcactccagctcgggcgacagtggaaagacccgtctccaaaaaaaaaaaaaatntaagggggggggnt

SEQ ID NO: 4860 - DNA, 321 bp, Homo sapiens
  I.4860 (N52384)
  misc_feature (245)..(245): n is a, c, g, or t
  misc_feature (306)..(306): n is a, c, g, or t
  misc_feature (313)..(313): n is a, c, g, or t
ttagaaaaaaatagtcttttattttgataaacatgtagatagcagtaactataaaggctagtatacttaatatgtacattatatcttttaaaggagaatctggggcatttccttgtgttatatacaataacagaatcatggtcccttcaggttattgttcttttgttttaatacatacatcttgagtttcttctgcatccttgttctccttgacatcagccactctgtcaaatctctgtattccnaagtttcttttctaagagttaattttcctgcagaaattctccctttatccaaaacctgggncaagcangtgtccaa

SEQ ID NO: 4861 - DNA, 450 bp, Homo sapiens
  I.4861 (AA152131)
  misc_feature (35)..(35): n is a, c, g, or t
  misc_feature (66)..(66): n is a, c, g, or t
  misc_feature (70)..(70): n is a, c, g, or t
  misc_feature (423)..(423): n is a, c, g, or t
  misc_feature (437)..(437): n is a, c, g, or t
  misc_feature (447)..(447): n is a, c, g, or t
cgacagcatgatccttctccttgctggtcccccanccagaacacagcctgggacatacgtgcggcnacangtgtctgttggtctcacctgagagctgcttgtcactcccacaccctctttcaaggagaagctgtcagcattgtccttctgcagcattcaacaggggccaggcattgggttagggctgaaaacactgatggagagccatcatctttgccttctaaagggcttggactgtgataagaaggtggacacttgaagcggctgcaggaccggcattccagtgctggaggggtgtttagtcctccatcagctcagagaagtaaaggcacatttattggcagggaaaacccaaggagggcttctcaggagagacacacattttgactctggggggaaaagtggtccatagtaccatgtacnaaggtttaaattgncttaataccnttt

SEQ ID NO: 4862 - DNA, 358 bp, Homo sapiens
  I.4862 (AA150124)
  misc_feature (348)..(348): n is a, c, g, or t
tggcatttgaaaaaatgtattagcaaattaaacctttgtacatggtactatggaccactttcccccagagtcaaatgtgtgtctctcctgagaagccctccttgggttttccctgccaataaatgtgcctttacttctctgagctgatggaggactaaacacccctccagcactggaatgccggtcctgcagccgcttcaagtgtccaccttcttatcacagtccaagccctttagaaggcaaagatgatggctctccatcagtgttttcagccctaacccaatgcctggcccctgttgaatgctgcagaaggacaatgctgacagcttctccttgaaagagggtgtnggagtgacaa

SEQ ID NO: 4863 - DNA, 740 bp, Homo sapiens
  I.4863 (AA149653)
  misc_feature (446)..(446): n is a, c, g, or t
  misc_feature (481)..(481): n is a, c, g, or t
  misc_feature (491)..(491): n is a, c, g, or t
  misc_feature (529)..(529): n is a, c, g, or t
  misc_feature (540)..(540): n is a, c, g, or t
  misc_feature (555)..(555): n is a, c, g, or t
  misc_feature (577)..(577): n is a, c, g, or t
  misc_feature (588)..(588): n is a, c, g, or t
  misc_feature (614)..(614): n is a, c, g, or t
  misc_feature (637)..(637): n is a, c, g, or t
  misc_feature (651)..(651): n is a, c, g, or t
  misc_feature (667)..(667): n is a, c, g, or t
  misc_feature (678)..(678): n is a, c, g, or t
  misc_feature (685)..(685): n is a, c, g, or t
  misc_feature (691)..(691): n is a, c, g, or t
  misc_feature (697)..(697): n is a, c, g, or t
  misc_feature (706)..(706): n is a, c, g, or t
ttttttttttttttagtgtaataattttattaataaaacgaacccatagggttcaaacaagcatacaaagtaattttttttcctgtgggttaaattgttacatttttaataataaaaataagaaagctttcatagttaacttaccaaaaacataacgcttgcctattgtttcttactgtgcaaaacaaaaacaaagttttgcccacagaaggattttgtgcaccaaaacatgcacattttcaatttcaaaatttctgcatcaaaatgaaaattccaaggccacgtttttgttttttcaaactaaagaagagcaagaggggaataaccaagcaaataacagcagctacatttttaatcttcattcccaggtattttctgtttcaatgtagaattctccacattcataaaatgatatcttcaacctactgcttacagtcagatatggncgtatctttcaataaggcagtcacacctttagcantccctaaggnctacagagaagtttcattcatttcacgggacactcagnttatccataangggatagacatcctngcccggccgattctgggcccgnggccaattccnaagggggcgtttaatcgggaaccagncaagcggttccggggaatggtancggcccattccccnaaatagggccggagcnaaatgtaaccngggggcnaagggngggcancccataatnggtgggccagccgttccattgggaaaattggcca

SEQ ID NO: 4864 - DNA, 561 bp, Homo sapiens
  I.4864 (AA151563)
  misc_feature (559)..(559): n is a, c, g, or t
ctaggattgtcttatcacctttattagataaatcatgaagtgtccctgtgaaattgaagtgaaactatctctgtaggacttaagagaatagctaaaaggtgtgacttgccttattgaaatgatactggcatatctgactgtaagcagtaggttgaagatatcattttatgaatgtggagaattctacattgaaacagaaaatacctgggaatgaagattaaaaatgtagctgctgttatttgcttggttattcccctcttgctcttctttagtttgaaaaaacaaaaacgtggccttggaattttcattttgatgcagaaattttgaaattgaaaatgtgcatgttttggtgcacaaaatccttctgtgggcaaaactttgtttttgttttgcacagtaagaaacaataggcaagcgttatgtttttggtaagttaactatgaaagctttcttatttttattattaaaaatgtaacaatttaacccacaggaaaaaaaattactttgtatgctgtttgaacccatgggttcgttttattaataaaattattacccaagnaa

SEQ ID NO: 4865 - DNA, 483 bp, Homo sapiens
  I.4865 (AA136155)
  misc_feature (1)..(1): n is a, c, g, or t
  misc_feature (232)..(232): n is a, c, g, or t
  misc_feature (473)..(473): n is a, c, g, or t
naaagaggaaaaatagaaactgccagtcctcttaggaattaggcccagaactggcaaagcaagattgtggcatatcttgctggttcaagcaatgagaggtcagccgagattcaaaggactccatagattccacctttcgatgggggagtgacatacaagtacatatatagaaggcaggaattgatggtgggccccttggagataagctaccacaaaccacaaggaaattttntagttaatatagctttgtaaacacataatatagttttaaatagatgaggttccattatttttagtaggttaaaatccatgcacctaaaaaatatgtctaaatgtatagaaagccaattttcagacataaattcaggtgcagcaggaacaccagaaagttgtattagattctgaagttgtctccatggaaaaaataattacagaccaaatacctgagtcactttaaactagtctgggaaganaaatatgcct

SEQ ID NO: 4866 - DNA, 426 bp, Homo sapiens
  I.4866 (AA136071)
  misc_feature (250)..(250): n is a, c, g, or t
  misc_feature (256)..(256): n is a, c, g, or t
  misc_feature (258)..(258): n is a, c, g, or t
  misc_feature (261)..(261): n is a, c, g, or t
  misc_feature (267)..(267): n is a, c, g, or t
  misc_feature (286)..(286): n is a, c, g, or t
  misc_feature (418)..(418): n is a, c, g, or t
ttaactttatcacatagttttattgaccacaaaagaagacaaatattaaaacacattatagatattagggttaaaaagaccagtggtacctccttgccgatacaacattgacccatattgcatatttttcttccagactagtttaaagtgactcaggtatttggtctgtattattttttccatggagacaacttcagaatctaatacaactttctgtgttcctgctgcacctgaatttatgtctgaaatnggcttncnatncatttngacatattttttagtgcanggattttaacctactaaaaataatggaacctcatctatttaaaactatattatgtgtttacaaagctatattaactaaaaaatttccttgtggtttgtggtagcttatctccaagggggcccaccatcaatncctggcct

SEQ ID NO: 4867 - DNA, 483 bp, Homo sapiens
  I.4867 (AA017698)
  misc_feature (110)..(110): n is a, c, g, or t
  misc_feature (111)..(111): n is a, c, g, or t
  misc_feature (210)..(210): n is a, c, g, or t
  misc_feature (417)..(417): n is a, c, g, or t
  misc_feature (472)..(472): n is a, c, g, or t
gatcccaggtgggccctctgaaggagcggggtgccgggagggggcgtgtagtgtgggggcaggaaagacctctccaccagcgaggcgctgaccctctctgcgcccctggnntgcctgcatgctgtggggccagctggaccccagggcccactcttgcctgcggaacctggaaggccagcctgtctcccgggctccctgggcccagctggntggagcatccttcctgcagtgctttatggcgcttgcatttccaaagggaagattcatggctcccctcccactgcagagaaggcggctgctgctctctgcattgaatctacagtcctgcccaccataaacctgtcggggaggcctttacattctcccttcccccagcatgagctattattatttttaaactcatcattctcctttctnctcggtttcgcgttttccctgctctggcgcagaacatccgtccctctgtgtcttncctggggtccc

SEQ ID NO: 4868 - DNA, 504 bp, Homo sapiens
  I.4868 (AA017695)
  misc_feature (62)..(62): n is a, c, g, or t
  misc_feature (297)..(297): n is a, c, g, or t
  misc_feature (386)..(386): n is a, c, g, or t
  misc_feature (420)..(420): n is a, c, g, or t
  misc_feature (434)..(434): n is a, c, g, or t
  misc_feature (491)..(491): n is a, c, g, or t
tctttagttctctctgctacaaacatgaacttcccgaggctccaactcagtgcgcaggctgngctagagtttccccagggaccccctcccaccttgactgtctccttcctccctctaaagaagtacatctaactgcagttaaggactgaagaactgcttcctgctgacaggggacgccgttttgtggaaacggcagtcttgaggtccctcaggggcttatctaagggttcccggcagatggggccatcatcagaggctccaattgcatgactgtttggagttttgatggcctgaagnaatgaacagacaaaccggtttattagaaaacaagtatcaaaacaaaacaaggggaggggtaaggacagatcaaaaattccgaggccttnttaccagtttgcacagggagaggaaagccaaaancctgactgggttanaaaaacttttactgttttgccggcatgttgggcttctggggttcccttcatcttgancccaatccctaaa

SEQ ID NO: 4869 - DNA, 221 bp, Homo sapiens
  I.4869 (AA017694)
  misc_feature (217)..(217): n is a, c, g, or t
ttaatttttgcctacattttagactagccctgtttctttctgtgaagcaaccagcaatctctggctgcagctcagaaagaacaagaggaatgggtaatgtaaaaatctggattaacattctatttctgagcaaatcctgccaagtgatgggaataaataggatgactatcacttggaggtttcctttctgggaaagcaggaccaaggaagctaaccnaagc

SEQ ID NO: 4870 - DNA, 251 bp, Homo sapiens
  I.4870 (AA017595)
  misc_feature (1)..(1): n is a, c, g, or t
  misc_feature (149)..(149): n is a, c, g, or t
nattcggaacgaggatcagttattttttttcagagttttctttctagcaccctgaattcatgctttatgttttaattttaattctaatttctcacctttaaaggtcataagaatataatttaataccaaatgtactacttgaaacctgnttattgaataccctgtagaattaaaactgaattttcgtaattgaggcaatatttaaacaaagttttcttctagttgctctgtagtatttctagtttttaaat

SEQ ID NO: 4871 - DNA, 434 bp, Homo sapiens
  I.4871 (AA017104)
  misc_feature (379)..(379): n is a, c, g, or t
  misc_feature (421)..(421): n is a, c, g, or t
  misc_feature (432)..(432): n is a, c, g, or t
ctggcctcagtttcctcctcagtggagtgaggcaattggaccaatgacatctagggccacttattcccagtggctcaagtgccccagcaagctctctgcttctcccaaaggagctcagcagaccacaggagttagcataaggcataacttactggagtggaggggcagcattcatggcctaggctgagccagagaacaaagcttcccaattcacaggctttcttgggagggaggtacaggaggctgggcttacatgaagagacaagggatttgaagccagcagagtgtcctggggagcctgagacctcagatcacggctggaatggagcttctgggatgctatcacccaggtaacgacagtaagcaagacattagtctnggaatgcaaggagaggctgcaagtaaccatccaggggggatnctggggctcangt

SEQ ID NO: 4872 - DNA, 404 bp, Homo sapiens
  I.4872 (AA017103)
  misc_feature (363)..(363): n is a, c, g, or t
  misc_feature (393)..(393): n is a, c, g, or t
tcctaaggaaaataaattgttatcattatgttcaaacttaacagcgtgatgccaaaaaccgatgctgacacctttttaaaaatcacaagtcgattttatgcaaggtttttcttgcttcccttgctttccccggaccctacagatgttttatatgcttagaagagcacataaatgcaagtagagcctgtgggaatttaggcgaagtcaagagctttttctcctaacatagatctttcccggtaagtatgtgaagtatgcttgattgttttcttcctttctcctgtatatttggaaaaatgattgacttgcaaaatgttgtgcaggaaatggagaccagcagggtacaaggctgttgacagaggncattcagttgatctccctgcctcactttgncccttccacat

SEQ ID NO: 4873 - DNA, 289 bp, Homo sapiens
  I.4873 (AA017011)
  misc_feature (13)..(13): n is a, c, g, or t
  misc_feature (161)..(161): n is a, c, g, or t
  misc_feature (164)..(164): n is a, c, g, or t
  misc_feature (187)..(187): n is a, c, g, or t
  misc_feature (197)..(197): n is a, c, g, or t
  misc_feature (204)..(204): n is a, c, g, or t
  misc_feature (251)..(251): n is a, c, g, or t
cctagtgccgagnttgggacaggtttacaagggcactaaggaaaagaagattgtggtttacgtaattgctttacaagtagatttggattttggctacccacgctctaaacttgggcatgattgtaaagttatataccaaataatattttgcagtattaacngtncaatttgttataacattattatngagtttactnaatattnttcccagtgattcctactgcttgagttttatagatgtcttcattgtntagactctgaattagcttacattcctaaacagaactgt

SEQ ID NO: 4874 - DNA, 120 bp, Homo sapiens
  I.4874 (AA016212)
  misc_feature (116)..(116): n is a, c, g, or t
taaatgttgtctggtcagtggtcttaagaatgtcatttccccactcttgttcagtggggggcatgacagtctgtctctatgctgtcatcacttgagaagtgtaaattttccattcngaga

SEQ ID NO: 4875 - DNA, 211 bp, Homo sapiens
  I.4875 (AA015890)
  misc_feature (33)..(33): n is a, c, g, or t
gcgtccgatgcagttcgtcgtggcggggagcgnagcctgaccggggttccagcgctcgggccgtagcttggtcctggactttccctggctccgccgccacgtgggagctgaggctctggggcttccgctccggcgcgattatttctctagaacagttttcatttttaaaatttgtaaagcgcttttgcctgtgtgatttcctctggggttt

SEQ ID NO: 4876 - DNA, 233 bp, Homo sapiens
  I.4876 (AA015889)
agggtctccctatgctgcccaggctagccttaaactcctggactcaaatgatcctcccatctcagcctcccaagtagtggggactacaggtatatgccactgttcccagcttgagatggtagcatttttatgtgtaaaatttaggacactaaattacaaaaagagtaacaaccatgataccagagtgataagctattctgtggcggcaggaagatctctgtagcccctgaaat

SEQ ID NO: 4877 - DNA, 620 bp, Homo sapiens
  I.4877 (AA012959)
  misc_feature (450)..(450): n is a, c, g, or t
  misc_feature (455)..(455): n is a, c, g, or t
  misc_feature (603)..(603): n is a, c, g, or t
tgtttttgggatgtactcaacatcatggattatgagggactgttgcaggaacaaaaacgtgcttaaagaaaactcatgaaagaagcaatagcttcccataagaatctgaagggctcttgtatgacagagggatgagatttgttctggagggtgtctgagataacagttaggacaaaacaaagaaaagtgagtgtaagaagataaataatggctagaaagaagaaaaaactctgaaaatgaaatggctgccataagagagataaaatttccttttactataggaattccagaatagctaaataattacttgtccatggtactttggagagaattcaagcattcaggtaaggatagaagtacttaataataataatatactaacactaataatgactaccatttaatgatcatccagtatgtgtcaagtcctgtgctgatggtttatataanttccnccaaatacttctgtgctctaccaataccatttccagtcctcacagccatttttaaacatgatcctcattataatgggtaaaacctgcctaatccccagtattccctctcaccctcctccctttaggtattgaatcccctattttagcnatatcctgctgcccgct

SEQ ID NO: 4878 - DNA, 497 bp, Homo sapiens
  I.4878 (AA012911)
  misc_feature (369)..(369): n is a, c, g, or t
  misc_feature (484)..(484): n is a, c, g, or t
tctcatcggtgttagaaagaaatgatattgaatgaaacgatgtaattcaaagacctgctgtgtatttatcccaaatgctccttatcacacacacaaagagaaagctattgtaggctttccttaagtggtagccttcctccctttctgcctgatgaacacaaatacatgtcctctcagcagcacagttacaaaggcaagcctgagatgtattctcagcacctggccttgtggtcatcccatgctctgtgtgagtgcaggggacagaacttgcactgtgcagacagcattctgcctgggaacaggaataaaaagatgggagagtaaagctggagctcagcagggtgtggtgccaatgcactatagtgagtnagggggaaaccaaatcagattcaaaccatttttatttcctagctaccggagtgaaaacagagcccataatttgttatgaacccaaaaattaataaagaaacatgccactttaccnaatatggacatga

SEQ ID NO: 4879 - DNA, 475 bp, Homo sapiens
  I.4879 (AA012850)
  misc_feature (473)..(473): n is a, c, g, or t
gttagggtaatgtttattaaaaattcaaaagaaaacaaatgttatcaatgatggagagaaaaggaaccttgtacactgtcactgggaatgtaaattggtaaagccattatggaaaacagcatgattattcatcaaaaaattaaaaataaaactatcatatgattcaggaatcctacctatggttaaatatccaaagaacataaaatcacatattgaagagatatcttcactcctatgtttcttgaagcaatattcacaatagacaagatatgaaaacaatgtaaatgtccatcaacacataaatgaataaagaaaatgttataaagctaggcatgtggctcatgcctataatccctgtatttttggggaggctaaggcaggaggattgcttgaggccaggagttccaagaccagcctggggtaacatagccaggactctgttcctacaaatttagcttgggcatagtggtgcncc

SEQ ID NO: 4880 - DNA, 447 bp, Homo sapiens
  I.4880 (AA012849)
tccacatcttcacactccttcaggatcaaaaacctaagccacatgactggatgagccgtcacttggccttcattcgggtagtgatggtcctcactgtagtggatgttttgcctccagatatgcttgaatcactgcattttgggaataacttcaaatgcaagtccttgatctaaataaacagagtgacgaggggcctatgtatctataccacctgtctcctgagtatacaccaggccagcataatcagcctcagcaacttctggttggaaagctttaaacataaatttacaaataacattgtcagtgtcctcttttttcttttttgttccctcaatttgtctttcagtagtgacataatattcttcactgtggcttcttccattgtgacccagaccaatctacttaaggtccgcaaatactgctcacgttctcccatgaagtccatca

SEQ ID NO: 4881 - DNA, 427 bp, Homo sapiens
  I.4881 (AA001012)
  misc_feature (25)..(25): n is a, c, g, or t
  misc_feature (31)..(31): n is a, c, g, or t
  misc_feature (35)..(35): n is a, c, g, or t
  misc_feature (55)..(55): n is a, c, g, or t
  misc_feature (121)..(121): n is a, c, g, or t
  misc_feature (150)..(150): n is a, c, g, or t
  misc_feature (283)..(283): n is a, c, g, or t
  misc_feature (309)..(309): n is a, c, g, or t
  misc_feature (314)..(314): n is a, c, g, or t
gtctcaaaacaaacaaacaaacaanaacaanaaangattattatgggttaacttnactcataaacacatgcaaaaatcctaaacaatatcctaactacaacggaatcaagtaatatagaanatgtaatataaaaattttaaatatatganaagttggatttattgtagtagtatgatactactacatacacataatataatgatactactacattataatgtagtagtctaatgtagtccattagaaatggactcagtgtaatgtgtcatatcaatgcaatanaaaagtctgataaaacctcaatacantgcangtaaaggcatttcataaaattcaacattctggtcacaatgaacaactctttagaaaaccctgggaatggggaaagggaccccatggcttaaattctcataaaaggttacccta

SEQ ID NO: 4882 - DNA, 520 bp, Homo sapiens
  I.4882 (AA001389)
  misc_feature (293)..(293): n is a, c, g, or t
  misc_feature (356)..(356): n is a, c, g, or t
  misc_feature (384)..(384): n is a, c, g, or t
  misc_feature (398)..(398): n is a, c, g, or t
  misc_feature (469)..(469): n is a, c, g, or t
  misc_feature (506)..(506): n is a, c, g, or t
tttttttttttttcttaaatatcttttttattgcaaaatacaacacatacataacaacaaaacacatacaaaacacagaaacatattcagtttaaggaattattataaatgaacatccacataccaccccagctcaagaaataggacattgccagcatccccagaagctctcctctttccctttctagtcacaatcctctttctcctccaaaggtaagcagtaacctgatttttacattaatgacttactttattttttgtttgctaccaaaatatgtatccctgagcactgnagttttgctttacctaactttgagctttatataaatggtatcatctaagatgtattattttgnctctgattcatttcagtcaaccttatgngtgtaagacttatncatattttgttgtagctcattttcataactgtatagtttatcagtgtatgcattataccacaatttagtcnactgttgatggacatttggggttggggttttgggggnattatggattttaa

SEQ ID NO: 4883 - DNA, 519 bp, Homo sapiens
  I.4883 (W94702)
  misc_feature (463)..(463): n is a, c, g, or t
gaagtggcctgggccacgaataagtttgagtggcagttaggtcacaaggactgcagtcttgggcaagccctcggtgctgcagtggtctctaaggctgtggactttgggtgcatgtgacccagcatgacaccagccgtagcagccaagggagtgtgccacacccctcccccaactccaggcagtgtggctcagaaagagactccttctgcttgaggaaaggagagggaagagtacagatgactttgtttttcaacttgagtaccagctcatgtcataggaaaataaagcgccaagtagaatcctgaagccaccgatcccaggcctttcttcctggacacgtgcggctagacccaacccaggccagaagggaatctgctgtcctggttggttggacacaagttctgggctggttttaccacctgctgactaaagtggcctcaagccttgaataaacgtcagtggncagtcaggtagtactgactgtggaccttgggcaatccccagtactgtgctggtcaa

SEQ ID NO: 4884 - DNA, 461 bp, Homo sapiens
  I.4884 (W94574)
  misc_feature (3)..(3): n is a, c, g, or t
  misc_feature (47)..(47): n is a, c, g, or t
tgntaattatttcaatctctttgttaaatttctctgctaaaattctnaattctttcttcatgttttcttgacattctttgagcttcttcaagacagatattttgaattccctgtctgaaaggtattccctatctgatagatctctatcactccagggctggtcactgggcagcttatttagtccatttgatgagatcatattttcttgaatgttctcaatacttgtggatatttgtacatgtctgaacactgaagagtttcttatttattccagtcttcacacgtctggccttgcttgtactcattcttcttcagagggccttcaaagaattcaaaggggactgagtgctgagttccctaagctgtggtcactgcagccatttcagcactagagggtgccataatcccaagtatgcaataaatcttgcagactcctagatacccagcctagatagatgggg

SEQ ID NO: 4885 - DNA, 453 bp, Homo sapiens
  I.4885 (W95137)
  misc_feature (40)..(40): n is a, c, g, or t
  misc_feature (162)..(162): n is a, c, g, or t
gaaactcccaattccgtcccattaggatgccctcaagggncagtgcagggatcttcccatacttcctgcttccctgatctgaaccaagattggaaagaggcaggcagcagagaagatgcccaagaaactctgacatatccacagcttggctctgcccttggntctcactggggtttgggcctccctcttggttgagctgagtgtgcctgagtgggtggggacagggaggattctccaggtctatcttgatttcataggtccttctcaatccaaggtcaaaaactgagaatcttaattttctgcaccaaggaactcaagggttatccccaacctatgccgctggaacaatgatgggtcatccaacctgtgtttttgtgagtgaagtgaatgtgtgactggttggcctctgagtggatgactggaatgcgtgaatgtgtgagtgaaatgggggat

SEQ ID NO: 4886 - DNA, 525 bp, Homo sapiens
  I.4886 (W95182)
  misc_feature (49)..(49): n is a, c, g, or t
  misc_feature (50)..(50): n is a, c, g, or t
  misc_feature (378)..(378): n is a, c, g, or t
  misc_feature (502)..(502): n is a, c, g, or t
gaaaggaatgggcggacttgagagtgtcctccgcttctgaaaatgatcnngaaaaatggtaagaatgtacacctcaagggtggatggtaaaggtcagcctttaagcctcaatggcggtgtggttgtaggtggggtgggggtggaggccccgaagacaggcagactaccacagtagccccgatggaagcagtgagaatgaactggaaggagcggctgtgggagcgacaacgtgatgagaataaacccggcttggctctgcctcgtgcacacacaggtgagctgtgtgctcccggaatgtgtcagctggtatatgccgtctgtcagaaggcagctggggaacactgttaactcagagactaaagaggcagaccccagganagccccttcttttgcattgggtccagggtttgctgccattttcccaagcccaaggaaaatggaaccccagttccttccttcctttcctgtgtaaaaataaataaagccatcaccaataaggctngtgccccatgagaaccgccattt

SEQ ID NO: 4887 - DNA, 420 bp, Homo sapiens
  I.4887 (W92656)
gacgcggcgaggtgaaaaatcaccttgggggcccaggttccccacgaacagctaattctcaggtacggaatgggctctggagggccgcgagtgagcgtgcactgtcaggaaggtgcagcacgagtcttcgggcttcagggacaggggaatctgccccctacacccctgctcggccatttacctagaaccaaacagcagccaacctcgagactgattctgacagcaccaggagtaatgaagttctctaaattcgataaactattgaaatttcccttcttcctttcccataatgcccaaacgacgctgaatcggcagcagaatgcacggactttggcctataatcaatgcaaaattcattttgctaagctaacgtaaaagctataaatatcactcccctacacagataataaaccttggtag

SEQ ID NO: 4888 - DNA, 453 bp, Homo sapiens
  I.4888 (W94753)
  misc_feature (141)..(141): n is a, c, g, or t
  misc_feature (383)..(383): n is a, c, g, or t
  misc_feature (417)..(417): n is a, c, g, or t
  misc_feature (426)..(426): n is a, c, g, or t
  misc_feature (433)..(433): n is a, c, g, or t
  misc_feature (439)..(439): n is a, c, g, or t
tcacagttaggtagggattcattaactcccccattcactcacacattcacgcatccagtcatccactcagaggccaaccagtcacacattcactcactcacaaaaacacaggttggatgaccatcatgtgccagcggatanggttggggataaccctgagttcctggtgcagaaaataagattctcagtttttgaccttggattgagaaggacctatgaaatcaagatagacctggagaatcctccctgtccccacccactcaggcacactcagctcaaccaagagggaaggcccaaaccccagtgaagcccaaggggaagaagcaagcttgtgggatatgtcagagttttcttggggaatctttctctggttgccttgcctncttttccaatctttgggttcagattaaggggaanccaggaagntttgggnaagatnccctggaatgggcc

SEQ ID NO: 4889 - DNA, 432 bp, Homo sapiens
  I.4889 (W94604)
  misc_feature (152)..(152): n is a, c, g, or t
  misc_feature (283)..(283): n is a, c, g, or t
  misc_feature (298)..(298): n is a, c, g, or t
  misc_feature (299)..(299): n is a, c, g, or t
catcaaaggaaatgatttttattgttacacaaaacatttcttgtcagagcacacataaatctagacagcagctgcattttcagaacaaacagatgaaatacctttggtgaactgtgagttggggaaaacaagtcaccttattttaaaatttnggtaatgtgtttactgagtttaacagaaatcaaaatcaggacagagtgagaaaaaacatttctgtggaaacaaaatgcgttctcatgaggcacagcctattgtgatgcttattagttttacacagaaagangaagaactgggttcnntttccctgggcttgggaaaatgcagcaaacccctgaccaatgcaaagaaggggcttcctgggtctgcctccttaagcccctgagctaacaagtgctcccccagctgcccttctgacagacgcatataccagct

SEQ ID NO: 4890 - DNA, 422 bp, Homo sapiens
  I.4890 (W94591)
aggctaccaaggtttattatctgtgtaggggagtgatatttatagcttttacgtagcttagcaaaatgaattttgcattgattataggccaaagtcctgcattctgctgccgattcagcgtcgtttgggcattatgggaaaggaagaagggaaatttcaatagtttatcgaatttagagaacttcattactcctggtgctgtcagaatcagtctcgaggttggctgctgtttggttctaggtaaatggccgagcaggggtgtagggggcagattcccctgtccctgaaagcccgaagactcgtgctgcaccttcctgacagtgcacgctcacctcgcggccctccagagcccattccgtacctgaagaattagctgttcgtggggaacctgggcccccaaggtgatttttcacctcgccgcg

SEQ ID NO: 4891 - DNA, 521 bp, Homo sapiens
  I.4891 (W93633)
  misc_feature (406)..(406): n is a, c, g, or t
  misc_feature (495)..(495): n is a, c, g, or t
  misc_feature (502)..(502): n is a, c, g, or t
tagtatttcggtgttaataatagactaaagtttatcaagcacttccattttacatagatcattcatttaatctttactacaactctatgaggcaactaatatttttccctattttaccagtgaaggaagtgagattcagaatggtttagtggctcgctacgggtcacacacctgcagttgtaacaatactgaattagaaatcagtctttatctgctaggtatcatccttgaggaagaaaatatcttgtcgtacctgtttgcactgtgtccatataaagcagaattggcccatacataagaacttttgtgtccagatttatttgtgagtcctacagtccatgcatgatgggccatcagtggacccaatatggcatgagatcgaacttgattgtcctcttggatgtcnaattcataggtgaggagcatgttttcactcccttccttagttcccataccagttttccctaatatcataaggcttccgttaatgtcagntttatanttaaaaagagacccacctg

SEQ ID NO: 4892 - DNA, 166 bp, Homo sapiens
  I.4892 (W93632)
  misc_feature (125)..(125): n is a, c, g, or t
ccataaacaaccctgcttcaaagagtagaaatatgtttcataaaagccattacccaaagacgtataaaaggtaaaacttaaataaaaatagattaccatttacaacttggaaaagaaacccaganttttctgtagccactggtcaatgtgttcttacagccagtaa

SEQ ID NO: 4893 - DNA, 318 bp, Homo sapiens
  I.4893 (W93169)
  misc_feature (292)..(292): n is a, c, g, or t
  misc_feature (310)..(310): n is a, c, g, or t
aaacaatccagatggctgccacgtggtccttaccagtgagaggcgtcacacagcacacactgcatgaatggggatgaaatcattcctgaattaatatagggttatattacttggacctcagccatttgagcctcagtgtctgcatcatatgtgtttagtatatggacatctaactgaaattattaaccgtggcaatttatgcgtgccttttttggaaatattctattttaatggaaagaattatgtagaaatactggatacatttttaaaaacatccataattcaccatctngacataactacgtatatncatttttg

SEQ ID NO: 4894 - DNA, 518 bp, Homo sapiens
  I.4894 (W93040)
  misc_feature (424)..(424): n is a, c, g, or t
  misc_feature (434)..(434): n is a, c, g, or t
  misc_feature (443)..(443): n is a, c, g, or t
  misc_feature (448)..(448): n is a, c, g, or t
  misc_feature (484)..(484): n is a, c, g, or t
  misc_feature (513)..(513): n is a, c, g, or t
tggatcacttgtttttcttttttatttccttaacaatatttcctatcaagcttcaaagtgtgaaatcataacatagtttggttctaaacatagcagaaaattctccaaataacagaatagctttttgctacttttagaaatcaaccaaaatataaacacttcagtcaacattggatcaaaaaacattattattgattaaattattgttttaacatcacttttctgcttatatctgaagattaatttattcttcatacagaatatgaacagattttatgattttctaaattaatttttacaaatccaatttctaagagagaaatgatataaaagcataccaagaaatgagtaaaatgtactaggtcatatgactttaagtgaaaagagcagaataccaaataatatatacactaaagctacatcnatataaaacnttggactcnaatcnccaaaatgggatataccagttatggtccagatgggnggaattatgggatgggttttaaaaatggnatccc

SEQ ID NO: 4895 - DNA, 447 bp, Homo sapiens
  I.4895 (H96644)
  misc_feature (342)..(342): n is a, c, g, or t
  misc_feature (404)..(404): n is a, c, g, or t
  misc_feature (447)..(447): n is a, c, g, or t
aggctcaaacacatctttattaatcaaaataggaaccattacaatcaacatatttttaccaatgagaaataagtttgtttattcctgtaacataaaaatccatgctttgggatttgatgaattcttggaaagcattttctgcatcctgatgatcgtagaagctttttccctgcaaaaatctgtcgagatgattgaagatgtggtagtcagttggcaggaggtcaggtgaatgacagatgagtcaaaacttcatagcccaattcattcaacttttgaagtgttggttgtgcgacatgtggtcgagagttgttgtaaagagttgggccctttctgttgaccaangccggctgcaggcattgcagttttcagtacatctcatcaatttgctgagcatacttttccgncgtaatgatttgttggggttcagaaaagctgtagtcgattacn

SEQ ID NO: 4896 - DNA, 265 bp, Homo sapiens
  I.4896 (H95989)
  misc_feature (121)..(121): n is a, c, g, or t
  misc_feature (149)..(149): n is a, c, g, or t
  misc_feature (152)..(152): n is a, c, g, or t
  misc_feature (154)..(154): n is a, c, g, or t
  misc_feature (201)..(201): n is a, c, g, or t
  misc_feature (222)..(222): n is a, c, g, or t
ttaatttaataaaataaaattataagagcaaaaagttacatttctaaagtaccaaaacctgcaacaggctcatggaacagagcctagggatccaggagcataggaggtggtggtgctgggnagggctctgcatcccctttcctcagcanagnancatcttcaccctcctgggaaagcagcattggagcctacaccacttgngcttttctcaccagggtaagnaatgcaggtatttgcagaggggagtgagtctggaaagtggcag

SEQ ID NO: 4897 - DNA, 374 bp, Homo sapiens
  I.4897 (H95988)
  misc_feature (122)..(122): n is a, c, g, or t
  misc_feature (123)..(123): n is a, c, g, or t
  misc_feature (262)..(262): n is a, c, g, or t
  misc_feature (281)..(281): n is a, c, g, or t
  misc_feature (357)..(357): n is a, c, g, or t
  misc_feature (369)..(369): n is a, c, g, or t
gtgttttctcagtatcacagaccagctctgcagcaggggattggggagcccaggaggcagccttcccttttgccttaagtcacccatcttccagtaagcagtttattctgagccccgggggnnagacagtcctcagtgaggggttttggggagtttggggtcaagagagcataggtaggttccacagttactcttcccacaagttcccttaagtcttgccctagctgtgctctgccactttgccagactcactcccctctgncaaatacctgcatttcttnaccctggtggagaaaagcacaagtgggtgttaggctccaatgctggcttttcccaggagggtgtaagatgggtggngtgcttgagganagggg

SEQ ID NO: 4898 - DNA, 439 bp, Homo sapiens
  I.4898 (H95656)
  misc_feature (9)..(9): n is a, c, g, or t
  misc_feature (368)..(368): n is a, c, g, or t
  misc_feature (432)..(432): n is a, c, g, or t
  misc_feature (439)..(439): n is a, c, g, or t
ttttgcttntgcttttgttgcaattgcttttggcatcgtcatgaaaactttgcctgttcctatgtccagaatggtattgcctaggctgtcttccagaatttgtatggttttggggccattatccttagcaaactaatacaggaacagaaaaccaaacaccacaggttctcaattataagtgggagataaatgatgaaaacacatggacacatagaggggaaccccacacactggggccagcaaagggtggagggtgggaggagggagaggatcaggaaaaataactaatgaaatactaagcttaatacctgggtgatgaaacaatctgtacaacaaacccccatgacacaagtttacatatattaacnaacctggcacatgtacccctggacttaaaagttaaatgttaagaaaattcttaaataagggtcnatttccn

SEQ ID NO: 4899 - DNA, 336 bp, Homo sapiens
  I.4899 (H95611)
  misc_feature (305)..(305): n is a, c, g, or t
  misc_feature (315)..(315): n is a, c, g, or t
  misc_feature (332)..(332): n is a, c, g, or t
tccaaggtaaagctggactgatttcagtggatgagaatacagtgataagcaaatctttaaatgttaccctaaataggctcttaaaatagaatgtagcttgtaaagatataagttaactgcctgcaagttagtggccttctactctccagtggtggtgtataaacccctgaaaattcaaatataatcctaaaagcagaaagactgacatttaggggaggggaaaggatggataaaaagaacaatactcaacctaccagcctccaaagagaagtcatgcaattgtgaatacatgtcaaccaactggntattaatatnccagccaaattcacacnggaa

SEQ ID NO: 4900 - DNA, 564 bp, Homo sapiens
  I.4900 (H95173)
  misc_feature (210)..(210): n is a, c, g, or t
  misc_feature (323)..(323): n is a, c, g, or t
  misc_feature (341)..(341): n is a, c, g, or t
  misc_feature (395)..(395): n is a, c, g, or t
  misc_feature (402)..(402): n is a, c, g, or t
  misc_feature (414)..(414): n is a, c, g, or t
  misc_feature (420)..(420): n is a, c, g, or t
  misc_feature (442)..(442): n is a, c, g, or t
  misc_feature (461)..(461): n is a, c, g, or t
  misc_feature (467)..(467): n is a, c, g, or t
  misc_feature (476)..(476): n is a, c, g, or t
  misc_feature (496)..(496): n is a, c, g, or t
  misc_feature (501)..(501): n is a, c, g, or t
  misc_feature (523)..(523): n is a, c, g, or t
  misc_feature (538)..(538): n is a, c, g, or t
  misc_feature (548)..(548): n is a, c, g, or t
ttaactagctcatctcaggaaaaaagaatctaactgcatataaaaatttgtcagcagatcaagtacattctaaaatgtataaaatacctacctcgtcttcccaaatatggtttagtgtagtcccaactgtcattgtcattcctaataacatttagacgagttggccgtgcatattcaatttttagtgtgcaacatccagcatatatatcngctccattgagtgctgctttagcttttctgggcacaaaggactgattcaaactcaaccattgcttgtatcccattttctcttggaatataacaatacgttgcactttcgccancagggttggcatacagtnatcataaaacatccactgtaattggtttaaagtggtttttccgaattgtagtgncagaagnaaccttggttgncctccnggatgggattcatcagtatttncccggtccgtgtggatccnttttgnctggttagnatagttggaaaaaaggccgntggancaggcatggtacacgggtttcnttggcaggcaaatgncacacattcntttggcactttttttg

SEQ ID NO: 4901 - DNA, 344 bp, Homo sapiens
  I.4901 (H95141)
  misc_feature (21)..(21): n is a, c, g, or t
  misc_feature (57)..(57): n is a, c, g, or t
  misc_feature (60)..(60): n is a, c, g, or t
  misc_feature (106)..(106): n is a, c, g, or t
  misc_feature (155)..(155): n is a, c, g, or t
  misc_feature (190)..(190): n is a, c, g, or t
  misc_feature (197)..(197): n is a, c, g, or t
  misc_feature (331)..(331): n is a, c, g, or t
  misc_feature (340)..(340): n is a, c, g, or t
gcgcttctcagccgccagtcncctggccgcgcagtccccgcggacggccgggcgcgnagnaccctcgcagaagaggcgctgcgccggcgaggactggccggcgganaccgaggcgcgcgccccaccgccacccccacccgcctgccagccggtcnctccggccggccgccatgtcctcctcctcttcctnccccagngagaacgtacgaggaggaccgggagtacgagagccaggccaagcgtctcaagaccgaggagggggagatcgactactcggccgaggaaggcgagaaccgccgggaagcgaacgccccggggggttggcgaatgngcgggcggncgga

SEQ ID NO: 4902 - DNA, 405 bp, Homo sapiens
  I.4902 (H95061)
gagactgcatagggctcggcgtggagtgcagtggctaaatctcggctcaccgcaacctctgcctcccaggttcaagcaattctccttcctcagcctcccaagtagctgggattacagccgcctgccatcatgcctggctaatttttgtatttttagtagagatggggtttcaccatgttgtccaggttaatttcgaactcctggcctcaagggatccgcccacctcggcctcccaaactgctaggatcacaggcatgaatcaccgcgcccggaccagtgtaagcatttggtgtgctgccaatcaaggacttatttacctttgcatccctgctctgaggccagcacaatcctgtcacacagtaggtacacaatgcacatttgtctagcaaaaagtactggaaaggg

SEQ ID NO: 4903 - DNA, 331 bp, Homo sapiens
  I.4903 (H94699)
  misc_feature (60)..(60): n is a, c, g, or t
  misc_feature (71)..(71): n is a, c, g, or t
  misc_feature (80)..(80): n is a, c, g, or t
  misc_feature (81)..(81): n is a, c, g, or t
  misc_feature (137)..(137): n is a, c, g, or t
  misc_feature (158)..(158): n is a, c, g, or t
  misc_feature (175)..(175): n is a, c, g, or t
tacggtctctgtcgcgccactgcactccagcctgggcaacacagcaagactcggtctcancaaaaaaaaanaaaagaganngagagaaggggtttctccacgttgtccaggctgatcccgaactcctgagctcaggngatctgcccgcatcggcctcncaaagtgctgggattanaggtgtgtgccactacctttgttaggcattagtgaaagtgcttttagatcttacgtatattaattcattgagtctttatacaacctcataagaaagcttctgtctgtttcacagtcaggaaacaggcacagagaggttaaacaacttggcccaaga

SEQ ID NO: 4904 - DNA, 406 bp, Homo sapiens
  I.4904 (AA114117)
  misc_feature (5)..(5): n is a, c, g, or t
  misc_feature (235)..(235): n is a, c, g, or t
  misc_feature (298)..(298): n is a, c, g, or t
  misc_feature (345)..(345): n is a, c, g, or t
ttttntatttatttttagagacaaggtcttgctatgttgcctaggctggtcttgaactccttgggctcaagtaatcctcccacttcagcctcccaaagtgttgggattacaggcatgagccgccagctcccagtctctttactctttaaacatgtaaaactatcttcagctcgtggcttctacccacagaaccatccactcatgcactccccagggcactgtcctgcagaatccntgactgagtagtgctatgaattttcaaggaaacccttccggcatttggagaagcaccagggtnccttgaaaagcacacggctttaaaataccactggcccaccttgccancattcaagcttgcagatctgcagttcagagttttggggaccttggcaatttgtcactgcct

SEQ ID NO: 4905 - DNA, 471 bp, Homo sapiens
  I.4905 (AA114099)
  misc_feature (188)..(188): n is a, c, g, or t
  misc_feature (440)..(440): n is a, c, g, or t
  misc_feature (456)..(456): n is a, c, g, or t
  misc_feature (465)..(465): n is a, c, g, or t
tttttttttttttttttctatgtgttattccaaagagatttcacatcagctaccagttactttcagctgatagcagctatctatttgatgtgctgtgttgagaagggttaagaacctacgtggcttctcagggaagaatattttgaccgatgatcagtgtcttccaaggacagagtgggagcagaatnatgctgtatatttggcagcattttatagtcaaaaacaaaatgttgcctttataaaaactaaatctaacctcagggaaaacaaaggcaaaaaacagaggatcagatccctggattcttatgaaataaatataaaagaacatccaaataaactagcagttaaaaaagccaaccagaaatgatagttatgtcattgttcagtattgcatgtcaattgtgtggcatcactgtactaggcactaagagaaaaagaanagataagggatagatngccttagcntgagtt

SEQ ID NO: 4906 - DNA, 435 bp, Homo sapiens
  I.4906 (AA114098)
  misc_feature (98)..(98): n is a, c, g, or t
  misc_feature (138)..(138): n is a, c, g, or t
  misc_feature (198)..(198): n is a, c, g, or t
  misc_feature (375)..(375): n is a, c, g, or t
ctgattatgcaggacaaaaacataattctccttatggatgttattgtcactgtgccacactgccataatggtagtgttcagaaaaaaatatggctganaattcatataacattcaaatgttgtagattcagaactatntcctttgtagacattttaatattcatgctgcttttagctcagtttttactgttctgctanaggaatgcattggtctctccctctgcctcagtgtgatagcaggcccaatctaatgtttatagtcatagtgtagaattatgtatttaggagtttttggaggttattaatcatttccttcagagttctaattttctaaattccatagcctgcttcagtccttatcttttccatatctgnatagggtttgattacctccgattctaagaaacttggaccttgcagtctagtttttcttgg

SEQ ID NO: 4907 - DNA, 392 bp, Homo sapiens
  I.4907 (W81668)
  misc_feature (88)..(88): n is a, c, g, or t
  misc_feature (108)..(108): n is a, c, g, or t
  misc_feature (113)..(113): n is a, c, g, or t
  misc_feature (122)..(122): n is a, c, g, or t
  misc_feature (327)..(327): n is a, c, g, or t
  misc_feature (334)..(334): n is a, c, g, or t
  misc_feature (391)..(391): n is a, c, g, or t
gctctattcgtcatgtttttattggcaggtaatttacatacaaagaaattcaaaaatcttaaatttcacaattcaatgtgttttgtcnaatggcctggcactccctgnccctnccccactgnaagatttacaacactctaagcacccccaaaaagttatttcatgcccccttcagctaacctctaccatgccactccatccataaaccccaaagcaactattaaaaaaaaaaaaggcaaaaaacgcaattactgtcgcaccaacctaatactagtctgatttttaaatcacagattcattttcatataaatgggaatcatacaatgnttattcntttcatacctggacttcttttcattcagggaacacggattcagagcttctgctgggng

SEQ ID NO: 4908 - DNA, 241 bp, Homo sapiens
  I.4908 (W80600)
  misc_feature (61)..(61): n is a, c, g, or t
  misc_feature (126)..(126): n is a, c, g, or t
  misc_feature (164)..(164): n is a, c, g, or t
  misc_feature (212)..(212): n is a, c, g, or t
ataagcacatatttttcgtttattcgtaaaacacctgtgcctagtattgttgatgctgaanactccaggacccaaagtctcagaagactattaaattcactgtgcaagcttcttgtttccaatggnttctgcttaggaatgaattaaattagcatttctacccnataaaccttaaagaaatatttgactattaacaaaataatgccagaccntgagcccaaactgtttcataagtctttgt

SEQ ID NO: 4909 - DNA, 455 bp, Homo sapiens
  I.4909 (W80599)
gagtgaaccagatgctttcgcagaggcattgaggaagagaacaggctcttctactgagttgctaaggaaagaacaactaagaggtggagtctctagatttgcccatctgcatctgtctgatccactccacaggaaggcaagaaaacaggggtcccaggaatcttctgcccttctgcccatgactctgcctgcaccagacgacacttactggtgttcactcaagcacagtgtacgtaaactttttggtgtaaagcatgtgtattagtccgtttccatactgctgataaagacacacctgagactgggtaatttataaagaaaaagaggtataatggattcacagttccactttgctgaagaagcctccacaatccatgattggaaggttgaaaggcatggtcttacatggttggcccagccaaaaagaaaatggaggagcccaagttgaaaagggg

SEQ ID NO: 4910 - DNA, 366 bp, Homo sapiens
  I.4910 (W80888)
ccagaagcttgatataccacctagatcactaaggaaatcataacacttctttcatgttctagagcccaccctagtgagtggatagcccacaagctcatagctagactcagtgaactgtgataaggaagatggtggaaagctgactagtgtggaggtgagtgaggtcagagagaagacagatctgaagaggattattgatgagatcattatgaagggcatgctgaaacttctaatatgaatagtccagatttagataaaagggaatgtagaagtagcccaaacttcagtaactaacatttcttatattatgtatttatgtgttcacttatttatatcaacactcctatcccatcttaatgcatgtta

SEQ ID NO: 4911 - DNA, 428 bp, Homo sapiens
  I.4911 (W80781)
  misc_feature (412)..(412): n is a, c, g, or t
gcagttttctacaatgatcatttcatcaattatcaatattatcaaaatcaaatgagaatgtcaattattataattttataatgagtaaaaactcattttaaaaatctctatccaaagtgatcattctggcctcataacaattataatggctattaacacacctgtaaatgacagacattagcagtaaaaaatacatctgaatggtgctagggacaccaaatatattcaataaatattaactgaccagtgataaggtggtttattatctaactaggagctcagtaaatatttggtgaaatatgaaaggataaataggtacatgtaaaggaaaatgtattggttcaatatagcaccattccatagaccttaatgagtggactttatactgtgggcaaaaaggggaatttaggcnttactgaatactgtgg

SEQ ID NO: 4912 - DNA, 444 bp, Homo sapiens
  I.4912 (W79181)
  misc_feature (3)..(3): n is a, c, g, or t
canaaaagccaaaacaaaacctgaaacccttgtcaagaaggccattgggtcatctcaagctctagtccactgaaggcctgacctctgagtgttcctactcgcggactcagggcctctgttctctggtgtggtaatctgagttcctaatttctatcttagctgaatgttctgccatgaccactgacacgtccaactcacatctctttggagtcagtctctttcctatcgaggtgggtttcaggtcttgcttgtggctcagtttccttggcccaccttgtggctcgtcctcctcccagctgccaccagtcgttcaagtgtggccacgcagtttttttgcagaaggcaggtgaaccacacctgctcccatgctagcctcctcttccttttctcacctaccccagtgatttctttgtgctctgagagacaagttccatggttctccat

SEQ ID NO: 4913 - DNA, 401 bp, Homo sapiens
  I.4913 (W79654)
  misc_feature (400)..(400): n is a, c, g, or t
agccacttcaactgcactggcccctgtggtcactgctgcaccgccctggcccatgtgggtccctgaggagcgacctgccggggccacctggctggacgaaaaagacacactttggacttaagccgtgagaaaaaaacttcatcagtaagaaacaagtcaatagacaagtaaaagactaggagaaaatatgcataaaacataaaaaagtgacttgattcctgattctggagtatttaagaattcctataactcaacaaaaagttcagttttttaaaatgagcaaaaggcttgggtaaactattcacaaaggaaccgtagacaaatgccagtacacacatgagaagcgcatacacatccaccaaacttcaaacaagcccacctcatgtatttctagtgagtna

SEQ ID NO: 4914 - DNA, 409 bp, Homo sapiens
  I.4914 (W74427)
  misc_feature (345)..(345): n is a, c, g, or t
aactaataacaaaagtgctttattcattcagaagaaacttcttaataaatcaaaggttagtaaagaatgtttactgatttacataaagatttaagattcttaattttcctcattattgtaaatagatacattctccctctcatgcttcaaaatctgagaaatcccgacgtaaatgaaaaaaaaaaatgtgtttaccaagtaaaagaataagaacaaaagaaatgccgggcagtgcaggcctatatataggtcatggtttccagctacgtgtcgggcagtggtgccaagtcagacatggaaacagcccccaaaacgtcaaccccaaaaggaaccacaggggacatngaagtttttggttatctgaaattaatttggacccatgggacatgcattctggatagggcactgc

SEQ ID NO: 4915 - DNA, 474 bp, Homo sapiens
  I.4915 (W75968)
  misc_feature (82)..(82): n is a, c, g, or t
  misc_feature (184)..(184): n is a, c, g, or t
  misc_feature (236)..(236): n is a, c, g, or t
  misc_feature (270)..(270): n is a, c, g, or t
  misc_feature (360)..(360): n is a, c, g, or t
  misc_feature (447)..(447): n is a, c, g, or t
tcctgcagccgctcctggattggagcagtgtgctctcggcgggaagggcccatcccgttggtcgaggcctgacagggcttangggcgactccctccccattggccgagttatggagcgctccgaccagacagcgtctcattggccaaagatgggagggttccgcttaaagaccgcctcttactnggccaggagtggacttggttagggctaccttctcattggttgcagccagagnacttctgcccgggctgcctctcccccgctacgcnctgcgtgcctctggtggaggctccctcccttggccgtcccaatagagcccggggctacttccactggccaggctcccgggcatctggttnaccccagcctggggaggagggcttggtctccgctcctcaggggcttagtccgtccccacccccttcccttccctggcgccccggggnccaaggcccctcaagctgtcagcttgg

SEQ ID NO: 4916 - DNA, 663 bp, Homo sapiens
  I.4916 (W73195)
  misc_feature (523)..(523): n is a, c, g, or t
  misc_feature (531)..(531): n is a, c, g, or t
  misc_feature (587)..(587): n is a, c, g, or t
  misc_feature (612)..(612): n is a, c, g, or t
  misc_feature (642)..(642): n is a, c, g, or t
ttttttttttctcctgaacagatttattgtgagggtatgggaacgtgagatacatttgaattcccagttggaaacagtgaagaaatcagcaaatgtcttgtccctctcatttatttccacataataaacacctgtcatgggccaacccttgtgccgagctcagtgggcacagagctgaggagagaggccgacaggagctcccagcctgccaagcctcataacgtaagctgctctgtgttgagtctgctctgtgccccacgcgtcatttatgcaaatgctgctctagatcctcacgttagctgaatgaggcaggtactattgctctccctattccatgcaggaggaaactaaggctcagcgagacatatgccacgtccccatgggtccacagccaaaagctcagtggaattcaaatccactctgtctcctaagcttatgctctctcggccacataccctccccacccatgtatcgtaaggggcatctgtatattctggggtttactacccgcatggtaaagggntgtcagantattgctgaaatgccagtgtgtgctctcattgtaaatccatggctggattgggggnttactgaagcaagagcaaattgtgntcaaagatgatgtgtgggcaaaatgaatgncccggccgatttggccgggaa

SEQ ID NO: 4917 - DNA, 642 bp, Homo sapiens
  I.4917 (W73090)
  misc_feature (501)..(501): n is a, c, g, or t
  misc_feature (622)..(622): n is a, c, g, or t
gacaaatgacaatagttggaccccacagcaatcattacttttgtagacagcaaagttatgctccttggcttcaggtgaagacccccagatccaggccagtggatttacaagtgagagtcagcagcactgggcatttcaggcaatagctctgaacaagccctttaccatgcgggtaggtaaaccccagaatatacagatgccccttacgatacatgggtggggagggtatgtggccgagagagcataagcttaggagacagagtggatttgaattccactgagcttttggctgtggacccatggggacgtggcatatgtctcgctgagccttagtttcctcctgcatggaatagggagagcaatagtacctgcctcattcagctaacgtgaggatctagagcagcatttgcataaatgacgcgtggggcacagagcagactcaacacagagcagcttacgttatgaggcttggcaggctgggagtcctgtcggcctctctcntcagctctgtgcccactgagctcggacaagggttggccatgacaggtgtttattatgtggaataatgagagggacaagacatttgtgatttcttaatgtttcaaatgggattcaaatgtanccagttccatcctcacataa

SEQ ID NO: 4918 - DNA, 335 bp, Homo sapiens
  I.4918 (W70264)
  misc_feature (1)..(1): n is a, c, g, or t
  misc_feature (207)..(207): n is a, c, g, or t
  misc_feature (220)..(220): n is a, c, g, or t
  misc_feature (222)..(222): n is a, c, g, or t
  misc_feature (223)..(223): n is a, c, g, or t
  misc_feature (224)..(224): n is a, c, g, or t
  misc_feature (225)..(225): n is a, c, g, or t
  misc_feature (313)..(313): n is a, c, g, or t
  misc_feature (334)..(334): n is a, c, g, or t
naggggaaaggcattttattaagaaagctttggccaagcccccgccggaggagcccatcctggggcaccggccgaggggggagcagccctgctgggggcctataaatacatctcctcaggccactagagtcgcccctggaggtcccgcggcgtgtggggcagtgggaggccatcaaaaccagctgacagctgaggggcctgggcggnggcgccagggaangnnnngggtgggacggactaagcccctgaggagcggagaccagccctcctccccaggctggggtcaaccagatgcccgggagcctggccagtngaagtagccccgggtctattnt

SEQ ID NO: 4919 - DNA, 436 bp, Homo sapiens
  I.4919 (W69813)
  misc_feature (359)..(359): n is a, c, g, or t
ggtgtgccatcacagcaaaggtagggtgtggccagtcctgggagaagctaagggttatgacctccagatccttactggtccagtcctcattccctccaccccatctccacttctgattcatgctgcccctccttggtggccacaatttagccatgtcatctggtggtgaccagctccaccaagcccctttctgagcccttcctcttgactaccaggatcaccagaatctaataagttagcctttctctattgcattccagattagggttagggtagggaggactgggtgttctgaggcagcctagaaagtcattctcctttgtgaagaaggctcctgccccctccgtctcctcctcttnagtgggaggatggaaaacaactgcctgcactgcccttgtccccggatcctgccgaacatctggggcatcaggaagct

SEQ ID NO: 4920 - DNA, 450 bp, Homo sapiens
  I.4920 (W69774)
  misc_feature (394)..(394): n is a, c, g, or t
  misc_feature (427)..(427): n is a, c, g, or t
  misc_feature (450)..(450): n is a, c, g, or t
taagtcaaaggtttaatcatgatccaagagcccagagagactttaggacaataataggaataaagcaaggcccacaggctccagctcctgatgcccagatgttcggcaggatccggggacagggcagtgcaggcagttgttttccatcctccactcagaggaggagacgagggggcaggagcttcttcacaaaggagaatgactttctaggctgcctcagaacacccagtcctccctaccctaaccctaatctggaatgcaatagagaaaggctaacttattagattctggtgatcctggtagtcaagaggaagggctcagaaaggggcttggtggagctggtcaccaccagatggacatggctaaattgtggccaccaaggaggggcagcatnaatcagaagtggagatggggtggagggaatgangactggaccagtaaggatctggn

SEQ ID NO: 4921 - DNA, 438 bp, Homo sapiens
  I.4921 (W65491)
  misc_feature (178)..(178): n is a, c, g, or t
ggaaaaggagatggaaggaaggaaaggaaataacttttattgaatgtctgttctgcagcaggcactgagtaaggtttgtcatagtcatatattgtagcttgctgtcgctttcatagcagtattatgaattagtaatgcactctctatttgaacggatgaggatagactcttcagagtnggccaggttacatgtccagagcaagattcaaacccaggtcttctgatttcaaatcttatgctcttaaacaattcaaattcattttgtatccttctttatatcttattgtttagggttggatgtcgttttcatggtatcacacacctggccttgaatcaaagggaaagtaaaaagtcaaaatcaaaacccctcccattggagatatttccactggtcaaattccagatgttagccacagaatgaggccacacttggataaa

SEQ ID NO: 4922 - DNA, 408 bp, Homo sapiens
  I.4922 (W65502)
  misc_feature (367)..(367): n is a, c, g, or t
aattttttaattttaaactaataaaattccattcttttctcaaacatgattttggctttattttaaataattacacacacagccataaccaaaggattttttcagagcaaagtgaattttacattttaaaatccaatcattaggggaagttagaaatagatatatatttctctgtctgtaaatatatatataaaaatatatgtaatgtataggggaaattagaaatatatattatgtcttgtacatataaaaccatgtacaaaaatctgcatagtaaaaattacatgcaatttagtttttaaaatagtgcttagtttaatacacaaaggcttctccaaagcatcctagaacggaattaggtttaacnttggtccttaaccaccacctaaaaatccttaaacccggggg

SEQ ID NO: 4923 - DNA, 348 bp, Homo sapiens
  I.4923 (W58291)
tatcattaattagaaaactttaatttgtaatctaccaaaacagtgaaaacaaccaacccttcccccgccccccaatacaaaccctccgttgcctactccagggacaagaggcgtcaccatcgctgaggagctggttaggaatgtcggctctccgaccctaagcccagacttactgaatcagaatgtgcatttaccacgacgaccaggtcattacacgcattttacagtttcagaacccctgctatagcctactgtacttcagcgccaatattttgctgaaaagaattcccagctggaactgtggctcccggagtctttcaccagatggcagcagccactcctccctgt

SEQ ID NO: 4924 - DNA, 379 bp, Homo sapiens
  I.4924 (W58290)
  misc_feature (58)..(58): n is a, c, g, or t
  misc_feature (95)..(95): n is a, c, g, or t
  misc_feature (312)..(312): n is a, c, g, or t
  misc_feature (314)..(314): n is a, c, g, or t
  misc_feature (315)..(315): n is a, c, g, or t
  misc_feature (317)..(317): n is a, c, g, or t
  misc_feature (319)..(319): n is a, c, g, or t
gcggctgaatcctgcctggaacaatgggagtgctacagggaggagtgggctgctgcantctggtgaaagactccgggagccacagttccagctgngaattcttttcagcaaaatattggcgctgaagtacagtaggctatagcaggggttctgaaactgtaaaatgcgtgtaatgacctggtcgtccgtggtaaatgcacattctgattcagtaagtctgggctagggtcggagagccgacattcctaaccagctcctcagcgatggtgacgcctcttgtccctggagtaggcaacggagggtttgtattcntnngncnggggaagggttggttgttttcactgttttggtagattacaaattaaagttttctaattaa

SEQ ID NO: 4925 - DNA, 436 bp, Homo sapiens
  I.4925 (W32791)
  misc_feature (1)..(1): n is a, c, g, or t
  misc_feature (202)..(202): n is a, c, g, or t
  misc_feature (285)..(285): n is a, c, g, or t
  misc_feature (383)..(383): n is a, c, g, or t
  misc_feature (411)..(411): n is a, c, g, or t
  misc_feature (434)..(434): n is a, c, g, or t
ngcgaaaccataggcagccagacacagagactatactgtttctcatttcatcagccttgggacttgaacagcaggtcactccatttgaaaactagcagacgtaataaatagaaagaggcatagaaagcaagctgaccacagattgggctgtagcacccagccatttctgtctgtcttggaaagggccaaggggaatgccctngtatactgccattgtatcaaatgttttgggcacctttttcagggcatttatgaaagaaaaaaagaaaagggagggattaaggnctggataagccttttcctgcctgagtacctgtttcatgatgtttctttataagtcatcatgactggcaaaataatctttaaggttgcttggcagtgtnccaaaaagtagaccaatagaccctgtancccgttggagaaaatttttaaancc

SEQ ID NO: 4926 - DNA, 339 bp, Homo sapiens
  I.4926 (W32331)
acaatcagagggcctgcttggacatagaaatcagggagagattatatccgtttacttcaatgatagctctgtaactttcaaaaggaaactatgtttatattgctggtattttgagagattactttgtcagtgaaatccattgagaaataggtatcggaggaaaacagaaatcatttttatcctgataaggctgttataaggatatgccatatattctggcaacaataggtttgcagaatgatatagaatcagttaccctccctgtctcaggcagaggtggaaaaacagaggggttcctgggtagaggcttgtctctctaatactacccccatgggagta

SEQ ID NO: 4927 - DNA, 358 bp, Homo sapiens
  I.4927 (W24763)
  misc_feature (255)..(255): n is a, c, g, or t
attcggaacaggcgtgaaatcactaagactcttgttccagggaagagaagaaacaaaaaactgaaggaataaaaagtttaagccacaaagcattaataggaacacttggacctgtacaagagatatgctgaggggcatggggaaggaattccttccttctcaagctgtaggtgtcaggctttggcgtcgaaaatgacagtggattttctactccttcagcaaactttctggaaaccccatcacctgccacgtgtntgtggaggtgctgtgtgggtatacaaaggcgaattaagatgtgatcctggggtcagggacagtggctggccacctggtaattcccagcacttttgggaaaggg

SEQ ID NO: 4928 - DNA, 445 bp, Homo sapiens
  I.4928 (W02753)
  misc_feature (359)..(359): n is a, c, g, or t
  misc_feature (380)..(380): n is a, c, g, or t
  misc_feature (392)..(392): n is a, c, g, or t
  misc_feature (420)..(420): n is a, c, g, or t
  misc_feature (431)..(431): n is a, c, g, or t
gtaaagatggggatctcactctgtttctcaggttggtctcaaacttctgggctcaagtgagcttccaccttggtcttccaaagtgctgggattacaggtggcagccactgtccctgacccaggatcacatcttaattcgcctttgtatacccacacagcacctccacacacacgtggcaggtgatggggtttccagaaagtttgctgaaggagtagaaaatccactgtcattttcacggccaaagcctgacacctacagcttgagaaggaaggaattccttccccaatgcccctcagcatatctcttgtacaggtccaagtgttcctaattaatgctttgtggcttaaacttttttaantccctcagttttttgggttcnttctcttccccngggaacaaagagtcttagtgaatttcancctcgttccgnattcttggggctcg

SEQ ID NO: 4929 - DNA, 423 bp, Homo sapiens
  I.4929 (W02063)
tatttaaacattttattccttaagtgaaaacagtctaggaatcatatggcagctctgtggtaacattactttatctgagaaatcctcagcaacccaagtttcttctatcgtgttgttctactattcatggttcacattcccaagatcagctcatggtccaagaaaggtgttttgctgccagccttcacattgacactggagtccacaagaagcaggaaagaataaatagcagcaaaagatacacaccacttatcttttaaagaagttgccacacttcacttttaatgggccagaactttgccatgtttctacacctagctgaaaggaaatactgtgtttattccaggcttcaatgtgaatcaatgaaatcagaagctataacattaggggaagacttcaacaggacaaggcacacctctccca

SEQ ID NO: 4930 - DNA, 558 bp, Homo sapiens
  I.4930 (W44359)
  misc_feature (198)..(198): n is a, c, g, or t
  misc_feature (486)..(486): n is a, c, g, or t
  misc_feature (521)..(521): n is a, c, g, or t
  misc_feature (535)..(535): n is a, c, g, or t
gtaaaacgttaaagtactggattaagaaaacaacaacaggctgggcgcagtggctcacacctgtaatcccagcactttgggaggctgaggcgggtggatcacctgaggtcaggagtttgtgaccagcctggccaacatagtgaaatcctgtttctactaaaaatacaaaaattagctggatgcgatacacgtgcctgnagtcccagctactcgggaggctgaggctggagagttgctcaaacccgggaggcggagattgcagtgagccaagatcgcaccactgcactccagcctgggtgacagagcgaccctctgtctcaaaaaaataataataataataaataaaacaacaacaaaatgcatcagagagccaaaacattcagtattgcattttcacataggtgatgaaatgactttggaactttatctggtgttatagttatgagttgctttgggagactttggaactctctggtagctattggntcataacactttgctccataaccctgatgtccgcngtatctaagtatcncagccctttcatccattaactct

SEQ ID NO: 4931 - DNA, 372 bp, Homo sapiens
  I.4931 (W45712)
  misc_feature (354)..(354): n is a, c, g, or t
ttttttttttttttccacaaaggcttttggttttattattattatttttaacaaacatacattggaaatagtaaaggtttctaattgaaaagagacctaatgcatagtttctctgcagcatagaagaccacctgtttccaaacttcaaggttagggctttgaaacattccctggtaaattatctccagctggctagctagttaggcatattggtgcacattggtatcaaaggtgattattttttgcatttagcaaatgagcgctattacttttttgatgtatttttaattcagattgctcaaaagtcttgttatttcaagggagccttatgtcataccacaaatattgataccnccccagtggaaatggtgg

SEQ ID NO: 4932 - DNA, 418 bp, Homo sapiens
  I.4932 (W39430)
  misc_feature (296)..(296): n is a, c, g, or t
  misc_feature (331)..(331): n is a, c, g, or t
tttgattatactcactcaaggcagtgcaagatcttgaagtactttttagcagttaagtaatattgaattgtattgaatagtttacatagtttattctagtctttgaaaattactgaacatggacaatgtgcatgtcattgacatctgccttagaacttctgggacaatcctgattccgagagattctatcccattatttacatataccaaaaatactttgttaatttaatgtgttggcttcccaactcctgaacaccgacacaattttattattagattttgtatggtgattttanggctaatgaaaacatgatcattaatatgtatatangatacatttttatttgttacaaatgtttgagcagctcactagcccacccctcctctattttggggaagagaatttactacccttttt

SEQ ID NO: 4933 - DNA, 377 bp, Homo sapiens
  I.4933 (W35358)
  misc_feature (320)..(320): n is a, c, g, or t
  misc_feature (353)..(353): n is a, c, g, or t
  misc_feature (363)..(363): n is a, c, g, or t
acttttttgtgacagatttattgaaatatatagttcacgtgcaatgaaatctaccctttgaaagtgtacaatgcattgtttgtaatatatttacagagttgtgcaaccatcactgccatctaatcttagaacatttttatcactcaaaaggaaatcctatactcattagcagtcactccccattcttcctccccaagtccctggcaaccacaaatttgctttctgtctttatggatttgcctgttttggaaatttcatataaatgagttcatacagtatgtggccttttgtgtctggcttcttttacttgccttcaaggntcatctatcttgtagcatgtatcagtactttantcccttttanggaccaaataaata

SEQ ID NO: 4934 - DNA, 458 bp, Homo sapiens
  I.4934 (W32922)
  misc_feature (278)..(278): n is a, c, g, or t
  misc_feature (306)..(306): n is a, c, g, or t
  misc_feature (338)..(338): n is a, c, g, or t
  misc_feature (353)..(353): n is a, c, g, or t
  misc_feature (361)..(361): n is a, c, g, or t
  misc_feature (367)..(367): n is a, c, g, or t
  misc_feature (390)..(390): n is a, c, g, or t
  misc_feature (401)..(401): n is a, c, g, or t
  misc_feature (419)..(419): n is a, c, g, or t
  misc_feature (454)..(454): n is a, c, g, or t
ggaagattggttccaaatgggtactgaaaatagattcaactaggctgtagaagagaaatgttcaccatgtagggaatgttattttgtgttccacatctgcaatttactgtatgtttgaatttaaaagtaaaaaaactcaaaaaacttgaccttttttttcaaactaaagtcctagctgattattttaactctcagtgtgctgtctttatattaagaatagagaaacgaccataactttctcaaatggcattagttttgccttaagttttttttgaccntcagatggaaagtaagcaagttggttgncaagtttgaaagttccaagattcctgggcctncccatattccagganggaaaccnctttanttcctcccagtttttaccaaagnaatcctttccnggtaatttcccggttccnaaaaaactaacttttaaagccccctaataatggcncctt

SEQ ID NO: 4935 - DNA, 430 bp, Homo sapiens
  I.4935 (W31797)
gaccaatctaaattagtcaccctccatcacattatcctcttttttcatcaaagtccttacacctgtctggcaatttcttattaattgatttgtttttggtaaactccacgaaaggtgggagtcatttctcttgtttccattttttccacagcacttagaacagtgcctggcaatcggtaggtgctcaatatgtgtttactggatgaattaatgagtgcatgctcatgggcaaggatctcattgtgctggaaaagcagcagagtgagacaaaactggacaggtgagtgaaggtcacaccaagaaggttcttagctgccaaactaaagggtttggatcttactctctggagaaaagggtgtagctagtggttttataggagaggagaggcgcgatccgcacttgagaaggtcaatttggccgctgtgtgtag

SEQ ID NO: 4936 - DNA, 408 bp, Homo sapiens
  I.4936 (W15339)
aatttttaaattgacatttattaaattcaaacagtatttgaggactatctagtttatatacatgttgaggttgataaagtattgaggactatctagtttatatacacgttgaggttgataaagttcaaattctgttttaggaagttaacaatgaattgagttcattttaactgaatgttactataaaagatggttttcttgctgcaatgtaaatctgctattaagaaattagcaaagtggctggtggtgtttgtgcctttaagatcatcgttcaaaagaattcagcaaactcgataacaaaggtaagacaaacataacctttattctctctcaaaaacccagagaacagggcctgggaaccatattcgttaatttaaccagaatcagaatactttaactttcataggg

SEQ ID NO: 4937 - DNA, 421 bp, Homo sapiens
  I.4937 (W04695)
  misc_feature (145)..(145): n is a, c, g, or t
  misc_feature (394)..(394): n is a, c, g, or t
  misc_feature (407)..(407): n is a, c, g, or t
gttttcttatttgctttgttttatttttcttgtgaaatacattgtaaatgaaaagcatataagtaatgcatattaacaatttaaataattattttacaaagaaaacctgtgtactcggcagccaacttaagaaacagaaactttngatggcagaggtgggcggattacttaagaccaggagttccactcgcctggacctcccaaagtgctgggactacaagcatgagccaccacacccggcctctaccaaaaattttaaaaggccgggcttggtggcatgtgcctgcagtcccagctgttactcaggaggctgagacaggaggatcgcttgagtctgggaggcttgaggcttgcagtgagccatgatcgccaccattgctctccagcctcagcnaacggaacgagancccatctctaaaaa

SEQ ID NO: 4938 - DNA, 178 bp, Homo sapiens
  I.4938 (AA058983)
ggcacagggttttagatgtatagagtattgatatgagttaacactttttagtagatggcaaagtgggcttgatgttcaaaagtaatgttcgagttagggttcatggtccctttctcagtaattttttcttaataaaagtaaacactggttcaaagacaaatagcaagtattccctcct

SEQ ID NO: 4939 - DNA, 294 bp, Homo sapiens
  I.4939 (AA059013)
  misc_feature (147)..(147): n is a, c, g, or t
  misc_feature (158)..(158): n is a, c, g, or t
  misc_feature (177)..(177): n is a, c, g, or t
  misc_feature (186)..(186): n is a, c, g, or t
  misc_feature (193)..(193): n is a, c, g, or t
  misc_feature (221)..(221): n is a, c, g, or t
  misc_feature (235)..(235): n is a, c, g, or t
  misc_feature (253)..(253): n is a, c, g, or t
  misc_feature (264)..(264): n is a, c, g, or t
  misc_feature (271)..(271): n is a, c, g, or t
tttttttttttacatcaaaaaccatactttattttatgtatagcaatacaatttacatattaaataacactataatagaatgatttgatatagtttaaacagaagaaaaagggaaaaatttcaggttacaaaacccctccccctggnacaaatttttnaaaaaaaaaaaaaagcccnctttttccnaatgggncaatgggacgaatgttttccagtgaccnattatggtccaaantcccattggccaaatggnccatgggattnaaaaggnaaccccactttcacaaatcactg

SEQ ID NO: 4940 - DNA, 344 bp, Homo sapiens
  I.4940 (AA057590)
  misc_feature (4)..(4): n is a, c, g, or t
  misc_feature (73)..(73): n is a, c, g, or t
  misc_feature (102)..(102): n is a, c, g, or t
  misc_feature (108)..(108): n is a, c, g, or t
  misc_feature (110)..(110): n is a, c, g, or t
  misc_feature (119)..(119): n is a, c, g, or t
  misc_feature (170)..(170): n is a, c, g, or t
  misc_feature (171)..(171): n is a, c, g, or t
  misc_feature (180)..(180): n is a, c, g, or t
  misc_feature (243)..(243): n is a, c, g, or t
  misc_feature (270)..(270): n is a, c, g, or t
gcgnctcgccgactgcaggaagagcagcgagcccggctcgcgcccagcgacagggagccgtccagactgatgngaggcccgggcgcgggcctctgccgcggntcgctncntcctgctcntcgtgcttgcgcttgtgcgagtccatctgcgacatgcccaccaccgtgtgnnggcaccggngaaggtgcagtggaagtgcgagcattgagcttgtacttgcagtcgggcacggcgcagtcggcntgagagctgaactggcagaagccgcgnacttgatcacgtcctgtttgccgtggtgcttgcgatgcgccgtgaccttggtgctgtcggtgcatgcggaacgg

SEQ ID NO: 4941 - DNA, 469 bp, Homo sapiens
  I.4941 (AA056242)
  misc_feature (35)..(35): n is a, c, g, or t
  misc_feature (242)..(242): n is a, c, g, or t
  misc_feature (351)..(351): n is a, c, g, or t
  misc_feature (369)..(369): n is a, c, g, or t
  misc_feature (399)..(399): n is a, c, g, or t
  misc_feature (418)..(418): n is a, c, g, or t
  misc_feature (454)..(454): n is a, c, g, or t
gtatgttgtttcatttaattcttaaataatccttnacagactcagagaggtgaagagagtagcacaggtagtatcagaattgggattcaaacctgacacatacactgagcactaagttaaaaccgggcactgggcagctgctgaggatgcgatggtgagtacaacagactgcttgctctttttgatatctagaatcttacagctctgctgtgctcatccttgtctgttgtcatttactacgntgacatcttcgttgactacctagaagcagctgcttcgacatctatcccaacctgaatcccgtcaaagggatgattacaacaaatgtgctttttagtctatcatctctangctagtgtttcacagttngggggagtatcattttcctgggtgactttncatagagcaagctccccanagggccaaggaatactcaatctagattcttccaatnctccggtaacccagg

SEQ ID NO: 4942 - DNA, 501 bp, Homo sapiens
  I.4942 (AA054076)
  misc_feature (125)..(125): n is a, c, g, or t
  misc_feature (134)..(134): n is a, c, g, or t
  misc_feature (394)..(394): n is a, c, g, or t
  misc_feature (434)..(434): n is a, c, g, or t
  misc_feature (476)..(476): n is a, c, g, or t
  misc_feature (494)..(494): n is a, c, g, or t
caatttaattttcacatgccttctcatttcaggaaaggttgaatccaggtgctcaattgattttaggagataaaatttaatttataaattaggcacagtaagatattaacaacaataactaatancaaaatagnacaattatagaactatagtgtaataaaagttatgcaaatgtggtttctctctgtctctgtcaatatcttattgtattgtaccattggtaactgaaactgaagaaagcaaaaccacagaagagggttgactgctatactccagttggactgaggggaaggcactttagattaaagactaccaccgtgtaggaaagggacaattctcaccgagagaaagtggaattcttttaccagaaacaggagaaggactccaagccatngtaaaaccacacacaccatttcaccaacccataccattcngttttctactaaaaatgttaaactggttttccaatggtttcnggtaggagaaaatttccngagttat

SEQ ID NO: 4943 - DNA, 437 bp, Homo sapiens
  I.4943 (AA054265)
  misc_feature (414)..(414): n is a, c, g, or t
aagcagttggaaaaacgggatcagcaataaatactataaaacaaacaatattaaatatggaaaatcaggagataataacctgatgacccagaggagaatatataactctggaaattttctcctacagaaaccattggaaaacagtttaacatttttaagtagaaaacagaatggtatgggttggtgaaatggtgtgtgtgttttacatggcttgagtccttctcctgtttctggtaaaagaattccactttctctcgtgagaattgtccctttcctacacggtggtagtctttaatctaaagtgccttcccctcagtccaactggagtatagcagtcaaccctcttctgtgggttttggctttcttcagtttcagttaccaatgggtacaatacaataagatattgacagagancagagagaaaccacatttgcata

SEQ ID NO: 4944 - DNA, 435 bp, Homo sapiens
  I.4944 (AA054106)
  misc_feature (329)..(329): n is a, c, g, or t
  misc_feature (390)..(390): n is a, c, g, or t
tccctcttcatctaaacatctcctaccctagtttagtgcctcataattctttgctaactactgtgttaactccagatggtttcccagttactagtctcatactgaccattgcttccagataatcttcctggcccaaaaattttccttgaaggcctggaataaatgtcactccttccatccaccaagccttggggatatactttaacctattgattaagaatatagatagatggagccaggcgcggtggctcacgcctgtaatcccagcactttgggaggccgaggcgggtggatcacgaggtcaagagatcaagaccatcctggccaanatggtgaaaccccgtctctactaaaaatacaaaaaattagccgggtgtggtagccgagcancctgtagtccccagctactcggggaggctgaggcaggagaatggg

SEQ ID NO: 4945 - DNA, 432 bp, Homo sapiens
  I.4945 (AA047895)
  misc_feature (367)..(367): n is a, c, g, or t
  misc_feature (374)..(374): n is a, c, g, or t
  misc_feature (382)..(382): n is a, c, g, or t
  misc_feature (432)..(432): n is a, c, g, or t
gctattagaacaaatggctacatgtaggattattaaatcaaaagaatatctatatatgtgtagtttatatttagtcctgtgagaactgctggctcatgttcttcagcctgcattctactgaggtgttggggtctttttcttcatctgtaagggctctttaaatagtaagaatgttgaccccttgtcaataaaattacaaatgtattttcccagtttactgattgccttcaattttatttacaagtctctgctatatgttttgtttctatttagtcaaacggatcactttattttctgcttctgatatcatgtctttgctaacccaccctggacactgtaaaaatgccagcctattttccttttgtcnccatgtntaatttgngaatttagattttaattaaaaaagaacattttatttcacactggacaaan

SEQ ID NO: 4946 - DNA, 218 bp, Homo sapiens
  I.4946 (AA046340)
tcagtccattaaactgctatcttcaactaaaaagaaaacaagcaataacatcgaagatgacacaattctcaaaaccaacaagcacatttactcccagcttttgagagcaactgcaaataaaaccgcgactcttctggaaagaatcaacgttatcgtccacctgctgggccagcttgccgccggagttgcagcgagcagcaatgccgttcagtgacttg

SEQ ID NO: 4947 - DNA, 324 bp, Homo sapiens
  I.4947 (AA046262)
  misc_feature (317)..(317): n is a, c, g, or t
gacattttaaataaatagtttatttattcaaaatagttttcttaccttattcacagtttcaagtttgaaatgaaaaaaaggggtagtacctgttcttgatcaactgtcatataaagtcaaaagtgaatcctttcagaacatgcattaaatacagcaaattgcacaacagctcgtctttgaaaaatcctgcactgaagcttatgaagaacacaccttttttctggacaatttaaaaaggaaacactgtagatgtacaggaaggtctccttaacccacttgaacctgtaattgtcatctggggtaaaagttctctttgnccaaacg

SEQ ID NO: 4948 - DNA, 572 bp, Homo sapiens
  I.4948 (AA044876)
  misc_feature (488)..(488): n is a, c, g, or t
aaccggcgcaacgagaagcctaggcgttgatgggagctgtctggagcaggggtccccagcccccaggccgcagactgatactagtccatgacctgttgggaactgggctacacagcaggaggatctctaccaccagtcctatgaatgcgtttgtgtcctcttcgcctcagtcccagacttcaaggagttctactctgaatccaacatcaatcatgagggcctagagtgtctgaggctgctcaatgagataattgctgattttgatgagctgctctccaagcccaagttcagtggggtggagaagatcaagaccatcggcagcacctacatggcagccacaggttaaatgccacctctggacaggatgcacaacaggatgctgaacggagctgcagccaccttggcactatggtggaatttgccgtggcctggggtctaagctggacgtcatcaacaagcattcattcaacaacttccgcctgcgagtngggttgaaccatggacccgtagtagctggagttattggggccagaagccgcaatatgcatttgggcaacacagtgaacgtggcc

SEQ ID NO: 4949 - DNA, 641 bp, Homo sapiens
  I.4949 (AA044828)
  misc_feature (471)..(471): n is a, c, g, or t
  misc_feature (547)..(547): n is a, c, g, or t
  misc_feature (563)..(563): n is a, c, g, or t
  misc_feature (572)..(572): n is a, c, g, or t
  misc_feature (587)..(587): n is a, c, g, or t
  misc_feature (622)..(622): n is a, c, g, or t
gggctccagacaccccagagtctctttattgaggttcttagaaggcgagtgcaatctcagcctagggtagctgaaggaggtccagttcgtgtcaagtctgtgttcaggaagtaggtgcagagctgccctttgcctttcaccttgatgacaccccggctgtagcaggtgtagcccagggactgtagggcccatgctgtctcctcagtcacttggattttgccaaggactcctgtactctccatgcggctggccacgttcactgtgttgccccaaatgtcatattgcggcttctgggccccaataactccagctactacgggtccatggttcaaccccactcgcaggcggaagttgttgaatgaatgcttgttgatgacgtccagcttagaccccagggccacggcaaattccaccatagtgccaaggtggctgcagctccgttcagcatcctgttgtgcatcctgtccagangtggcatttaagcctgtggtgccatgtaggtgtgccgatggtcttgattttccacccactgaattgggttggaganagtcatcaaaacagcnattactcantgagcagctcagaantctaggcctcatgattgagttggatcaggtagaancttgaatctggatgagcga

SEQ ID NO: 4950 - DNA, 560 bp, Homo sapiens
  I.4950 (AA044749)
taaaaacatgtgcctggcatataagtgcttcttcaggaattcttttttggatgcatagttattattttttaaacaaactcagattttcaaacactgattttcttctctgaacgggcattgcattgttttaaacagtagctcctggaataatgccacctttagtattttagactttcaaacaacaattggaattggaaaatgctttcagctgggagcactttcctaatacctttgtaggtaatgggattctctatttgtgctgggtgacaaacggacagtgccctggacagactgcctaccctctgcagaatctaccaaaaagtagagttttcccatgagactgcttgtggtccatctaaaaatgaaaaaataatcagagaaaatgcgcaaagccttttctaactacagttatgaaatgatggcttaaagaggtatttagaaaataagagtggagtaatacagaaacaaaatctgaagaagaaagtttgcttaggagctgatgctctttgtctacaaacaagagggtaaggagctggatccaattgaatgagatgttttgt

SEQ ID NO: 4951 - DNA, 280 bp, Homo sapiens
  I.4951 (AA044673)
  misc_feature (10)..(10): n is a, c, g, or t
  misc_feature (236)..(236): n is a, c, g, or t
  misc_feature (246)..(246): n is a, c, g, or t
  misc_feature (251)..(251): n is a, c, g, or t
  misc_feature (270)..(270): n is a, c, g, or t
  misc_feature (276)..(276): n is a, c, g, or t
aaagaagcantttcctgttttatttagtccagattaataacggttaagttgccatgtttcttccagaaaaagctttttcacttttttctcagcaagtcagagtttacagaaatcatctcatagatatactttattattccagcttaatccatctgaaaaaaaattcaatgctttttgacaccaattgttacactatgcatcattaggaaaaaacaattcacagtaataaaaagatnctaatatttnaggcnagaattaaaaatcccggcngctaanatgg

SEQ ID NO: 4952 - DNA, 396 bp, Homo sapiens
  I.4952 (AA044344)
acagtttgattattcttaaaaattgaaaacataagctaaagagatgactaaatggtagattattttgtgtgtgcatgctaggaaaaatgctgttgctttagttttgagctcttcaatgagtctaattgtggtaaggaacaatataaaatcagtttaaagatctttaaaggtagaattttaaataggcatgaaatatagtgagaacttttagtaaacatactacttactctaaaatcaaacattttattttcctaaagaatataggttgccaaaaaatattttatctctaaatataggttagctgtaattatttcatgaatttttttttttttcaatgtaactttttttggtgaagattcatggttcctaagttctgtattcaagtttttgggaaac

SEQ ID NO: 4953 - DNA, 337 bp, Homo sapiens
  I.4953 (AA044225)
  misc_feature (324)..(324): n is a, c, g, or t
ttttttaatttaaaggtttagtttatacaattgataattctgcaaaccacaattatgtcaataactacatactgtaataaaaataaacaaagtcatacttaattctataatgcattaagaataacctaaaaaaacaaattgtgaataaaggcatatttaataaattagggaacatcttaacttctaatagactgggggaaatttttaagttttctatgtacacaaaggcagtgggaacaaatgaaaaaaccaattactacattgttgcagcacattaaagactggatggtgtatattattcacaattacatcctctttcccatngcctggcagagga

SEQ ID NO: 4954 - DNA, 219 bp, Homo sapiens
  I.4954 (AA040503)
  misc_feature (4)..(4): n is a, c, g, or t
  misc_feature (32)..(32): n is a, c, g, or t
  misc_feature (82)..(82): n is a, c, g, or t
  misc_feature (87)..(87): n is a, c, g, or t
  misc_feature (114)..(114): n is a, c, g, or t
gctngagaagagaaggtggtcaagcctgggcntgtggacactgggccctactcctgcctgtcaggttgtgccaagggatggnattanagggagggctgagtgggaagcccttgncactgctgagttcctcgagtcctgcaggatccagggccggcctttcagaacctctcttccctctagggagcccttctgcctgccccggaatctggggctggggct

SEQ ID NO: 4955 - DNA, 386 bp, Homo sapiens
  I.4955 (AA040502)
  misc_feature (261)..(261): n is a, c, g, or t
gtgacacctgttgtgaacccagtttccagaggagcaaacagaggctcaggcaatgaggcccctaacctggactaccctggtggtccctgctcctaaccactgacccacccagcctcccacaaccacagggggctagagcagtccagtgctccctcccctgctaggctcctcttctgtgctctttctcccacatcaggacccactgggagagctatcctagggtagcctccagctccaggactccagggtgcccgtcaatangcctggctaatttaatagatgcaggagagagtgatgtggagggtggtgggggcaacgggacttgctttcctgagaggtgggactcaggcctcttgaggctctgggtacctgtcaggctggggtat

SEQ ID NO: 4956 - DNA, 506 bp, Homo sapiens
  I.4956 (W40469)
gacggcaggagaatcacttgaacctgggaggcggaggttgcagtgagccaagatcacgccactgcactccagcctgggcaacagagtgagactccgtctcaaaaaataaataaaatttttttaaaaaggtcaaaatgctataaaatttaacatctactatttaaatttataaaggagatgcagtgataattatgcatatgcgttttttgacttgttagctacattcttttttactatacttgctttctttattaagttctacattttgtcctacattaatatgaatcatttgaagtactttattctaatttaaatttgaaaatactattttctgaaaaaatgtattttattttggaagctcttcatttttaaaaatttgtggtttatattctggagcaaattaaaagtagctgttttggcccatttaaaaatggttaaaagaatatgagtggcattaagagatataatgaccactataactattacctggacctgtttttaaaatc

SEQ ID NO: 4957 - DNA, 511 bp, Homo sapiens
  I.4957 (W30697)
  misc_feature (16)..(16): n is a, c, g, or t
  misc_feature (311)..(311): n is a, c, g, or t
  misc_feature (351)..(351): n is a, c, g, or t
  misc_feature (455)..(455): n is a, c, g, or t
  misc_feature (467)..(467): n is a, c, g, or t
  misc_feature (476)..(476): n is a, c, g, or t
  misc_feature (500)..(500): n is a, c, g, or t
aagaaaaatatcaganaaggcatgattctgacaaggaagaaaaaggcagaaaagagccaaaaggattaaagacacttaaggaaatcagaaatgcatttgatttatttaaattaactccagaagaaaaaaatgatgtttctgagaataatcggaaaagggaagaaataccactggattttaaaaccatagacgatcacaaaaccaaggaaaaccaacagtcacttaaagaaaggagaaacaccagagaccgaaacggatacttgggcatacattgctgcagaaggtgatcaggaggttttagacagcgtgtnccaagcagatgagaattcagatggcaggcagcagattctnagtttgggcatggacctgcagttggaatggatgaagttggaagatttcccaaagcaccttgatggggaaagatgagaattttgctgcaacagatgccattcccnagtaatgtgttnagggatgcngtgaaaatgggggattatattacngtaaaagttgc

SEQ ID NO: 4958 - DNA, 434 bp, Homo sapiens
  I.4958 (W25618)
ccttggataaattttgtagctggtacactctggcctgggtctctgaattcagcctgtcaccgatggctgactgatgaaatggacacgtctcatctgacccactcttccttccactgaaggtcttcacgggcctccaggtggaccaaagggatgcacaggcggctcgcatgccccagggccaagctaagagttccaaaagattctcaagatttggttttagtcatgaatacataaacagtctcaaactcgcacaattttttcccccttttgaaagccactggggccaatttgtggttaagaggtggtgagataagaagtggaacgtgacatcttttgccaagttgtcaagaagaatccaagcaggtatttggcttagttggtaagggctttaaggatcaggctgaatatgaggacaaagtggggccacgtttaag

SEQ ID NO: 4959 - DNA, 437 bp, Homo sapiens
  I.4959 (W25093)
  misc_feature (18)..(18): n is a, c, g, or t
  misc_feature (240)..(240): n is a, c, g, or t
  misc_feature (360)..(360): n is a, c, g, or t
  misc_feature (395)..(395): n is a, c, g, or t
gaatgtaagggattctanaggagggtaaatctcaaagtgctctgaaatcatccctctaaaatctgtcctgtggtgtgctaagatgtctgttgcctttttatgttaagctaaggaacttgaatgccttacctaataactcaactagtagtaagctcattttgtaaatatgaaaatggctgtaagaagtggcattcatgtatattcaatgttagtcaatagaccatagtgggctggatggcnttaacaagccaaattccgcaattttttttccttttttccccttcatacttgtatgatctcacctgaccacgtgatttcttttcctcctaaccccatgctaccaccattttctggaaatcnaagagatgtggtagtaaatcatacagtacacacgntcatctgagatcaatatgagcacaaaactcatcaagtagggc

SEQ ID NO: 4960 - DNA, 252 bp, Homo sapiens
  I.4960 (W24967)
  misc_feature (38)..(38): n is a, c, g, or t
  misc_feature (166)..(166): n is a, c, g, or t
  misc_feature (171)..(171): n is a, c, g, or t
ggtggatcctgcctgagaccagtcagaaggccctggancagctggactcccaggctctattgatgctgggatcacccagatgccaagatatcacattgtacagaagaaagagatgatcctggaatgtgctcaggagagaagaaaaaagcagaaagcagctgggaantttanctgcttgagtgatctgggattctcaagtagcatacataacatcaccttggctttggttcctttagataccaagcatgtgtt

SEQ ID NO: 4961 - DNA, 360 bp, Homo sapiens
  I.4961 (W24646)
  misc_feature (146)..(146): n is a, c, g, or t
  misc_feature (151)..(151): n is a, c, g, or t
  misc_feature (153)..(153): n is a, c, g, or t
  misc_feature (155)..(155): n is a, c, g, or t
  misc_feature (157)..(157): n is a, c, g, or t
  misc_feature (236)..(236): n is a, c, g, or t
  misc_feature (244)..(244): n is a, c, g, or t
  misc_feature (297)..(297): n is a, c, g, or t
  misc_feature (331)..(331): n is a, c, g, or t
gcagaagcactgcctggccttcagccccaagaccatagcaggcatcgctcagctgtgatcctctttgttgctgtggttgccaccaccatctgctgcttcctctgttcctgttgctacctgtaccgccggcgccagagctccagagngcatntnananggccaggagattccaatgacaggcatcccagttgcagccagtatacccatacccccaggaccccaaagctgggccctgnacccccanagcctggcttcatatacccacctagtggtcctgctccccaatatccactctanccaagctggggcccccaagttttacaaaccctgnaagcctccttccttccctaattatggcaa

SEQ ID NO: 4962 - DNA, 457 bp, Homo sapiens
  I.4962 (W23646)
  misc_feature (33)..(33): n is a, c, g, or t
  misc_feature (35)..(35): n is a, c, g, or t
  misc_feature (36)..(36): n is a, c, g, or t
  misc_feature (37)..(37): n is a, c, g, or t
  misc_feature (237)..(237): n is a, c, g, or t
  misc_feature (294)..(294): n is a, c, g, or t
  misc_feature (304)..(304): n is a, c, g, or t
  misc_feature (305)..(305): n is a, c, g, or t
  misc_feature (332)..(332): n is a, c, g, or t
  misc_feature (419)..(419): n is a, c, g, or t
agcggcgactccgttcaccccgtgtgctgttantnnnccagcctccccgtgaagctgcagacactcaggatctggacttcgaggtcggtggtgctgcccccttcaacaggactcacaggagcaagcggtcatcatcccatcccatcttccacaggggcgaattctcggtgtgtgacagtgtcagcgtgtgggttggggataagaccaccgccacagacatcaagggcaaggaggtgntccgtgttggcacgaggtgaacattaacaacagtgtattcaaacaagtacttttttnagaccaagtnnccgggacccaaatcccggttgacagcnggttcccggggatttgactcaaaagcacttggaactcatatttgtaccacgactcacaccttttgttcaaggcgctgaccatggatnggcaaagcaggctgcctggcggtttatccggataagat

SEQ ID NO: 4963 - DNA, 249 bp, Homo sapiens
  I.4963 (W21246)
  misc_feature (211)..(211): n is a, c, g, or t
  misc_feature (226)..(226): n is a, c, g, or t
ctgaaccacatagaagtatacagtatcagtgaagcagctagctgtaaaatgtgggctgagtagcataacacttttatctgaaaaccttcaattcatagtatctgaaagcattaatattctcagtcattaatttttccaactacaaaatgaaggcactttgcaagcaatcacagacttattgtaatagttaattcttgtttttgattattgncatcttttgggggantaaagtgttttggcatgttgggc

SEQ ID NO: 4964 - DNA, 208 bp, Homo sapiens
  I.4964 (W21545)
gaacatcctataaaattttcttccctgagatgcaactataaaacttggccttattctgagaatgcttaacatagatttcatccatactgtaacactgattttgttgttgttgtccttaaagcagctcagcttcctgaggtagtgttatgtctctgtggcaacaaggtgaaaatgtctagcttattttgtcaaagtcaacaataatcca

SEQ ID NO: 4965 - DNA, 466 bp, Homo sapiens
  I.4965 (N99049)
  misc_feature (244)..(244): n is a, c, g, or t
  misc_feature (344)..(344): n is a, c, g, or t
  misc_feature (358)..(358): n is a, c, g, or t
  misc_feature (374)..(374): n is a, c, g, or t
  misc_feature (418)..(418): n is a, c, g, or t
  misc_feature (430)..(430): n is a, c, g, or t
  misc_feature (436)..(436): n is a, c, g, or t
  misc_feature (451)..(451): n is a, c, g, or t
  misc_feature (456)..(456): n is a, c, g, or t
ttttttaattcatatgccatttattaaatctgtgatctactggaaacaaaaccatcaggacttgtgctggatgtttttctgagcagttacacacaggccactccaattataatatgtctacataaacagatgtatgatatgtgacttaactgtggcacagtcgcttctcacttacgtctctaaatggttcttcagcaagtcgtacacaagcacattgttagactgcttcgcaaagtgcagggcntattctggtgctttgacaaaatattgcagtcagctccacattcaattacgagtcgtacgatgtctgaatttcctcttttacaggccttcatcagtgcagntcaccattgctttntggacatttacaaaanccctgttccaaaagaatagcatgttgttaaaagtctctctgcancatgaatgaggnggtggncgtctctgcgacgtnattcngctttgtgag

SEQ ID NO: 4966 - DNA, 550 bp, Homo sapiens
  I.4966 (N95494)
  misc_feature (434)..(434): n is a, c, g, or t
  misc_feature (497)..(497): n is a, c, g, or t
  misc_feature (527)..(527): n is a, c, g, or t
taaaggtgagtccgggtattttattttgccttaagagtcaacacaatttctaacattctgccattagaagtaatacaatttctaatatcctgcaatgagcattgctaaaagagtcaggagaaccatgagaaatatgcatatgaaaataaaccatgtgacaggggacatagaatccaaagagattccagcagagaatcaaagtgcacgctcacctactctgacctctccccataaaagatgagagtcatatacaaatagatgcttgtattctgtacagtcctatttaaaaatgcaccacataaaataagaataagacaggaacacactcatgaccacataaaatacagagaatgtgagcgtgcttcttgctgagatacccacaatcaaatttagtaccaagtgactggctgataagaggtaagcacactgaggangatggtgaagaaactatagccaagaaaaaatgtcctcgctgttgagtttccagaccagactgnacagcccatatattagcttcattgcttcanagatgccattgggatcattttgc

SEQ ID NO: 4967 - DNA, 468 bp, Homo sapiens
  I.4967 (N95187)
  misc_feature (343)..(343): n is a, c, g, or t
ttttttttttttaaaaacaatttatttacaaaatatttaataggaagaaaaaagaaatacaaggcattacatgtttttatgtgttttgtcatttgatctagcaagttattacagatattatccccagtcacagaagaagaaactgaggttcaataatgttaagtaattttaccttaaagtaagggcgggaacagaaattcttaacagagttgtgtggctctaacacccatgtacccttcaccacaacagatggcatgtttattatgtctatttgaaacataaattatgagcctgaaagtccaaatgttacctagagttaagactattccttttctctagccantcctgtaaggtacagagtcagagatatgacggccctacagcaatgtggacaggaggcaggctggttcaaaccagaagcgtgaaaatgtgtcctgaggtgccacctcactccataagatatcctga

SEQ ID NO: 4968 - DNA, 416 bp, Homo sapiens
  I.4968 (N93967)
  misc_feature (355)..(355): n is a, c, g, or t
  misc_feature (372)..(372): n is a, c, g, or t
  misc_feature (397)..(397): n is a, c, g, or t
gcaacatgaaacttatgaattgtttatttctggaattttccatttaatattttcagaccatagggaaagcaaaaccacaaataaagggactactatatgttgacccacatgaaggaacttatttcataaaaataaaaggagcaaaatatttaaaaaatatgtataagggtgtttattacaatattatttgtcgtgacaaaaaactggaaacaaacttattatggactattctgcagttatttaaaatcactatcaaatgacaatatccatcagttactaagagaggggaaagcaagtattagagtaatatgtttgcatgattccggtttttaaaaaaagtaccccctccccatcngtggtggacccttttantccattcccaccaaatattttattngggtggcccacctatatgg

SEQ ID NO: 4969 - DNA, 144 bp, Homo sapiens
  I.4969 (N93475)
tttttttttttttttccattatgcttgactctgtaatgaaagtctaggaagtgaatgtaacatgaaatcattccttccgccttagcagacagatggagagagacattccagtttgtttccagccttttgtctttggagcatttt

SEQ ID NO: 4970 - DNA, 427 bp, Homo sapiens
  I.4970 (N93236)
  misc_feature (324)..(324): n is a, c, g, or t
  misc_feature (411)..(411): n is a, c, g, or t
  misc_feature (421)..(421): n is a, c, g, or t
aaccctgctcttttattacatcagtagtatagtaagtgcataaagtatagaagagaaagaaaatttcaggagagaaacttacaaaaaacttgaagtttgatgcgtcaaacacaaaatagtttaaaacagtttacagttcttataagcactatcataattttttctacccaaataattcaggtcttcattccatttcaaactgcaatccagaaatgaagattttcagtgtaaaaactgttcagagaaatctaattcattatgtaatacatcttattaatttcagttttcaagtattcaagtaatgcatacccaagtattttctgnttacagcaacacatttacagactaagcctcaaacatgggggaaaaattccttttaaaataattggtacacttttctggtccaacggnatcaaacccnagacat

SEQ ID NO: 4971 - DNA, 475 bp, Homo sapiens
  I.4971 (N92873)
  misc_feature (346)..(346): n is a, c, g, or t
  misc_feature (450)..(450): n is a, c, g, or t
  misc_feature (456)..(456): n is a, c, g, or t
  misc_feature (468)..(468): n is a, c, g, or t
tttatccttcagcaagcctcttttaatgatttaaaaaagaactactaacttttacaaataattgtgttcagagacagactttcaatctaaagaaaagatcaaggacctagctctcgtggcagaatgcagaaacagaagcctccagattgatctctgcagatgctaacgtggcccactttgtcctcatattcagcctgatcctaaagcccttacaactaagccaatacctgcttggattcttctgacaactggcaaagatgtcacgttccacttcttatctcaccacctcttaaccacaaattggccccagtggctttcaaaagggggaaaaaattgtgcgagtttnagactgtttatgtattcatgactaaaaccaaatctggagatctttggaactcttagctggccctggggcatggcgaagccgcctgtgcatccccttgggtccanctgganggccgtgaagancttcagt

SEQ ID NO: 4972 - DNA, 392 bp, Homo sapiens
  I.4972 (N92412)
  misc_feature (152)..(152): n is a, c, g, or t
  misc_feature (155)..(155): n is a, c, g, or t
  misc_feature (186)..(186): n is a, c, g, or t
  misc_feature (188)..(188): n is a, c, g, or t
  misc_feature (257)..(257): n is a, c, g, or t
gagttatgtctttacagctttaatctagcaggccagagatgtggcagtggggcagccagagaggagggctactgcagctgctgacggaacctcctccctccccccaccccagcccagagggacaaacagtagggccccagccttcctggctngantcttgggagcagagggactatttgactcctngnactgtgacccaggctgtcatctccctcccttgcccccagtaaaaatagcccataattccaagccctccncccaacccctcatagttctagttcagctcctgttccacttccctggggctctgtcccagtaagggcccagggcttggctttggtctcggggcctgggtggctggaggactcctggcagccccaggaccagatgca

SEQ ID NO: 4973 - DNA, 478 bp, Homo sapiens
  I.4973 (AA024797)
  misc_feature (13)..(13): n is a, c, g, or t
  misc_feature (231)..(231): n is a, c, g, or t
  misc_feature (318)..(318): n is a, c, g, or t
  misc_feature (409)..(409): n is a, c, g, or t
  misc_feature (466)..(466): n is a, c, g, or t
atttggggaaaangacctaatgacctaatatgcaatttctgtcctcgtgtctttttctctaacacacagtcatgggtgaaacatttcagacacctcaggcagcacttatggtttctaattgtgagaactacccttccatcaaacaaaaagggcaagggtgggagccccggctacttggttaaacattttttactacaaattcgcccagaaaaggtgaaatattttgttatnaaactgtattaagcatggcctaagtatttattaggtatgtgatctgtgtagtatgttccatcagaaatatttcttactagtgctttnagctccagagtaaacaagtcatttaaaatggagttcactgggcaggtttcccctttaatctagatagaaatactcttttatcagagatttnaggcactgttttgctaactggtaaataaaaccaaatgtaaatatgtaagaatgtttntttggttgcacc

SEQ ID NO: 4974 - DNA, 345 bp, Homo sapiens
  I.4974 (AA024445)
  misc_feature (140)..(140): n is a, c, g, or t
  misc_feature (217)..(217): n is a, c, g, or t
  misc_feature (286)..(286): n is a, c, g, or t
  misc_feature (311)..(311): n is a, c, g, or t
ttccacaggtaacttctacatttattttataccaaaaaagttatgtgcaacaaataaacattcttacatatttacatttggttttatttaccagttagcaaaacagtgccttaaatctctgataaagagtatttctatcnagattaaaggggaaacctgcccagtgaactccattttaaatgactgtttactctggagcttaaagcactagtaaganatatttctgatggaacatactacacagatcacatacctaataaatacttaggccatgcttaatacagtnttaatacaaaatatttcaccttttnctggggccgaattttggtaggtaaaaaatggttt

SEQ ID NO: 4975 - DNA, 469 bp, Homo sapiens
  I.4975 (AA019557)
  misc_feature (122)..(122): n is a, c, g, or t
  misc_feature (136)..(136): n is a, c, g, or t
  misc_feature (370)..(370): n is a, c, g, or t
  misc_feature (381)..(381): n is a, c, g, or t
  misc_feature (386)..(386): n is a, c, g, or t
  misc_feature (407)..(407): n is a, c, g, or t
  misc_feature (425)..(425): n is a, c, g, or t
atagtcaaggtctcactttgtcacctaggcttgtcttgcaactcctggcttcaagcaatcctttcatctcagcctcccaaaatgttgggattgcaggtgtgagccaatgtgcccagccaaanataaaatttaaaanaaaataatgtaggtagtttctcatagtaacgtaaagaatatgtaacctgtgttttcctgaaagttgagggaaagctgaggcagctaatgggctcatacaaaggtttggaagacccattctgactacctaaaggagagtcagcattctgaccattctgactgtgcttatagaagagtcagaacttgtgaagaaagaagccttaaaatccaaggtagtaatcatcctgggaaatanttcaggaaatnacttnaaggtttgtatttttcccctnaaaattgttagaagcaangcaatgaagatctacatatatgctcttttagagctgagaatagc

SEQ ID NO: 4976 - DNA, 349 bp, Homo sapiens
  I.4976 (AA019834)
  misc_feature (349)..(349): n is a, c, g, or t
tacctacataactgcaaaataattcaaagtacacagagacaccctttaaagattcatcatatacttagacgatatgattcataccactttcctgtggaaacactcaaattattcacaataaatagaatgcaatcttacaaagttgatggcagcaccaagtgaagatgggtgcttccttcaaaatacttgatttagattctgccatcttattcacatagaacctaagaaactctttccgtaattaagcagtaattcacaatatatacatctctggaggcacttgttgtttcaatagatggtttgttcctctccggaattaccaagacaatggagccccaaataaaaagtn

SEQ ID NO: 4977 - DNA, 499 bp, Homo sapiens
  I.4977 (AA018520)
  misc_feature (194)..(194): n is a, c, g, or t
  misc_feature (243)..(243): n is a, c, g, or t
cagctacagggaagggccattaagatggcacagtcatggagtaaacatatcccccttgccaggccacctaagcacagttcctctgtcgtctggggaccacgtggttattcagctggagtgggtttcgacattaataactggacattttttggctggtgttaatccatctaagccagttcctgtgagccctgtgncactaagtaaataccctttttcccaaagcgcttcactgtggcccgatgngtctgagtgtgtagtgtgcacaggtggagacgatggaaaccacaggggctctgtagtctgcagcattcttgtcttcaaagactttcagaccagtgaaaaggtaaagcaggtcagataagaccaaaagaaggttcttgcagaagggtcctggttcttggacaattctggagaagtcagtttccctccctcatttcacctcctcatacatccagagatacagttaggcagatacagggattttctgggggaatatttt

SEQ ID NO: 4978 - DNA, 481 bp, Homo sapiens
  I.4978 (AA018475)
  misc_feature (449)..(449): n is a, c, g, or t
ccacttcctctctcaccatgggatctctgcataggccagctccccttttcttcccaccgtgaatagaagcagcctgagaccctcaccaggtgcagatgcccaatcgttaactttccagccatctgaattgtaagccaaataaatcgctttaaaaaaaatgatttcaatagtttttggggaacaggtggtttttggttccatagataagttctttagcggtgatttctgagattttggtgcacgtgtcacccaaacagtatacactgtatgcaatgtgtagtcttttattcttcacctccttcccacccttcctcccgagtccccaaagtccattattatcattcttatgcatttgcatcctcagagcttagcacccactcataagtgagaacatatgatatttggttttccattcctgagttacttcacttagaataattaaacttctntttctttataaattacccagccctgagtatat

SEQ ID NO: 4979 - DNA, 417 bp, Homo sapiens
  I.4979 (AA018469)
tcctaaacaggaaatgggttaaactactataattgagtggtaactttctgagtagaaactggtgctgccaaattctgatataaggtaaaattgggtggcaatatcaaaataattgggtgggaggtggagagaaagagctaaatattcaaaaccagactcagcacaggtgtacttatcagccaccatgcctaaaacgttctggaacacagtgactgccaatgctttaggcccaccccagactccaatgtcagcccaggacaagtctttcaaagaagtcagagttctcttccctagggagctttacctccatgagctcttctccacccacctgagtttctgttgtacaatcacagccgtccggcgaagcctgccgtcttttgccacatttcttataacttcggtagtacttttggatga

SEQ ID NO: 4980 - DNA, 423 bp, Homo sapiens
  I.4980 (AA018447)
  misc_feature (414)..(414): n is a, c, g, or t
aacttttaagctcacaggtacatgtgcagatttgttacataagtaaacttgtgtcatgagggtttgttgtacagattatttcatcacccaagcattaagcctagtacctattcactattttttctgatcctctccttcctctcaccctatgtgcagttctaacaagctcccaggtgttgctgatactgctggaatgagatccacactcggagttatcagggttctacctcataggttgaaatgactattcctactcatttctaaccctacagttgtatgctgtttgtttcatctcgtgtgccttgctttgacccccaaccatccattcagatcccacataacatccacgatacagtttatgctccactctcttgattaaacctttctgccaaattattatcttaatagattagnattatctct

SEQ ID NO: 4981 - DNA, 456 bp, Homo sapiens
  I.4981 (AA018405)
  misc_feature (424)..(424): n is a, c, g, or t
  misc_feature (441)..(441): n is a, c, g, or t
  misc_feature (448)..(448): n is a, c, g, or t
tgttttatttattaaatagtttctactagcctaatgttaaagtctgccaactagttccttcaagttaatcacattcacttttgattccctcttaacacattaagatattttataactctgtgagtttaaaatctgatgcaaattcattgtggtcaggcaagatgcaagaccagtcaggcaaatacacttcccttattttttatgggtctgaaatatcttttgtcttgggagatgtattattatacaaaagatctatttggcaatttatagtttgctttttatctattcaattgttccctggtattcttagaacagaaaagcgaaccttttaagaataataacatgccaattacctttaattactctctagctctttcagttaaacaaaaaaaccctctcattttaggtttagtttgtaactgantagaacattttatatcnaaacccntaatgggg

SEQ ID NO: 4982 - DNA, 477 bp, Homo sapiens
  I.4982 (AA018404)
  misc_feature (475)..(475): n is a, c, g, or t
atgcaatcactatcatattctatagtttttcctaacagattgatagagtaaaatgtatggtttttctaatttttagcatttgtgtccaataaaatgactttatataatttttttcttgttggttcattttttttccggtcaaagtttcttctttagtttctcatataattgattcaaaactcctaagtgatgatcacagtaaccttaggtatttcttatttctccataataaatatagcatctgagtctaatttcttctgggagatttattaacttttaagatagcatgtgtcacataatctaacaatgcattttgcatactaaaatgatgaaacattcttaatgaatttaaatagctactttatcagaaacaggagtcataggttgaatttttatggtggggtaagtagagcctaagaatatttggtaaaacagctcctccatgatgggctccaacagggatgaagtaagaccncc

SEQ ID NO: 4983 - DNA, 490 bp, Homo sapiens
  I.4983 (AA017279)
  misc_feature (5)..(5): n is a, c, g, or t
  misc_feature (9)..(9): n is a, c, g, or t
  misc_feature (15)..(15): n is a, c, g, or t
  misc_feature (16)..(16): n is a, c, g, or t
  misc_feature (218)..(218): n is a, c, g, or t
  misc_feature (391)..(391): n is a, c, g, or t
ggccntttntgctgnngtcctgggccggtgtgtgtgtgtgcgtgcgtgcgtgtgtgttgtagtgtgtgtttcttttgttattttctcccctaacaccgcagaaatgaaacacacatgcagctcatgtcacctcatattttcagatgtttttcacactattgtctgctccagcccgttgaaagtgcaaagtgaaaacagatgcatccaaaaaatttttnttgaaagggacaatcctaggatggagactaacccctcgaatacagataagcaataaatattatatcagatttataacgtgcatcgagcagtcttgattagcaccaaggtgagctttggtgagatttttatcatttccatgtgtctggactacaagaagaaatcactggggggnagagctctataaatcagcgtccatgtcaagacaaatcaaaataatgcctctattatttcaatcaataaaccatttttattcccaacatctgatacacac

SEQ ID NO: 4984 - DNA, 440 bp, Homo sapiens
  I.4984 (AA017213)
  misc_feature (370)..(370): n is a, c, g, or t
  misc_feature (425)..(425): n is a, c, g, or t
tcagtttgaaattttgaaacaacaaaaagtgctttattcagagtggaattctgagtctcttagatgaatctcaaaataacaaagaaactcaaagaaaaaaataaaacaaaaataaaacaaaataaatgggaacaaataaaactccatctcccaaacaatcccaaccgccactcctttttcgcagaaattgctgcctggcacaatttgaaatgtggctatttaaagggaaaaggaatatatcttctcttcattccatctaaaatctataagttttcaattttagcataagaggagaaagcgtttatagctgagtttttccaagttgcttaaaaggaaagggctttgggatttgaaaaatccagttttctcnttgtacttttccaaggcggggatttgaaagctggggcactagatttgcttctcangatcccgggggccct

SEQ ID NO: 4985 - DNA, 365 bp, Homo sapiens
  I.4985 (AA013452)
  misc_feature (108)..(108): n is a, c, g, or t
  misc_feature (320)..(320): n is a, c, g, or t
  misc_feature (349)..(349): n is a, c, g, or t
ctcctcaactgcttcccctgccccccggccctggtggtggggaaagacctagacctaaagccggcatcctcgcttcgcctccagggagactctaagcccccgcccgcncacccgctgtggaggtggcagatggggggtcccgctgtccctgagccccctggcctcaaattctgggggatcaacatggatgaaagctgaccgtgggacttctgccaaaggggaaaagttgggaccatggccaaaccgcgggcttgaggaggggagccccgtttctcacatttgtcccctttccttttacatttttaggaactgttgggcanaagggaacttaaataacagtgattttttnatttaaggacctaagt

SEQ ID NO: 4986 - DNA, 322 bp, Homo sapiens
  I.4986 (AA013451)
  misc_feature (165)..(165): n is a, c, g, or t
  misc_feature (166)..(166): n is a, c, g, or t
  misc_feature (167)..(167): n is a, c, g, or t
ttttttttttttttttaaaacaaacaaaacttttatggtccaaaacagtttttctcaagaatctgctctatgcaaacaataacaactttttacaaagcattttcacagaaaaggagacaagtccttccccagcgtgggaattgttcctctcgcacctcgttttcnnnggaagagggggcgctattcactagtgcgggatggaaggcgcactgggtccctcagttgttcggcagctccaaaagccccagcttcccttcatacctcaacttgccatctccctaagacctaagctcccctgacctcacctgggtggaggagaaag

SEQ ID NO: 4987 - DNA, 255 bp, Homo sapiens
  I.4987 (AA013119)
  misc_feature (15)..(15): n is a, c, g, or t
  misc_feature (96)..(96): n is a, c, g, or t
  misc_feature (130)..(130): n is a, c, g, or t
  misc_feature (145)..(145): n is a, c, g, or t
  misc_feature (166)..(166): n is a, c, g, or t
  misc_feature (180)..(180): n is a, c, g, or t
  misc_feature (241)..(241): n is a, c, g, or t
ggcgccatcgcatgngctttggggctggggctccggggaggttccggtagggcgttggagaggccgctctttttgcaaggcccgagacggcggccntgcgcaggccgccctattccgcgccctcaggtcnagtatcagcctgagntggatacccccgcttggcccnggatgccccgctgncccggagcatcctccggcgctgccctcccagagccacgcagaggctgaggtggcgcggggncggccccggcttcc

SEQ ID NO: 4988 - DNA, 380 bp, Homo sapiens
  I.4988 (AA013247)
  misc_feature (373)..(373): n is a, c, g, or t
attttttatttatttatttatttatttatttatttatttatttatatattttttttgagacagagtctcactgtgttgcccaggctggattactgtggcacaatctcggctcactgaaacctccgccccccgggttcaagcagttctcgtgcccagcctgccaagaagctgggactacaggcacatgccaccatgtccggccagttcctgtatttttagtagagacagagcctcaccacgctggccaaggctcatctcgaactcctgacctcaggtgatccgtctgcctcggcctcccaaaagtgctggggatcacaggcacgaggcaaggggatcacctgaggtcaggagcccgagaaccaagccttggccnaacattg

SEQ ID NO: 4989 - DNA, 580 bp, Homo sapiens
  I.4989 (AA007295)
  misc_feature (134)..(134): n is a, c, g, or t
  misc_feature (151)..(151): n is a, c, g, or t
  misc_feature (156)..(156): n is a, c, g, or t
  misc_feature (159)..(159): n is a, c, g, or t
  misc_feature (163)..(163): n is a, c, g, or t
  misc_feature (168)..(168): n is a, c, g, or t
  misc_feature (169)..(169): n is a, c, g, or t
  misc_feature (174)..(174): n is a, c, g, or t
  misc_feature (175)..(175): n is a, c, g, or t
  misc_feature (178)..(178): n is a, c, g, or t
gactgtgagcagaatgagtcagagcccattcctgccaactgcactggctgtgccagaaacacctgaaggtgatgctcctggaagacgccccaaggaaatttgagaggctccatccactggtgatcaagacaggnaaagcccctgttggagnagganatncagnatttnntgtgnnagnaccctgaggcgacagaaggcttctctgaagggtttttcgccaagtggtggcgctgctttcctgagcggtggttcccatttccttatccatggaggagacctctgaacagatcacaaatgttacgtgagctttttcctgttttcacgtcacctgccatttccaaaagatgcctctttaaacaagtgctcctttcttcacccagaacctgttgtggggagtaagatgcataagatgcctgacctatttatcattggcagcggtgaggccatgtttgcagctcatccctcccttccagtgccgaagacattgtcagtctgtggccatgcaatagagccaggggatatcggctatgtcgacaccacccactggaaggtctacgttatagccagaggggtccagccg

SEQ ID NO: 4990 - DNA, 550 bp, Homo sapiens
  I.4990 (AA004279)
  misc_feature (284)..(284): n is a, c, g, or t
  misc_feature (360)..(360): n is a, c, g, or t
  misc_feature (368)..(368): n is a, c, g, or t
  misc_feature (409)..(409): n is a, c, g, or t
  misc_feature (419)..(419): n is a, c, g, or t
  misc_feature (441)..(441): n is a, c, g, or t
  misc_feature (503)..(503): n is a, c, g, or t
  misc_feature (515)..(515): n is a, c, g, or t
  misc_feature (534)..(534): n is a, c, g, or t
catcgtttttgtttttatttttcccctttcaacctggttttcggctctggaagctgttcctgtgcacagttctatttcctacagttctgagaaagcggttccatcgcagatgaccaaaggctggacccctctggctataacgtagaccttccagtgggtggtgtcgacatagccgatatcccctggctctattggcatggccacagactgacaatgtcttcggcactggaagggagggatgagctgcaacatggcctcaccgctgccaatgataaataggtcanggcatcttatgcatcttactccccacaacaggttctgggtgaagaaaggagcacttgtttaaagaggcatcttttnggaaatgncaggtgagtgaaaacaggaaaaagctcacgtaacatttgtnatctgttcanaggtctcctccatggataaggnaatgggaaccaccgctcaggaaagcagcgccaccacttgtcgaaaaaacctttcaggagaangccttctgtcgnctcaggggtactggcacanaaaaatgctgaatctc

SEQ ID NO: 4991 - DNA, 450 bp, Homo sapiens
  I.4991 (AA001959)
taggaaaaaaaaaaaccttctacagcatccattttattagagggagacattctttgtcacttgggttccagattaataattctagaatcctaccatgcaggagttgtgatttggtttcaaagaatcaaagagaaaaattttaagaggagggaacccagagaagggctagcaggtgtaaataacttccatgccctttatttcatctggggatgagggaaaggagaaggatgctaagcaaacttgaaagctcctcaggagatccttaggaaccccgtactgctgggcccctttctcctgcttcccttccagggctcaagcatccttgggcaatgcttcttcaaattttgtgtgtgcagaaaacatgtaccaatcttgtttaatatatattctgatgcagaaagtcaggggtggggtttgtgattctgcatttctaacaggcttataggggag

SEQ ID NO: 4992 - DNA, 438 bp, Homo sapiens
  I.4992 (AA001925)
aaaaccagcaagtttttattagggattttaaaagaggagagggtgtacgaacagggagtaggtcacaaggatcacatgcttcaaagggcagtaaagatcacaaggcaaaggcaaaattagaattactgatgagggtctatgtcctgctgtgcacacattgtcttgataaacatcttcacaggaaacagggtttgagaacagagaaccactctgactagaatttacccggctggaatttcccaatcctagtaagcctgagggtactgcaggacaccagggcgtatttcaatccttatctcaaccgcataagacaaacactcccagagcggccatctatagacctacccccaggaatgcattccttccccagggttcttccatgctggggaaaagaattcagcaatatttctcctacttggcacatccttctataggctt

SEQ ID NO: 4993 - DNA, 478 bp, Homo sapiens
  I.4993 (AA002147)
  misc_feature (466)..(466): n is a, c, g, or t
cttcatactaatgtttccaataattcagggcaatgctcttgcctccctgtttttttcttcaatttcttataaataccacatgcaagagagtgtgagtaatagattttaacaacagcaacaataaatatggaataacaaaggattacattacagcaaggcagataacattttaaacatttctattcttaaaaatcacaggccattattatcacagagaacctttcacctgccaaattgcctggcccctctgtgcatcaccttgttccagaaccttgctcatgctcctccttcctgtgtcccctcctgggcaattcctaaatacttaaaattttccaacttccttttgtagagcaattcaattttttctttccccttgattttccttggctctgccaggggcaagttttccacatctaagaaggcccaaagtatttttgctaaagaaaaaaaccaaaacaaataaacnaattgagcaagt

SEQ ID NO: 4994 - DNA, 491 bp, Homo sapiens
  I.4994 (AA001337)
  misc_feature (79)..(79): n is a, c, g, or t
  misc_feature (103)..(103): n is a, c, g, or t
  misc_feature (205)..(205): n is a, c, g, or t
  misc_feature (434)..(434): n is a, c, g, or t
ggaagtcagggaccctgaatggagggatcggccagagctgaggcagaagaacataaattgtgaagatttcatggatatntatcacttcccaaaattaatactnttataatttcttatgcctgtctttactgcaatctctgaacataaattgtgaagatttcatggacatttatcacgttcccaattaacactcttatagtttctnatgcctatctttactttaatctcttaatcctgttatcttcataagctcagaatgtaattcacctcaggactactattgcacaaatggattgtaaaacatgtgtgttttgaacaatatgaaatcagtatacccggaaaaagaacagaatatcagtgattttcagggaacaatggaagataactataaggtctgactgcctgcggggttcgggcagaatagagccatattnttcttcttgcagaaagcctatagagggatgtgcaagtaggagaatattgctgaattc

SEQ ID NO: 4995 - DNA, 531 bp, Homo sapiens
  I.4995 (AA001194)
  misc_feature (348)..(348): n is a, c, g, or t
  misc_feature (503)..(503): n is a, c, g, or t
gctgaaagtcagccagaagcactttctgagaaggaagatgtttgcaaggtaactctagtaagtggaagggatttttagatgtgctttttggagattaaatcatttgttttaaaaaatactttcattgatgcataataatttatacagatttaaaaacatacgcattttgccatttctgtgtagcattaagtaccttgaagttgaacaattattaatataatttggaatttctccaaggcaattatggtagaataagttgatacttcaatacagttaagcatgaaagttttcatcttacatctttatttttgagtccttatcacttcaaaattctgttatgcttattangtatgtcaatttgaaaggaatattttcttacattaacatgtatcttcacctcctttgcagatagatgtgccaaaaaaactaaatgttatggtttttcttgtatcagaatttggttttttacatgtttacattatttgtagcaaatattagatggntaatttaagattttaattattgggtgct

SEQ ID NO: 4996 - DNA, 190 bp, Homo sapiens
  I.4996 (AA001134)
  misc_feature (91)..(91): n is a, c, g, or t
  misc_feature (122)..(122): n is a, c, g, or t
  misc_feature (123)..(123): n is a, c, g, or t
ttttttttttttttctaattcaggagtcctttattagccggcgacctagagacgactagtgctcaaaattctctcggccccaaagaagggntgagattttcttttataccttggtttagaanngggagggggaattgagctgaagcaatcttacagaagtaaaacaggcaaaaaagttaaaaagacaaat

SEQ ID NO: 4997 - DNA, 428 bp, Homo sapiens
  I.4997 (W90423)
aaaatgtttttattttatttgaagttctaggataaatatgcaggatgtgcagttttgttacataggtaaacaagtgccatggtggtttgctgcacctataacccatcacctaggtattaagtcccacatgcattagctatttatcctgatgctttccctacctccacccgcaaaaggcctcagtgtgtgttgtactcaaggttttttttaaaaaatctgttgaacaactgcaaccagcatcaaacctaggttttcaaaacgtaccaaaacggaaaaatattctgaaccaaaccatcatttgattcagttccaactttggtcttgagcccaatcaaataaccactgaaacatgctggacaattctagtgggccacggggactgggtggaaagcctggtggtcatctggtctccatgagatgatttccaa

SEQ ID NO: 4998 - DNA, 435 bp, Homo sapiens
  I.4998 (W88463)
  misc_feature (64)..(64): n is a, c, g, or t
  misc_feature (65)..(65): n is a, c, g, or t
agatttcaccttgcaccctaggccacttgcccatgtccttgccatcttttaactcctgtctccnngagggggcagcagaaagtagtcttgagagttaatgggattgctactagtttttacctgccgggaggatttggtctccatcgagaaacaggggaagatgtcatctgcttaagaaggtatttatgtttgtttttctgcccggtgatatacatgaacccggtagtgtgtgaaataaagcatcttagtcctcatttcacgtgaatcagaagaaactaaaaggcatggttatttctccctcggtatgatgaagtctatataatatttgcaaaatctcctttggtgaatttgtataaacaatctatcacaaagaaagtattgttttctatatgggcttaaaggatttttggaaaatgggcagaggattttcccatg

SEQ ID NO: 4999 - DNA, 385 bp, Homo sapiens
  I.4999 (W81369)
  misc_feature (345)..(345): n is a, c, g, or t
gtttcttgctatttttaataaatggtttcagttactgaaggcaggatttatttcagacttccaaagaagttatcaaggaaataaagcagcatctattcatttcccatcagacttgacaaggtttctgataacaacctaatgctaagttgcaccttttcaggcaaggaccgtcttccagaattttccacagtgtattacaaggtaaaaatgacaccctcaaagggttgttaattcctttcctgttccaagcaaacctccttgaaagcttgccaagctaagcatcaatttgcataactggaggaggtgggtgtcactaacagggttttgactggaagtccgattctnagcagcaagacatgccagaaaaatgtgccacattcaattg

SEQ ID NO: 5000 - DNA, 184 bp, Homo sapiens
  I.5000 (W80744)
gttgcagagatggtgaggatgtcttgctttgttacccaggttggtcttgaatttgtggctttaagtgatcctcccaccttggcctcccaaagtgctcgggttacaggcgtacaacagtgcctggcctgtattttattgtaattcctttttccattctcatctcaatgcatttccaaattagaga

SEQ ID NO: 5001 - DNA, 489 bp, Homo sapiens
  I.5001 (W78846)
  misc_feature (1)..(1): n is a, c, g, or t
  misc_feature (49)..(49): n is a, c, g, or t
ntgattcggaggttacaaactaaaagtcctgtgtgtgaaccaaaggacngagggactttcagtaacagatgcattgcccctttacagtagtgctgaccctgtctgatccttccagcattcgtgcttccgagtgcgtcaagggctgcctgaagtcatggctacaggtttccgctagctcttaggtatgttgatttgaaaactggagtttcagatcgtcttctcgatttctgtgaagattttagtgaagccactgaagacgtaagagattgttgttctcttgtccaaatacaacctagactttgctcatttatctacatatttggcagacagtacacagttaatttgagcaaatttcatttagtccataagcttcttaccaatgaaaatgaaaacatcttacctgctaaatgttcacacctcgtacccgacactgtcacaaaggggtgtaatttgcttacctgtgataccagctttcataatgaaagtttt

SEQ ID NO: 5002 - DNA, 458 bp, Homo sapiens
  I.5002 (W67527)
  misc_feature (43)..(43): n is a, c, g, or t
  misc_feature (194)..(194): n is a, c, g, or t
  misc_feature (196)..(196): n is a, c, g, or t
  misc_feature (199)..(199): n is a, c, g, or t
  misc_feature (279)..(279): n is a, c, g, or t
  misc_feature (316)..(316): n is a, c, g, or t
  misc_feature (331)..(331): n is a, c, g, or t
  misc_feature (335)..(335): n is a, c, g, or t
  misc_feature (340)..(340): n is a, c, g, or t
  misc_feature (355)..(355): n is a, c, g, or t
cgagaagatctttgacccttgcctttgagcccccaggagcganatgggatcatggagagccctctaaagcctgcactctccctgctccacagctttcagggtgtgtttatgagtgactccacccaagcttgtagctgttctctcccatctaacctcaggcaagatcctggtgaaacagcatgacatggcttctngngtngagtgtgggggtggaggtcctgctcctagagatgaactctatccagccccttaattggcacggtgtatgtgctgacacgnactgaaagctttcctctttaactgatcccacccactnccaaaagtcagcagntgtntcttngagctgtgggcaagntgggaagtcacttagctccttaaggtctgtttttagacccttccaaggaagaggccagaacggacattctctgcgatctatatacattgcctgtaatccagga

SEQ ID NO: 5003 - DNA, 401 bp, Homo sapiens
  I.5003 (W67545)
agtttttagaaaaaaagaaaaaagtttaatagcgatatagaaaattgagcacctataaaactatatggtgggctctgggttacattgagcttaagtagaccaagtatctatcccacctaaattatcagcaactccaggccatgacccagtgtcccattctccttcacggtttgctggtgtgtagcctcctggatacaggcaatgtatatagatcgcagagaatgtccgttctggcctcttccttggaagggtctaaaaacagaccttaaggagctaagtgacttccccaaagcccacagctccagtgccacttgctgacttttgggtgggggtgggatcagttaaagaggaaagctttcagtactgtcagcacatacacctgccaattaaggggctggata

SEQ ID NO: 5004 - DNA, 449 bp, Homo sapiens
  I.5004 (W53041)
  misc_feature (281)..(281): n is a, c, g, or t
  misc_feature (322)..(322): n is a, c, g, or t
  misc_feature (351)..(351): n is a, c, g, or t
  misc_feature (429)..(429): n is a, c, g, or t
tttttaaaatctgtaaattttctttattcaatgaaaaagaaaagaaactactgtgtttttttcctttttttggattttaaaagttgctcttcacaaccaccaccaccaaaaaaaatggaattcacaacacaacaagacccaggataggatattcagtttaacaaaattttatcattaattataacagaaacctatctaggaaaaaaaaggatctttaaccagattttcagagatgaaggaactagagttaagtgtagatgtgggttgaagtttgttttccntttttctttaattccccgaagtgagtttatttgctttttcntggttgagttttaagacaaccaaaggggnaaataaaaactggggtattaaagccttcctaataccttgaagggccaatagggataaccaggccaaagaacccagatncccgaattatacctccgggc

SEQ ID NO: 5005 - DNA, 471 bp, Homo sapiens
  I.5005 (W51897)
  misc_feature (144)..(144): n is a, c, g, or t
  misc_feature (211)..(211): n is a, c, g, or t
  misc_feature (415)..(415): n is a, c, g, or t
gaagctctctccaagacgagagggaaatgctgaaaatggaaaagcactggccaccatctgtgaactgaacagagcctgttccgtgtcttggcccctgggtacacctgctgggaccactgatctcagagtttagaatcagcaganacagaagcccaggaaggatggagggaattattcctggagcataacctgcctctcagatcgaggtgtntgttgggggagaagatgaccgagtcaggcttcatagctgatgactaacagcctcccccaggaaatgtgaagacctggcagctttcaatggcaaagatgattttaccgccattctttttctgacctgtactgggagatcattgaaacatctgccttcctcccaagaaacaagcagctcaaacaagtggagattcaaattcggatnattcaccacacgaacgagaacttttgatccttatataataggcctcagaaccttga

SEQ ID NO: 5006 - DNA, 461 bp, Homo sapiens
  I.5006 (W48664)
  misc_feature (407)..(407): n is a, c, g, or t
  misc_feature (461)..(461): n is a, c, g, or t
ttttttttttggcttacaaacaacagacatttatttatttctcccagttctggaggctggaagtctgagatctgggtgccatcatggctgggttctggtgagggcctgcttctcggttcatgggcagctgatttcttgctgcatcctcaagcattgaaggggtgaaggagctctctggggccacctttcatgagggcactaatcccatcatttgggccccatcctcatgatatgatctaaacctaatcacctcccaaaggccccacctccaaataccatcacattggggattaggtttcaacatataaaatctgggggaacataaacattgagtctattgcacacgagtttattagttcccagtataacatcccaaggttgctggaggcctattatataagggatcnaaagttctcgttcttgtggtgaatgatccgaatttgaatctccactgtttggan

SEQ ID NO: 5007 - DNA, 349 bp, Homo sapiens
  I.5007 (W39070)
  misc_feature (283)..(283): n is a, c, g, or t
  misc_feature (304)..(304): n is a, c, g, or t
  misc_feature (338)..(338): n is a, c, g, or t
ctgaagtgggagaatcactaagtcaggagattgagaccttcctggccagtatggtgaaaccccatctctactaaaaatacaaaaattagctgggcatggtggcatgcacctgttgacctagccattcaggaggctgaggcaggagaatcgcttgaacccaggaggcggaggttgcggtgagctgagatcgcaccactgcattccagcctgatgacagagcgagacttcatctcaaaaaaaaacaaaattaacacaatgtgtggaaaatataaaattagttagnaagatatgtcctagaaatttnacccttttgaagagttaatgggtaagttggggantgttttaaatt

SEQ ID NO: 5008 - DNA, 311 bp, Homo sapiens
  I.5008 (W38933)
  misc_feature (303)..(303): n is a, c, g, or t
aaaatatacaaaaatcaattctgtctcacatactagcaactaacatttagaaagttaagttataagacactttgtttacaatagcataaaatacttagcaaaagacatgtatgacctgtaggctgaaaacaataaaacatgacaggaagatctgcataaatgaacagctatacccgtgttcatggattcaaagtctcaatattgttaagctggcaatcctttttgaattattcaataaattcaatgcaattcccacgaaaatcgtaactttttttttgaaaaaaatttgccaagaggattttnaaatttta

SEQ ID NO: 5009 - DNA, 136 bp, Homo sapiens
  I.5009 (W37169)
  misc_feature (19)..(19): n is a, c, g, or t
  misc_feature (20)..(20): n is a, c, g, or t
agttaagagagctgccccnncactttgggcttctggtgtctctgaatcagcaggcaaagaagggagatactgtgctggctggggtaattgatcttgaatgctaaggggaaatcagactcctctactacagagacgc

SEQ ID NO: 5010 - DNA, 499 bp, Homo sapiens
  I.5010 (W37075)
  misc_feature (16)..(16): n is a, c, g, or t
  misc_feature (34)..(34): n is a, c, g, or t
atttcggaacgaggcnggaagtatattagcattntgattgaaataagggtaaatgagcaatgtgtgaaggttttcactgacttcacctaaaagatagtttagctacttgaattttagtaaatagaatttttcctttatttcatcggtccccccaccttttttttttttttgcacctgccttgtaaatttaatagttaagtgacctctgcctagaggatgatatttggggaggtttgatgtttcctgtgggaataagacgattcacaggtgaaaagtggggcacattagctgttattgtttccatgggtcagtgtggaaaatggattaatcatattctaaaccgttcatggacctcattacagtcacaattgtccaattctgtttcctacccctggaacacattaaaatgggtaggaacctaatgcctaatttaaattactaaaagccaccattttcctttggataagattgagcctacaggattggtaaacctccatgg

SEQ ID NO: 5011 - DNA, 497 bp, Homo sapiens
  I.5011 (W38604)
  misc_feature (30)..(30): n is a, c, g, or t
  misc_feature (451)..(451): n is a, c, g, or t
ccaaagtgctaggattactggcgtgcaccnacgcctcggccagttttatggtattctgtaattgcagcccaaactgactaagacgtgaagtttaggtaaacatttgcagtttgctatgctgatattgaagtattatctgttggtaaatattctttgctgatacttaataagtattcttattaataacaagtattaataatatgtattcctcactaatgcttaatacaaatccttactaatagcagtattagtattaattagtattaatcagtattctttgccaataagggttctgacagaaaatcaagttgttcattaaatattattgagatacttcttgatcttataagtagacaggtactgttttaagattctgggggattcagtcgtaactgaggatagatgtaatcccctacccctccaaaaggggttggccagaagaaaaacaccnggactccaattggaattgggaatttccggattaaaaaaccccttaa

SEQ ID NO: 5012 - DNA, 532 bp, Homo sapiens
  I.5012 (W38392)
  misc_feature (418)..(418): n is a, c, g, or t
  misc_feature (433)..(433): n is a, c, g, or t
  misc_feature (486)..(486): n is a, c, g, or t
  misc_feature (523)..(523): n is a, c, g, or t
  misc_feature (530)..(530): n is a, c, g, or t
tgctgtggtttcggcgggagttggtttgtgtggattttcaggactgctgacttgatcagacaggcacaacacagtcccggccctcaggcaggccttctccctggtctgatgctgaactgcatggcgtctgttcagatgaagattcttttgccacctccttaaatgaaagaacgatactgaatgtggcttagaaacagctttgccagccgtgcagaatgattgtaagtagtggttgcccgaaaagtatttgcttggaataccactcactgataacactggtgaacctggaaggaattatacggagtgaaaaaaggcaccactcactgataacacgaatgaacctggaaggaattatacggagtgaaaaaaggctccgctcactgataacgcgggtgaacctggaaggaattcacggagnaaaaaagaccctgcnactggtaagcgggtgacccagaaggaattcacagagtggaaaaaagctccgcnactgatacgcgggtgaccccagaaggaattcacggangaaaaangc

SEQ ID NO: 5013 - DNA, 505 bp, Homo sapiens
  I.5013 (W38310)
  misc_feature (144)..(144): n is a, c, g, or t
  misc_feature (145)..(145): n is a, c, g, or t
  misc_feature (146)..(146): n is a, c, g, or t
  misc_feature (388)..(388): n is a, c, g, or t
  misc_feature (450)..(450): n is a, c, g, or t
  misc_feature (480)..(480): n is a, c, g, or t
  misc_feature (487)..(487): n is a, c, g, or t
agtggaaagcactatgaatgtgaaaactgtgccaaggttttcacggaccctagcaaccttcagcggcacattcgctctcagcatgtcggtgcccggggccatgcatgcccggagtgtggcaaaacgtttgccacttcgtcgggnnntcaaacaacacaagcacatccacagcagtgtgaagccctttatctgtgaggtctgccataaatcctatactcagttttcaaacctttgccgtcataagcgcatgcatgctgattgcagaacccaaatcaagtgcaaagactgtggacaaatgttcagcactacgtcttccttaaataaacacaggaggttttgtgagggcaagaaccattttgcggcaggtggattttttggccaaggattnacttctggaacccagctatggataaaacgtcatggttaatatgagtcatgcaaccgggcttntgactattttggcgcaatagcatctgtggnttacttncaacagtctggattcctt

SEQ ID NO: 5014 - DNA, 429 bp, Homo sapiens
  I.5014 (W23546)
  misc_feature (379)..(379): n is a, c, g, or t
tgttttgtttttgagacagagtcttactctgttgccaggctggagtgcagtggctcaatctccgctcactgcaacctccacctcccgagttcaagcaattctcctgcctcagcctcctgagtagctgggactacaggcatgtgccaccaccatgcccagctaatttttgtatttttagtagagacggggtttcaccatgttggccaggatggtctcaatctcttgaccttgtgatccgcccacctcagcctcccaaagtgctgggattacaggcataagccaatgcgccccgaccaagtattactcacttttataaaatgtcacatggtttaatcactgggagacaaggagacgacacaacttcatgctttgctggtcncgtgtatgaactgagtacagatgcgtactgaccagtcattgccttcgaaa

SEQ ID NO: 5015 - DNA, 441 bp, Homo sapiens
  I.5015 (W23429)
  misc_feature (347)..(347): n is a, c, g, or t
ctttagttaccatcctgtttagttggtaagaaataggaggcaaaaaggtaatagtcacatttaaatgacttagtaattaaaagaactaaattattcatagttgagtcattatctgttcagatctgcagtgttcttataataataggaaacatttatgtaatactatgtgttagataatgttttacctatattaacttatcctcacaatagcactgaggtgtttttatagataggcaactaaagcaaagagaagatagtaaatataccaaaggtcatgtagctactacatggtagtactgagtgtcagagaagacaagatcaaaatcctgtaatcctaacatttattngagaacctactgtgtaccagccccacagctgggtgctttcattatgagttagtcatttgtctttacaactaccttatttaaaatggaagttcag

SEQ ID NO: 5016 - DNA, 130 bp, Homo sapiens
  I.5016 (W20223)
  misc_feature (26)..(26): n is a, c, g, or t
tgtgaaatctatcatatagaagagancattcagcatgtacaatttaatgagaaataaagttataaaacagatactcatatacccaatgctcaggttaagaaatgtacattgccaataccttagtaagctc

SEQ ID NO: 5017 - DNA, 365 bp, Homo sapiens
  I.5017 (W20006)
  misc_feature (15)..(15): n is a, c, g, or t
  misc_feature (16)..(16): n is a, c, g, or t
  misc_feature (17)..(17): n is a, c, g, or t
  misc_feature (231)..(231): n is a, c, g, or t
acatgctttagaaannngagtgtggggaaaatttgatgttccttaggattatataactgaggagggaacattgcaaatagggtctgaggctttgtttctctcttgctctgaaacatttctgaaaaggcaaggaagggaggggtagtgtctggggcagtgctggtagcctgcatgtgttgtaaatcatcctgccataacaaaggactgcattgttctagctggcccactggnaggtctgccaggctacttggaactgtagtgggaaggtggttgattggagggttatctgtatataaaaggttttctcccctccaaagaaaagactccagtacaagataccttggtcccagggagtctaaatttgt

SEQ ID NO: 5018 - DNA, 623 bp, Homo sapiens
  I.5018 (W19997)
  misc_feature (9)..(9): n is a, c, g, or t
  misc_feature (12)..(12): n is a, c, g, or t
  misc_feature (27)..(27): n is a, c, g, or t
  misc_feature (29)..(29): n is a, c, g, or t
  misc_feature (30)..(30): n is a, c, g, or t
  misc_feature (159)..(159): n is a, c, g, or t
  misc_feature (265)..(265): n is a, c, g, or t
  misc_feature (545)..(545): n is a, c, g, or t
  misc_feature (550)..(550): n is a, c, g, or t
  misc_feature (576)..(576): n is a, c, g, or t
  misc_feature (607)..(607): n is a, c, g, or t
caacgtctnggngattataggcgtgcncnngcgcccggcctctcatttcttaattgtagacattgcgtacttccggagaaggtccctgagaacctggctgatcttccccgctgcacccctcacgtggtcctgttagctcccaaactgtcaacctgaaangaaacccagaggcaggctctccaggacaagtgagttaatctgggaatcgcagggggttgcagcctaggctgttcgtgccatgacagatcataggcctatctgagangggccgggcgaaggggaaaatacagatgagctcacaaaagttgttttgtaacaaaaaccactggctgtgggcgcttgctgcaggagtgggcgttacttgttgttggagagagccttaccaggccgacgtcctttgttgcaagctgcttatctagaatactgcagtcctgaggaatttccctgcagtaagtccggttacaggcaaacgtgcaggacgtgcaggagcgtcttgtgaaggaaggcctgctgcaggtattcctgcaatgagagctccccttcgntgggncttccgactccaatttgtttagggantggtggaagtagttccattttggtacctggnaatttcaaaactgtcg

SEQ ID NO: 5019 - DNA, 482 bp, Homo sapiens
  I.5019 (W19632)
  misc_feature (1)..(1): n is a, c, g, or t
  misc_feature (20)..(20): n is a, c, g, or t
  misc_feature (278)..(278): n is a, c, g, or t
  misc_feature (410)..(410): n is a, c, g, or t
  misc_feature (427)..(427): n is a, c, g, or t
  misc_feature (439)..(439): n is a, c, g, or t
  misc_feature (455)..(455): n is a, c, g, or t
  misc_feature (466)..(466): n is a, c, g, or t
  misc_feature (471)..(471): n is a, c, g, or t
ntagagttcatgaactagantgcagtcgggaaattgtagctattctctgtagcagggtatgtatgacacattttcagttggataacattctgtgtgatgattgataatggaataggaaccaacaagagcagaatagcatgtactgcagggaatttgcagatagttgattcaatttttatatccagctaatcaatttgccagatgctggtagatgctgtctcatttggttgactgtgagacttgaatctgctacacatcactctatagattttgaacangttttattagtaatacttcaaaagttctaattgacttacaaggtgtgtcaaggaaatacaaaattgctaacaggccctgaaacacaggctaccaggaattgaaagtgttaaggtcctataagaaccttcctnggatccatccacctccngtatccccagantagccgaaggggggancaagtccgggnccggntaaaattccca

SEQ ID NO: 5020 - DNA, 551 bp, Homo sapiens
  I.5020 (W19540)
  misc_feature (477)..(477): n is a, c, g, or t
aaaattttaactactaatgggaaggttaaaaagctgccacgtatttctagtacaatgtatccaataagagcaaggacattgttaaatggaacaagacagctgggaaaggccccactatctctaatagaattgtgctactataaaacatgaagatatcagcaatttggccacttgcagtttttttcagcatgttaaagcaagtgctaagtactttattagtactttatttagtactttattttaaaggtctagaaaacaacagtcttcctggaggccccagaatccctttcatgggattcataagggactcaggtattcttattttctgccaaaaggtgtgcttatttagggactcttttacgatactttgtttctgaagttaggtagatcttggtttactgtgccaaggtcctacctagcattccctggtaggaatatttgaaattccactagctagtctaagaagtcaaagcacanaattaattgtcaacgcctctctcatattcttaaaaattgaagcagtttgcaggggagaacaagaatgaggtgtc

SEQ ID NO: 5021 - DNA, 173 bp, Homo sapiens
  I.5021 (W19454)
taatgttaaaaatatttattttttttcctaaaagatcacacaaaagttgggaagagaaggatgtcaattagactacatcaaaatctgggcagagggaggacaaagagctgcctaaagaaactggtagctggagcaaactgcagagatcaagatgaccctagtcaacggaacca

SEQ ID NO: 5022 - DNA, 475 bp, Homo sapiens
  I.5022 (W19431)
  misc_feature (403)..(403): n is a, c, g, or t
ccaggggtcacattccttcctggaggcactagaggagaatccttattccttgcttttctagcttctagaggcctaccacattcctccaccatcaaaatccgcaactgcattttagatgagtcttttcgcaatggcatcaccctaactttctctcctgcctgcctcttacaggaagacttttaaggacccctgtgactgcatcattgggaccaccagtataattcagaatactgtccctattttaactcagctgattagtgtgactaatccatctggccaccttaattcctctttgtcatgtaacctaacatattcaaagggttctggggttagaaaatagagatctttggggagggccattattatggcttacccacacagagcaaattaaatttttggtggnactttcattaagggaaaaaaacgaaggagtaaatagaaatataggaaaatggaagctcagtgggtaagataa

SEQ ID NO: 5023 - DNA, 572 bp, Homo sapiens
  I.5023 (W17354)
  misc_feature (209)..(209): n is a, c, g, or t
  misc_feature (486)..(486): n is a, c, g, or t
  misc_feature (512)..(512): n is a, c, g, or t
ttcaatacctgttttctatcggtgctaactggagaaaaacagatattaaaggaaataatataatccatttatcagtgttaacctttcatacagaggttctcaaatatataataaaattaaatattcctgaactcccagtgtggaaaactttggtaggcatttcaaatagatgttaaggaacaaggagctgttgcactttgggccttggnaggacaaacactaaaacaacaaaaatatatggcagaacaaattggatacagctttataataaatatgcttttgtcaccatcagctaaaatgcagtatgttggatatttgcttaagagcaggctatgcattaacactttttgccttcaataatcgctttcaacaatacttaatattggaaagtggaataatgaccatatctatttccgaacgtttcttgaaccaccagttgaaactgagaaggcaatggcagcattcagattgttgtctggctaaagnattagagatatggccatattctttgntgcagaggtgttctatttagttgaagctgttcagtcagctctctatgcttgcagggatta

SEQ ID NO: 5024 - DNA, 352 bp, Homo sapiens
  I.5024 (W17065)
  misc_feature (4)..(4): n is a, c, g, or t
  misc_feature (135)..(135): n is a, c, g, or t
  misc_feature (238)..(238): n is a, c, g, or t
  misc_feature (267)..(267): n is a, c, g, or t
  misc_feature (298)..(298): n is a, c, g, or t
  misc_feature (328)..(328): n is a, c, g, or t
  misc_feature (349)..(349): n is a, c, g, or t
tttnggtctctcatgccaacccgcattccctgtcttgtcaattttatttctactaccttagttaagtctctcattagcgctcagctagatttcagaaacagtgatgaccttcttgaaatctaactcttaaaccancaacacactccccactcctgccccaattaacccctctttaaaggactcccagtggcctttaaaaaccatctgacaattgccagcacattaagtggtgtccttnaggatctgctccttcctgcttctctaacnacgacttgacctgtgcttctcccttttccangaaatgtggtttctctcccttcctttggcntggctttctcttacctaatcntcc

SEQ ID NO: 5025 - DNA, 559 bp, Homo sapiens
  I.5025 (W16603)
  misc_feature (357)..(357): n is a, c, g, or t
  misc_feature (377)..(377): n is a, c, g, or t
  misc_feature (404)..(404): n is a, c, g, or t
  misc_feature (412)..(412): n is a, c, g, or t
  misc_feature (485)..(485): n is a, c, g, or t
  misc_feature (490)..(490): n is a, c, g, or t
  misc_feature (496)..(496): n is a, c, g, or t
  misc_feature (504)..(504): n is a, c, g, or t
  misc_feature (532)..(532): n is a, c, g, or t
  misc_feature (554)..(554): n is a, c, g, or t
gagccagtgttttctgtaactggagacctcagttaggccaacttcgaattccagagcaacgtaggaagtctattcagcagaaactcgacattgttcagtgtgtattgctgtgcagggtgcctattgtgacaggacacaaatgttactatgttttaatttgctatatttttgaatgggtaaagcattactttacttctcttggttacttgtaccaccattccacccctatccctagcctgccccacaaatctaatattaggaagcctcttaactgaaaccaaatgaacatttgggtcaggtgccagatgtctgctgcctagaatagctttttctaggtgtctaccaccttgaatttantcttaactgtgtgttcaagntttgtcattgaaactagttttccatancttagatncagttgtgtatgatttaatgtcccttattaggagcttaggccagggagggaagaaaaacagatttgtccatancatgncagtanccatttgnacataaagattttgatgagccctgtttncatagagccagatgtttccccncccca

SEQ ID NO: 5026 - DNA, 112 bp, Homo sapiens
  I.5026 (W07553)
  misc_feature (39)..(39): n is a, c, g, or t
  misc_feature (41)..(41): n is a, c, g, or t
  misc_feature (42)..(42): n is a, c, g, or t
cagggactgggccaagctcagaagcggggagaagagcantnnagagatgctctgagcaggggagacagggatcccgggctgctgccgctaccaacaaggggaggaattctga

SEQ ID NO: 5027 - DNA, 259 bp, Homo sapiens
  I.5027 (W07192)
cattgtccgcctggtgtggagaatgcattgacaggttctttgcggccgacgataccatgcagacattttgcttgttcaaaccaacaagacccagcaccgcgctctcctggtgccattattatgcagccagcggttctcttgtggagggggcaggtgacgtttcagaagacaccgagctggatgggactacctttctgttcatcaccacacaagcagaatttcctaatggaagtttgttgtgaatgtaaaggaagggaac

SEQ ID NO: 5028 - DNA, 275 bp, Homo sapiens
  I.5028 (W06919)
  misc_feature (271)..(271): n is a, c, g, or t
ctcaacctgttagtagaaatgttgacttcgattttttgcaccctcttcacaggacctcataagttgcctctgttcttggaaagcaatgggaataaaaatatgctgttgaaaatagtgcatggggcatgcattttagtttaggaaacccccctcccttcccagttccagagggagaaattataagctatactgtgccaaaagtgagtggggctgcagagaatggtgccttttctcaccttctgagttaatggcccgaaatctggcaatgggnatcc

SEQ ID NO: 5029 - DNA, 367 bp, Homo sapiens
  I.5029 (W05629)
  misc_feature (10)..(10): n is a, c, g, or t
  misc_feature (44)..(44): n is a, c, g, or t
  misc_feature (63)..(63): n is a, c, g, or t
  misc_feature (276)..(276): n is a, c, g, or t
attcggcacnaggcggacaccccaaagtaatgccagctgggaanacctgggaaggacccagcncaaatgggaagacggaccagggatggtcacagaccaacgtcaccccgaccacacagggcaccctgagaacacaaccacccgcttcaggtctgtcagaagagcctccaatcacctagacttccctaattcactggaacaggaaaggtgttgccacaggatacaaagcacttggtggtgagagtgagaacacttttggctcccctaatccaagcnaggggaactcgcggggctcaggcgacctcgctgggtaatggaaggcctctcggccaccttgcctttctgcggggctggaaacactgacatc

SEQ ID NO: 5030 - DNA, 413 bp, Homo sapiens
  I.5030 (W05733)
  misc_feature (3)..(3): n is a, c, g, or t
  misc_feature (12)..(12): n is a, c, g, or t
  misc_feature (15)..(15): n is a, c, g, or t
  misc_feature (348)..(348): n is a, c, g, or t
  misc_feature (393)..(393): n is a, c, g, or t
atntcggcacgnggnggagggagaagaaatagaagaaagttctgcaacaaccatgtctgagaacttccagtattaatgtcagacaccaaaccaaagatccaggaagctccgagaacaccaggcagaataaatgccaacaacctacacttggacatataattttcaaactatatgaaataaaagataaaggaaaactctgaaagaaaccagaggtggcggcagaaaacaccttacctacagagacacaaagataagaactgcattcaacattgcagaaactgtgaaagcaagaagacagtgaaatgaaaaattcaaaatgttgacagaaaaaaacccaccaaccctaangtttctgtacccactggaaacacccttcaaaaagtggagggaganttagggccttcctcagaaaa

SEQ ID NO: 5031 - DNA, 193 bp, Homo sapiens
  I.5031 (W05568)
  misc_feature (189)..(189): n is a, c, g, or t
caccaaactctggtgtagtccagggcagtggggcaggtaaattggcttccctggaaaatatgtccatctatgtgccttattcccagttcgtgcttttaagggatggagcacaccagccatgaactaaggctggagtagcaaaacatgaaatctgctttctacaaattatccagataatctctttccaantccc

SEQ ID NO: 5032 - DNA, 460 bp, Homo sapiens
  I.5032 (W05086)
  misc_feature (421)..(421): n is a, c, g, or t
aatatcctgcctgcccatctgctgatatttgcagcaatcaaaagcagcaagaacagcagtcctctgccttatttccactttccaaattgtccatgagtgcacctaattggtggtacctaattcccatccagaactctagctgccatggagggaagcattttgtgcaatatggcgcaaattatgggtgcgttagtccccgccttaaccacggaggagacgttccaagacctccagtggatgcctgaaacctcggctagtaccgaactctgtatgtactatgtttttcttatgcttgcatacctttggtaaagtttaatttataagttaggtacactaagagattaacagtgttaactaataattaaaattggaacagttaaaacaatatactggtcataaaagtaatgtggaatggactcancacctctccccaaatttatcttattttcagggtaactga

SEQ ID NO: 5033 - DNA, 548 bp, Homo sapiens
  I.5033 (W04854)
  misc_feature (325)..(325): n is a, c, g, or t
  misc_feature (425)..(425): n is a, c, g, or t
  misc_feature (456)..(456): n is a, c, g, or t
  misc_feature (493)..(493): n is a, c, g, or t
attttttttttttgttgttattgttgtttataatagagctgttttaatttgtaagacattaatttgaaagccctttaagactgtttaaaagcttgactgaaaagccataagcagagagttttatttcaacaccagtagaaaagttagaaaattaggcagagaaatgaaatagagggatagagagagctaggaaggctctacacattaattctgtaattacaggggatttttagagagtctgaataatgatcaatcaagccttgagtctttcttaatgtaatttgcccatcagtttaaaaatgtgcatgagaacaggccataatangtagtcagctagagtcccacaaacccttggcatgccttaatgtttgagaattccattctatttctcattaactcttgaaagcaaagataattttataaanccttttggaccagtgttttagatggtagtgntgtggcagtgcttttaattagccacctgaaccccatnatttaaaatattattttgccttcagaaattttgaaatagtagggaaaacccaatt

SEQ ID NO: 5034 - DNA, 337 bp, Homo sapiens
  I.5034 (W04744)
  misc_feature (254)..(254): n is a, c, g, or t
  misc_feature (334)..(334): n is a, c, g, or t
aaaaaaggaaaaggccagggcaagtctcatgggaagaaacagaagaaaccagaagtggacattctcagccccgcggccatgctgaacctctactacatcgcccacaacgtcgctgactgcctgcatctgcgaggcttccattggccgggtgctcccaaaggaaagaaagggagaagcaagtgacagcatttcacaacacatctctgttacagacaacaggaccttggggaagagaaatcagggttacacaactntttgccagcaacatagactttactccagacgacttgagatgcaaaattaagtgtgcttttctgtgatggtggaagatctngga

SEQ ID NO: 5035 - DNA, 402 bp, Homo sapiens
  I.5035 (W04272)
  misc_feature (157)..(157): n is a, c, g, or t
  misc_feature (158)..(158): n is a, c, g, or t
  misc_feature (159)..(159): n is a, c, g, or t
ttcctgtggctttaaaatatttcatgatatggatacagggagcacagggaggggaacaacacacactggggcctattgggggagggcagtggggagagcattaggaaaaatagctaacgcatgccggtcttaatacctagctgatggattgataggnnnagcaaaccaccatggcacacgtttacctatgtaacaaacctgcacatctggcatgtgtaccccagaacttaaaataaaataaaataaaacttaaaaaagaacatatggaaagctggataatgccacaaaagggttaatgttagcaagcttgggatggaggcactatgcaccatcatcatgtatttttccacttaagcagcatccactcctaaataaaacaaaatcattttgcagaaaataaac

SEQ ID NO: 5036 - DNA, 343 bp, Homo sapiens
  I.5036 (W03743)
  misc_feature (331)..(331): n is a, c, g, or t
atttatgggtataatattgtggtctgaatggcgtgaatttttatcccgcggagggggcagttgtgacaacctccagtgcatgtgggaacagcatgaattgggtcccttattcccagggggtgccgcatattccccaatactgtaaagcagatgctgtttagcacctgccaaggagccatatgccctgaagttcagcattaggcaggtatctcttaactgtaagacataccaggcccagctgggaccataatttgtacagaaacactggatgtgattaatagggagtaggcgagattatagcaaaccagcagaaatgggactctgctcaatntgcatcccctga

SEQ ID NO: 5037 - DNA, 411 bp, Homo sapiens
  I.5037 (W03137)
  misc_feature (301)..(301): n is a, c, g, or t
  misc_feature (311)..(311): n is a, c, g, or t
  misc_feature (314)..(314): n is a, c, g, or t
  misc_feature (317)..(317): n is a, c, g, or t
  misc_feature (330)..(330): n is a, c, g, or t
tcatctgttttgatcactgaaaagttgtctaaaaactgtgctcattatacacagtttatagtattttaatactttgtttatagtatttaatagcttctgaaaactttaagagaacatactaaaccaaggaactatttattaatggtaatctatatttagtaataaatatatttgtaacttactaaatgtaagtttactaaatgtagattactaaatcactgagtaaatatttcttgaatatttggacaagagatggggggagggagaatgacttgaccctcaagaaacttaactgctaccntttaaaaggntantantggaggccggggnccactgtggtacacacctgtaagtcccagctactcaggaggctgaggcaggaggaccccttggagccgaggagttcgaggc

SEQ ID NO: 5038 - DNA, 378 bp, Homo sapiens
  I.5038 (W01791)
  misc_feature (76)..(76): n is a, c, g, or t
  misc_feature (80)..(80): n is a, c, g, or t
  misc_feature (83)..(83): n is a, c, g, or t
  misc_feature (84)..(84): n is a, c, g, or t
gtagcaattcgtttgctgtccttcctctccttcgaagatgacaaggcctaccatcgtttcttcctgcctttgggcngtcnggnntcggttgggacccgctccaaccctcggttcttcctgcaatacagtggatacaatttgtcatggctactctgagtgttataggttcaagttcacttattgcctatgctgtattccataatatacagaaatctccagagataagaccacttttttatctgagcttctgtgacctgctcctgggactttgctggctcacggagacacttctctatggagcttcagtagcaaataaggacatcatctcgctataacctacaagcagttggacaggggagacggggtttcgccatgttt

SEQ ID NO: 5039 - DNA, 507 bp, Homo sapiens
  I.5039 (W01512)
  misc_feature (504)..(504): n is a, c, g, or t
aaagacagtatatttatttaaacgcaaagctttttccccttttatgtctcctcataaactccagagacagtctggaaggccctcttaaatttgtcaaagagcagtaaagtgtctcacgctcagtttttctagcagatcgtaatactctcagttgaccctgctgggatttgaacctgcagtttctattaagtttggtgtgtgaagtccaacaccttatcaactaggctttccctctgacatcttgaagcctccgtgtatatcctttggactctgcagcaaagtgcatcagttgttacgtttactctgagcatggtattcttagattgaaaagaagtctctgaagatgtcaaataaaatgtaaacattttctccagcagtgtgaagtctagtgagttaatgtttggcacaagcaggtaatttacatccattctataagggtagtagaaatggtgatctggggcaagtcacagtggctcatgcctggtaatctcagcactttggganggc

SEQ ID NO: 5040 - DNA, 473 bp, Homo sapiens
  I.5040 (W00726)
  misc_feature (6)..(6): n is a, c, g, or t
  misc_feature (8)..(8): n is a, c, g, or t
  misc_feature (403)..(403): n is a, c, g, or t
atctgncnagctcacttgtgaaggcagatggctatgggaagactgaagcatgggcctaggatttcaccagcaagtagtaatgggagaccctttttgggatttcccaggtcaggtggagattacacttagacaacaaataggaaatccttcagtgaggataaggtgaaggagatgaccttcctgtggaaggggaggtgggtcccagctgactggtaatgttaataatatcagcgtggtgaatatgtggggagtataattgtgttgtagaacagatggggaatgtagaaaagtgtaaagtgaaaaattaaaatcacataatatagcactgaaaagcactgcatgactgtcattttgaactagaaacgacacagaacatgaaatgattggttgttaaggcagtggnaaggaatttttttccttctttgacatctggttgcatggttctttagttctttaatggaactataggtgaa

SEQ ID NO: 5041 - DNA, 453 bp, Homo sapiens
  I.5041 (W00466)
  misc_feature (182)..(182): n is a, c, g, or t
gaatgggtttcaagtgattgtaccaaaataggaaaactataaatatatattcatacatatagtaaaatgttaagactgagatttagaattcatttaatgagcccaaattgtattttatgtatgagtaaactgaggcacagtaagactaagttaactgcccaaactcttccacctggttagtngggaaaataacatttccaaccctgatctttctggttcctgaaccaggatagctggactgtacttccccatttttgaaaaagctgctaaaaacttggttacaaactttaagtgacacgtttctccatttatgtggtggttatagcaacggtacaactctctatttataaattaaaccttgagaaacacccatctccacttcctagacaaaccaatgaacattagtcttatttttctcccagaaaatgtcagagggtgttacagtggctacac

SEQ ID NO: 5042 - DNA, 446 bp, Homo sapiens
  I.5042 (W00433)
  misc_feature (410)..(410): n is a, c, g, or t
attgattaaaaggtgacctttcttattggactgataagacaaaaatatagattccaaatctattgacatatgatatcacatccacaaatgtttgcctatttttgtagcattattttggttgcaaagtctcttagggaatgcacaaaaataatacaaccttaaaaatcagactagaagatggaatataagtggtttccttgtaatttttttttaagcttggagaggtaataacacatctttgaattcaaactgaggactgctgcttaatggtgcttttacagggtggttctaaaatttttgagagtcaggtattgctttctctgactgtttaattcaccactggcacgtgtttcctatcctcaagcataagtttaaaagattacaaacctcatgctgctcagttttttctntccagtaaatcagatgcatggtttctctagatttag

SEQ ID NO: 5043 - DNA, 470 bp, Homo sapiens
  I.5043 (N99464)
  misc_feature (293)..(293): n is a, c, g, or t
cacagtggcaccgaccagcatgggaagagtttttgtgctgacagagggcattctctttgttctgtggtccatttgtagatggctgcgctcctctgcacaggggctgtcgcttctgcatggattggtgtctaaaaaccccacctaaatgagaattagatattccctttcttctttacccagaattttctttttataaataaaaataggctgggcacagtggctcatgcctgtaatcccagcacttttggaggctgaggcaggaggatcgcttaagctcaggagttcaggaccangcctgggcaacatagtgagactgtaccactgcaaaaaataaaaaaacttagccagatgtggtggtgcatgcccgtagtccagctactggggaggctgaggtgggaggatcacttggagcccaggaagttgaagctgcagaaggttgtgatcgcaccaccacactccagcctgggcaa

SEQ ID NO: 5044 - DNA, 388 bp, Homo sapiens
  I.5044 (N99713)
  misc_feature (337)..(337): n is a, c, g, or t
  misc_feature (376)..(376): n is a, c, g, or t
gaaggagctaggagaagaattctctcatgtcagtagccctcttagggactacttaggttcggatccatttagtaactgaactcctagtgagcttgtttgcaaatcctctctattgtcccagccgtgaagtacttctctggcttccatagttaccttctccctggctggtgaagaagtggcccatgtttctggggtttcccagaatgttacagtcagcctcaaagcccatgtggaaggtatatttcctggtttctattgcaaaagttctgtagtggtgttgctgcaatgaaatggaagtccaacggcattccctgttagtgacggagtgtttcaaganggacctaacacgtaattgctttcatgttcgttacccaangtaaggggacag

SEQ ID NO: 5045 - DNA, 667 bp, Homo sapiens
  I.5045 (N99205)
  misc_feature (293)..(293): n is a, c, g, or t
  misc_feature (423)..(423): n is a, c, g, or t
  misc_feature (609)..(609): n is a, c, g, or t
  misc_feature (655)..(655): n is a, c, g, or t
cgggaaatgtctgattggcagatgttaaaagggattccttggtaatccagtgcatcaatgagctgcagaaattcagcccaggactgcaagaattcaggcatgaggacactctgtacaggaggctcacacaggcagacccaagatggacagaaccttggaatctctgagacacatcattgcccaagtcttgcctcacagagatccggctctagtcttcaaagacttgaacgttgtgtcaatgttacaggaattttgggaaagcaagcagcagcagaaggctcaattcccaagtnaaggtgtggtggtctatgagtcactgccagctcctgggcctccctttgtgagttacgtgaccctcccagggggaaagctgttttggcaactttcagtgctgcttaagtagagccgaggccaggcgggatncagctaaagtggccctgatcaactccctcttcaatgagctgccctctcgcaggatcaccaaggaattcattatggaaagtgttcaggaagcagtagcctccaccagcggcaccttagatgatgcagatgaccccagcaccagtgtttggggcctatcactacatgctggagtcaacatgggggaanctatgctggagtttcaggagctgatgacattttccaatattgactngaatggaagcgg

SEQ ID NO: 5046 - DNA, 459 bp, Homo sapiens
  I.5046 (N98806)
  misc_feature (407)..(407): n is a, c, g, or t
  misc_feature (422)..(422): n is a, c, g, or t
  misc_feature (440)..(440): n is a, c, g, or t
  misc_feature (452)..(452): n is a, c, g, or t
ttttggtaacacaaaattacccaaggtatagtaaacaaagaagacacagacaataaaaactaacagatgccacattttgcaaacatagcatttggctagaggcagaattataaggtatacatattaaaacatacatccaagactctcctcctcaatttgaaaccatgtttatcaagtttttacttcattgtatataagccaaaaaattaagagaaccttgatttgttcctgaaatacaagatttgcttgtattattactggaccaggtagactggatatgtgaatgtttaattcatagttagctagctttaccatcatctcctgaatcagctgctaaggatgcctgtgctctgccgtaactatatatagagtatgctttcaaaacaatataggcgggtgtggtggcnccacctgtaatccanccttgtggaggcaaggtngcggatacgagncagagat

SEQ ID NO: 5047 - DNA, 389 bp, Homo sapiens
  I.5047 (N98837)
  misc_feature (378)..(378): n is a, c, g, or t
gtgaaaaatgaaaatagctatcagcctggccctccagatttgaaaattagttttgggagcacagcaatttctcagggattcaaattacaaatgttaacaacagcagtcttcctgatgtgtgaaaatttacgcattcagaaactgggaaattatataatttaaaaaattttcagtttattaagaataaactacgtttctaaacataaaatccctatactacctttcagaaaacatttgttttaagtggcagggtacacctatttttgaattccctacgtatggaatttttttccaaaccacaaagtctatcttaaaactgctcaaaggtggtaaagattaatcagagtaatttattcattcagaaattggctgttaaanatttataccaa

SEQ ID NO: 5048 - DNA, 284 bp, Homo sapiens
  I.5048 (N98290)
  misc_feature (253)..(253): n is a, c, g, or t
  misc_feature (280)..(280): n is a, c, g, or t
atttctgtaacaattgcttccaaatattgactactaaaggcagttctgcaagatgtactaaatatgtatattagaaattatagaaaatcatgttgtccgttttcaaattcatcaacagcctagagtgcctgagatataagatgaaacacaaatccacagtatacttgaaaggagcctttttacggttcaggataaatcagcctttgtgatgtactgtgtttacctccttttgtgttgtatctggtaattaaantagggcccagattcagcaagtgacatnacaa

SEQ ID NO: 5049 - DNA, 470 bp, Homo sapiens
  I.5049 (N95641)
  misc_feature (1)..(1): n is a, c, g, or t
nggcgacagagagagactctctccaaaaaaacaaaacacaaaaaacacataagcaaacaactatacaagcagtataaagcatgtctaatactgccatatcacaatggcatatttcaatagggaaatggtattttaaataccattttttaaaaaccttttattctggaaaacatgcgaaactccgaatagtatggagaaccccatgtgttagtcactcacttagctttgacaattattaactcatagccaaggtcggttttgtttcatgttgtatccccccacacaaactagattattttgaaacaaatcttaaacattgtgtcacaacattagcgattttgacttttaccagattgccccagattaaggtcacaaaatttacttttagtagaataatagttctcatttttgtttgttggggcttcccttctctggtttatacatggatttctgtacagcagaaaagaaga

SEQ ID NO: 5050 - DNA, 415 bp, Homo sapiens
  I.5050 (N95049)
  misc_feature (145)..(145): n is a, c, g, or t
  misc_feature (253)..(253): n is a, c, g, or t
  misc_feature (292)..(292): n is a, c, g, or t
  misc_feature (311)..(311): n is a, c, g, or t
  misc_feature (372)..(372): n is a, c, g, or t
  misc_feature (380)..(380): n is a, c, g, or t
  misc_feature (412)..(412): n is a, c, g, or t
ttttttttttccagttacaatcatgaattcctcagagtttattgttaggtcaatatttagaaacagcattacattttctcacagaaacaatgaacaataatgattatgtttgcttccaggctagctcacagaagcctatattccnctaattgtaatgaaaacacatctttgtattgaaaatagtagaaaattatactctggcttctcttcagatcacataaatctttcacctttcactaaagatttccatggngagggacacctctgagtcttaagataccatctcatgccngttagaatggcgatcattnaaaagtccggggacaacagatgttggagaggttgtggaaaaatagggatgctttacaccgntgatgggnggggtaaatagttccaccactgtggaagacantgt

SEQ ID NO: 5051 - DNA, 365 bp, Homo sapiens
  I.5051 (N94834)
cactttctgaaatggaacctcaggatcttgagctagaggtaggtgaaataaagggaaattatatggaaacctgatataaatgtaatagcaaatatgaggatttggttcagtagaccagaaacttacatttttagagctgggtaatgtttttaaaataatttaatcctaagattttccaacttagtagtggaactcttgtctcaaaatccatgaaatctagtgtagaagacacataaaggcagggctgctgtggtcgcagtagtgttgggggaatccctggggctctgtccacttgatctctcctgggaagccaccttctgtttccagggtgccctagggtcttgcacagtacagtttgaaaactt

SEQ ID NO: 5052 - DNA, 454 bp, Homo sapiens
  I.5052 (N93187)
  misc_feature (300)..(300): n is a, c, g, or t
  misc_feature (422)..(422): n is a, c, g, or t
ttttttgatttaaaaaatactttattgctaaaaaatgctgacacagagacatgaagtgagtacatgctgttagaaaaatggcaccaatagacttatcccacacaaggttgccaaaaactttcaatttgtaagaaatgcaatatatgtgaagtgcaataaagtgaaatgcaataaaacgagcagtgcttgtacaaatgagcaagatgaagcaaagtaaggttaaacatacccaaggccacatagctagaaaatggccaagctagattcaaacctgggtaagatagctccagtgctatagcncacggcttagctctatactttactgccttaatccttacactgcacatcccattttaagatgaagatctcagttttagagagctgatggtgcatccaatatttaaatcccagttgtctgattncaaccttatgttccaccatggatttttttttc

SEQ ID NO: 5053 - DNA, 477 bp, Homo sapiens
  I.5053 (N92777)
  misc_feature (433)..(433): n is a, c, g, or t
  misc_feature (444)..(444): n is a, c, g, or t
  misc_feature (477)..(477): n is a, c, g, or t
atatttaacagactttaattgagcaaagaatgatagactcagagagactccagtgcagccacgtgatggatgaagagttacagacagaaaaaggaaagtgacatacagaaaacggaaatgagtaacagaaacagccagattggttacagcacagaatttaccttatttgaacagtttgaactgacccctttaattggccaaaacttggtgatcggcacaagagtagactcagtctgttgacaactccatttaggttatagttcactatgtacagagaaacctttaggctgaacttaaaatatttaaggaggcagctttaagttaaacttgatttaacagttgagattcagtaatgaataaatcagaaaacattgtacatattttaaaataaaatgttaatgtggaacatataaaacattcttcttaaaattcngaagtataacnaaatggtttattggggaataaaaaacgtgtccn

SEQ ID NO: 5054 - DNA, 430 bp, Homo sapiens
  I.5054 (N92689)
  misc_feature (161)..(161): n is a, c, g, or t
  misc_feature (164)..(164): n is a, c, g, or t
  misc_feature (165)..(165): n is a, c, g, or t
gatggagccttgctctgctgcccaggctggagtgcaatgacagtctcggctcactgcaacctccacctcctgggttcaagcgattctcctgcctcagcctcctgagtagctgggattacaggtgtgcgccaccacgcccagctaatttttacatttttagnaannacaggatttcaccatgttggccaggatggtcccgaactcctgacctcaagtgatctgcccacctcagcctcccaaaagtgctgggattacaaggtgtgagcactatgcctggccctgacctacttttgacaacaagttgacctccagtaactgaactgcagaaagcaacactatggataagggggagtactgtgtatagaattatgataaacgaactttaatagcaagaatttaaaatttttttagaaaacccacagtacctttg

SEQ ID NO: 5055 - DNA, 220 bp, Homo sapiens
  I.5055 (N92495)
  misc_feature (200)..(200): n is a, c, g, or t
tttttttggagtttgttttttatttagacatggaattttccttttcatataacttatctaattaaaatattcatctcggtagttaccacaaaaaagtaacatagaaaattgtatttacattttgggaccaaaatacaaatgaagagcaggatgacaccttgctcctttccctcccgcttcccagaaagaaaaagcccccnagaaactgctcagtacacca

SEQ ID NO: 5056 - DNA, 356 bp, Homo sapiens
  I.5056 (N92229)
  misc_feature (270)..(270): n is a, c, g, or t
  misc_feature (292)..(292): n is a, c, g, or t
  misc_feature (348)..(348): n is a, c, g, or t
caaatgcctgactaaatcttaagaacctgaattaacatagtagtttacgaaggactaaggacctatgttggtagatggtatactctttgtttgattggaagatctatggtgacaagggaaggatttaacatagaaatggcattatttattcgatgcaaagctgagtgcaaacatcattatatctctgaatcttttgcagatgttcatgttatttagtagcggtattaacctcattggtagctgaactctagggaggtttattggtgaaanctcacagtcctctgtggtctgnacctgcctagagactcaacattatggcatggaaatgccttgacacatcccatgccntgacctta

SEQ ID NO: 5057 - DNA, 489 bp, Homo sapiens
  I.5057 (N92159)
  misc_feature (435)..(435): n is a, c, g, or t
  misc_feature (472)..(472): n is a, c, g, or t
agacacggaagtttaattagcattgacagcacctgtacagagatgggcaattttgacaatgctaatgtcactggagaaatagaatttgccattcattattgcttcaaaacccattctttagaaatatgcatcaaggcctgtaagaaccttgcctatggagaagaaaagaagaaaaagtgcaatccgtatgtgaagacctacctgttgcccgacagatcctcccagggaaagcgcaagactggagtccaaaggaacaccgtggacccgacctttcaggagaccttgaagtatcaggtggcccctgcccagctggtgacccggcagctgcaggtctcggtgtggcatctgggcacgctggcccggagagtgtttcttggagaagtgatcattcctctggccacgtgggactttgaagacagcacaacacagtcttcnctggcatcgtccgggcaaggggagaatacgaagacangttctcagagttatgga

SEQ ID NO: 5058 - DNA, 442 bp, Homo sapiens
  I.5058 (N91396)
  misc_feature (31)..(31): n is a, c, g, or t
gtactgtttcatcaacaagggtgcaacatgngatagcataagtcattagcataatccaaatgcttgctaacggcctttggaatgcctaaacttaaaaaagtacactaccaaggacttggaaagaatctcgcactccaacgccaaagaatctattgcatattaatcttcattagaaaaaaaattgattggggacctaaagacaaaaataagcctattgtgcaatagcaaaacattaaaaaaatttaaaaagctttaggaaatttcatgtcattgtacaaagatgctacaccggagaaagggggatctggtgatcctaattttgtcaccagctttgaaatctttagctaggcatttcagccctataaaaatccattttctcacttgtaaaaagaagagttgaagttatgtttttccagggcttttttctctgacaaaccgaatt

SEQ ID NO: 5059 - DNA, 252 bp, Homo sapiens
  I.5059 (N91347)
tacaggttactttccaattttttattttagaaaagtcgtctcctctttaacatttcttacggatggctaccattaacttccttattcaaattcaacactttaagattagtagaatgaaaaaggcacctgcggtctcctctatttcatgaaagaactgatattatgtggaaaacatacctgggcaagaaaagagtgtctgtgtccacaaaaatcctgctttgattacatcttaaaataatctcccaacttcat

SEQ ID NO: 5060 - DNA, 300 bp, Homo sapiens
  I.5060 (N91341)
  misc_feature (266)..(266): n is a, c, g, or t
  misc_feature (279)..(279): n is a, c, g, or t
agagagcttaggattttatttttcgtttacacagggaatccaagaaaggagacagacaaagtgagtctcaaggatgagagcagagaaaagctcgagataaagagctgtgcagcccgggtcaggaagtgatcggtctaggtcggaacaggagaatcagttagacacaacggatgtgtttgagcctttggaaaacggtatcgttaggcatgtggcaaaaacgttggggtacttgaaaaaaaggctggccatgggttagtaaaaaccangatatgtggaaanattagggtaattattaacccc

SEQ ID NO: 5061 - DNA, 487 bp, Homo sapiens
  I.5061 (N91335)
  misc_feature (306)..(306): n is a, c, g, or t
  misc_feature (327)..(327): n is a, c, g, or t
  misc_feature (344)..(344): n is a, c, g, or t
  misc_feature (433)..(433): n is a, c, g, or t
  misc_feature (439)..(439): n is a, c, g, or t
  misc_feature (445)..(445): n is a, c, g, or t
  misc_feature (466)..(466): n is a, c, g, or t
gaattcttgagcatcatgcctagaacagtttcacagatgcaataaaacacgtctatctggctctcaaaagggaggcctcactgggaggtcagacattggttaagtctcatggttgagggtctggtccttgggaatgcaggtttagaaacatctcaatttattcgttggtgggggtaggaggcagaggaatatcagaagaggggaaggggggcaagccttgaaggtgcattcacttcggtaaaatttacatatctcacaccaaataaaatactgcctagaaccaaactacttacatgtgtctattcncgaatatttaaaatgccaaantagggtttttggtaagncataggacaaggggaaagtttaatattctttaaggggatggtttttttggcaaaattaataagccagcattaactctaagttaatggcntggttnattttngtataaatccaggtgtttttnccaagttttaatttggattca

SEQ ID NO: 5062 - DNA, 187 bp, Homo sapiens
  I.5062 (N91307)
  misc_feature (19)..(19): n is a, c, g, or t
  misc_feature (182)..(182): n is a, c, g, or t
cttaaagatcttttttttnttttttttttttttttttttttttttttttttacagaaagaaaatccatggcatttaattagattgcattttatttagataaatgaaaatttgccccaaacagaactaggaatcaaatattgtcttggactagaggtaattgctaagctggaacttatattgnaaacc

SEQ ID NO: 5063 - DNA, 233 bp, Homo sapiens
  I.5063 (N91300)
  misc_feature (228)..(228): n is a, c, g, or t
acttaccacttcttgaaattctttttgggtttttttgtttttattttgtcttttttgtttgtttttttttttttaattgctgttgttgtttttacttactttctgtcttctgtaacttcagtatatgcacagtaaaggcagggtctttaactgccatgtccactgctatatctctaggacccagaacagtatccagtacatcctaggaatttaataaatattagttgnataaa

SEQ ID NO: 5064 - DNA, 83 bp, Homo sapiens
  I.5064 (N91230)
acataactgaatcttgtcagtgacgtttgcctccagctgcctgacaaataagtcagcagcttatacccacagaagccagtgcc

SEQ ID NO: 5065 - DNA, 500 bp, Homo sapiens
  I.5065 (N90583)
  misc_feature (393)..(393): n is a, c, g, or t
  misc_feature (401)..(401): n is a, c, g, or t
  misc_feature (447)..(447): n is a, c, g, or t
  misc_feature (495)..(495): n is a, c, g, or t
atatgaaggaattttattaaccaaaaagtcaataaaatttttaaaaatgggcaaatgatttaaacagcaactttgcaaaaaggggaaatccaaatggtaaataaatttgtagaaaaaataattaacctcatggaaatgcaaattaagcaacgaggtaccattacaagcctagattttccaaagttttagtctaacaataccaaatgtggaaccttttaatgctgctggtgaaagcactaattactttggaaaagttaggtattacctagttaatttgaagatatacatatcctatgacccaccaattccattgctggatgtattctcaagagatcatacacatgtacaacctggacatatatacacaagaatgttcataatgggctttgttcnaaatagcnaaaaaggtagaatggatcccaatggccttcatgggagaaatacctngtggtgggatggttaataattaaccccggtaccaaaacctataggccntatgc

SEQ ID NO: 5066 - DNA, 451 bp, Homo sapiens
  I.5066 (N90493)
  misc_feature (30)..(30): n is a, c, g, or t
  misc_feature (320)..(320): n is a, c, g, or t
  misc_feature (327)..(327): n is a, c, g, or t
  misc_feature (346)..(346): n is a, c, g, or t
  misc_feature (352)..(352): n is a, c, g, or t
  misc_feature (367)..(367): n is a, c, g, or t
  misc_feature (387)..(387): n is a, c, g, or t
  misc_feature (393)..(393): n is a, c, g, or t
  misc_feature (400)..(400): n is a, c, g, or t
  misc_feature (405)..(405): n is a, c, g, or t
  misc_feature (424)..(424): n is a, c, g, or t
  misc_feature (450)..(450): n is a, c, g, or t
tgagatataggaaaaacccaagtgtctgtnttcccccactctcacacccatgtaacataacacttctcacaccagatgtggggggatttctcctcataccccaagtgagtctccagcagataccagctgggtgtcctacaatgtaactcagtcctgacactctatctggagacagtgtcagatcccacaagttaaggttcagtcccacaagacccgcccactgcagatgccaatcccaagttccaggctgtgacctgtactggacaaattctgtttttccacatgaccctccgtggatttgattactttcctggagtggntcacagnactcaggggaacacgttanttttanttacccatttattgnaaaagatattggaaaggatnctgggngaaaagntaganggaagagatgcacaggggnaagacacattgaagggagctcagagnt

SEQ ID NO: 5067 - DNA, 133 bp, Homo sapiens
  I.5067 (N90388)
  misc_feature (76)..(76): n is a, c, g, or t
  misc_feature (102)..(102): n is a, c, g, or t
  misc_feature (112)..(112): n is a, c, g, or t
cccaacaacaaagagggatactatggctacacaggcgctttcaggtgtctggttgagaagggagatgtggcctttntgaaacaccagactgtcccacagaanactggggganaaaaccctgatccatgggcta

SEQ ID NO: 5068 - DNA, 418 bp, Homo sapiens
  I.5068 (N90288)
tgtattactcagtctatcaattcaaattttattctcatctggaaacaccctcacagatacaacaaaataacgtttgtccaaatgtctgggcacccagtgatccagtcaagttgacacataaaatgaaccatcacaggtccactgttgtcaacttgacacccatacacatcttcctaaatcgtacttaatctccaaataaagacaataacaaggtcataattctgcctgacatagtacaattatcctgcattcaactaaaatcacactaacctcttccccagaagaggaggttaagtccttgagtgatgtttacttttctccttgatatctcatatgatgcataattaataatgcttaaatactatgatataaagtcaatacaatttatgttacatggataacagaataagaaagaaaa

SEQ ID NO: 5069 - DNA, 421 bp, Homo sapiens
  I.5069 (N90286)
  misc_feature (421)..(421): n is a, c, g, or t
caacttctcaatatttatttattcattcagtttgatgtgcatatctttgaaaagggttgacttataaagaaatacatgaagtttacaatctgtagctcaatctatcaaagaaaatggtggcttttagtaattaaataagcattagttcctaccattttaatgtgttcagggtaggaaacagaatagacaattgtgactgtaatgaggtccatgaacgtttagaatatgattaatccattttccacactgacccatggaaacaataacagctaatgtggccccactctcacctgtgaatcgtcttattcccacaggaaacatcaaacctccccaaatatcatcctctaggcagaggtcacttaactattaaatttacaaggcaggtgcaaaaaaaaaaaaaaggtggggggaccgatgaaan

SEQ ID NO: 5070 - DNA, 415 bp, Homo sapiens
  I.5070 (N90211)
  misc_feature (323)..(323): n is a, c, g, or t
  misc_feature (335)..(335): n is a, c, g, or t
  misc_feature (348)..(348): n is a, c, g, or t
  misc_feature (365)..(365): n is a, c, g, or t
  misc_feature (371)..(371): n is a, c, g, or t
  misc_feature (396)..(396): n is a, c, g, or t
  misc_feature (409)..(409): n is a, c, g, or t
ccaaaacataatcggctcaaatacgacagaagtttatttcttgctttaagggtggatgttcctggttggctgacagtttttctccatacatttagggtcccagtgccttctaatttatggctccccaggttatacagcattgttcactgtatgctatttgtatttacaaatctctgcttccagcatgttagcttataagcgtagtgagggcatagaattgccagactcagcaaataaaaacataggaagcccagttaaatttggatttcaggttatcaacacatttaagtgtacattttagtataagtatattccaaatatcncatgggaaaatncccgtataaggtntccccttaaacctattnatcccnaaaaatttaggggggttttttaccnggaaattcccaantccaat

SEQ ID NO: 5071 - DNA, 471 bp, Homo sapiens
  I.5071 (N89900)
  misc_feature (4)..(4): n is a, c, g, or t
  misc_feature (15)..(15): n is a, c, g, or t
  misc_feature (125)..(125): n is a, c, g, or t
  misc_feature (259)..(259): n is a, c, g, or t
  misc_feature (261)..(261): n is a, c, g, or t
  misc_feature (430)..(430): n is a, c, g, or t
gcgnccgctgccttnggacccagcgccacccgcacacggcgctccgctagccaggccgggagcaagagccaggcggtcggagaagccgccgtcggagaagccgcggctgaggcgctcgtcgcgcngggcccaggaggagggccgggggagccgccgccgcctgagctggcgttgctcccgccaccgccgccgccgccgccgactcccgcgaccccgacgtcctcggcgtccaacctggacctgggcgagcagcgggacntngggagacgttccagaagcggcagaagcttacctccgagggtgccgcaagctcctgctagacacctttgaataccaagggcctggtgaaagcacacaggaggctgccacttgtggaagcagttcgtttttgaaagttttgggcctcagcagactttgcatatatttgaantggaattgcagcattttgcaagaagaagcagaatagacact

SEQ ID NO: 5072 - DNA, 423 bp, Homo sapiens
  I.5072 (N89878)
  misc_feature (282)..(282): n is a, c, g, or t
  misc_feature (354)..(354): n is a, c, g, or t
  misc_feature (360)..(360): n is a, c, g, or t
  misc_feature (380)..(380): n is a, c, g, or t
  misc_feature (395)..(395): n is a, c, g, or t
  misc_feature (403)..(403): n is a, c, g, or t
  misc_feature (418)..(418): n is a, c, g, or t
gtattttatctggcctgacttgttcctccttcagctaatcttgagatactgaggtgatggatccaagaagttctatagacttaacacttcaattctggtagcctgtgtttcagggcctgttagcaattttgtatttccttgacacaccttgtaagtcaattagaactttgaagtattactaataaaactgttcaaaatctatagagtgatgtgtagcagattcaagtctcacagtcaaccaaatgagacagcatctaccagcatctggcaaattgattagcnggatataaaaattgaatcaactatctggcaaattccctgcagtacatgctattctgctcttgttgggttccnattccnttatccaatcatcacacagnatggttatccaactngaaaatgnggtcatacatacccnggcta

SEQ ID NO: 5073 - DNA, 329 bp, Homo sapiens
  I.5073 (N89814)
  misc_feature (255)..(255): n is a, c, g, or t
  misc_feature (263)..(263): n is a, c, g, or t
  misc_feature (280)..(280): n is a, c, g, or t
  misc_feature (282)..(282): n is a, c, g, or t
tttacaagtgtgagaaattcctcaagattttaatgttaatatgaaaaagattacttcacatgtgaaatccacaggtgtcattctattatttttgaatatttaacattcacaccaaaataaaagattctgaatgaaaacttaagttgagctgtaagtatgtaataaaaaatttaacattctccacttaccattaactcttctaaaagtttaatttctaagacatatcttctaactaattttatattttccacacantgtgggtnaataatgttgttttttntngagatgaagtctcgctctgtcatcaggctggaatgcagtggtgcgat

SEQ ID NO: 5074 - DNA, 337 bp, Homo sapiens
  I.5074 (N89651)
  misc_feature (294)..(294): n is a, c, g, or t
  misc_feature (303)..(303): n is a, c, g, or t
  misc_feature (319)..(319): n is a, c, g, or t
gttatcaatgctttattaattctgtacattaagttataggttttacatatacacactccagttaataaacagttgttgaatactagatatgtgtcaggcaccaagccaggcactcttaaattgcttatggttcagtgaggaaaagaggcaatataataccttgtgaaaggggctatgattgcataaagaagatatgcctcacctcgctcaggaggatcttgctaagctttttgatttctgacaaggaagaggcctgaattgagcctggaagaataggtaagagaaagcaaggcnaagggaagngggggggaaacacacnttctctgggaaaaggggg

SEQ ID NO: 5075 - DNA, 382 bp, Homo sapiens
  I.5075 (N80474)
  misc_feature (242)..(242): n is a, c, g, or t
  misc_feature (307)..(307): n is a, c, g, or t
  misc_feature (350)..(350): n is a, c, g, or t
  misc_feature (368)..(368): n is a, c, g, or t
  misc_feature (378)..(378): n is a, c, g, or t
atgctcagaaagactagaaaacatccaaaatgataatggtacttacatataggtagtttgactaaagtgatttttccttcttactatctttctgtattttgaaaatttgctataataaacagatagtattttcaaaaggataaaaagcctaaattccagttttctggcctacgtcatacgaccacacatcccataatctgccccttctgctccaacacctgctctgctgaatatgcctaaanggaaattacacaacacacatttgggtcctccacacattctccatctcccagggctcatgtacccngggaaactcggttccctactaaactttctcttccattaggccnaagtgggtacatcaaagnttctcccaantctt

SEQ ID NO: 5076 - DNA, 401 bp, Homo sapiens
  I.5076 (N80446)
  misc_feature (270)..(270): n is a, c, g, or t
  misc_feature (392)..(392): n is a, c, g, or t
ccatgtccttggtaaaataataccaacagacttgctctatgcagggtggccacaaaccttcaatttgtaaaaaataatattgtctactgagtataataaagtggagcacattaaaacaaggtgcacctgtactatgtgccaagcaccatgctaaattatcccactaaagatgtctcaaataaaatgagaacattttgagtaggctaattttataaggccttttattttagttgtaccaaaacaagccctccaaaatacaaaagcactaanggaatagacatctttgtcactttgttccatccttggcacctaaagaaactcctgggactgaacataattatttacttcagcaactctgagtctttgacattataatgtacatttataaatcnctaagaagg

SEQ ID NO: 5077 - DNA, 485 bp, Homo sapiens
  I.5077 (N80436)
  misc_feature (3)..(3): n is a, c, g, or t
  misc_feature (283)..(283): n is a, c, g, or t
  misc_feature (293)..(293): n is a, c, g, or t
  misc_feature (324)..(324): n is a, c, g, or t
  misc_feature (358)..(358): n is a, c, g, or t
  misc_feature (371)..(371): n is a, c, g, or t
  misc_feature (383)..(383): n is a, c, g, or t
  misc_feature (391)..(391): n is a, c, g, or t
  misc_feature (402)..(402): n is a, c, g, or t
  misc_feature (415)..(415): n is a, c, g, or t
  misc_feature (428)..(428): n is a, c, g, or t
  misc_feature (437)..(437): n is a, c, g, or t
  misc_feature (470)..(470): n is a, c, g, or t
ggnagtaccactgctttgtgagctatatcgtggctgacatagagctcaagtagggtagaagtgtcggctcggcagattcttgtttatcattgctgttcacttttgcttgttcaattagtgttatcttctatccacagttcctttggtgggatcttttaaagccaattgtccattttgtgaggattagtttagttaaaaattagattatataatctctaaatccacttaatagggcatgtatgaactgcaattcaggaaaaggcgagtgagccccaaaaggtgncactgttgancccttcgtgttagccatgaagctcctatggntccccccaaaataccttgagggctatgggaatgnatggaggccaacnggggttcaaagnatttaagngacccgatggnggcttccaattcngggcctaaaattntaccggttnaaaaattaaatggcaaaaaggttccaaaaatgnaacctttccggtaaa

SEQ ID NO: 5078 - DNA, 244 bp, Homo sapiens
  I.5078 (N80383)
  misc_feature (239)..(239): n is a, c, g, or t
ttcccttccaactaatttttctcttaaaagtggcactatgtttttgaaaaagctgactactttaagaaaatttctctcagtttactttcttaatcgtgtgcttttctgaagagttggctctgacgttgactactatagtaaatccaattttgatgagtttttcttttttagtgggccaaaaaaaaaaaaaaggaaagaaaattctcctttgtagaaaaaggagggaggatggaatgtanattgt

SEQ ID NO: 5079 - DNA, 459 bp, Homo sapiens
  I.5079 (N80358)
  misc_feature (214)..(214): n is a, c, g, or t
  misc_feature (215)..(215): n is a, c, g, or t
  misc_feature (219)..(219): n is a, c, g, or t
  misc_feature (220)..(220): n is a, c, g, or t
taaataaccataacaaagcccaaaatgtcagcctccaaatgtcctctgttcccatctctggtctggggaagatcacagtccttatttgaagaggctggagcagtggtccttccagtgtctgttcaggatgtgtagggggtctgatatagtttggagatatgtcccctccaaattgcatgttgaaatttggtccccagtgttggaggtagggccnnatanngagatgtgtttgggtccttggggtggatccatcatgaatggcttgatactgtccttgtggttatgagtgagttcttgctctattagtccctggagaactgatagttaaaaagaggctggtatctccctcctcctcttggctcctttggtcttgccatgtgtcaggccctccttcgccttctgctaggagtgaaaagcagcccaagaccctcaccagatacagatgctgctgccatgctt

SEQ ID NO: 5080 - DNA, 249 bp, Homo sapiens
  I.5080 (N80336)
  misc_feature (122)..(122): n is a, c, g, or t
  misc_feature (223)..(223): n is a, c, g, or t
  misc_feature (232)..(232): n is a, c, g, or t
  misc_feature (246)..(246): n is a, c, g, or t
aaatttctattaagatttcttcttctaaaaaaaagatatcttctttaaacaaaaccatgttatttggagataagtatacattcatgaaactatcagcacaatctatgccataaaactacctntcactttcaaaagttttctcctgccttatttgtgtgtgtgtgtctgtgtgtgtgtgtgtgtgtgtgtgtgtgttgagaatacccaatataagatctaaccnttctggggnaatttttttagagncgg

SEQ ID NO: 5081 - DNA, 236 bp, Homo sapiens
  I.5081 (N80097)
  misc_feature (186)..(186): n is a, c, g, or t
taggcagaagggactagccttgtctcagataagactttggactgtggacttttgagttaatgctggaatgagttaaatatttgcaggactgttgagaaggcatggtagtttgtttgtttgtttgtttgtttgtttgtttgttttttgagacagagtctccctctgccactgcacttccgcctgggnaaaagagcgagactccatctcaaaaaaaaaaaaaaaaaaaaaaagcaaag

SEQ ID NO: 5082 - DNA, 323 bp, Homo sapiens
  I.5082 (N79921)
  misc_feature (182)..(182): n is a, c, g, or t
  misc_feature (317)..(317): n is a, c, g, or t
ggctgagagtgagcaaattgtcttgcttatgcacagcagtcttcacaacacatgacatttcagggaaacttcaaaggagtagcagagacagcagcccgagatgtggtttacatattggggagacaattgggagcttatttgcgcttatcttttttcaagttaaaaggcatgacatctactgnaaacagttcctgaaggtttaaaagtatacatctgaaaagagatggaatactttgtctaaattctacatttgtcttaatatgcagttacatgttgtcagtttacccacccggaaatgattgctagcacatgggcgnaaatct

SEQ ID NO: 5083 - DNA, 437 bp, Homo sapiens
  I.5083 (N79686)
  misc_feature (139)..(139): n is a, c, g, or t
  misc_feature (177)..(177): n is a, c, g, or t
  misc_feature (348)..(348): n is a, c, g, or t
  misc_feature (359)..(359): n is a, c, g, or t
  misc_feature (375)..(375): n is a, c, g, or t
  misc_feature (388)..(388): n is a, c, g, or t
  misc_feature (400)..(400): n is a, c, g, or t
  misc_feature (426)..(426): n is a, c, g, or t
  misc_feature (432)..(432): n is a, c, g, or t
ggggtttccgtgcaaagtgacaaacgacggtaacatgaaccttccaaagccaactgggttgtctttgtctttccgtgccaggtaagaagaagaggacaagccctgcccagtcccaagaagtgttaacaggcgctggagngttatctgcggctgcactcgcttctccctcctgcaganattcttgctgctttccggtcccacgggacggctcccaggctcccgcctcacggcaagaaaaataaaggcctccccgcacagccagccagcttcgttcattcacgtcaccgacaaacactcctaagcaggcgttgttaaacgttcagggagcgcccgggacctagccgaggncccctcctggntgttcgcggggggatngcggcaccccttnggaaacgattgngggaaaggaaaatttttggttggccngggggnccggt

SEQ ID NO: 5084 - DNA, 166 bp, Homo sapiens
  I.5084 (N79671)
  misc_feature (133)..(133): n is a, c, g, or t
  misc_feature (151)..(151): n is a, c, g, or t
  misc_feature (162)..(162): n is a, c, g, or t
ctttacatacatccgtgtatccacctgttaccattttccttctgcccaaagtatttatcatctataccagtgaagaactgttggttcaactgttgtatgtctgaaaatgtgactctttttctgcctccattcngtggaaaaaaaaattgcngcatatagaanttga

SEQ ID NO: 5085 - DNA, 218 bp, Homo sapiens
  I.5085 (N78539)
  misc_feature (103)..(103): n is a, c, g, or t
  misc_feature (202)..(202): n is a, c, g, or t
aagcagagatagggtttcactgtgttggccaggctggtcttgaactcctcacattgtgatccacccgcctcggcctcccaaagttctgggattacaagcgtgngcaccgcgcctggccgtgtgtttgagattcctagagacattagtaaaaccctccaaaagagtggggaccttacaccagcctgccggttcaagctccatnctggacctccacctcc

SEQ ID NO: 5086 - DNA, 141 bp, Homo sapiens
  I.5086 (N78412)
actagatgctttcaattaatagccctatatttttgtgcaggcgaactgtataacaggataaaaaatgatttgtatgtattgaaaaggaggagaaattctcacagaacaccatatgagctttagaccaaaaggggaaacaag

SEQ ID NO: 5087 - DNA, 289 bp, Homo sapiens
  I.5087 (N78205)
  misc_feature (36)..(36): n is a, c, g, or t
  misc_feature (255)..(255): n is a, c, g, or t
  misc_feature (269)..(269): n is a, c, g, or t
  misc_feature (276)..(276): n is a, c, g, or t
  misc_feature (287)..(287): n is a, c, g, or t
gaaattctctgatgttgtcactgagctgtaaggctnggagataagactgtctccttctgctgaaaataagaatcaatactcactccttgatgggctaaactattaaaaagagcccttcttacaatgtttcattatctgggatttgcctcagctggtgatttgtcggtggcacagggagatttgtgaggcatttcatattaaaattagtcagtagccggtgaatccctttagataattctcttccgttttacacgngctcctgaataganttgtganttatttttgcnca

SEQ ID NO: 5088 - DNA, 440 bp, Homo sapiens
  I.5088 (N77774)
  misc_feature (12)..(12): n is a, c, g, or t
  misc_feature (14)..(14): n is a, c, g, or t
ggcgtattctcncnaaattctccgttattaaaatcgatttctgcatcttgcctggaaaatgcacttacatatttacaagcgttgtatgtcaatgtgcatgttttgaatttcctaacagtgtctaatcttagtagtttcatagtagttatgtaaaatctctttaactgcaaaatactataaaatattacttgaaatattaaagtattagtgccatttctagctgtggcaaggcacaagtcttactatagcttacttatgtcttctcatagatttcagtacagcatctgagtagtggatctgtttactgacagtatacacaaactaggtcttgacctcacttctttcttcatttaaaaggagaagatttgaaatagagctagtgtaaataataaataaaattatttaaatagcatcagtggctcaataccatctgttgaggg

SEQ ID NO: 5089 - DNA, 459 bp, Homo sapiens
  I.5089 (N77569)
  misc_feature (337)..(337): n is a, c, g, or t
ttgtttcatcacactgaatcgttggccaagaaatgcttgaaaatcaaaacattaatatcatctttcttcttttttttaaaggtgacttaagagattaaaattaatttggttgctgttggttctgaacaaataatcgagttcttttatttgaggtatgccattttgaagactgagacgttggagttttatcctagaggataaaggaaatctttgggaaagtcagtattttatatagcaaaaatatgaacctcaaactgaatcctctaaaggccccatacaatgaagtagacattggtggaaacatttacacccagtcagctttgaagagtttcaaatnggaccctaccactgagaaatcaagatgggcagtctactatggggaattgaggaaaaatggattaatacaagagtcctgtgataatatacaaccaagacaggggttccttttaacatggattc

SEQ ID NO: 5090 - DNA, 229 bp, Homo sapiens
  I.5090 (N77138)
tgacagacaaacgccaaaaaaagatgaaagtcttgtatccaaagcaatggagtacatgtttggctggtagtagaacaccaagaaggaggttgctacactaaaacagagttagcagagtgctgctggttccttcggttagttatataactgttcctgcagtattggatagctatctcatacttcttttagaaagaagcctttttcattaaggatacaacctatttgtagc

SEQ ID NO: 5091 - DNA, 509 bp, Homo sapiens
  I.5091 (N76856)
  misc_feature (333)..(333): n is a, c, g, or t
  misc_feature (338)..(338): n is a, c, g, or t
  misc_feature (422)..(422): n is a, c, g, or t
  misc_feature (477)..(477): n is a, c, g, or t
  misc_feature (509)..(509): n is a, c, g, or t
ctttacaataattattatagccaaagccaccatatattctgcatttcccaggatggtgtcagttttgaatgttgtttctttcaggcaggcatggtgaattttggttcagaaaacaggatcactctgtcacgctcttgagggtgaactgttggagagtcactgtggtgatcaaccaatgggtactccctagttcctggaactgagaacttcagtctggatacttctctataaatggtttcggtagactctgccactttccccggggatctgaaagagttctccaagaagcccccacttctcaggcggcaacagggcaggtaccctgggcggtcntttantgctactggttcataaaatcaatctgagttttatgggtgctttttctgaggaaggagagatttaaagttatgtagccggcaacnaagctttctaataatatttttggcaggctgctaaagaaaaaaaaaaaaaagatcnttaattaagcggcgcaagcttattcccttagn

SEQ ID NO: 5092 - DNA, 284 bp, Homo sapiens
  I.5092 (N76478)
  misc_feature (90)..(90): n is a, c, g, or t
ggagagacaaagaacagcatggcataaacaaacatcccagaaataaatgaaaagttttaagtgataaaattgtgttttctatgaaccagngttgtacatgaaccaacattgtgtttcttagctctgacctgtacagtgaggtacctgtcaggacccctagtcttggcactggaaatgacaaagttctcctattactaaattctcatgccttcccttttctgacttaagtagattgaaattggtaggtaccaaatgatttatgtttgataaacttaagttcccgc

SEQ ID NO: 5093 - DNA, 429 bp, Homo sapiens
  I.5093 (N75784)
  misc_feature (8)..(8): n is a, c, g, or t
  misc_feature (114)..(114): n is a, c, g, or t
  misc_feature (418)..(418): n is a, c, g, or t
  misc_feature (428)..(428): n is a, c, g, or t
taaagctntggctatatagtcagaaatgtcctaaataacaaactattttgtatttaatttagggaagactaaagggaagaaaaatgaaaactcagtctttatgtaagctccaanggttattagggcttaaagggcttttctagttttatgagaatttgtactactgatttttatatattcctgtttttgagatgaacagatctctggggaaattgttgagttacaatggcatttcactgtgatccctctcaagctcagatcagttctataacccaatgacaacctgtctctttggtttactgtcctgtgaaatgtcagctcaagtttcccagaagtcgtgtgtttatgatgagtcagagtgcttttcctcggtgggacagttgctggccctcttaattttgggtgtatgtgcttccangtatctaaant

SEQ ID NO: 5094 - DNA, 426 bp, Homo sapiens
  I.5094 (N75773)
  misc_feature (399)..(399): n is a, c, g, or t
tgactagtcagtactgctcaaaaatgtcaagattatgaaagacaaagaaagactaaggtactttccagatttaaagaaattaaatagacaggactactaaatgcaatatatgagtctgaattggaccctggactaaaattaggcagacagttggtgaattttgagtcaagtctgtagagtagttaatagtatttctggttttgatcatcataatatggttatttaagatgttaacatttggtggatctgggtgaaaagtatatgaggattctctccgcagtatttttgcaatttttttaaatccgaaattcttttaaaatgagaagttggctggggcacagtggctcacacctgtaatcccagcactttgaaacaccaagggcaggagactccctttgngcccaggagtttgagaccatcctgcgt

SEQ ID NO: 5095 - DNA, 366 bp, Homo sapiens
  I.5095 (N72930)
  misc_feature (246)..(246): n is a, c, g, or t
  misc_feature (267)..(267): n is a, c, g, or t
  misc_feature (271)..(271): n is a, c, g, or t
  misc_feature (278)..(278): n is a, c, g, or t
  misc_feature (339)..(339): n is a, c, g, or t
agagagatatatattaaaaagtaacattaatatatagaactttaccatcaccagccgtagttgatagaaaatattagtttcagaattaccctcctttaaaaaataagagactatttgttttcttttaatttctatgaataaaagaaatttttaaaaactttaaaattttaaatattagtcaaaatactttttaagtcctgagtgcttacaggtagttgttaaaaaaattttaagggcaggcatggngggcgcgcacaaccctaaaancctnggatctnggggagggtcgaggcaagctgatcgcttgagcccaggagtttaagaccggcctgagtagcntagcaagaccctgtctctacaaaaaaa

SEQ ID NO: 5096 - DNA, 360 bp, Homo sapiens
  I.5096 (N72927)
  misc_feature (101)..(101): n is a, c, g, or t
  misc_feature (123)..(123): n is a, c, g, or t
  misc_feature (265)..(265): n is a, c, g, or t
  misc_feature (277)..(277): n is a, c, g, or t
  misc_feature (319)..(319): n is a, c, g, or t
tgtgtgtgtgtgtgtgtgtgtgtgtgtgtgtgtgtagagacaggatcttgatgtgttgcctaggctggtctcaaactcctggcctcaagtgatcttcccanctccagcctcccaaaactgttngggattataggcgtgacacctggttgcccagcctaactggaattttatgagaggaaaatagaaaatgctcttctagaagagagagaacaagaggcacaaaataatctggacctcacaaaaatttcagcaagctccaagaaangggggattggangggaacgcttggcaaaaatttaaatgccattaggatattttngcaagttattacctgtttgggtaaaaatgcatcatcaccct

SEQ ID NO: 5097 - DNA, 447 bp, Homo sapiens
  I.5097 (N80764)
  misc_feature (43)..(43): n is a, c, g, or t
  misc_feature (338)..(338): n is a, c, g, or t
  misc_feature (426)..(426): n is a, c, g, or t
aactttactcataaaattttatttgaacaaaacaatttttganaatataaaaatttcataagaactgctttcctgttagatacaaaatttattttaaaaataaataattatattgacctttaccatcacttgtctaaattttactcatgtttattgtgaagacacagaggtgaattagaagagtatatcattatacattgtcaaataaagcgaaggtttccttatccaaatagagagaatatatatgtgattacttaatataaagcaaaagctatttctaccaaagaacagacatgcagttattgatctggaattggcatcgattacaaactactctngcaattcttcctctccccaattaaggtgtctctcttgaactggattgaaagctgtttgataagtatacttttttcaagatggtgtgcncagttggggggccttttatta

SEQ ID NO: 5098 - DNA, 346 bp, Homo sapiens
  I.5098 (N79813)
ctgtgttccatctctttaatttttgtctttagagaatgctgtataaaaaaaaaatcatacggcatgtgatctttcagctcggccttttttcactccgtataattccttctgggttcacccgcgttatcagtgagcggggccttttttccactccgtgtaattccttctgggttcacccgcgttatcagtgagcggagtcttttttccactctgtgtaattccttctgggttcacccgccttaccagtgagcagggtcttttttcactccgtgtaattccttccaggttcacccgcgttatcagtgagcggcccttttttcactcccgtataattccttcccaggtt

SEQ ID NO: 5099 - DNA, 403 bp, Homo sapiens
  I.5099 (N79807)
  misc_feature (382)..(382): n is a, c, g, or t
ttttaaatcattcagtttaaggtcactagactttagatgagtgaccctgcaggtttataaggcattctgctcagcagtcttgtaaatagtcctatatgaaagagccatgctactgttggacttggtcccactctggtcaaccttgataacgtcatacgtggcttatggactggatagcactggattccgccgcagccctggccatactgtgccacacgttggaagaactgtgggatgtagaatggagggactccttgtcagacagtgacagcatcatagcatatgcctgcgatttggactttctgtgtaacggctgcttaagttcccctggcacatgggaagtactaaaagaagacagctccagcttcagaatattggatancctccaattttccccaatttg

SEQ ID NO: 5100 - DNA, 378 bp, Homo sapiens
  I.5100 (N78967)
  misc_feature (230)..(230): n is a, c, g, or t
  misc_feature (236)..(236): n is a, c, g, or t
  misc_feature (239)..(239): n is a, c, g, or t
  misc_feature (244)..(244): n is a, c, g, or t
ggaaaaagtaaaatcattcttttgtatttgtcatatataaaagttttcaggagctactgtcttattcctttttgcaaacacttttaataactgctatagaaaacctcaaacacttcatcctggcttttaagggtcttcacaataaggtcccaaccttaactaatcctgttgccaaaagaaactgagctcattcccagcttccgtatttattgattttccttcagtaatgnattccntcntttcnccacttccaaggtttcagggtctcagctgaagtcctaggaaaactcttttaaagataggaattatggatggtcctccattcttctccagactcttctattcccggagtacaaatggatagcagagccggttgga

SEQ ID NO: 5101 - DNA, 428 bp, Homo sapiens
  I.5101 (N78784)
  misc_feature (380)..(380): n is a, c, g, or t
aggttcttaaaattttaatacaaaagttattcacaaattggttaaaaagtttccatttcctttttgaaaaaccttattgaaggtgagggggaaaacacactgcatgtaaacaccattcttacacaaaatcctgctccaaaaaacccatgggtttgtatattaaaaagcaaagaatgctccctcctttacattcacaacaaacttccattagaaattctgctgtgtggtgatgaacagaaaggtagtcccatccagctcggtgtcttctgaaacgtcacctgccccctccacaagagaaccgctgggctgcataaataatgggcaccagggaagaccgcggtgctgggggtcctggttgggttttgaaccaagcaaaaatngtctggcatgggaatctcgggctccgcaaaagaaccctggtcaatgca

SEQ ID NO: 5102 - DNA, 152 bp, Homo sapiens
  I.5102 (N76117)
agatatatagatgatctttaatgatttggagggaaatgaaataatataacaattacacggtatttccattggcaaggccatcaaaagttgattcctcaagcacttctgctatccataaattctcacggttgatacttttctttgccctgcaa

SEQ ID NO: 5103 - DNA, 340 bp, Homo sapiens
  I.5103 (N75302)
  misc_feature (168)..(168): n is a, c, g, or t
  misc_feature (173)..(173): n is a, c, g, or t
  misc_feature (176)..(176): n is a, c, g, or t
  misc_feature (178)..(178): n is a, c, g, or t
gccttctgagagcaaagtttaatcctgacccagaattataataatttctgaaagttctattaatttcagcacactgtgtaggaattactcaggcttttcccatcctatagctcctaaaaaaccaaagtggctaaccatatctggcataacagaggaagtaaggtgcanttccngantnttcaaccatcacagaaaaagcacacttaatttgcatctcaagtcgtctggagtaaagtctatgttgctggcaacagttgtgttatcctgacttctcttccccaggtccctggtggtctgtaacagagatgtgtttgtgaaaatgctgtcacttggctttctc

SEQ ID NO: 5104 - DNA, 212 bp, Homo sapiens
  I.5104 (N75029)
tgctcacccatgcctacccggaaagccagctacagctgcgtataaaggaagagaatactggccctgggtgaggtgtggcattagtggcaccttctgggctcctgggcaggggtggggagtggctttcttgagcagctgggatcattcattgactgatttttggataaatgaggtgttagtggaccttgattcggaagattgtgaaagaggat

SEQ ID NO: 5105 - DNA, 140 bp, Homo sapiens
  I.5105 (N74889)
attgtaccacaattctttctttaatgctctttttaaaaaaatgttgatccaggtttcagttacatatcttttgtttccctaaagaatttcatttaaaatttcttgcaagacaggtctcctggcaacaagtttcttgaatt

SEQ ID NO: 5106 - DNA, 250 bp, Homo sapiens
  I.5106 (N74930)
gttaccttgatatattacctgtaattgcatgaagcacaaatttccctgctagctcttcagttcataaatcactaagtaaataacacatgcacatcatgatctgtgactgatcatgtcacttcttcgaaggcaatgactggtcaggacagtacgcatctgtactcagttcatacacagacagcaaagcatgaagttgtgtcgtctccttgtctcccagtgattaaaccatgtgacattttataaaagtgag

SEQ ID NO: 5107 - DNA, 354 bp, Homo sapiens
  I.5107 (N74903)
  misc_feature (342)..(342): n is a, c, g, or t
tcaacaacagaaatttattttttcacaatactggagtctggaagtccaaaatcaaggtgttggcaggttggtttctcctgaggcctctctccttggtcttcttgatgaatcctcacatggtctttcctttgtgtgtgcaactcctgtgtctctttttgtgctcaaatttccttcttataaggaaaactgtcagactggattagaacccaccctaacggcttcatctgaacttaatcaccccaaagccctgtctccaaatacagtcacattctgaggttacggctgttagggcttcaatataattttgggaggacacaattcagccccataacaaccccctcnccctttctctag

SEQ ID NO: 5108 - DNA, 508 bp, Homo sapiens
  I.5108 (N74698)
  misc_feature (166)..(166): n is a, c, g, or t
  misc_feature (189)..(189): n is a, c, g, or t
  misc_feature (340)..(340): n is a, c, g, or t
  misc_feature (413)..(413): n is a, c, g, or t
  misc_feature (423)..(423): n is a, c, g, or t
  misc_feature (462)..(462): n is a, c, g, or t
  misc_feature (485)..(485): n is a, c, g, or t
  misc_feature (506)..(506): n is a, c, g, or t
cctgacataccatgatatagtaaacttgaacttcatgaatgaaagcctctgcaaccatttaacaatctgaaaatccacacaaaatttaagaccaccatattactaaagacaatctactcaacaatctaattacagaaagattactttaaagggctttaaaactaanaagaatgaatttattagcagtangagattagagcatgcccaagtcctctgtctgatgagaggggagagttctgaggagatcagctcctattcaggatgttgaagaaactgaacaggtatgtttgaagttggaaagggaacattagtagagttgttcaattctcagaacaattgnaatataagtcagcttgccccatcactctgtttactgaggaccattagtgagttacctttacttcaaaaacggnaagaagaccnagctgtggaatgaccaacctagcaagcctatctatagtnaaaaataaatttaaatagaagcncccatcactacaagataaganta

SEQ ID NO: 5109 - DNA, 190 bp, Homo sapiens
  I.5109 (N74634)
tcaaaattaagaacatttcatttggaagactgaatgaaataaggtgaatgaaaacacacaaaatagaatatatacacacgtatttcttatctgttctttttgtttttgtttttgttttttgagaagtagtcactctgtcgcccaggctggagtgcaatggcgcgaccttggctcattgcaacctccgccc

SEQ ID NO: 5110 - DNA, 318 bp, Homo sapiens
  I.5110 (N74427)
  misc_feature (310)..(310): n is a, c, g, or t
ccatgtcaagaagagtcaatgtaccaaaaaattaaaacagaaaatcaaaattcattaaaacaatttgtttgctcagtagtatttttttttacattcactgaacattcccttgcctttcccataattaaaaagttaattattggaatcatattttttgtagatcccagttttcaaacaatgtgatttaaatgcttgttattaacattacaacactttgagtaacactgatcctaacactaaagtgatgctgttttgtacataattaaatttgttaccattctaaacagaattttaaatttaactctgtggnaaagaccc

SEQ ID NO: 5111 - DNA, 214 bp, Homo sapiens
  I.5111 (N73972)
  misc_feature (209)..(209): n is a, c, g, or t
tgagagtataaatactttatgattccaattgtgttaattctagaaaaggcaaacaaatctaaagtaaaaaatgtaaatcaacggtttcctagggaaggcaaggagggaatgtaaaggggcatgaggtagctttgcaggtgatggatacgttcattatcatgattatggtattggttccctgagtgtacataatatatgtacaaaacttnccaaa

SEQ ID NO: 5112 - DNA, 179 bp, Homo sapiens
  I.5112 (N73694)
gtatttttttatttttatgtatttatgcatttaatttttatgtattcatatgtatttaattttttaaatttatttattgagacagagtctcactctgacacccaggctgcaatgcagtggggcaacagagtgagactgtctcaatcaatcaatcaattaatcaataccttcataaaaac

SEQ ID NO: 5113 - DNA, 306 bp, Homo sapiens
  I.5113 (N73572)
ggaacatttaaaaacatatttattcaggacacagaaatgtctaaattataattatattctgatataattctaaatacaatcataaaattacctgtaataaaaaataatttaattgtacatttaaaaatgaagtgtataattggattcgtttgtaatacaaaggataaatgcttgaggtgatgaataactcatttactctgatgtgattacatgttgcatgtctgtatcaaagtaacccatctatgccatgaatgtatacacataccatgtacccacataaatttttaaaaataaatttaaatataa

SEQ ID NO: 5114 - DNA, 304 bp, Homo sapiens
  I.5114 (N73510)
  misc_feature (302)..(302): n is a, c, g, or t
tgtagagacaggcgcttactatgttgcccaggctcggttttaaactccaagcctcaagtgatcctcctgccttggattccaaagtgctgggattatagttgtgagccactgcgcccaacattcccatgacttttttgtgaaggaggcattcaccaagcttttcctaatctttaccataagccaggctctgcggtaaacaccccacaataaatgtttatcagaggacttagcagggaagtacattaaatgttaacgccttaatctgatactgaaaataaaagataatttcaacttggtttttnaa

SEQ ID NO: 5115 - DNA, 462 bp, Homo sapiens
  I.5115 (N72185)
  misc_feature (212)..(212): n is a, c, g, or t
  misc_feature (332)..(332): n is a, c, g, or t
  misc_feature (369)..(369): n is a, c, g, or t
  misc_feature (462)..(462): n is a, c, g, or t
taagggtttggcttctgaaaggtattccaagtacaccggcaaaatatctactttctctatgagtttataaattgaagtggttcttcaggacaaacaaaaacccttttcatctaaaattttaattgagaccaatttcagtgccctgggaattagttccaaagtttgggctcaagttttctggcactgagcacagggctctggctcaggacttnactggggcaaccttacagctgaacctcagggctacttgccaagaagctggtctcatggcaacacttccctaatggcttaacaccagaacattgagcttggatacccaacctggctgaaancaatttcacatggactggcactctaatctagcaagcnactttgcaggagtcatctccgtggtaagcacttgtaacaccctctggacaatttcctggggagaaaaattaagacttaatggttcattgggtn

SEQ ID NO: 5116 - DNA, 395 bp, Homo sapiens
  I.5116 (N72166)
  misc_feature (347)..(347): n is a, c, g, or t
  misc_feature (359)..(359): n is a, c, g, or t
  misc_feature (387)..(387): n is a, c, g, or t
tacaattattattcggaagttggatttccccccaggagactgtaatattgcaaattagacaaaacatatataacaaagatagctttttatcttcttaaaactttgattagcaggaaaaagcaagccaagtggtcgtccatgctatagtgacttctatggagccaccacacttaaatgctgccacaaagctttggtaacattgaagaggtccctttctgtatggcacttgtttggctctcacacaagtgggaaacattcaatttgttgaaaatagtctgcttcgtatccagctgctaaaagcatgttcatttaaaattcaaggaatgccttattctaagactttttgnttttacatttcngagggtcacatctcatggcatggatacngataagag

SEQ ID NO: 5117 - DNA, 420 bp, Homo sapiens
  I.5117 (N72011)
  misc_feature (392)..(392): n is a, c, g, or t
gtttgagagagagtgagtctcactctgttgcccaggctggagtgtggtggtgcgatcacaaccttctgcagcttcaacttcctgggctcaagtgatcctcccacctcagcctccccagtagctggactacgggcatgcaccaccacatctggctaagtttttttattttttgcagtggtacagtctcactatgttgcccaggctggtcctgaactcctgagcttaagcgatcctcctgcctcagcctccaaaagtgctgggattacaggcatgagccactgtgcccagcctatttttatttataaaaagaaaattctgggtaaagaagaaagggaatatctaattctcatttaggtggggtttttagacaccaatccatgcagaagcgacanccctggtgcagaggagcgccccattctt

SEQ ID NO: 5118 - DNA, 420 bp, Homo sapiens
  I.5118 (N71407)
  misc_feature (151)..(151): n is a, c, g, or t
  misc_feature (404)..(404): n is a, c, g, or t
gatcttctcaaaatgtatcatttcagtttatatctttggttatgcattaaatatgagtgaaattcatgggttcccatgtacattatgaatcagattctaaactcaggaggaaagagaaacaattaaaacttcattagaagcagaataaatngtgcaaaaactcttaaaataccaaaaatgttaaaggaaaaaaagtgcttgccatagtagaaaaacaaattggccacattgaattgttccttccttcatggtgatgagatgtgtggggcctgtgcctctcccctcagtgaccacatgcgggtttccctgcacactaaagaaccacgtgtcccagggagcaaatgtgtcctcggttcccgcctcagcccttcccagactcaggaaggcctgccagcctcctgagntcctatacacttcctc

SEQ ID NO: 5119 - DNA, 433 bp, Homo sapiens
  I.5119 (N70979)
  misc_feature (45)..(45): n is a, c, g, or t
ttgagacagtgtctcactctgtcactcaggctggaatgcagcggngaactcacagctcactgcagccttgatctccatgctcaagctagcctcttgcttcagcctcccaaacagctgagactgcaggggtgggccaccacatccagctaatttttttaatttttagtagagacaaggtctcgctatgttgcccaggctggtatcaaacccctgagctcaagccatcctcctacctcagcctcccaaagtgctgagattacaagcatgagccactgtgacttgcccagatcacatttctactaccctatagaatggatgtaaattacctgcttgtgccaaacattaactcactagacttcacactgctggagaaaatgtttacattttatttgacatcttcagagacttcttttcaatctaagaataccatgct

SEQ ID NO: 5120 - DNA, 387 bp, Homo sapiens
  I.5120 (N70894)
  misc_feature (342)..(342): n is a, c, g, or t
aagaaaaataactttgttattaatcatatacaatcataacaaaagtacatcatagtatcacatccataattgcttgaatgctaacttgactgttacatggacctgttacaaataatgaacaacagagctactccagtatatgactagtcactgtgaaataaaaacagacccatggcacacatgaaattcctaaggggacttgctttgatcccctggggaataagagggtccttttctatgatttccctagagcagtaacgtttgttgagggagcatgtgaagttcatgattatatgccctaacaattacagtcatgggtgtgttttggttttcccaatgggnaaattaatttttggacctggttgtggggatataaataattgacta

SEQ ID NO: 5121 - DNA, 452 bp, Homo sapiens
  I.5121 (N70756)
  misc_feature (419)..(419): n is a, c, g, or t
  misc_feature (441)..(441): n is a, c, g, or t
agaatttaaaaaagaaaattattttattatttggaaaattaaatcaaagcatatgttctatgtttcagagtgtcatcctaactatgtaaaggatatatttggcacatatgagttttctggccataggggattgatgaagcctatactagttgtagagtgagcataattttcacctaataaatacaagctcttttctctctcttatcatttgatttggggaagtgcaaaagtctgaggcagtaattatattgtcaagatctcctagctactttcttagttctaggaccacaagaagtgcctctctgccccatctttcccaggtcctgggaatactgggcccatccccttcatttccctcaatctcctccacaaaagggaaggtaggggttggtaccatacccataatgggtaaggagggntggaggtacaaaggctgcccanggaaaaatggg

SEQ ID NO: 5122 - DNA, 448 bp, Homo sapiens
  I.5122 (N70654)
tgcttaataaatgtttatttaatgaacaaattagttaatgaacaaatgaatgaatgatctattccaataaatatatgctcctagactgctactgacattttattccacttagggtctgccacattggctctccaacagccggtactataatccatgctaagtaataattacaaattaggagtaatatattggtagtgttggcagaaatccccaagtgattcattctgccagatatgttaaaattatagtttagtcattgaatactgaaggtgataagtacagtcatttttacaagttgttcctggatccatggaccgaagataggcatgtacacaaacggcactaaactatggaggcagtgaggtagcacagggttacgggggacactgtggagggacttctaaactcagtgtttgtgatcagggaaggctgattcctgatcagattc

SEQ ID NO: 5123 - DNA, 427 bp, Homo sapiens
  I.5123 (N70324)
ctgtcatgaagtgttttattttctgcaaaatgattttgttttatttaggagtggtatgctgcttaagatggaaaaatacatgatgatggtgcatagtgcctccatcccaagcttgctaacattaacccttttgtcggcattatccagctttccatatgttcttttttaagttttattttattttattttaagttctggggtacacatgccagatgtgcaggtttgttacataggtaaacgtgtgccatggtggtttgctgcacctatcaatccatcagctaggtattaagaccggcatgcgttactatttttcctaatgctctccccactgccctcccccaataggccccagtgtgtgttgttccccctccctgtgctccctggtatccatatcatgaaatattttaaagccacaggaaaaaaaaaa

SEQ ID NO: 5124 - DNA, 401 bp, Homo sapiens
  I.5124 (N69368)
  misc_feature (275)..(275): n is a, c, g, or t
  misc_feature (303)..(303): n is a, c, g, or t
tttttttttttttttttttggtcaagtaaagaaactgtttgaccataactggctaacgaaataaaaaaaaaaaagacttgacagtgtaactactgttcttttagtgtcagaagtttattttgatgacctacattttctattggaaaagagagtaaatcaggaaattcttatcaggctgacagcatttttagactatgcaatgcgtgggtgaagtgggactaatattgacttggccctaatgcagtcatccgagaatacatattttggttgttttngcattccataaggttttatcattattanccatgaagattgttttctccgtacatgggaagtgacccctaatagcatcttgcctgggagacaaaagtaagggctacaactcctactgaatttgaaaa

SEQ ID NO: 5125 - DNA, 228 bp, Homo sapiens
  I.5125 (N69229)
  misc_feature (154)..(154): n is a, c, g, or t
  misc_feature (184)..(184): n is a, c, g, or t
  misc_feature (196)..(196): n is a, c, g, or t
  misc_feature (215)..(215): n is a, c, g, or t
  misc_feature (223)..(223): n is a, c, g, or t
ttgcaaatccatatgaaggaagcagtttccttaccaaaacagaaggcaacttaccacagagagggatatcacagtagtcaaaaagttttcttggattcactctgtagcaccagggaccattgatgtcaccatcagggttacggcagtactgaanacaagcaaggcatgtaagctccagctccangtggggcaaganagggagaaggttgttccanggcacacntggtt

SEQ ID NO: 5126 - DNA, 401 bp, Homo sapiens
  I.5126 (N68578)
  misc_feature (292)..(292): n is a, c, g, or t
  misc_feature (344)..(344): n is a, c, g, or t
ttaaaatgagaacagaggagttttgagtatttattactgtcattttaaacatttgtttcattgtaagttctataatgtaattttaaaataatggctatgtttaaaaatcagcttgcaaaattcttgaaaatttagcaattggctttgtgagagggtgagggctttcatcttccctggggaaaatatgatcccagcccatgtggcgaaccacatctcaccaaaccccaggccctgggggtcgagcgctgcacgtggtaagggcatgggagggtcttgtgagcatcagaagtcntaaacttgaagaaagaagcctcttgtgtgtagcagaggcccaaccccacctnttgactagaaaattgccatgcactgtggtcaccatgtggggagtaaaaccatgaact

SEQ ID NO: 5127 - DNA, 494 bp, Homo sapiens
  I.5127 (N68530)
  misc_feature (216)..(216): n is a, c, g, or t
  misc_feature (479)..(479): n is a, c, g, or t
aaatcaattatgatttattcacgtgatgtaatgcaaaggagccatttaaatcatattttggacaaatgtttatgcattagggaaaagttcacaatatgctttaagtgaggataaccaattttaaaagcaacaaacaaaatggcattctacatttctaaaatttagcaatattttatagctgtctttcacctatatgtttccattaaaagaactaanagaaaccattgcaaaccagatgtcaaaagaaaggaaaaaaattacctttcccactgccttaacaaaccaatcattttcatgtttctgtgttcgtttctagttcaaaatgacagtcatgcagtgcttttcagtgctatattatgtgattttaatttttcatctttacacttttctacattccccatctgttctacaacacaattatactccccacatattcaccacgctgatattattaacattaccagtcagctgggacccanctccccttccacagg

SEQ ID NO: 5128 - DNA, 342 bp, Homo sapiens
  I.5128 (N68491)
  misc_feature (119)..(119): n is a, c, g, or t
  misc_feature (315)..(315): n is a, c, g, or t
  misc_feature (324)..(324): n is a, c, g, or t
  misc_feature (335)..(335): n is a, c, g, or t
gtaaatttcctgttaattttataggaatttgccaagatcttttacaaggtcttaaaagatatttttgataacaagtgttctgtgatcaaataaacttggaaaacactgatttatacaanattaacagcattactagagttatgctgctataatttcgcaaaaacatcccttaagaatattaactttcccttgttctatgcttaccaaaaacctaatttgcattttaatattctgaatagacacatgtaagtagtttggttccaggcagtattttatttggtgtgagatatgtaaattttaccgaagtgaatgcancttcaaggnttgcccccttnccctctt

SEQ ID NO: 5129 - DNA, 459 bp, Homo sapiens
  I.5129 (N68463)
  misc_feature (459)..(459): n is a, c, g, or t
tcggccaactgagattgaaatccaagtgctggtttctagttctgaacatcaactaaagagttttggaaatgacagcaatttataacaagttcatattgacttcctctctatggcaggaagacattctgtgctgttttgaacagattaaagatttgtgtagtttgtgggaaattgacgtttttgtttaaattccacccgcgtttgtcttttcctaccacctgtggccaggtgctcgctggccatcacagttgcgattccatgagtagctgctttatgactgctttttgtactatctggatgtgcccagagttacttctgtacaagctctgtatctgtgtccgttgagaacattattttaacaagaagaacaccaacagtagcatgaaatataatactgttttataattctaaagctggctgttaatttatgaagtacataataatctaatgtaaactgcn

SEQ ID NO: 5130 - DNA, 464 bp, Homo sapiens
  I.5130 (N68456)
  misc_feature (352)..(352): n is a, c, g, or t
  misc_feature (464)..(464): n is a, c, g, or t
tttctagaatttccatttattttccttctctttaaacagtcttttattcctgaggagtttgctcatcttcctaactgcatcctctactgatttaaacatttaatagaattttgtatcccagactcaggaccatgtcatttctcttgagggttatggaagtaagagttcaacatactacctctctgctattcaataaccttacaatgatgctgttacaaaaatctggcatgagacaatcctgtcccattctgctacctgctgtccaagccacctcctagcagctctggcttgccttgtcttattatcatcagacagtctggatcctggctgtttctggcccaccttccatttngcttgcttactttttttagaaaggtagaagaatatccctggagatttttgtctacattttatgagaccaatgatgcctccaaccaataatgtcctactcatggtctacttgn

SEQ ID NO: 5131 - DNA, 433 bp, Homo sapiens
  I.5131 (N68441)
caacttttgagatttccattttatttaatatatcagcctggcaattaatcatcacctttccaacacattcaagcagatgtttgttgttatatgtagccaggtgttagaccaggaagattggaccaaataatctagcataaagtagaagttgaaagcagaagttcaagggtttttgttgttgttgttttttggtaagtcacctcacagcttattagccagcctgtgtttgaaccaccatttgggtaccttctctgttttaataaggcctcatccctgcaccagcatcctaaccatttttctcaaatgggagagacgggtgctataaacaacccaatttaggctagaaagggaaactaaatattttgtgtaacatccaaatactctctggttggccaattttgggttctaaagaaatgggaccaaatttctcccc

SEQ ID NO: 5132 - DNA, 154 bp, Homo sapiens
  I.5132 (N68009)
ataggaaacaggtttaattgactcacagttccacacggctggggaggcctcacaatcatggcagaaggcgaatgaggagcaaagttatgccttctaaggtggcaggcaagagggcatgttcaggggaactcccctttataaaaccatcagatct

SEQ ID NO: 5133 - DNA, 464 bp, Homo sapiens
  I.5133 (N66577)
  misc_feature (434)..(434): n is a, c, g, or t
  misc_feature (442)..(442): n is a, c, g, or t
taaaagaatgttaactttatttatgaacatgtgatttgtgtttatacacatgctaataaacaaaaaggaaataactgttttcaagaaataaaacttcatctgaattagtttaaatactatataaactgtactttatacaaaatgtgttacattaactactacagtcaccaggatagtcaatctaatttatgctagcatttggatacataaaaatcagttttaaaccaatcaccagcaaaacataagcttggacagtttttacagcattatgcttaaaaaaaaaaaacaaaaaaacaaaaaaaaacaccccatatccaaaaagaggaaaaaaaaaccccaaacactaagacttttggatcttagaatcactgtatttagttccacaagaaactaaaggccatatactcctaaaggaaccaaggtccaatggttcngatattcnatattatcctggtttaggatcc

SEQ ID NO: 5134 - DNA, 378 bp, Homo sapiens
  I.5134 (N66220)
  misc_feature (360)..(360): n is a, c, g, or t
ttaagaagataattaaaaatagttaaaactgaacaattagctatacttttatattattaaaatccaatgaatttaacaaatgaaacccacaggaaaagagatgatataattcaaggcatagatttgacatgtcagaatacggcaaaaacaataaagatagcatcagtaaaacagttgtaaaataagtaaacaattttcaagtgtgcaaaactagtcaggaataaaagtgctatgtgtggatacctgggttttcaaatatttgtttcaaaaactttcagctggatgggtggaaaaactagaaagtattatataagtaaaaattttaaagaattatataaaaccctactttattatcctacnttatggccctggttatgg

SEQ ID NO: 5135 - DNA, 444 bp, Homo sapiens
  I.5135 (N66205)
taaaacaatccatattatttatttaatcctaagtatttttaaacactgctatcatgctacttcacctaattctggctgctgttcatttggggaatgctatattggactattcttgaaacaatatatataaaatcaagcaaggcacgtgacagtcaggctttaggttggagccaggcctcggaaaatgtttttcaaacaattttgtgtctatcctttcatcctgagctggaactattgagaatgtgatagaaaaatgcatcgagtggcttgttgggtcttgtaagggtcctacgactctcatactctgtaaatggaatgtgtggagagggttaggagagccttcaggtagtactagagatgctggagcctctgaggacctctgcactgagattcctaatgttaatctggcctctgccatcactgagggtacccggggcttggctt

SEQ ID NO: 5136 - DNA, 396 bp, Homo sapiens
  I.5136 (N66038)
ttgccccggctggagtgcaatggcagagtaaccgctcactgcaacctctgcttcccaggttcaagcaactctcctgcctcagcctcctgagtagctgggattacaggtgcctgccacccagcccggctaattttttttatttttagtagagacggggtttcgccatgctggccaggctggtctccaactcctgacctcaggtgatctgcccacctcagcctccaaaagtgctgggattacaggcatggggctgcagtaagccgagactgcaccattgcactgcagcctgggtgacaagagccaaactccatctcaaaaaaaaaaattttttttttaccacttattccagttcaggggttgggggtggctggaagcctatctcagcagcttaggggg

SEQ ID NO: 5137 - DNA, 555 bp, Homo sapiens
  I.5137 (N64662)
  misc_feature (134)..(134): n is a, c, g, or t
  misc_feature (411)..(411): n is a, c, g, or t
  misc_feature (420)..(420): n is a, c, g, or t
  misc_feature (430)..(430): n is a, c, g, or t
  misc_feature (453)..(453): n is a, c, g, or t
  misc_feature (461)..(461): n is a, c, g, or t
  misc_feature (493)..(493): n is a, c, g, or t
  misc_feature (505)..(505): n is a, c, g, or t
  misc_feature (534)..(534): n is a, c, g, or t
tttttataaagaaaagaggtttaattggctcatggttctaaaggctgtacaggaagcatgatgctggtatctattcggcttctggagaggccttaggaaactttcaatgatggtggaaggtgaaagcgtacagngcacgtctttgcttttttttttttttttttttttgagatggagtctcgctctttcgcccaggcggaagtgcagtggcagagggagactctgtctcaaaaaacaaacaaacaaacaaacaaacaaacaaacaaactaccatgccttctcaacagtcctgcaaatatttaactcattccagcattaactcaaaagtccacagtccaaagtcttatctggagacaaggctagtcccttctgcctatggacccctggtaaaataagaaacaagttttgccnccgtgccgnattcttgggncctcgaggggccaaatttccccnataggggngtcggaattaaattcggaatcatggcaaaggngggtttcccggngtgaaattggttatccggtcaaaattccncacaaacattacggggccggg

SEQ ID NO: 5138 - DNA, 160 bp, Homo sapiens
  I.5138 (N64597)
  misc_feature (151)..(151): n is a, c, g, or t
taaggtgttaatcggatatttatttactctggagacaaacagtcattgcatgaaacatttataacaaaaaagcatgttcattttaagtagactgattttagaagtcatactaagattatgttttctgaaattaataactggtattaattcnaaccaaaag

SEQ ID NO: 5139 - DNA, 372 bp, Homo sapiens
  I.5139 (N64541)
  misc_feature (290)..(290): n is a, c, g, or t
  misc_feature (309)..(309): n is a, c, g, or t
  misc_feature (326)..(326): n is a, c, g, or t
gagactcaatgtaaatgtttattgatagatgaatggataaagaaaatgtagtatacacatacaatgaaatattattcagacttatgaaagaaggaaatcctgccatttgtgaaatatggatgagtgtggaggataataggctaagtgaaattagccaaacacacaaggacaaatactacataataccacctatgtgatgaatctaaaatagtcaaactcatagcagcagagagtggaataagttgttgaagggaacatgatgaggtggaatccaagttattagaccaagnataccaattttcagttacntaagttggataagtccnagggatatatttggtaccgccttaggagcccatggggtaaataata

SEQ ID NO: 5140 - DNA, 449 bp, Homo sapiens
  I.5140 (N64495)
  misc_feature (346)..(346): n is a, c, g, or t
  misc_feature (401)..(401): n is a, c, g, or t
  misc_feature (423)..(423): n is a, c, g, or t
attttccatccccttttatttttatttgcaaatcttcaaagccaagctccagctttcttaatcacattgtaagtacactatgttgttcccttatcttaatttcttattatttgttgcacacacaaatgtgctcacccacccacatccccaacacaaagacattcagcttctgaactttttcctccacgttaccactctctcccatccagactttggaaaagcgaaagacaaccagaatatattgaaggtatctagtccgatttgtcatttaagttgatacatgagtttgaaaaatcaaacaattcgcttgaacatgcattgatttagaatgtgtctaatttatccnttctatcaggaggaaaaatatttggatgattccctcaggtgacatctaaattccnaattggtggatttcaccaaagnctacataaaaagtggctcccagtgaa

SEQ ID NO: 5141 - DNA, 411 bp, Homo sapiens
  I.5141 (N64362)
gggtaacaacgtttattaaaatctggccattttctacatctcaaagaggagataacccaccagaggcttaggtaacataattgtgtttaacgtaaatatacacagataccaataggcggttaagcatgggacagggccgcagatggagactgctcaaggtcaaaggggtctccagctgggaccctgcacctggttcgtagcccctctgcagacgcacagtgcctcacgcctgctgcaacctggaaccttgaggccttcatgtcagtgcaggacaagagtcatgtctgtccatagattggggctggaaaggactttctgccactggagcttcgattgtgagcatgcatccccgccaacagctgtgtctccctttgaaccaagtctgggttcctccaagcaagcggtcgttca

SEQ ID NO: 5142 - DNA, 398 bp, Homo sapiens
  I.5142 (N63993)
  misc_feature (222)..(222): n is a, c, g, or t
  misc_feature (258)..(258): n is a, c, g, or t
  misc_feature (324)..(324): n is a, c, g, or t
  misc_feature (333)..(333): n is a, c, g, or t
  misc_feature (372)..(372): n is a, c, g, or t
  misc_feature (383)..(383): n is a, c, g, or t
taaaatttacaataactggcattcaataaaaagttatcagcatgtaaagcagaaaaatataaactatggtaagaaaaaaaaatcaatcaatagaaacaggccaggaagttgcacagatgacataattaacaaacatgaacgttaaaacagttattacagcaatctcttcttatctgtgggggacacattccaagaccctcagtagatgtctgaaaccaaggntagtaccggaccctacatatattttttcctatatgnacatttctatgataatgtttaatttctaaattaggcatagtaagagataaataataataaaatagnataattatnaccatatactgtgataaaaggcatgagaatgtggtttcncgtctctcaanatatcctattatact

SEQ ID NO: 5143 - DNA, 451 bp, Homo sapiens
  I.5143 (N63777)
  misc_feature (369)..(369): n is a, c, g, or t
accattttgaaatgatgtatggtgtgattgttagagatggatcagcatgattggtcatcttggtttttaaaggaagccagtgcttggcttcaaataatgctatgtggaattttatttatgtggtataccttgcttaaaaattgtaaaaattcgttaaaattgtgaaaaccaaaataaattttctttccacttctattaaaattttctttccaactctttacacattcatttgaggtttcctgggaaaagtaggaggcaaaccatccaaaggtactgtgggttttctaaaaaaattttaaattcttgctattaaagttcgtttatcataattctatacacagtactccccccttatccatagtgtttgcntttcctgcagttcaggttactggagggtcaactggttggtcaaaagtagggtgcaggggccaggcatagtgggctcacacct

SEQ ID NO: 5144 - DNA, 491 bp, Homo sapiens
  I.5144 (N63717)
  misc_feature (370)..(370): n is a, c, g, or t
  misc_feature (451)..(451): n is a, c, g, or t
  misc_feature (457)..(457): n is a, c, g, or t
  misc_feature (477)..(477): n is a, c, g, or t
  misc_feature (490)..(490): n is a, c, g, or t
tcacatagatatctttctatgacctagttagttactgcaattcagaattagttcacattgcataaagaattacttgttgtaagcaaaatgctgaaactaccaaaccagtggatgaagaccactaagaactttgcacataatcatacaatcttttgaaaatattttgcaaatatgtgtttagacaataagatggactagagttcgacaaaatgatttctttatttaaattttgtataagtattttcttcgacactttcaaattatattgtgttcttgatatatgctgtatatttatttgttagtgcatgtgtttttaatttacatgaaaacatgagttaggagaaattacaggttgaaagatgaaatgccnggtatgtggctccggaagaaatgggtaattccagattggtggcagggggggaaaccaatccaatttgggtttggttttggntttttngagaccgagcccttggcccnggtggctggggcng

SEQ ID NO: 5145 - DNA, 432 bp, Homo sapiens
  I.5145 (N63628)
ttttgtagcgagggggtcttgctttataggccaggctggtattgaactcctgatttcaagcagtcctcctgtctgcctcccaaagtgctgggattacaagtgtgagccacagcacctgtcctagagtaattttttaataatatgatcgtggtcgaaaaagaccaaatttcttttacagtgaattagatgtgaactcacctatttttcctgtgaagcacatattatgatttgtcatttatctataggaaaaaggaaaggaatcccatggatatatttgatatggctagacatcggttgcaagctcctgtcagaagacagtcccctaagggcttagacgctgccacttttcagaatgttcatgattttaatgagctgaaagatagaggtgagtagattgctgctcttttaaagatgtagcagaagtgttctacc

SEQ ID NO: 5146 - DNA, 448 bp, Homo sapiens
  I.5146 (N63599)
  misc_feature (349)..(349): n is a, c, g, or t
  misc_feature (427)..(427): n is a, c, g, or t
ttttcatgtcttttaagtttttaatttgtgagatataaaatcttggctctttaatacagaatctttatcttcagggatatagaacacaaaaataattcaaaagcctgttgctacaggttaatcacttgaaacagaagctacaaaatctgagttggtatctcaattcttccatttattagctcaatcacagtgtgcaatcacaggtaaaatgggattgatgagttttgtttatcttataacattattctaaggattaaacaaaattatgatttaaaaagtgctttgtaagctatagggcattaagcaaattaaaaatttttaaataagaattttatctaagtaagaagcnatggatttatgcaagatattcttatcattgacttttgtatctaagcctagtaccacttaggaatcatcgatttaaccnacaggaagtagagtggtcttt

SEQ ID NO: 5147 - DNA, 476 bp, Homo sapiens
  I.5147 (N63597)
  misc_feature (430)..(430): n is a, c, g, or t
  misc_feature (455)..(455): n is a, c, g, or t
  misc_feature (472)..(472): n is a, c, g, or t
tgacagtttaaagcacatttatatgcagagaaagacttaaaaatacaatttctgccaagtgaaatattaaacagcatgtttcattatatttgctatagatgccaaaagagttgccattttcaatgaggtatgtttcctgcttatgtaacagtcatttatcatagaagctgtaaaatgcaatctggaatttctcttgccaaattgctgcctgttcttgacattttatattattaaagctataaaatctataaatacttttagcacactttcactaaaagcagcactagtaagtagcaggccttgtcttgtatttcagtagccacgtcaaaacttctgagccaggcgaaatagaaagaggggtcctagggtattttatgcccagggcaacaaacgccaaatgctgacgtagatagcacttattcggttttgncaggagctgtgctaagtgattttcntaaaatatggaatttanccac

SEQ ID NO: 5148 - DNA, 471 bp, Homo sapiens
  I.5148 (N63516)
  misc_feature (282)..(282): n is a, c, g, or t
  misc_feature (305)..(305): n is a, c, g, or t
  misc_feature (338)..(338): n is a, c, g, or t
  misc_feature (343)..(343): n is a, c, g, or t
  misc_feature (353)..(353): n is a, c, g, or t
  misc_feature (403)..(403): n is a, c, g, or t
  misc_feature (454)..(454): n is a, c, g, or t
  misc_feature (470)..(470): n is a, c, g, or t
ttctaaaatccattcactcattaattttttttttccacaagacaaggtctggctatgttgcccaggctggtctcgaacccctcagctcaagcaatcctccagcctcagcctgtcaaagacaggagccacccacctagcctcctttatttgtagtaatgtctacctcataggggggtcttggggactaaatattatcatctatgtaatacacagggcccacctggcacatcacatagtgaacaaaacaatcggagtgatgacaattactaggcatctgaattnccaatacctaagagcaaacaggncattaaatggctttcatggggttacttcctacnaaggnaggcaagcanccttgggggtaaaaaaacacttaggccctagacaaatcctccatttattnccatcccttaaaatccactcctaccttgtgggaccttgagctccttccccngggaaattaaaggggnt

SEQ ID NO: 5149 - DNA, 444 bp, Homo sapiens
  I.5149 (N63161)
  misc_feature (363)..(363): n is a, c, g, or t
tgatacttatacatttatcttacacataaatgattcatttattccattgatttaattacttggtatttttacatacaaaaatttgaatgctcaaaacatgtttagaacccatttcttttgcagtcgtcttcaccaaaactttatgaacctcatcaaaactcgaggctcatcattttacagttttgcctaattttctgcctcaaacaccatctcagaacttaaatatctgacagacctggttctgcaaactttgcactattacacaaataaaattcattctcaagggatgatagattaccagcaaatgttatttaaattcgatatgttacaagttctgatgagtaacatttagctagtttttcnatgtatccactaagtacatttttatataatgggggtcctaagttatatactatccccattggttaagccatttcacttcat

SEQ ID NO: 5150 - DNA, 428 bp, Homo sapiens
  I.5150 (N62868)
  misc_feature (399)..(399): n is a, c, g, or t
  misc_feature (412)..(412): n is a, c, g, or t
gcaagcaaaatattttattgaaaattcagaaaagttacaacactttaagacagcgtttttcatattctgttataaagaaaaatgttaaaagaattgacttgaatgttatatttaggtttcattcaaactaacaaaatcattttgaaaaacaaaaatccacccacagctgaatttattcagggtgtaaacatatattttcctatttgttatcaagaaaacgctaatgaaatatttttagtgttcttttcaaaacagcatctttctggacccaatttaaatagtaatttacgtattagtatctagttcacatagattactgatttgtgtgtgtgtctgcatatacttgtgcacgcatgcatgtaggaactagctaattttaatatgaaattttaagaatcnagagtgatttgcnatttcacttatcatag

SEQ ID NO: 5151 - DNA, 465 bp, Homo sapiens
  I.5151 (N62745)
  misc_feature (336)..(336): n is a, c, g, or t
  misc_feature (394)..(394): n is a, c, g, or t
atatatgtcttgtttattttactagctcctgaaggaacgtttatagtttacttattagtagtaaatatatgtgtatgtgaaagaatcctatgaaaatatatacgaatatgtatattgtgtgtatgcttatattcacgttgaaaagtaattaacaggattttgttctttaaaatgaatccgttcaaaacactagccttctcccaggggtgggagtcactgatattttgccaaatggcccctgggtttatgtcgcagagggcatctgagtattgacgaaaaggggaattgagcataagggcagtcaaaggggactgcctgaggttaagagagcaggtnagggtcagagccaggaatagccgacagcaggattcctgagcgataatcaggcagcctnacctcctgcagggtcgcccttggagacaatgggcaggcgagtttatcagtcctcatgccctccagcctctt

SEQ ID NO: 5152 - DNA, 422 bp, Homo sapiens
  I.5152 (N62672)
  misc_feature (366)..(366): n is a, c, g, or t
  misc_feature (395)..(395): n is a, c, g, or t
cagtgtgtaccttattagtcccatataactttgtttcagataatccctattaatgatacagttaaacatacattttaataatctgtgaaaacattaatgcaatattttctaaacttttcattaactactatgtattaataaattggcatcgttggttaacagggttctgaggtcagataggtttatggtatggtgcatacttatatctcttcttagagatttataatgtacattataatgtcaaagactcagagttgctgaagtaaataattatgttcagtccaggagtttctttaggtgccaaggatggaacaaagtgacaaagatgtctattccttttagtgcttttggtattttgggagggcntgttttggtacaactaaaataaaaggccntataaaaattagcccactccaaatggt

SEQ ID NO: 5153 - DNA, 421 bp, Homo sapiens
  I.5153 (N62659)
  misc_feature (305)..(305): n is a, c, g, or t
  misc_feature (388)..(388): n is a, c, g, or t
  misc_feature (421)..(421): n is a, c, g, or t
tttttttttttggtaaaacacttgtctctttcataaaagcatttaacatcttactagatgaatactggtcacaaataacaaaagttatcgatggtttgtagagtaattggaagacttcttcagtcattaaacaaatgagaatccagttccagttgtttcatttgagattaccctttagagaaagactagggaaatacttagtaaatatttttaaaatatcacggatacttattttgcatacaaaattaaaatataaaaacatctgaaattactaatcagaagtactgatagtttttccaaattgngcaataagaaaaactaacccaagataattataaacacagtaagtcagagtgaaaacccaggaagagtataaagaagcaggctngacaaagtgaagctaactctcagagaccaagan

SEQ ID NO: 5154 - DNA, 446 bp, Homo sapiens
  I.5154 (N62640)
  misc_feature (421)..(421): n is a, c, g, or t
  misc_feature (430)..(430): n is a, c, g, or t
gctttgaagaaagactatttaatttgattctcagtctccagagggatataatagggaaacacagtttacgttgacggccacctagaatagattctgattacataaattaggtaacttaaaactcaatctgagcagaggagcaacgactttcagcctgctgttgaattgtgctactaagcaaatgtgatatactatttacataacaaacattattgttatgtactgtttagtccatgttaagaccatctctttgcataaaagcagttctattaaagagaagaatttaaggtcttgctttccagagaaatgatttagaatttgtctttaaaatacaacctaaaacaccttattttgctaacacagtgcaaatcatttttataatatgcactggaaatttattttttccatgaggaattggccntagagttcnaaagaatcttaccatc

SEQ ID NO: 5155 - DNA, 250 bp, Homo sapiens
  I.5155 (N62585)
  misc_feature (239)..(239): n is a, c, g, or t
ttaaagtgaacaattccctgacatttgcacattcacaatgttgtgcaaccatcaccaccatctagttccaaaatattttgtcaccttgaaagaaaaactcatacccactaccattcattccctactccccaccaccatccaccagcccctggcaactactaatctacttctgtctctatgaatttacctattctggatatttcctataaatggaatcataaaatacgtgccatctgggntctttcactta

SEQ ID NO: 5156 - DNA, 464 bp, Homo sapiens
  I.5156 (N62281)
  misc_feature (414)..(414): n is a, c, g, or t
  misc_feature (459)..(459): n is a, c, g, or t
aagtgttacaaattttattaaaaattaacatttcaagaggtcatacgtatacaaatcaaactgcaaaaaaattccaggcataaaaactattatctgggttagtgtgccatctttcttctccaaatgtcaaaatgtccacaaaaaaagtctttagaaagtcaaatccactgtccatttgtgttgggtaagaaacctatgtcttcattcactgcatggaatccatgttaaaagaaccctgtcttggttgtatattatcacaggactcttgtattaatccatttttcctcaattccccatagtagactgccatcttgatttctcagtggtagggtccatttgaaactcttcaagctgactggggtgtaaatgtttccaccaatgtctacttcattggtatgggggcctttagaggantcagtttgagggtcatatttttgccatataaaatactggactttncccaa

SEQ ID NO: 5157 - DNA, 433 bp, Homo sapiens
  I.5157 (N59650)
  misc_feature (264)..(264): n is a, c, g, or t
  misc_feature (353)..(353): n is a, c, g, or t
aatgatcaatcctgttgacagttttcccgtccatcttccagaagaactcactactcaaccaactgcctggtattcagctgtgactgtgaggatggataactatatttccttaagaaatagcaggaaggtatctcatccaagcagaaaataagaccaacagttgtccaggtctcagtggttctgcatttcttcctaaaagagaaatatgtctctaaacatctctttcccacctcatggggttgggggaagcaatatgctcagaanaattttaactactccaggcagctgaatagaacaagctgaaaaccctagatgtgttctccacattactgtgacagaatgcaagttgtgtnttccgaaagatttcctcgctggaattataaagcgtacagcaaggccagcctgctgtactgccacctcgctcttgctccca

SEQ ID NO: 5158 - DNA, 252 bp, Homo sapiens
  I.5158 (N59330)
cattgacaatgtttattatcaagaaactttaggttttttaaaagaatgctcgttttagaatacaccaagaggacactctgtgacaggacatatacaaacaaggataattaaaatattaaatactatctaaattaaaagaccataattcaaattgctaattataatatttgtgtcggtagaaataactatagttccccttcatgaaattcacccccacgttctcatgaagactatgacgtctcaccacaattt

SEQ ID NO: 5159 - DNA, 433 bp, Homo sapiens
  I.5159 (N55249)
  misc_feature (433)..(433): n is a, c, g, or t
agcagcctgccaaaaatattattagaaagctttgttgccgctacataactttaaatctctccttcctcagaaaaagcacccataaaactcagattgatttatgaacagtagcataagggctaccgccagcgtacctgccctgttgccgcctgagaagtgggggcttcttggagaactctttcagatccccggggaaagtggcagagtctaccgaaaccatttatagagaagtatccagactgaagttctcagttccaggaactagggagtacccattggttgatcaccacagtgactctccaacagttcaccctcaagagcgtgacagagtgatcctgttttctgaaccaaaattcaccatgcctgcctgaaagaaacaacattcaaaactggacaccatcctgggaaatgcagaatatatggtggctttggn

SEQ ID NO: 5160 - DNA, 135 bp, Homo sapiens
  I.5160 (N55056)
  misc_feature (114)..(114): n is a, c, g, or t
  misc_feature (120)..(120): n is a, c, g, or t
  misc_feature (131)..(131): n is a, c, g, or t
aaatcacctggcccactatttttaaaaagtgattcagggcccctatatcagacttctgaaccagaatctctggatgatcccaggaattggcagcatttgtggatttggaaatgnttcttnggcacactggngttt

SEQ ID NO: 5161 - DNA, 169 bp, Homo sapiens
  I.5161 (N53916)
  misc_feature (20)..(20): n is a, c, g, or t
  misc_feature (161)..(161): n is a, c, g, or t
tcatatatctgtgaataacngaatttcaaggttagaggtctattcaaaaaaggtgggttcttgcccataaggaaggaagagatcactttaggcagttactgataatttaaaacttttgtctttcagttggtgcaagcattcatttattcacaattttaaancctgatac

SEQ ID NO: 5162 - DNA, 319 bp, Homo sapiens
  I.5162 (N53369)
  misc_feature (271)..(271): n is a, c, g, or t
  misc_feature (281)..(281): n is a, c, g, or t
  misc_feature (292)..(292): n is a, c, g, or t
  misc_feature (303)..(303): n is a, c, g, or t
gtggttaaacataaaacattcaatttattattttgataactgcaatccttaaaatacataatccaactgaacaattatatgttaatagtttcattctcttcaaatatacaacacattaaatctaagtttatactttggcttcatttctgaggagaagcatgaaagttgctagataagacattgttaaacatttccatcatttattacaaaaaaaagaaattgaaacataacttatgttgagaattaagaggttactaatttcaaaaataangattataatnatttttccccnagggtaataanccccccctaggggttt

SEQ ID NO: 5163 - DNA, 265 bp, Homo sapiens
  I.5163 (N53327)
  misc_feature (12)..(12): n is a, c, g, or t
  misc_feature (33)..(33): n is a, c, g, or t
  misc_feature (104)..(104): n is a, c, g, or t
  misc_feature (167)..(167): n is a, c, g, or t
  misc_feature (259)..(259): n is a, c, g, or t
atacacaatttntctcaaagcatcttagcagancttaattaaatggatagatgtctgttccctttgctggacgccaagaatacaaaaaagaacaagtgacaatnttctctgtcttagggagaagagacagcagaagtgtaaatgatccctaaagagtgatagatgtnatcatgaagccacaggaggggtgccaggctgcacaaaagagacactggatgcttcttggtagtagaggcagtggcttcccagccttggggcnaaggcc

SEQ ID NO: 5164 - DNA, 152 bp, Homo sapiens
  I.5164 (N53200)
  misc_feature (2)..(2): n is a, c, g, or t
  misc_feature (3)..(3): n is a, c, g, or t
  misc_feature (4)..(4): n is a, c, g, or t
  misc_feature (55)..(55): n is a, c, g, or t
  misc_feature (142)..(142): n is a, c, g, or t
gnnngcagccactgaagagatagtctctgcagagacagggttacctgggtggttnaggggactgacatttgaggacagggagatggagcagtgtcattgtcagtggcagggcatggggggcagtggtgagctaaggctgagnagtggagatg

SEQ ID NO: 5165 - DNA, 458 bp, Homo sapiens
  I.5165 (N52930)
attacagttttattttaaaggatacacatagggcaaagtctgggagagtccaggacaagagcttctcccaatacagtcaggctatgacacgctctcggcacattgatgtattctccggccaggaagctcccccaagtctccatgagcagagtttttattggagttttattacttaggcatgattgattaaatcattggtcacataactgaactcaatctccaaactttcccgccctagagggaagtggctgaaagttctaaccctctaatcctattcctggtctttttggagggcagttcccatcctaaagctatctaatggcccacagtgagtcatctaatcagtaaaacaaaaccattcccatcacacagaaaactccaagcgttttgaagctatttttagggaaccacagacaactactttttcgtttttcttttttttaagagacagagtcttg

SEQ ID NO: 5166 - DNA, 199 bp, Homo sapiens
  I.5166 (N52696)
  misc_feature (54)..(54): n is a, c, g, or t
  misc_feature (190)..(190): n is a, c, g, or t
actgtgggaggccaaaagctcagaacagttgtgtctctctttctcagtattaanagatcaaggtttcccatggaagccaacctgatctggtaattgggcccttctatacccctctgaatacttttccaaggagggggcagttcccacccccatagttcccctgagggttaagagtccagttggtggccangttgcaaga

SEQ ID NO: 5167 - DNA, 296 bp, Homo sapiens
  I.5167 (N52575)
  misc_feature (134)..(134): n is a, c, g, or t
  misc_feature (148)..(148): n is a, c, g, or t
  misc_feature (271)..(271): n is a, c, g, or t
  misc_feature (294)..(294): n is a, c, g, or t
ttttaaaaaggaagaaatgtttaataactcctggagagataaaatgccaacgtttaggtatatttatgaattagaagcttccaaattgatatggagtaaagcagtgtcagatttttaaagtaagggttgaaacntggtttgccaaaantttcagggtgaaatcaaggaccatcaagtactttaagtccaccacatccatacctaaaacatgctggcctgacccaagcttgaggtcctcagactgaacaggtgcaccgctgggatgctttcnagctcctggacggaaccgcctanct

SEQ ID NO: 5168 - DNA, 430 bp, Homo sapiens
  I.5168 (N52278)
acagtgggtaaagcagcagtttttatttattacaaattctaaaaaagaatccaactttataagtaaaaaggaacactgatgatcacttaaaacatttaaatttaaaattactactaaaaaaaccctgtacattcacacaagtccaatgcctttgttggtttttacagacatagaatttctgtagggttttgggccctatcaacaatttttattaagtactgcaataacaaaatacagcaataaaacaactggacactcctaggggacaccaaagataaagggcccattaaatcaggtgtaggccagagaaacccaacctgttggcaatatgacgctctttccccaactgggtcttggtgagacacgtggcacagcaaggctgttcagtgcatgtgcataaattgtagaccaggtcccactatgctacttc

SEQ ID NO: 5169 - DNA, 504 bp, Homo sapiens
  I.5169 (N52275)
  misc_feature (386)..(386): n is a, c, g, or t
  misc_feature (398)..(398): n is a, c, g, or t
  misc_feature (477)..(477): n is a, c, g, or t
ttttaaagatttgcagaaatcaattagaataaaaatgtcaacagacaataacagtgttgcatagcttgaacatttttatattgattaaattgtttttcagtagaatcactgacagaacaggtcagaatgaaaaacattccaaatatacagaaaaaagattactgctcagttaaggtccttttccaaataacttcacacaaatcctttggttgctccaaacagaatgagagctatgagaatggtggcccagcccggccatcagactcccaagcatttggtccccggtctgaggtcacagaatctttgccacctttacccgagactgctctcagctggaggaccaacagggcaagaaccagaaaggtgggccatccttgtcctttggnattccaacaagngccaaagtctgagggggacaaactccttgggtgacaaagtctcagaaattggtgacatgtctctggtagcagccataangctttggttagggattaatttggattc

SEQ ID NO: 5170 - DNA, 379 bp, Homo sapiens
  I.5170 (N51745)
atagacagcagaaatttatttctcacagtttggatgcttgaaaatccaagatcaaggcaccctcaaattcagtgtctagtaaggactcagtttctgtttcatagatagttgtcttttcactgtaacttcatatggcagctttaattggtgaggagtttcagactctttaataaggacactaatctcattcatgaaggatttgccctcatcagctcatcacctcacaaaggcttcatttcttaatgccatcaccttggaggttagggtttgaacatatgaattttaaggggatatatttagaccatttcattctgccccatcccccaaaaaggcatgtccttctcaaatgtaaaatgcattcatttcaattaccccaaaa

SEQ ID NO: 5171 - DNA, 466 bp, Homo sapiens
  I.5171 (N51620)
  misc_feature (292)..(292): n is a, c, g, or t
  misc_feature (322)..(322): n is a, c, g, or t
  misc_feature (367)..(367): n is a, c, g, or t
  misc_feature (412)..(412): n is a, c, g, or t
  misc_feature (447)..(447): n is a, c, g, or t
  misc_feature (463)..(463): n is a, c, g, or t
tccagtgaccatcacaatttttcagtatttattaattcattatacatgtttagaggccttatggtgtgacagggaccatgccagagaccggagcaacaaaaatgtataaggatgcactcaaggagctcatggacagatggggagggcagaaatagctcactgaagtgcattgacagagcatagttgtcctgtaggaacgcaagctgggccttgaatcgtgcctaaatcaagggactctgacacttttaagtggtcaactttaatacaactttgtaacggggcagagggaatncttgggcctaagacctggattcccaaagcnacccaatactttcagggtgccacttttgtgattgatgctggcccnccattatacctggctccagatgggggcaatgcttgcagaaggcanatggttttggctgttcaattctcagagtaatttgncccaaaagctgggccnttg

SEQ ID NO: 5172 - DNA, 429 bp, Homo sapiens
  I.5172 (N51537)
  misc_feature (297)..(297): n is a, c, g, or t
  misc_feature (323)..(323): n is a, c, g, or t
  misc_feature (330)..(330): n is a, c, g, or t
  misc_feature (341)..(341): n is a, c, g, or t
  misc_feature (357)..(357): n is a, c, g, or t
  misc_feature (367)..(367): n is a, c, g, or t
  misc_feature (419)..(419): n is a, c, g, or t
aaaaccatatattttattgatgttcttcaaggacaatacagggccatgtgtacaaatgctactcaagtctcacatctggcaacctccccaccgtcatcccccattgaccagtctgcaagcagccaacatcctgtaggtctccctgttgcccttccccaggatgtcaggcctcaccgtgctgagccttcaggaggctggaaatagcagggctggcttctaagcttgagctctggagccaggaaagagtcaaggccaaaattgcccagatcttcccctcctccctctccctcccattgnttaagtatggccagaatttgtgggtngaaaatngccccagcgantcctccatttgagggnagcctaaggntttccccctctttcagggcatctctaatcacaattcttttaatttcccaatngaccttgggc

SEQ ID NO: 5173 - DNA, 464 bp, Homo sapiens
  I.5173 (N51239)
  misc_feature (448)..(448): n is a, c, g, or t
  misc_feature (459)..(459): n is a, c, g, or t
aaactctaagtattttattaaaaacaaagatattcaggtctcttaaagcgggcttccaaaactatggattagttgcttgtgaaatggccaacctgtctataatgtaatattcttacaatgaaacatcagtctgggaaatctacacaaagtgaatgatttcaaacaactcaattgaaaacgtatttcctttctttcgtgtaaaacaataataattaggaaggaagtcagtaggagatcctttttaggttattgtacatgaaaataaaatggcaaaagcaatttccccccaagggaatgagactcaacaaaacttagcctcctatttccaatgttatttttaaaatttcatctaaatatgtcttaatctaaactagagtaaaagaaaaattgagattcgaatacacacgcatatacacacagaaaatggacacagatataaacggtgggnccaataatacnttttt

SEQ ID NO: 5174 - DNA, 173 bp, Homo sapiens
  I.5174 (N50765)
  misc_feature (22)..(22): n is a, c, g, or t
tgtggagctggggtgcgttacnttctcggggcaggttgttccttgcatgctaagccaggccatgtgaagataatgaagtcccgcctcggctaccggacaccgtttgtaccatcaggccatcctgtccaagtctcctggggtctttgcctgcttgtttaaacactgaaggccca

SEQ ID NO: 5175 - DNA, 439 bp, Homo sapiens
  I.5175 (N50733)
  misc_feature (370)..(370): n is a, c, g, or t
  misc_feature (402)..(402): n is a, c, g, or t
  misc_feature (414)..(414): n is a, c, g, or t
atattttaggtatatattttatttaggataaacacaaaagtatattcatctaagacagaggtggataaaggaccaaacaggaaatattttaggctttgtaagtcaagaggcaaaaattaaggatattacataggtacttatgtaaccatttaaaaatgtaaaaaacattcttggcttgtaaactaagacataaataccaacactagacaagtttggggaaaagagaggttacaagtcaaatatgaatacaatagtttcttagtttttccttaaactgtttacccaccatggtcactgactgaaatcctctacaccatatacctgtgtgtttaattactgatttttttctgggatattgagaagcagggtngcacaaagacagggataaggaggaaggaaggnaaaatggagtcngaattagactaaaaatagggggtta

SEQ ID NO: 5176 - DNA, 501 bp, Homo sapiens
  I.5176 (N50680)
  misc_feature (458)..(458): n is a, c, g, or t
  misc_feature (484)..(484): n is a, c, g, or t
cattcagtatttattaagtacccactgcgtgcaatgcacagcatggggctacacttatacaaaagagcaggcaaggtgagactatcaaatagcactggtacttggcaaaaactaaacctatcacagcatcccaaggggcaggtctttgaggcaaaggtgatcgggccaactggtagttataaactgggttactagttcttccacttacccttgaaaatagcagaattcaaatagttattcacaggttaggtaggcactaattatttctgcttcatgagtaatcagggtggaagaatttatcaccacctacagtgtccagtcatttcatatctgggatatacagacatccaggtaagaaaattctgaagcaaccttttaccagtggacaccaagccctaaatgttttgtggatctggggaacacccgcagctgggttttaggattatggaagaccaganaggcaggggagagcctccccaatccngaggattattttttttt

SEQ ID NO: 5177 - DNA, 648 bp, Homo sapiens
  I.5177 (N49848)
  misc_feature (381)..(381): n is a, c, g, or t
  misc_feature (529)..(529): n is a, c, g, or t
  misc_feature (579)..(579): n is a, c, g, or t
  misc_feature (592)..(592): n is a, c, g, or t
  misc_feature (600)..(600): n is a, c, g, or t
  misc_feature (632)..(632): n is a, c, g, or t
  misc_feature (642)..(642): n is a, c, g, or t
ccttgtttgacttttaatggaataatgtcattgccaggcatggactcaaacaaagtaggcacttggttaatatgtattgaatgaaagaaatgagcaggtaggcttttaggaagtggatcttttgactgactcccaaatgctggtcattgcatttctagaacaaaggccacattttagaaacaactggggagtctttttcatggacacatgcccagccccattagagcatcctggcagggtgtccagccgtgtatgttttgaagctcctgtggttcagacacaacctgttacacaactaccaccttgttatctctgtggtcctggcctgtgctgatgctgtgatattttcaccctgaaatgaagagtcatcccaacatcaanggtcagtaaaaccaattcctgtccttaaaaatggattcattattatttgaatttcaaacaacagaccaaccatagctcaatgtttctcaagagtatcctgtggagcacagtgcggtgaacgcccagaagaaaagcagtctgtggtcangtggggttctgtgccatttgctgccaactttcctggcaaacagtggattncagcaaaattgtnctgggtcngttctgagtgataaaaccattaaccaggggtnccaaaggacnggcctt

SEQ ID NO: 5178 - DNA, 647 bp, Homo sapiens
  I.5178 (N49768)
  misc_feature (428)..(428): n is a, c, g, or t
  misc_feature (531)..(531): n is a, c, g, or t
  misc_feature (546)..(546): n is a, c, g, or t
  misc_feature (635)..(635): n is a, c, g, or t
  misc_feature (640)..(640): n is a, c, g, or t
taatcactgaaatgtctatttattaataagtggtgcagtatttatttaagatagaacataaaaaatcaggtaagaattatttgcataatatatatggaaatcaacctattaaagttgttcaaatattggacagagccagaatataaattacacatacagtttaaaaattacaggaaatcatattataaagagcactaaaggccacttgtggaatagttgtgttcccctgtaagccagaatgtgaagaaagcctacttgtagcacagagacaaacccagggagcaaggcaccagaattctatgccataaaaaggggttaaaaaatacaatccaaaatcaaatataatggattcatgtcactgggaacctccatttgttcttcaaagactggtgttttcccatcactggctacattagaaaaagaagggnaaaaaaatagccatatcctatctgaagcaaggcagagatcatttttccctttaaaaccaggaaggactggacaaatctggatggaggtccacctatcctttcnaagttggatttttcnggatgggcacagagccgacttcacctctccaacaggcaatctctggtccttgggcaaatggctgccccaatcttggcacttggccccantgggnctcttac

SEQ ID NO: 5179 - DNA, 447 bp, Homo sapiens
  I.5179 (N49595)
actgtgttttacatatttattaaagaatccattctttctgataatactcctaacacaggtgaagatatttttacaatattttaccaaactcctaatagaaaatgtctaatcagttcatccttttagtccctgaatccatgtttgagcattttaaagatggaagaaacctgtaagactcatatcattttaaaaaaattgacttaaaacacttattggataactaatacatttgtaacagcatcatgatttgttttgctatctgtatttcacccagaactgctgaattacagaatgaaactcaaatgaaagcattcatctataatttcaaaaattattatttgaaatttttaaatcaatagtcataacatcatcgtgttccgaaattagaaaattattagcacatatacaaacatatttacctatgtcaattaggtcaatgtcaggatt

SEQ ID NO: 5180 - DNA, 523 bp, Homo sapiens
  I.5180 (N49527)
  misc_feature (40)..(40): n is a, c, g, or t
  misc_feature (496)..(496): n is a, c, g, or t
attatcaaaaatcaaatgcaagtgagttggaatatctgantgtctaagcatgtaaaaaacttaagattacagcaggttacttactatatgcattgaactactgaattcaaatttcccagtttttcattttaagatttaattattttctttactaataataacctatatgctatgatttgtaacttgcattttacaaagcaagttaaatgtggaacttgtgcgtttgtttaccttaggattaggctttactggcatcacagcatttttcagtaattactagatttcttagcatcttggatttcattgaaaaatgctcgttcagaagtaatgtatgaaaggacttgcagatacaatataaaaagtgagaaatcagggattgtgaaggtttttattcccaaaaaccttgctagttaaaataagacttgctgtaacatagcgtgtatagtttagagttagagattttatccattaggatttattaaaggaaataatgccnattgtaaatttaagataggttatggag

SEQ ID NO: 5181 - DNA, 475 bp, Homo sapiens
  I.5181 (N49436)
gagagacggatcccactctgtcccccaggctggagtgcagtagtgtgatctcggctcactgcaacttcttgtctccggggttcaagcgattctcctgcctcagcttccctagtagtggggactacaggcatgcaccaccatgtccagctaatttttgtattttttagtagagacggggtttcactatatgttggccaggctggtctcaaacttctgacctcaagtgatccactcaccttggcctcccaaagtgctgggattacagacgtgagccaccatgcccggccaggattttccactcttgaagggagtattttgttgtcacttcaactcgctgttttttttccagacaacctcaaatatgaccacactacagcctgtacacaacaagacagtttatcttggtccatggggtaagtgtatgcctgatctttttaattcagtacaaatctctgaaggtggttaaaactaattt

SEQ ID NO: 5182 - DNA, 414 bp, Homo sapiens
  I.5182 (N49285)
  misc_feature (269)..(269): n is a, c, g, or t
  misc_feature (385)..(385): n is a, c, g, or t
ttttaaatgttaatagtaacttttatttgaaagttagggagatgaaaatacatttccaaatttttccaaagatatagctaaatgacaaaataaaaacttcactatgggccaggcgcggtgactcacacctgtaatcctagcactttgggaggccgaggcaggtggatcacttgagagcaggagattgagaccagcctggccaacttggtgaaacctatttctactaaaaatacaaaaattagccgggcatgatggcgtatgtttgtaancccagctacttgggacattaaggcagaaggatcgcttgaactcaggagggcagagggttacaggcgaggccagggttcacaccactgcacttccaagcctgggcgactctggtctnccagaaaaaaaaaaacccaaaaaacaaaa

SEQ ID NO: 5183 - DNA, 273 bp, Homo sapiens
  I.5183 (N49215)
  misc_feature (125)..(125): n is a, c, g, or t
  misc_feature (141)..(141): n is a, c, g, or t
  misc_feature (161)..(161): n is a, c, g, or t
  misc_feature (206)..(206): n is a, c, g, or t
atgagtccaaatgttaatttattatgcagtggtttactcaataaaaacaagattccagcacttaaaagggtgatctgggagattcctgatagaggagagtcaggaattgtaagattatatatatntacctccaaaaatgtncttctttcagttccggatangtactgatggtttaaccattccaagtagcccattactaacaatgnccataagaactgggaagcaattcaatcttttggcattgcatgctaacgaaaagctgtaattctaaaa

SEQ ID NO: 5184 - DNA, 475 bp, Homo sapiens
  I.5184 (N49062)
  misc_feature (25)..(25): n is a, c, g, or t
  misc_feature (32)..(32): n is a, c, g, or t
  misc_feature (33)..(33): n is a, c, g, or t
  misc_feature (370)..(370): n is a, c, g, or t
  misc_feature (473)..(473): n is a, c, g, or t
atataagaagacactgagatatggnccaattnntaactgcatcttcaaaacagcacattatattacaattccattttcaaaactgatggacataattgaaaaattattcctgatttgatccagaagctcaaataccatcatataaaattatttaaaagtccagaaaaacagatgcaattaacattaagagtggtgttctctggactgtgattttggttttctttataattttctgtattttctaaaatgtctaaaacaacgaagtattaaaagtgagaagaaaatgagttaactgaatcttctattgaaagattttattttggtgcctcttgacaatcagagagcttcagcatgtaaaattttctagtgnatgtggtatggaataaacttcccatttaccatggataattttcaaccttttccttacctcactttccatacaggactttgcattaatctcaccacagtaaatntg

SEQ ID NO: 5185 - DNA, 468 bp, Homo sapiens
  I.5185 (N48715)
ccttacacgtccatttattaaacaagttccttcatgacaatttaatacaatagttattaacgattagtgttgagaaaattatttccctctacatacaaaaatacagatttgaacactatgaaaaagatcaagacaagtaccatgaaaaactggtccttcaaatgaaagggggaaaattgagggcaatgtgaggctttgctcgctgtcggggacaaatcaatagcagcaaagctttggggccccaacccactccatacatacagacttgaacccaaaagccaggccagccaggggacgcccacccagggcttccacgtcagctggaaaaaccaaacacataaacctaagtttgcccaacgggttccgcctccagaaagcccacagttgtgtctttaactggccgaattgaaagagacttgatgagtaaaatgtgatagttgttaacattgccccccaaaagtggcacca

SEQ ID NO: 5186 - DNA, 388 bp, Homo sapiens
  I.5186 (N48337)
  misc_feature (378)..(378): n is a, c, g, or t
gaaacaatagcaataaatttttattaagttcttatttatctgtatatgataggaattgtttttatgtctatacctttccctcagattttaagagatttcattttaaagaatttcgtattgaaaaatagccttaaagaaagacgctcagttgattacaaaagcatataaccaaaagtcactaaagaaaatcccaaagcagcctgctcaagtaagtatagtccctcagtctgtaatgagtgtgtgaagagtgatttaagtctgctttctcgatgtgagataatgagatggaaaatgtgaatggtctgccaatatactgctcaggcacacatgggaagggggtcctaggccttctaaagtcctagttcaagctcccaaacnccgaaccccc

SEQ ID NO: 5187 - DNA, 228 bp, Homo sapiens
  I.5187 (N48286)
tactcatttaaatgaagacaccttttcagaacccatttggttgaagtcttagttatagtattgatttttttaagtggcttgtatcattcaggttagttggacatactgggaaagtttccagacattggcagaaacccaaactgaattttcttccaaaaagtcatgaagaatttcattaaccttttaaaaaaaaaaaaaaggtatatttctcatttgttcaactctaag

SEQ ID NO: 5188 - DNA, 397 bp, Homo sapiens
  I.5188 (N48180)
gcatttgaaaagctaagaacagcctttattggagaaagtaggataaagacatttccatatatgttcatgggaatttaccattcaaatttaccattcaaactgggggagtagagatcagtcacttttgccatcttatctgtttaaaactctttcaagaaaagaaaagaaaagaaaggaggagtctctttcaagaaaagaaaaaaaggaatactgtgtaagaaccacagaaaaaaagctaagtaggagcagatgtgggtgctctttccttaacagtcagcatagaatgtagagactgacattttctttaagaacagattattataactaagcaagaaaaagtatgtgtacataagttggtcacagtgacacttggtaggaaaatataagtagctgtaaa

SEQ ID NO: 5189 - DNA, 524 bp, Homo sapiens
  I.5189 (N46907)
  misc_feature (216)..(216): n is a, c, g, or t
  misc_feature (218)..(218): n is a, c, g, or t
  misc_feature (417)..(417): n is a, c, g, or t
  misc_feature (511)..(511): n is a, c, g, or t
  misc_feature (523)..(523): n is a, c, g, or t
tgatgatggtccatgggaaaaacagaagagttcagggctcaatttgtgtactggaacaggatcaaaggcctggtcattcaatattaacagggttgcaactcaggctgtagaagatgttttaaatattgcaaaacgacaaggaaatttgagtcttccattgaacagagaattggtagagaaagtaacaaatgaatataatgaatcactgctctacantnctccggaagaaccaaaaatacttttcagtattcgagaaccaatagcaaatagagttttctcaagcagtcgtcagcgttgtttctcctcaaaggtttgtgttcgttctcgttgttgggatgcctgtatggttgtggatggaggaacttcttttgagtttaatgatggtgcaattgcttcgatgatgatcaataaagaagnatgagcttcgaaactggtgcttcttggaacagtgaaggatttcctccatgacaaatttttgattactggcgagaatatttttacttccagaaancagactaccagnt

SEQ ID NO: 5190 - DNA, 259 bp, Homo sapiens
  I.5190 (N46686)
  misc_feature (170)..(170): n is a, c, g, or t
  misc_feature (179)..(179): n is a, c, g, or t
  misc_feature (185)..(185): n is a, c, g, or t
  misc_feature (195)..(195): n is a, c, g, or t
  misc_feature (202)..(202): n is a, c, g, or t
  misc_feature (218)..(218): n is a, c, g, or t
  misc_feature (226)..(226): n is a, c, g, or t
  misc_feature (242)..(242): n is a, c, g, or t
catctagtcgtctttcatgggtgtgattagttacaaatgttatgcttatgttttcatacttaatatcaagctttctttgtaccttacaagatagtatttttggttctaaaaaaaacaagcaaacttcatttttgtagtatccagaaattacctggagtcagtatttttantcgccttcnagaacntgtggtccanacatcancccatttataattagnggggaaantatctgccgaaaatcnaattgtaagaaaaggct

SEQ ID NO: 5191 - DNA, 276 bp, Homo sapiens
  I.5191 (N46623)
  misc_feature (1)..(1): n is a, c, g, or t
  misc_feature (262)..(262): n is a, c, g, or t
  misc_feature (271)..(271): n is a, c, g, or t
naggatattcagcaattctttcctggatgtgatcagcaaagacaagacatctgcagctgatgggatcacctagatttggaggttggggaacagggaagatctaaacacccttgttttcttggcctctttggtctcagccacatggaatcagattatttgactaggactattaatgcataagaagggagaaacacaaaaaggtgatttcttgaggtttcagcttaccttgtcaatgattctgcaactgtgtgccatgaattcntagtcctgnaacaa

SEQ ID NO: 5192 - DNA, 473 bp, Homo sapiens
  I.5192 (N45983)
tgaatattcaaaacctctttattacgtgaagaataagagccaattttgttagattacaagacattaaaataacatggctgcccaggagaaaagattataatttcagtcacattgggatacttaacttgaaataatgtgataaatacatgtagtttcatgtcttgctcatttaggaagaactaatgatatgacaagtaatggcttacattggaagctcctacaagacctacgctgcttaaaatatacagaaaagcaaagcaaatcagctgtaaacatatggaaaaagatcatacttcattaattatcagagaaaaagtgcaaaattaagataaggaggtaatattttacctctattaaaatttgtaataataaaagtttgagaggtaacctccaccattctctttgggcaagggatatgaaaaaaatggacatttccgggacattcattggtatgactataaataagtaccatc

SEQ ID NO: 5193 - DNA, 565 bp, Homo sapiens
  I.5193 (N45982)
  misc_feature (35)..(35): n is a, c, g, or t
  misc_feature (517)..(517): n is a, c, g, or t
  misc_feature (536)..(536): n is a, c, g, or t
gatttgattgatcaggaagatacatcaattccgtngccaattatacctaataacgtagcattaaaatatatgaagcgatatttgagagaagagacttctggttctaaacaaatggagcatacatattttttcttattcttcccactaagtacagctaaaaactctggaaataattcttaaacattagagaagagaaaaagactagctagggactttggtacttgaagaatgttatggtgtgaaaggagtggaaataaaatattaatctgaaaaatatacaacatgttacattgtgtatatggtcttaaaatggtttatagactatcataaactgatgcgtacagatatgattgtgggatatagacattaataatcctttttctatggtgcatagagttgatttttaagaagaaaacgacttttcataatactccagcctcaaattttgcctcaccagaatccagtgtgttttcaagaactgggactttctccaggttggtttcattttttaaaatgntccgcctttaccaatttgnttccatttattatgggaaaatggtaatat

SEQ ID NO: 5194 - DNA, 428 bp, Homo sapiens
  I.5194 (N45563)
  misc_feature (24)..(24): n is a, c, g, or t
  misc_feature (25)..(25): n is a, c, g, or t
  misc_feature (92)..(92): n is a, c, g, or t
  misc_feature (103)..(103): n is a, c, g, or t
  misc_feature (120)..(120): n is a, c, g, or t
  misc_feature (297)..(297): n is a, c, g, or t
  misc_feature (300)..(300): n is a, c, g, or t
tttccaggcttcaggctgaacaanncaggctgtttgctgtgaggagctagatgacaccaagacacagacacgtactcttcaccggctccttntgcttctcctncctgcaggacgtgagtnatgtctggtcccaaaacccttgagtaaactagctgagccattgcaaatgaaggtacagatggattgaaacataaaattgtagcttttggtgtccttctgaagggtcagaatatgtaattatttgataaccaaggaagtcaagtcagatggctaagtagtaactttccaatatggatntcnccgtggtacttcacctggtggcacttttggggggcaatgttaacaacttatcacattttactcatcaagtctctttcatttcggcagtttaaagacacaactgtgggctttctgaggcgaatgcccgt

SEQ ID NO: 5195 - DNA, 532 bp, Homo sapiens
  I.5195 (N45223)
  misc_feature (477)..(477): n is a, c, g, or t
caacttctatggtggttttattatgaaacaaaataaacctttcaatatcatattcaaattatcaaaaatatagctcaaaccttcctacactgataaaaataatatatatcattcacatcaacatcatgacagctcaaagttagctatttgaaataaatcatcatacttttgaaagctactcttattacatttctaaacagagtgctatttttcctttttctaagagaaactataaagcataccccaaagtactcacattctggctacatttggaaaactatttgaaagattaaaccttcatgtttatctcatctcacaatttacatttatgtattaatttaaatggctacagaactatttaaaaatttattttataaacatggtactacaaattttaaaacttcctgttctaaaagtaactatttaaaaagatttctggaacacaccatcaaaaagatactgttagaaaatttcccnagagtggacacacaccaggcaaatccaggccggaggaattaagacgggtttagca

SEQ ID NO: 5196 - DNA, 137 bp, Homo sapiens
  I.5196 (N45176)
atatcctaaaagatttgggagttagaggaggtaaactaagataattatattacaaagggtacaagaccacaagacaacaaccgactccggaattcttggacctccgccttccgtacaaggcccagccgccccgtcca

SEQ ID NO: 5197 - DNA, 616 bp, Homo sapiens
  I.5197 (N45115)
  misc_feature (218)..(218): n is a, c, g, or t
  misc_feature (330)..(330): n is a, c, g, or t
  misc_feature (501)..(501): n is a, c, g, or t
  misc_feature (539)..(539): n is a, c, g, or t
  misc_feature (553)..(553): n is a, c, g, or t
  misc_feature (563)..(563): n is a, c, g, or t
  misc_feature (572)..(572): n is a, c, g, or t
  misc_feature (585)..(585): n is a, c, g, or t
  misc_feature (591)..(591): n is a, c, g, or t
  misc_feature (597)..(597): n is a, c, g, or t
gcatgaaaagaggtaaaacgatttatttacatgtctttaaaaaatcaccttggacatttgctaatagaactgccaaaagagggtggtaagtaacaacctttgattaagatgtggtcttttactattaagcttttagtaaaaaggaacacactaaaagttcagagtagatcatttatattcactgagtatttactgagcaattactgggcgccaggcgnacttctatgttcttgaagttttcattccagcaggaagagaaatctagagtatgtcagatggtgataaatatggattagttcagcaattttaaaaaaggatttttatgtactngcacactgttaccgaatatacaaaatcagtcaagaatcctgttatagtttttggtaatgtacaaaaagtgaaggtgtgtgcacccaccccatttttatagagggtgatcagggaaagcctcagggataaggaagcatttgagcagaaacctacagaaagttagagaggacnttatccgtgagaaaaaatgttgtaagaagagaaatgcnatatccaaggatcncctgccaggntccaggacnctgagtagatccngtggcnggaganggatagagggaagaagtgg

SEQ ID NO: 5198 - DNA, 233 bp, Homo sapiens
  I.5198 (N44976)
  misc_feature (105)..(105): n is a, c, g, or t
  misc_feature (217)..(217): n is a, c, g, or t
ggctttttctgaatgtaattgtgaatacaaagccttgctggtcctttttatcattacccaatggatgactgtttattagctatcagcagaattccgtagcgaaanaagccgtgaacgatgtacattttgctttaatagcatgttagcgaacaaacttccatggacttttgtggacaaggtgctgctttttctcatgaccctgtagaattgctatcgnccacatcttctgtagc

SEQ ID NO: 5199 - DNA, 349 bp, Homo sapiens
  I.5199 (N44889)
cgcagttttttttttttttttttgctttgttttgtttctgattttttaaacagtgaaatatgtccaattttatttccagtgcattaaacaaattttaaattaaaagaagaaataaacgtttccccccatctttctaaaggaaatgactaacaaaagtacaatacaatagaatcaggcattgcaagaatagcatgatgtgcaacctcaattacatcaaagaaaacaaatagacaaacaagaattatagaacataagtatgaaggagccaagattacataattccaactatggtatgattggcaagcactggttaaaaaaacaggtaaggctacttcttagattttctaac

SEQ ID NO: 5200 - DNA, 382 bp, Homo sapiens
  I.5200 (N44276)
  misc_feature (5)..(5): n is a, c, g, or t
  misc_feature (6)..(6): n is a, c, g, or t
  misc_feature (7)..(7): n is a, c, g, or t
  misc_feature (253)..(253): n is a, c, g, or t
  misc_feature (321)..(321): n is a, c, g, or t
  misc_feature (328)..(328): n is a, c, g, or t
  misc_feature (345)..(345): n is a, c, g, or t
  misc_feature (356)..(356): n is a, c, g, or t
  misc_feature (368)..(368): n is a, c, g, or t
ccaannnttcttttcctaaaatgttcaaatgactttcaggtcttcccttccttttgatcttaaagtcaactgtcataatatttcccaaggacatatataattttattctaatgctaaacaagtgttttcaatgaccatttgttgatctattaaatattaatatacagtacagcagctatattcatcaacagaattccagtttattacctatatatacgtagcacagtcataggatactgtgctcatacataanaaatgcaaaaactgtcaaatgtgctatcctcccatgtatacaaaaaaactatttagcatcattgaggnaagaaancttttttaagtccattncaggatttatnatggaacccccnggccattccataaa

SEQ ID NO: 5201 - DNA, 511 bp, Homo sapiens
  I.5201 (N42709)
  misc_feature (421)..(421): n is a, c, g, or t
  misc_feature (433)..(433): n is a, c, g, or t
  misc_feature (481)..(481): n is a, c, g, or t
  misc_feature (486)..(486): n is a, c, g, or t
  misc_feature (509)..(509): n is a, c, g, or t
cccagttggagaaaaaaagagttagatagcagctaacttggggaatgaacttcgacgtcagggaaaaaccatcaccaatatgaaatgtcagagatcagatctcgctgtcatggtctgcggcaagtaggaatgacttcaccctacagctacccaaactgcacctggagacctttgcaatggaggggctcaagggcgggccagaggtggtagcatgccaggctatgattaaaagtttcatggatgtctaccagcttgcaagcactagaatcatgacattagagaaggaaatgacatctcatcgaagtcacattgcagccttgaaatcagaacttcacacagcttgtttacgtgaaaatgcaagtttacaatcaataggatcacgagaccattcaaatctctccattccttccaagagctcctncttccctgctgnacacaactgggtattgggggatttcttaccattgaaagctgaacttgntactnacttacacttttcttaaagggantt

SEQ ID NO: 5202 - DNA, 373 bp, Homo sapiens
  I.5202 (N42397)
  misc_feature (25)..(25): n is a, c, g, or t
  misc_feature (263)..(263): n is a, c, g, or t
  misc_feature (273)..(273): n is a, c, g, or t
  misc_feature (298)..(298): n is a, c, g, or t
  misc_feature (332)..(332): n is a, c, g, or t
  misc_feature (340)..(340): n is a, c, g, or t
gctactttgaaaagtaagtatcttngaacttgattatttaaaataatagtaattttaaatactttgatgttgattttaatatccctttcttacaatatatgttccaatattttattatctaaatattcatattatataaattatacttataattactgtataaataattaatgttcattaacagcaaactttttattatggcaaaatctaataacgactcttgccaacacattaagttgtagtcattctatttttaagtagcnattaaattcnttaaaaaagattttttaataaaggngagctcctaaaaggttatatttaacctaattttnacccattncaaaggatacctttggtaaaaaaaggaaaaggc

SEQ ID NO: 5203 - DNA, 153 bp, Homo sapiens
  I.5203 (N41806)
  misc_feature (5)..(5): n is a, c, g, or t
aaaantagctgggcatggtggctcatacctgtagtcccagctactcaggaggctgaggcaggagaatcacttgaacctgggaggtggagattgcagtgagatgagatcactccactgcactccagcctggtgatggagcaagactccatctca

SEQ ID NO: 5204 - DNA, 349 bp, Homo sapiens
  I.5204 (N41634)
  misc_feature (136)..(136): n is a, c, g, or t
  misc_feature (335)..(335): n is a, c, g, or t
  misc_feature (347)..(347): n is a, c, g, or t
caaggctgagtttcctgtaaggtcctctgtttttgattcacccaaaagtctgcaaacccccagcatctctgctctggccagccctgatctgaagcctgtgtctactaagagggatgcccagtgccccactggaggnacgggaagcctagcctgggccccctctgtgcacacagttcaggcctgcccagcttcttatgggcaagccaccatcccactctcgtctccctgagctgtctggttctgcggacccaggaagggccaggctggggcctgcttgtgtttatcctcggctgctgtcttcccagcaggccccaggcaaggaggcttcccactgntgctgctaaagngg

SEQ ID NO: 5205 - DNA, 383 bp, Homo sapiens
  I.5205 (N41529)
tttaattaatgtgcaattagtcatggactgatagttttgtaaaaagtgaattcctgggaaaacaagattagaaagcaaagacagacaaaattcttttattattagatttaacagacatagcattactctgctggtttgctataaaagcttctgaatgcttctctcggtctctcttactcatatcttcatagacttgtaatagtttgcacatgggcacctgttccagaacacagattgagtggcactggaatgcccacgcactcagcacccagctgcaatgatttgcaactccttagctaattttggatgatctgtgcccccaccacttcccctttctcctatatcattttgaagcaaactccagattcatatcattttatctg

SEQ ID NO: 5206 - DNA, 520 bp, Homo sapiens
  I.5206 (N39328)
  misc_feature (133)..(133): n is a, c, g, or t
  misc_feature (276)..(276): n is a, c, g, or t
  misc_feature (282)..(282): n is a, c, g, or t
  misc_feature (286)..(286): n is a, c, g, or t
  misc_feature (304)..(304): n is a, c, g, or t
  misc_feature (306)..(306): n is a, c, g, or t
  misc_feature (310)..(310): n is a, c, g, or t
  misc_feature (331)..(331): n is a, c, g, or t
  misc_feature (510)..(510): n is a, c, g, or t
tccgctggaaatttagtttatttctatcacaactctgggtagcccctaactcgcatttgttttgagtatcacaagataagcaagcccgaagaaactacaaaaacaactttgcctcttcggtaatgcgcaggcnctctcgctctgttttccgttggccttaagcccgccccttgtgcgtccttcgaggagggttgcgagccgtgagctcggcagaccactcttccctcagtcttctcgagcacatcgtcgcaaacggggccggaaagcgtggcagcnagggcnaaangcaggagagcggaggcgntnggtnggtggcggccgctggcaagtngtaagatggcggcggcgtttggtggtggcagtggacggggcggctgggctttgtacggaaggcggaggtccaagaattccggagtcggttgttgtcttgtggtcttgtacctttgtaatataattatcttagtttacctcctctaactcccaaatcttttaagatatcttaaaacggtnccatttggtc

SEQ ID NO: 5207 - DNA, 456 bp, Homo sapiens
  I.5207 (N39242)
  misc_feature (444)..(444): n is a, c, g, or t
  misc_feature (452)..(452): n is a, c, g, or t
gttttaaattgtttattttttttttaaagaagtctgtcttcagagtacaaccaatgtgattaattgtgcctttaacaaagtcattcaatgtctaaacaaattcagtatctgaaacatcttcatgaggaaaactgaaggaaaggaatttaaaaacacagaccaggaaacaatcacaaaatataggtttaattactacttttaaacttaaaaaaaaataaaaaccaagaaaacaaacataggtactccagtaagacttgctactctgaataatgtaacattttttctaagttctataaatatatactggaagttttagaacacatacagacgcttaggaaaagaaaggctagttccttggaaatggacgatccaggatgatacaatcacttggatgacagaaggtaagcctttcttacaattagattttagcagataattttaccnctaatatnaatg

SEQ ID NO: 5208 - DNA, 656 bp, Homo sapiens
  I.5208 (N36621)
  misc_feature (1)..(1): n is a, c, g, or t
  misc_feature (559)..(559): n is a, c, g, or t
  misc_feature (594)..(594): n is a, c, g, or t
  misc_feature (603)..(603): n is a, c, g, or t
  misc_feature (613)..(613): n is a, c, g, or t
ncacacaaacctctgcctattaactctttcaaagaacgtttgttggctgcgaaagtcgtctgggttcattgataaaaaaaaaaaaaaaaaagatattgtctttagggctgctgaatatattaatgagttgtcacggaggacagttaggatttgcaaagggtgatagttaccattcacctacttgttgccttaaaagataaaatcatgtgcaaatgaagacagagctttcaggcacctccgccagaacacacttcatttgaggcgacggcagggatgctactaaaaccccaaagagttaagctgaaatggttaatattcctgtctctgcccgcctcctcctgtattctaatgtatgaacccgctcattcagatgtgagtgggacttggggacagcttgccttccctacgcgattgtgtatggcccccgctgaaatgttcctaaaaacacgattttgtaaacgcttatgctccaccagacatccagcgcatctactggatgcccacgtctacaccagacgcccagcgccccgagtgggggttcactttggcctcttcacanccaggggctctcagcctgaaggtgaggggaaggangggggggtntttaagaatnctgccaaggtaggctgaaaaatttgtggttccttttgtgagcc

SEQ ID NO: 5209 - DNA, 471 bp, Homo sapiens
  I.5209 (N36400)
gagttgtcatatttttaatatgttttcttactgttacagaagttcaaacagttgaatgatataaattgttttgtactatgggtccaatatagtattgatgtgtgacttttatatctgagacattttgtcttgagtttaagttagttgtcttcattggcaggggtgatttgaggtgagtttcactttcttgaacccatgtgcctgataattagagggttcaggataagttttgcacatagccttgctgcctgcttatctttgtaaaatggccctttccttcagtcagtattttaaagtaggctactctatatagtttcccaaactctcggtaggatacttttaactctctgcagcagatagtatagggcaagggctctttactagagccaaaagtaaatggcattttaggtccttgctccaaccagaaaggttcactccatattacagatgttactattaggaagagggtta

SEQ ID NO: 5210 - DNA, 387 bp, Homo sapiens
  I.5210 (N36344)
  misc_feature (94)..(94): n is a, c, g, or t
  misc_feature (378)..(378): n is a, c, g, or t
gtgtaatcatgtgaagtcatacgttttcctctaggatagttgtgtttagattataccaaaacagctcttagttgaagtgattcaagtgtttctnttttccctatctgccatcaattggccaagtttttgatactagacaagaattcaatatattaattaaaaagtcatttcagacttggcttaactgaaaagcagaagagaaaaatcctttagagaatggattggcatactttatttctagagtcgatttagataaatactttggaatccgatgtgagtaaatgatatgtttcacatttcttctcacttgccaaacagttatttgagaataaactctggcttagctttaagaaacttcttggacattggaggattggngattaattg

SEQ ID NO: 5211 - DNA, 430 bp, Homo sapiens
  I.5211 (N35603)
  misc_feature (105)..(105): n is a, c, g, or t
  misc_feature (107)..(107): n is a, c, g, or t
acacagtatgatctcattttattgctgaaatggattattctgcacaggaacatgcctgggatttgtaaagcgagcctgccctagaagagaggcacacggccgtgnancacctacctgggatgatagaaaactacaggcataagtcaggaaaggaaaggagtgaacaaaaccaccaggggctggcttcgctgtcaaaccaggctgcagagaacttttctatttctacagagcgcgtttccaggaactaaataaatgaaaaccataaaggggagaccctgcctacaactaaacgatgcctggccacgcgtacatgggcaggtggtagcggttatagtgcaggtagtcaagagtgcttctctccaccagggttttgtagatggattcctcaaaaactcctttgaggtaatgcctgggcttctcagtccgggtt

SEQ ID NO: 5212 - DNA, 473 bp, Homo sapiens
  I.5212 (N35251)
ctcactgtaataaggtaaaagtttaataaaattaaagcccttcccagtttcttattggattcactcacaggcagaaatgttcttaatgcctctcaggattccttcagcagctgcagcctggctgtctctttttggatatggatacaacacattcatttggcacttcagaagttaaattagttcaataactctatggtgtgcctcaacttacaaaaggtctggagagtcaataaaacacccaaggtaattacaatacttgccttatacccaccaaatttaaaaggcagttatcctgtacaaaattatgctcccaaaactcagtagtatttattgccaaagactacatgtagcagaaactctatagcaggaactcatgaatcagtaggaaggaagataaccggtgatggctttagcttaatcagaatgccagtcacatgagctggcacacttaaactaagttgggaagaaatttg

SEQ ID NO: 5213 - DNA, 472 bp, Homo sapiens
  I.5213 (N35225)
  misc_feature (120)..(120): n is a, c, g, or t
gtttccatatggaaccatctgtgtgaattagtcatcagttaggtatagttaacgtaaagagcccctgccattgaaactttgcacaccttctctgctttattgaaggcaagggccagtggnagtgatagcaggggagggaccctccagaaccacccagccctccaggaggccaataagcatggatatcatgtcaggagctgagctgacatatatttactcagaggacattggggtctgtagctaatcctaaagaatgctccgcaacagaaggaaaccaatgcattgtagaaaacaaagggagatggtgcccgaagtctgcctgtttctcttctcttttctttcccatctcaccaccatgtcctctctaacagaattatatttcatctcatatattatatgttactagaaaagtcatttggttccttggtttctctctttatcagtgggctggaaattcctccaaattaaatat

SEQ ID NO: 5214 - DNA, 301 bp, Homo sapiens
  I.5214 (N34897)
  misc_feature (165)..(165): n is a, c, g, or t
taacatgtggtgaagtttaattattcaataatggttccaattattaaacatgactattgcataatgacataattggctgtggatgtgcttttgtgtggccacataaactccaggaaactttgtcttcattagtttcattagtcttcatgaggtcaggcctggggnagctcgtttgactcttcccaagtgtggggtaggtgttgatgccttgagagtgccagagtgacacaggtcatgacccacgccagggtgaagtgagaactctcaggggtcacctctccttgttccacatctgtctttt

SEQ ID NO: 5215 - DNA, 451 bp, Homo sapiens
  I.5215 (N34672)
ctgaaagtttttttcctgatattttatagttcttataaaatatcaagttatgttgattttcatactttgtcatataccatgttattatgttacttcatgtttttaattcttaattcattgaaatctgttttttagcttctcctatctgatttacttgcaaaataaataaaatctttgatgagaaaactgtgctgttacatttgctttttccttaccttacctctctttaaggtcctccacagatacctgtgactcagactggctaacattgagtttgtttctaaccctccaccagtttctggactactccttctttatcctttcctcttatattccagttttagtaaatgaaaccaacatccacccagttaacttcctgattttcacaacccttatccagttggtaagcagtacccacaaattttacatccagatagctctcaagaaaatg

SEQ ID NO: 5216 - DNA, 316 bp, Homo sapiens
  I.5216 (N33590)
  misc_feature (306)..(306): n is a, c, g, or t
tttttgatttcaccgaaataaatgtttaattataaaaacccagtaatctctctaggcctactatggctcacaagaaaaggaaaaatgttttaaaaattaaaaacacaaaaagcccctccctggtgttttgtagcaattcgtgtgagttgtttaacacgcttcatagcaccgagtcgcctctacattcttgtaaaacattagtgttaacaccttcagagattgtactgaattaaaaagatcaggcatacacttaccccatgggacaagataaactgtcttgttgtgtacaggccggagtgggggccnatttgagggt

SEQ ID NO: 5217 - DNA, 485 bp, Homo sapiens
  I.5217 (N33550)
  misc_feature (485)..(485): n is a, c, g, or t
aaaaagagaaaaataattttaataatataatttagcattttaactttttaataccgaggcccattccatggggattatggtctcgataaataatcctgtgattaaacttttaatatgtctaaaatttttcactgaatcttgtttactaaatctaaatctccattacaattttctgaagcttgagtacaatgagtagcaataaaagtgcttcttaaacagtcagaattcacctgtgaaataagcacaatagcacgagcagcaggtagcaggcatctgtgttagaatcctcccacccatttgctaagtggctgtcttcctggaccctgggtttcaacaatacatcttggctttgtgctgaaatacaccagggctcaggggtgaggggcacagcatactgagataaacatggaaaaggttactcaatgtaagcaatggtttcggatcatagcaacctgggaagcagtaataagataattttaaatggn

SEQ ID NO: 5218 - DNA, 510 bp, Homo sapiens
  I.5218 (N33530)
  misc_feature (10)..(10): n is a, c, g, or t
  misc_feature (160)..(160): n is a, c, g, or t
  misc_feature (400)..(400): n is a, c, g, or t
  misc_feature (502)..(502): n is a, c, g, or t
taactgcaanatcctttcaacaaatagaagctcatctggaagcttgtatatctatatctgtatgtatgtatgtatgtatgtatgtatgtatgtatgtatgtatctctatctatctatctatctatctatctatctatctatctatctttccatctctatntcatccagataaatggatcactgcattgcttgaattggcaggggagttgggggtacggccctacctgcttgtccacctcacttccccacctctctcagtccttgagaggctccttggagacccctagtaccctagtactccaaagaatacagtctgagaacttctcactactcttcagtgtcatttcttttaggctatcaaatttttaagctggtcatcctttataataagggtcacaanggtaagtttgaaccgggaaacatagggcctttttggtttcctaactaacctgactggtgatgttgaaaagccaattgggcttaatgttcttctggggtcganatgggttt

SEQ ID NO: 5219 - DNA, 485 bp, Homo sapiens
  I.5219 (N33423)
  misc_feature (57)..(57): n is a, c, g, or t
ctctgagagacagagtctcactctgtcaccaggcctgagtgcagtgacgcagcatangcttactacagtgtcagtctcctgagctcagctcttgcctcagtctcctaagtagctgggattacaggcatgtgccgccatgcccagttttaaatttttgtttttataaacagtgttttactaccttgtccaggctagtctacaactcttggcctcaagcaatactcctgcctcagcttcccaaagtgctgaaattttgataagtcctttttacagaggggaagtttttaattttaatgaagtccattgtatccatcctttttttaatgaattttccctttttaatttaaaatgtcagcactaaacccaagatttcatctatattttctgctggtgctatcttctatgagggtttatagttttgcattttatggtctgtaatctatttgagttaatttgggcaaagggtataagggttaatatctcgg

SEQ ID NO: 5220 - DNA, 456 bp, Homo sapiens
  I.5220 (N33187)
attttttccctccactatattttggaagcacttgttcttatgtagaaattacagttatatagttagtgctgaggacaaaattattttaaacactactgatcacctaagaattctatctttgggcctgtctactatgattttagaaatttccaccaaatgatacttgctagttaaatgcaagtatctgtgattctggtaggtcaagtggtaaacttgtctttgtgacacagaatttatcattttacactaaaaaatttataagaatatttctcccatggcctataagcatacctgttaacactttttagatttaaaatatataaaatgactcttcaggcatctttttccatactttgaaaacacactagtaatggtaaaaggagtagctgttgctatcttgattctcctataatacccattccatctgatctgtatttctacccttgctgcagaggg

SEQ ID NO: 5221 - DNA, 609 bp, Homo sapiens
  I.5221 (N32853)
  misc_feature (490)..(490): n is a, c, g, or t
  misc_feature (495)..(495): n is a, c, g, or t
  misc_feature (516)..(516): n is a, c, g, or t
  misc_feature (552)..(552): n is a, c, g, or t
  misc_feature (564)..(564): n is a, c, g, or t
  misc_feature (589)..(589): n is a, c, g, or t
ggcaaggaataacaaaataatagaaactccatatatattagaaaaagatctgtaagtttgagccttatatattattacaatgtggcaatcaagaggaaaactcaagacaactgtgcgctgtgcttgtcctgttttgttcaaaccacgataattttaaataaatagtaatgttcaacattcactgatgacattatctatcaaccacatcacacctggaacacagtagataataaatggcagctgttataccttccttcttgaaacaaaatcctgtcatttcattctcattttaactttgtgttaagcttctacaatccataaaaatgataaaacaataaaatggtccaacattatctagtccagtcttatttttacaaaacattgactttaaaagtccctggagattttaattttactggtttaatctgtcttccctacccttgtttaaaaaaaaatagaatcatgtgtcattattgggttgagtacccgntatcnggaatccttgggacagtggtnttggattccaatatggaatattggcttatattaccngtgagtatcccnatctggacacgggaatcctaatgcncgtggacatcccttgagtgt

SEQ ID NO: 5222 - DNA, 599 bp, Homo sapiens
  I.5222 (N32495)
  misc_feature (495)..(495): n is a, c, g, or t
  misc_feature (527)..(527): n is a, c, g, or t
  misc_feature (539)..(539): n is a, c, g, or t
  misc_feature (598)..(598): n is a, c, g, or t
tgcttattgatttttttaagtctgagggaaattacccaaaatgtgtcattccttaacatttaaaaatatgttacataaaaatgagcaactgtgataacaaataaaacttggagagaaaaaagttggctatttccttattcaaggagacagagctaccagaatacatcaagatagcgcacaaattttttaaatccactgccacttctgctgaaacaaaagtcaactgataagaaaattcccattcaaaacaattttaattgtactgttaactcttcctccattttttaatttcatgaagtcataatccaatctgagttggtctgttgggcattagcagacatagtcactggagaggagtgagatgatgtcagagcatggggcacagtatttataaatgtctcctttaagaaagtgtaagtagtatcaagttcagctttcaatgggtaagaaatccccaataccagttgtgtcagcaggaaggaggagctcttgaanggatggagagatttggatgggcccgtgatccnattggattggtnaacctgcattttccccgttaacaagccggtgtggaagtccggtttccaaggctgccatnt

SEQ ID NO: 5223 - DNA, 448 bp, Homo sapiens
  I.5223 (N31068)
  misc_feature (207)..(207): n is a, c, g, or t
  misc_feature (287)..(287): n is a, c, g, or t
  misc_feature (302)..(302): n is a, c, g, or t
  misc_feature (356)..(356): n is a, c, g, or t
  misc_feature (382)..(382): n is a, c, g, or t
  misc_feature (398)..(398): n is a, c, g, or t
  misc_feature (424)..(424): n is a, c, g, or t
  misc_feature (438)..(438): n is a, c, g, or t
gagtctctctggagttatttgctgccgctacctagtctgaaggtgtgagcagctgggcttagtttggcagatgtggaaagctggtaagcactttcatttcatagtgctgttagaaaggaggggaagagaataggaagaagagtccttttctcttaatttggagtcttcaattgaaatctgcctttacaaatcatataaagcttgatngccaattctactaaaataaaactctacacttgtatatgtatttaaaaaacaccacggcctggcacagcctaccacacttnaaatttacccatttngagtggtacagctgagtgggtttttaggtaaattgaaaaaattgaacaaattancacaatcttaaattttaggacctttnaaaaattaccccctgnaaaaggaaaaatttcccttggtaatnccgggttccaaaanaattttaagg

SEQ ID NO: 5224 - DNA, 395 bp, Homo sapiens
  I.5224 (N30778)
gcagtgaaattacatctttttattgtggtaaaatacacattacataaaatttaccattttagcagtttttaagcatacagttcagcggcattaagtgtgtgtatattactgtgcacccatcaccaccagtcatctccagaacctcttcattgtcccaaactgaaactcataccaccttaaacactgagtccccgttcctcctccccaccagcccctggtaattatcattctactttctgtctctacgagtttgactactcatgtaagtgccttatgtaagtgggtgcctcatgtaagtggagatatatatttgtccttttgtagctagcttatttcactttgcataatgtcttcagggttcatccatgctgaatatgtgtgagaatttccctcct

SEQ ID NO: 5225 - DNA, 123 bp, Homo sapiens
  I.5225 (N30764)
  misc_feature (38)..(38): n is a, c, g, or t
  misc_feature (44)..(44): n is a, c, g, or t
  misc_feature (50)..(50): n is a, c, g, or t
  misc_feature (55)..(55): n is a, c, g, or t
  misc_feature (58)..(58): n is a, c, g, or t
  misc_feature (75)..(75): n is a, c, g, or t
  misc_feature (78)..(78): n is a, c, g, or t
  misc_feature (85)..(85): n is a, c, g, or t
  misc_feature (90)..(90): n is a, c, g, or t
tttttttttttttttttttttttttttttttttttttnctttgnccagtnccttnatngggggcagggcaccaanaanaggcccnccgcnccccaaacccagaggcaaaaggggttggcacgc

SEQ ID NO: 5226 - DNA, 609 bp, Homo sapiens
  I.5226 (N29999)
  misc_feature (352)..(352): n is a, c, g, or t
  misc_feature (433)..(433): n is a, c, g, or t
  misc_feature (479)..(479): n is a, c, g, or t
  misc_feature (567)..(567): n is a, c, g, or t
  misc_feature (581)..(581): n is a, c, g, or t
  misc_feature (591)..(591): n is a, c, g, or t
  misc_feature (602)..(602): n is a, c, g, or t
cctttggtctcttctaaaattaaatttcctaattctctctatattcttgtaccacttctcacttaggaactcacttataaaaaccagccatgacctgccattccttccccaggaaaccccgtctgctgctcctcttcctttgctttcttgagtcaccccataattaaacaaacagagatagtgacattgcctgagagaaagaaagagaaccagatgattcaaattaaaatctaagctacacaggataggtcaataggcaccaacccacccaaaatgtaatcctttttcaatccccagactaaacagagtaggaaataaagcagttggaataccctttagtacaaactctggnttcaaactggatgcaaccagttcaaaacaaaatcattacttcttcttaagacccccaaccatccacaggaatggattatgnagaagtctcacaactggtcacagggtcactgggctcccaaatactnccctgaatggagatctatcattcacaggggcagaagtcatccacctctacttttccatctaggtttttttctggcaatagcttccagngggaactaaagttngggaccttanccctaatggtnaataaat

SEQ ID NO: 5227 - DNA, 474 bp, Homo sapiens
  I.5227 (N29629)
  misc_feature (33)..(33): n is a, c, g, or t
  misc_feature (71)..(71): n is a, c, g, or t
  misc_feature (73)..(73): n is a, c, g, or t
  misc_feature (339)..(339): n is a, c, g, or t
  misc_feature (342)..(342): n is a, c, g, or t
aaccattttcattttttaataatactgtaaatntctcagaaaggatgtattgtttctaatgaatatcaaanangtcatcacaatgacatgttcccctgcccccacattgccctccccacccccaaagttacccaaatactagtaggaaattacaaaaaacaaaaagcaacaatccaccctccgccctgccccatgagtagtgttaagtgagtcaagcgttagcaacattacgacgtgtgtgtgtgtcggcgatggcggaccacagggatctgtgcatccgtgagagttggtgtggagaacccggtagcagcagcagttgggaagcctccttgcctgggnctngctgggaagacagcagcccgaggataaacacaagcagggccccagctggcccttcctgggtccgcagaaccagacagctcagggagacgagagtgggatggtggcttgccataagaagctgggcaggcctga

SEQ ID NO: 5228 - DNA, 494 bp, Homo sapiens
  I.5228 (N29140)
  misc_feature (97)..(97): n is a, c, g, or t
  misc_feature (98)..(98): n is a, c, g, or t
cttgctctgtcacccaggctgggagtgcagtggcatgatctctgcaacctatacctcccaggttcaagcaattcttgtgcctcagcctcccaagtanntgggactacaggtgcacgctaccacacctggctgattttttttatgttttagtagagacagggtttcaaccatgttgcccaggttggtctcaaactcctgagctcaggcaatccacccgccttggcctcccaaagtgctaggattacaggtgtgagccaccacacccagctattttttctttcgttttttaattttaaagttggggggggtctcaatttgttaccctggctggtctcgaactcccggacttaagcgatcctctggctccaagcccactaccagtctcaggtttctttactaaaagatcactacctttttttctcttaatctgctgccatgtgagatgtggctttcaccttccgccatgattgtgaggccttcccagccacgtagat

SEQ ID NO: 5229 - DNA, 574 bp, Homo sapiens
  I.5229 (N28639)
  misc_feature (375)..(375): n is a, c, g, or t
  misc_feature (391)..(391): n is a, c, g, or t
  misc_feature (414)..(414): n is a, c, g, or t
  misc_feature (533)..(533): n is a, c, g, or t
  misc_feature (542)..(542): n is a, c, g, or t
  misc_feature (566)..(566): n is a, c, g, or t
ttccaaacttttaaaggtttctcatattctagaaactcaagagttgtttgtataggaaacaggggcctggagttattggtgcatattccaatggcctcataccttctttctagaattttgttttatgtaatgcagtttaagaagatgcactttcatcatggtgactaacccaaatcctgatagtgacttttgggacatgatataaattttgtatttatgtaaatataagtatacattcatataatataaaacatattagatatatattattttgcatatcagtataaacattaatatatatttatatagttctattccacagtgatgaagttttacaaggatggagcaagaagtgccagaattaaaatttccaanagtgatcagtataatntttttagtaattaaggttgcagnaaatatggatagtaactggcaacataatgctctaattattccctattagttttttcaaagaatggcaacaactaaatatgcctctgagtggctccccctacctattttggccttttttnccaaattgnagtccttaaggggttcaattaccnattaacac

SEQ ID NO: 5230 - DNA, 374 bp, Homo sapiens
  I.5230 (N28295)
  misc_feature (155)..(155): n is a, c, g, or t
  misc_feature (165)..(165): n is a, c, g, or t
  misc_feature (176)..(176): n is a, c, g, or t
  misc_feature (182)..(182): n is a, c, g, or t
  misc_feature (205)..(205): n is a, c, g, or t
  misc_feature (213)..(213): n is a, c, g, or t
  misc_feature (214)..(214): n is a, c, g, or t
  misc_feature (236)..(236): n is a, c, g, or t
  misc_feature (315)..(315): n is a, c, g, or t
  misc_feature (331)..(331): n is a, c, g, or t
  misc_feature (363)..(363): n is a, c, g, or t
  misc_feature (368)..(368): n is a, c, g, or t
gtctgcctcccaaagcactgagactacaggagtgagccactgtgcccagcctactctggttttagtgcattcaagaggaacaaaaaaggaagaaaatcactagtaaatatacctctttctggttagagtggatgtttggaaattatatatatatnatataatacntatcccccatntacccnaccatgtacatacatgcacacanatatatgnntttttgattataggatagtatnccaaaactgagaaatattatggaattaacagaatttagtaaggcagataagtagtaggtagaaaaatattaattttatnttccagcaggaagcantgtgaaaaattagacaacaaggcaaacatttncattnaaaata

SEQ ID NO: 5231 - DNA, 477 bp, Homo sapiens
  I.5231 (N27817)
  misc_feature (3)..(3): n is a, c, g, or t
  misc_feature (376)..(376): n is a, c, g, or t
  misc_feature (473)..(473): n is a, c, g, or t
tgnaatgaccgctactgctccttcacagtatatttacatgagcttcctgtggacatcagcaccatttaaaattaagtttcatttcacttcttctaggctggaacacagatgtggggctggaagtggagcagccccttttagccatgaggccaaagccacatgctaaggatggtgaagcaggggatagaaagagcctgtgtctttgctgacttccttaagccacggcaccagcctgggcctgcctactctggacatctaaatgtcaggagctaagaatcaagtcagtctagaggtgttcgttgccatgtggagagatccttcccaagaagaaagatgctacaaagtgtcctggaaatcctctttgcccatccagatncaccctccctagcatgctctgtacctcaggaagctgcttttcatgggttccacataaaccaggctcctgtaccctcccaggataggtccatcctatngggt

SEQ ID NO: 5232 - DNA, 393 bp, Homo sapiens
  I.5232 (N27704)
cagagcagcctttgaatagactatgtcctagtgaagacatcaacctccgccttaagctatgtatgtatggaggccagtcgcagctttattatgcagacacacaagtggtctggacatgagggtacagtttctgcctaccaagacactacttgcactggatcttacgcaaaaaagaaccagaacacacagtgtggacaactgcccatatattctatctagattaggagagggtcctggctaggattttagtggtaattcctagttacattcaacaagtataaagattatagagcttattttatgaactataaactataatttaatgcaaaatatcctttttatgaatttcatgttaatattgtgaaatattaaaataattccgcaatagttgag

SEQ ID NO: 5233 - DNA, 217 bp, Homo sapiens
  I.5233 (N27492)
  misc_feature (162)..(162): n is a, c, g, or t
cacaaaaccaaacccatcagaagtttgcaggacgtccttgtttagagctgggaaataaaccacgaaacagcgcaaaggagagtccaggcctgccaatgcttccgcgaactcctcgccccgacctcatccttctccagctcctacctgcaggcctcaggctcnctgacctccaggctccttaccctcccgctggcctctgctctacactcatctttgt

SEQ ID NO: 5234 - DNA, 410 bp, Homo sapiens
  I.5234 (N26975)
aagtggggaaagagtggtacaacgggcaaccaactgtgaataaccaattgagacaattcactaccttgggaccagccaaagcttgctttttaaagtaaccttgaaatacataccatattccatattatacaaagctttacatattgctcttagttttgaaatagaaaaagaacttttgaagagaataagaatcataaaactaggtctaaaaattgtaacacctgttcttcataaaacatatataactttatttacattaatactttatttaggaggttcaagcctttaacataacccttcccattaatctataactgtaaagagttcatggtatatttcctccattttctggcacatatggtattaatggtaaaaaatttgggccctggccggtatttttttttaggccc

SEQ ID NO: 5235 - DNA, 339 bp, Homo sapiens
  I.5235 (N26361)
  misc_feature (274)..(274): n is a, c, g, or t
  misc_feature (284)..(284): n is a, c, g, or t
  misc_feature (292)..(292): n is a, c, g, or t
  misc_feature (319)..(319): n is a, c, g, or t
attttccttgagaaaattcctgactttaaaaataacccttatataagtacaagtgattgtgacaaatgacgtaaaaatggcattcatgatgtctgaaacaagcctaaatagaattcaagattagactaaatgattttcacaaagcacattcaaggttttacattctatgattgaaaaaaattttttgaaaactttttatttcattctttcctgtaggattttgctacaaataactttgggaatgaataaagtggaatggtaactttccagtggntcagaattgnattagacntcttgtgactgtgatgtttggtttccnttgaaatatatgaagtgaga

SEQ ID NO: 5236 - DNA, 610 bp, Homo sapiens
  I.5236 (N25990)
  misc_feature (185)..(185): n is a, c, g, or t
  misc_feature (523)..(523): n is a, c, g, or t
  misc_feature (536)..(536): n is a, c, g, or t
  misc_feature (591)..(591): n is a, c, g, or t
gcaacagcaaaatatgcttgctttaaccaaaaaaaaaaaaaaaaagcaaccatggcagagatgggtgagttgggagagcatgaacatcatcaactcttactcctgccaagacggagcacaggacatgaggaccccgtccagggcccacggggagccttgagttcccaccccacgaaggcctgtgncaatcacctcttcccctgagaatgctgcatctcaaaaccccagccggcgcaggctgccgaaatcaacagaacatgcatttcaaaccgggtttccactgaaatgctccctacacacagacgggcgaaaattaattttctttcttcctgcgccacaaaagcagattaaaatcacgaacagtggggacgagtggggggaagtggagggcttcctcattgagggagacccctgcccgggaggtttctctccctaacaagggatggcctcagcgtttgaaacgccctgctgcaggcataaagcccgacccaggagaaggccttgagaaaaaggacgccgctgnccttcccaacggnttaaagctggtatgtactttgctccggggtgattcaacagctagtcaagacgctntcaggaacagattgaatta

SEQ ID NO: 5237 - DNA, 389 bp, Homo sapiens
  I.5237 (N24397)
  misc_feature (170)..(170): n is a, c, g, or t
tcaagaccagcctggccaacatggtgaaagcatgtctctattaaaaatacaaaaattagccgggcgtggtggcgggcgctgtaatcccaggtatttggggggactgagacaggagaatcccttcaacccgggaggtggaggttgcagtaagtcaagatggcaccactgtntccagcctgggggacagagcgagactccatctcaaaaaaaaaaaaggaatcggacgaagaaccacaggatgttgaagacaactgtctgaagtatttgtgagggacagcgatgtggccctctgtgttaagaataacgtgtcctgctttggcagaggagaagaaaatagccactgcccgctttcaaggcaagatcgaccttttctgttttgttttgttttt

SEQ ID NO: 5238 - DNA, 490 bp, Homo sapiens
  I.5238 (N22831)
  misc_feature (8)..(8): n is a, c, g, or t
  misc_feature (481)..(481): n is a, c, g, or t
caattcanatcaagcagcatttattaaaatctgatcattataatggattataaatatgactaagacatcacctcaaagtctcacaatatgctaatacatacacaactaattggttacgtaagtcagactactatacagaactcacacatgtaaatacagtgacaaacgatcagaacaaaggaactcttacttcttctgccaattgaacaatggtgaaaaaaaccagaaggagtcagaatatgccagaatgtcaatggtaaaaaactcatactttattatggggaaactgtagagaaaaaacaactcttgagtttctagaatatgagaaatctttaaaagtttgaaaatgttttcagtaatgctatgacctgaccatatctgtgttttggaaggataactctgggcactaataaggcagggtgaatagaagaaaaaagactagatatgagaaaacttattggaagaccatggcaatagcccngggaaatgg

SEQ ID NO: 5239 - DNA, 364 bp, Homo sapiens
  I.5239 (N22563)
  misc_feature (150)..(150): n is a, c, g, or t
  misc_feature (190)..(190): n is a, c, g, or t
  misc_feature (208)..(208): n is a, c, g, or t
ttttttataagcagaaaaaaactttatttctatcaaattgaaaagtatgaaccttcaagcaagataatcaacataatcaataatacaattaacagttaggatagcatatacagatcagactggaggtttagatacttggaagcacatacnccaaaattaagagggccagcaactgtcccaccgaggaaangcactctgactcatcatnaacacacgacttctgggaaacttgagctgacatttcacaggacagtaaaccaaagagacaggttgtcattgggttatagaacctgatctgagcttgagagggatcacagtgaaatgccattgtaactcaacaatttccccagagatctgttcatct

SEQ ID NO: 5240 - DNA, 348 bp, Homo sapiens
  I.5240 (N22551)
  misc_feature (212)..(212): n is a, c, g, or t
  misc_feature (269)..(269): n is a, c, g, or t
ttttttttttttttttttttttttttttttaaagagatggagtcttgccatcttacgcaggatggtctcaaactcctgggctcaagcgagtctcctgccttggtgtttcaaagtgctgggattacaggtgtgagccactgtgcccagccaacttctcattttaaaagaatttcagatttaaaaaaattgcaaaaatactgcgagagaatccncatatacttttcacccagatccaccaaatgttaacatcttaaataaccatattatgntgatcaaaaccagaaatactattaactactctacagacttgactcaaaattcaccaactgtctgcctaattttagtcca

SEQ ID NO: 5241 - DNA, 583 bp, Homo sapiens
  I.5241 (N21216)
  misc_feature (103)..(103): n is a, c, g, or t
  misc_feature (452)..(452): n is a, c, g, or t
  misc_feature (499)..(499): n is a, c, g, or t
  misc_feature (520)..(520): n is a, c, g, or t
  misc_feature (547)..(547): n is a, c, g, or t
ataaacaatccactttatttagcacaggccttcaagaaaacaccagacactgacatgatgaattgctctcttgggagcacgggtgggtgagactggggaggangatgggaagtgagaacttggtccgtttaccggaagacagcagcacacagatctgcttgcaccctgtacctcattgtctaggataacaggattccacagccttgccctgatagaagcaactcggcaattaatgggttgatggcccacagtccttccaaggaaaacccatgtttgcttgctgcagccacgtggacaacaggcaggctcaccacagtgcctgcaggccttcctggtctctcaatttcactccttcaacaagcgtttagcagatgcctcctccttattaccttctgtattaggtgctggggatacactgggagaaggttcttgttcttaaggaacttctgatnctacagcaagccagtgatgaggggagaagtggtagaatgggggggantcacagcatgagcacacagangagggatactcactatgggggcaggantggaagctggtgcctagtcgtcagcattcattctct

SEQ ID NO: 5242 - DNA, 436 bp, Homo sapiens
  I.5242 (N21176)
  misc_feature (398)..(398): n is a, c, g, or t
gtagtttcccaagtttattgtaagtggttttaagttaagtctcatccaaacaagttatcacacagcacttaaccaagccctgggatttactgtcttgatgactacatggctttgcacagtctgaggtgcttcagtgtgcaaggcagcagctgggggggaggaggggggtcttcacagggacagctggcaagagacttcctgaggcacatcagctacgttggtcaatttagggcacggtctggttctgcagctttgaaaggtggattctttctattagcacactttacaagagggattgtaaaggattaactcagtcaccagaaacgaaacaccacttcagaaattcagagacctctgatcaacagaacagacatttggggcttaactgctaaagcagntacctacttggggaaaccatgggcattctgctgcctgg

SEQ ID NO: 5243 - DNA, 587 bp, Homo sapiens
  I.5243 (N20948)
  misc_feature (12)..(12): n is a, c, g, or t
  misc_feature (80)..(80): n is a, c, g, or t
  misc_feature (82)..(82): n is a, c, g, or t
  misc_feature (85)..(85): n is a, c, g, or t
  misc_feature (229)..(229): n is a, c, g, or t
  misc_feature (448)..(448): n is a, c, g, or t
  misc_feature (564)..(564): n is a, c, g, or t
  misc_feature (570)..(570): n is a, c, g, or t
  misc_feature (578)..(578): n is a, c, g, or t
aaagtgaaagcnagtttattaggaaagtgcaggaataaaagaatgcctactccataaacagagcagccccgaggctgtgngnctngcccatttttatggttatttcttgagtatatgctaagcaaggggtggattattcatgcctcccatgtttagatgatctagggtaactttctgatgttgccatggcatttgtaaactgtcatggtgctgctgggagtgtagcagngaggatgcccagaggtcactcttgtcgccatcttggttttggtgcgctttgactggcttctttactgcaactgtttcatcagcaaggtctttatgacctatatgttgtgccaacctcctatctcatcctgtgacttggaatgccttaaccgtctgggaatgcagcccaataggtctcagcctcattttacccagcccctattcaagatggagttgctcnggttcacgtgcctctgacatttccaataaggttacattccgaaggggttatacttcaccatatggaatttggggtgatacaattcaaccccaatgtccttttttttcccccctcanctctcngggctccngctgggtac

SEQ ID NO: 5244 - DNA, 547 bp, Homo sapiens
  I.5244 (N20862)
  misc_feature (1)..(1): n is a, c, g, or t
  misc_feature (3)..(3): n is a, c, g, or t
  misc_feature (24)..(24): n is a, c, g, or t
  misc_feature (379)..(379): n is a, c, g, or t
  misc_feature (396)..(396): n is a, c, g, or t
  misc_feature (425)..(425): n is a, c, g, or t
  misc_feature (459)..(459): n is a, c, g, or t
  misc_feature (509)..(509): n is a, c, g, or t
  misc_feature (530)..(530): n is a, c, g, or t
ntnaaaaaaaagtgtttatttccnttattttaagattcagtaggatagccaaattcatagagaataaaattacatgaaagagttacaagctcactgttttaaagacttgacatttttcatttagttttaattaacagtaataagtcacctcctgtttttcaatgttcaccaaaaaaagaaacatagaatagggggaaaacatgcttatatagccaaggtacagatccagatgatgtaacctttttagtattcgcatgacttgaaaactgggcagatcaatagataatcgaagtgctttatctgaagggagagggtaaagacagtgtgaccaggtttgttttcagggctgccgaatgagcctcaccttaacagtgtccangggtaattcgctaaccntaacaaagatgggaagaagtgagtgctcngatgtcttctgctgggctctccataagtactggnaatttttttttataaataaaaactgggaatatatatgtacagttgtaagnatttcccccttttaattttgnaatccagagcctgattg

SEQ ID NO: 5245 - DNA, 266 bp, Homo sapiens
  I.5245 (N20277)
  misc_feature (1)..(1): n is a, c, g, or t
  misc_feature (179)..(179): n is a, c, g, or t
  misc_feature (231)..(231): n is a, c, g, or t
  misc_feature (260)..(260): n is a, c, g, or t
nttttttttttttaaagctttatgcatttattaaaatatacacattttgttaaatttagaattttcccttagtatcttgataaatcaatatattgtcaacaccacacatttgaaaataaaacacatttcataatacatctgcatattatttctttcttcatgatacactacattgtacngcacaccaatgggaattaaaaaccacaaaacgaacaaactttaacaaatacngcaatttcataccaaaaaaagatagcagngaacaa

SEQ ID NO: 5246 - DNA, 424 bp, Homo sapiens
  I.5246 (H99483)
gagatggagcctcacactgttgcccaggctggaaagactggcaggatcttggctcactgcaatctctgcctcctgggttcaagtgattcttctgcttcgacctcccgagtagctggaattacaggcttacaccaccatagctggctgatttttgtattttcagtagagacagggtgtcaccatgttggccaggctgatctcaaacttgacctcagatgatcctcctgcctcagcctcccaaagtgctgggactacaggtgtgagccaccatgcccggccttattgtcattattttgaatggaatgttttcttgttgtctaatttttcacagtgcttctgctgggaagataaaattaatatttttctacctactacttatctgccttactaaattctgttaattccataatatttctgagttttg

SEQ ID NO: 5247 - DNA, 443 bp, Homo sapiens
  I.5247 (H99394)
  misc_feature (1)..(1): n is a, c, g, or t
  misc_feature (358)..(358): n is a, c, g, or t
  misc_feature (388)..(388): n is a, c, g, or t
  misc_feature (394)..(394): n is a, c, g, or t
  misc_feature (415)..(415): n is a, c, g, or t
  misc_feature (435)..(435): n is a, c, g, or t
  misc_feature (441)..(441): n is a, c, g, or t
nttgattctcaagtccccaatcttatttttattttgcattttaaagaaagcagcgtaatatataaatggttttaattttgtttaacaagatttcaattattggtagagtacactttagggaggctagctaaatgtgtaaatggaagaaaatatactgaagaataaagataaaatcaccaggtgacattacatatttaagtaagttgaaaatgtaactcattttaccaatattgttatttacacagaactttaaaatcattcacacattatatatgataaagtatatataaaatttaaggaaattattttattatagagaaagacgtttaaaaattttcacccacaattaaaattagcncctatttattattttttggagatggagtcncgctcnggttgcgcaggctggagtgcngtgggtgagatctcggctcnctggcnac

SEQ ID NO: 5248 - DNA, 453 bp, Homo sapiens
  I.5248 (H99362)
  misc_feature (416)..(416): n is a, c, g, or t
  misc_feature (429)..(429): n is a, c, g, or t
tgactttttaaatgattttattagatagcttaggagggagaaaaatagtttacaaaaaatattttttgctctttaaaactgatgatcaaccatagagaatgatataaaacaagggactgtttacttgccgtatctttaaatagtccaagttcatcttttatttcaagaaaagtaaagattaaatgagtgtccattctctaatagtatatcatagttctgtggtttgatggcacaaacaaagtgaaatacttaccaaacattattgtcaagagggcaattggcatcacaaacaatccaaccagcaaatcagccaccgccaaggacattagaaagtaattagtagcatactgcagcttcttctccagtgaaacagccagaataaccagggtatttccaccaattggggggtattatcnccatggagtatcngaagagctggcccagtgcagttta

SEQ ID NO: 5249 - DNA, 438 bp, Homo sapiens
  I.5249 (H99238)
  misc_feature (383)..(383): n is a, c, g, or t
  misc_feature (400)..(400): n is a, c, g, or t
  misc_feature (418)..(418): n is a, c, g, or t
gcattctcagcccatgctgctttattgctaaaatatatatatacacaggtgcagacttccaacttttttaacagttcctttttacatcaaagaattaaatttcttcaaaaaccccaaagatgcatagattaagaagcaagctgccttttgtaatacttaaaataatattcaatgaaactcttaacgttatacaccaatggtgcaatggagaatatggaggacagcaagtaaacacagtgagcaactcttattcttacaaggcagtaggtaaagtataatgtgaagggacagtctaagataatctttctgggttataagaaatgggtccgggttttgtgataagtgccaaagactggttactggtttaaaggattggatggatnaatggtattacccagantcccctttcttaatcccngggggagaaaaataattttt

SEQ ID NO: 5250 - DNA, 402 bp, Homo sapiens
  I.5250 (H99148)
  misc_feature (173)..(173): n is a, c, g, or t
  misc_feature (176)..(176): n is a, c, g, or t
  misc_feature (369)..(369): n is a, c, g, or t
ccttcttttacctttatattgatatttaaaagaaaaagaacatgatggatacgggaatgggggaagggacaacggttctacgattaacaacaggaactgataggaaccagaagctccaaggatttaaaaaaaaataaaatatatatttatacatttatatatatatatatatntcncgttatgtatgtgagtcccagacaagcaggaagcagcagcaagaagcaactagcacacagaaacacccgtgcgtgtgccttacacattcaagcaaagccattcctctagctaggacgcagcaatccccaccctcccacctacgggcaaaagagaacagctgaaaacaaacttccctcttttaagggccactcngtaattttggtcctcatgggccagggaaaaaga

SEQ ID NO: 5251 - DNA, 453 bp, Homo sapiens
  I.5251 (H99099)
  misc_feature (50)..(50): n is a, c, g, or t
  misc_feature (451)..(451): n is a, c, g, or t
ggggttggggacaaaaggccgggcgggggctgggggtctcagggaggggncgggcgtgtgcggccggggcgggcttacgcggaggacaaacagctggcgagtgtcagggtctggccgcctccccgctgcccacacgcacctacccgcgcccgggacgcgcattttccttctctcgccacgagttcacctgggactttgcaaataactgtgcggtgggagctgcgctcaagccttgtcatttgctgagggtgggtggcggtgccaaggaagtgaacttattttgttccttcacaaagactggaccaggcggtgcctttcacgcgaagaggttacgaccacggacacaacctcctttgatgcattgtgcgaggcagcacctcgggccccggacagtaagtcatttcacagaaaatgcaccgccccgagtgtcttattgctgtgatgaaatggnaa

SEQ ID NO: 5252 - DNA, 448 bp, Homo sapiens
  I.5252 (H98648)
agttttaaataatttcttaatttatatgaaataaagacaacccatatagtagacttacaaatattctatttcgcgttatattcaagactaaacatcttccaaaccatattcatgaaatggtttgatgatatgtgctttggcagttttcaagaaatatcaatcaaaccgtaattaaatttcaacgtatcggctaaacatccactgagcacctcctcttgcagttagcattagactaagtgcttaaggacaagtagtttgatgcaataaattaagaaatacatatttaagacttatattattcacagaattcttggcatagttatttaagttcctcctgttggagaaacttgaggtttgtgttttctttctttcagtcccaaaagctccgttttgagttctccaccgctttgggtggaatttcaggtattggtcaggtccggtcggtagt

SEQ ID NO: 5253 - DNA, 248 bp, Homo sapiens
  I.5253 (H98546)
gttgccaggctggagtgcagtggcatgatcttggctcactgcaatgtccgcctcctgggttcaagtgattctcctgcctcagcttgccgggtagctgggactaccggcatgtgctaccacacccagctaatttttgtatttttagcagagacagggtttcaccatgttggctaggatggtctcgatctcctgaccttgtgatacacctgccttggccacccaaagtgctgggattacaggtgtgagcc

SEQ ID NO: 5254 - DNA, 323 bp, Homo sapiens
  I.5254 (H97804)
  misc_feature (30)..(30): n is a, c, g, or t
  misc_feature (314)..(314): n is a, c, g, or t
taagacactgtctttttaagagactgacanagaaagaactatccattaaaagaataatgagattccaaatattccacgaatgatcggctgttgctttaagaaaggagtgagcaaacaaatttacaagaaaaaaagaaacaaccccatcaaaaagtgggcgaaggacatgaacagacacttctcaaaagaagacatttatgcagccaaaaaacacatgaaaaaatgctcaccatcactggccatcagagaaatgcaaatcaaaaccacaatgagataccatctcacaccagttagaatgggcatcctttaaaagnccgggacca

SEQ ID NO: 5255 - DNA, 393 bp, Homo sapiens
  I.5255 (H88923)
  misc_feature (38)..(38): n is a, c, g, or t
  misc_feature (45)..(45): n is a, c, g, or t
  misc_feature (50)..(50): n is a, c, g, or t
  misc_feature (52)..(52): n is a, c, g, or t
  misc_feature (53)..(53): n is a, c, g, or t
  misc_feature (179)..(179): n is a, c, g, or t
  misc_feature (183)..(183): n is a, c, g, or t
  misc_feature (250)..(250): n is a, c, g, or t
  misc_feature (297)..(297): n is a, c, g, or t
  misc_feature (310)..(310): n is a, c, g, or t
  misc_feature (326)..(326): n is a, c, g, or t
  misc_feature (359)..(359): n is a, c, g, or t
  misc_feature (373)..(373): n is a, c, g, or t
  misc_feature (388)..(388): n is a, c, g, or t
atcagaatccatggaggccagaaggcagtgggatacanatttttnatttntnnattttttttagaaagacttaaattttataaacatccaagaaaaagggagggagaccaagtttaataaaattaatagatttgttaggaagaataatcaattttccataccccctccaagccattgtnattngatataaatcacagttttgttaaaggaactttaagaataacttcgtcactaatgacacatcattttnggcaaacaggaaaaatactaaattcagaggatcataggtttctgcanagtcagctctgangggccacacaagaggntggtaaaggatttggcaattgagaagtagtacnatttggatagggcntacacatgggaatgntggaa

SEQ ID NO: 5256 - DNA, 342 bp, Homo sapiens
  I.5256 (H94648)
gaaaacatagtttattttctcattcaggcttttgtagtttatttttacaaaatagcagacaaaatttggttctttatattaatagagaatatgtaagacatatcgaaatatatatatagcacttaagttataaacacacagcaaattcagcatcacttaaacagcaaccatattttcacataatcaggattgcataaggagataaacattatttttagcctaaatatataaataatctttgatgctttatgtcaattagtatttataaaagctagtctaaaaactaacaccacctacaaaagttgattgagctttaggctacaaccttgccatcatgccata

SEQ ID NO: 5257 - DNA, 385 bp, Homo sapiens
  I.5257 (H93609)
ttaagaagcagtcttgttctgtcacccaggctggcatgatctgggctaactgcaacctccaccacacgggttcaaagtgattcttgtgcctcagtttctcagcctcccaagtagctgggattacaggtgtgcaccaccacacctcgctaatttctgttatttttagtagagatggggtttcactacgttagccaggctggtctcgaaatcctgacctcaagtgatccacccagccttggcctcccaaagttcggacattacaggtgtgagccaccatacccagccagaacagctttatttttaatagacaaaaattgggagacaactcaaatgtccatcaatatttgcatgaatgggataagtaaactgtgttatatccatacaa

SEQ ID NO: 5258 - DNA, 439 bp, Homo sapiens
  I.5258 (H92912)
  misc_feature (1)..(1): n is a, c, g, or t
  misc_feature (403)..(403): n is a, c, g, or t
  misc_feature (429)..(429): n is a, c, g, or t
ncttagcatgtgagagtccagttggtcccaattctccagaatacatctcaggggcgtttctgccttggggggaacgtttcccattgctttggagatcccttcgtggtcaccaaatgttactgggggtccttactcccagagctcccgatagtggcaggctgcttccaagacggtggcaagcctcgtgttctctgacctggggttcttggcctcacggattccaaggaatggaatcttgggccatgcggtgagtgttatagctctattagaagccgtgggtcacggaagagaaccgtggaacccagtgactagtgttcagctcgattaggacgaacccaggctcttagcgtgcaggaacaatgggcaagccttcagtccgattcaggagttggcaaagggcgcnccccggatcaggagcacagcagacancccgcaggat

SEQ ID NO: 5259 - DNA, 420 bp, Homo sapiens
  I.5259 (H92791)
  misc_feature (5)..(5): n is a, c, g, or t
  misc_feature (20)..(20): n is a, c, g, or t
  misc_feature (33)..(33): n is a, c, g, or t
  misc_feature (36)..(36): n is a, c, g, or t
  misc_feature (42)..(42): n is a, c, g, or t
  misc_feature (44)..(44): n is a, c, g, or t
  misc_feature (45)..(45): n is a, c, g, or t
  misc_feature (51)..(51): n is a, c, g, or t
  misc_feature (62)..(62): n is a, c, g, or t
  misc_feature (66)..(66): n is a, c, g, or t
  misc_feature (146)..(146): n is a, c, g, or t
  misc_feature (368)..(368): n is a, c, g, or t
  misc_feature (374)..(374): n is a, c, g, or t
  misc_feature (384)..(384): n is a, c, g, or t
  misc_feature (390)..(390): n is a, c, g, or t
  misc_feature (398)..(398): n is a, c, g, or t
ggatncagcagggtgtctgntgtgctcctgatncancgaggngnncattgncactcctgatnggantgaaggcttgccattgttcctgcacggctaagagcctgggttcgtcctaatcgagctgaacactagtcactgggttccanggttctcttccgtgacccacggcttctaatagagctataacactcaccgcatggcccaagattccattccttggaatccgtgaggccaagaaccccaggtcagagaacacgaggcttgcaccgtcttggaagcagcctgccactatcgggagctctgggagtaaggacccccagtaacatttggtgaccacgaagggattttccaaaggcaatggggaaaangtttcnccccaagggnagaaangcccctgnagatgtattctgggagaattgg

SEQ ID NO: 5260 - DNA, 389 bp, Homo sapiens
  I.5260 (H92525)
  misc_feature (64)..(64): n is a, c, g, or t
  misc_feature (97)..(97): n is a, c, g, or t
  misc_feature (140)..(140): n is a, c, g, or t
  misc_feature (362)..(362): n is a, c, g, or t
  misc_feature (380)..(380): n is a, c, g, or t
  misc_feature (385)..(385): n is a, c, g, or t
catgctgaagtgcaatggcatcatcatagctcactatagcctcaaactcctgggcccaagcaancctcccacctcatccggccataaaatacttttntgaaaaagtagttaaatatccttgattccattcataaattganagttcttcaagtattggtttgctttatcaagctatttcagccttaatatttctcctgtaacttgaaaaaagacataacagttttcctatttatccacaccctgatttaaacattgttattgaaaggtcacttgatggatcagagaattatttgttggctaagccactcatccaaagactctaaacctacacagtccaatgtgatagctactaattagtttcnaatcacactaacgacatnccagnaaat

SEQ ID NO: 5261 - DNA, 340 bp, Homo sapiens
  I.5261 (H92524)
  misc_feature (11)..(11): n is a, c, g, or t
  misc_feature (15)..(15): n is a, c, g, or t
  misc_feature (25)..(25): n is a, c, g, or t
  misc_feature (304)..(304): n is a, c, g, or t
atctcggcacnagtnctttgaacanatattagatattgctaaggaaaataggcatatttttgagaaataaatattttctcttaggccagctcttttagaattgctagactagtaatctgtcttctgtgcttttactagctattttatagagatgcttagaaaataccagtatttaaatacattttaggacaaattttggttttatgggtttatggtaaaaaattaagtatctttaacacttagtaaatgaagtagacatctgtttatgtttaactggtttgtcatttttgtaatgcaagccttncaaaaacttttttgaggcctaagggaaattaaatgt

SEQ ID NO: 5262 - DNA, 230 bp, Homo sapiens
  I.5262 (H92345)
gcttataccttttaagttgtataatattgtaccttactttcatcttttctaaatgccctgatgcctcatgtgtgaacatttgatatactcaataaaaaaggttgatgccagtacattttttttccctaaatgcaagcaattcaagactttgggaaaagctggctgtagacgtttgtcttacttatactactactggcaaaacaggaaaaactttaaggattactatcctc

SEQ ID NO: 5263 - DNA, 390 bp, Homo sapiens
  I.5263 (H92191)
  misc_feature (310)..(310): n is a, c, g, or t
  misc_feature (319)..(319): n is a, c, g, or t
  misc_feature (338)..(338): n is a, c, g, or t
  misc_feature (362)..(362): n is a, c, g, or t
gacaatgctttatcttgaacttaactttgtagtcagttctgaagaagagtttagtcaaaacattaacttcagccaattttatttgtttcttgcctattcttgtctgtaaggaagcctacaaaaaagacttttatataacattctatcagggaaatgtttgtgtgtcattgagcctatataaagattaaatatgatactgtagtaagcccttaaatagcattatttctgttttgtgtagcagatgtattttgtagtcctcataaaataaatagccacatttatgtattgggcttcacatatttgggctccngagtaaatntactattgagaaaagatcnggaacaaccccatgggcaacatanaaaaaccatttaaaaaggcattttttcc

SEQ ID NO: 5264 - DNA, 392 bp, Homo sapiens
  I.5264 (H91756)
  misc_feature (13)..(13): n is a, c, g, or t
  misc_feature (388)..(388): n is a, c, g, or t
caacagcaaaatnaacaacttcacctgagcccttacctccaaggaagtgccacaggggaaccaaaggcccttaatcattaaaaaaaactttagagatgctggctgagcattcagtgagaacatggatgcatacacagaacctacatcttgtcatctctgctcttcgaggaatggagctggagaggcagagaagcaatgaagccgaattctgagtagtatactctgatgaagaggatattttacaagcatagaaaaaggagggctccagtcttcaaagaaccagagcatgggtaccaaagcctcccagagctagttctggtcccagctcagccacttgtctgtttgggtgactattagaacttccagatccaggtgggcttcttttccntggg

SEQ ID NO: 5265 - DNA, 437 bp, Homo sapiens
  I.5265 (H91663)
  misc_feature (281)..(281): n is a, c, g, or t
  misc_feature (398)..(398): n is a, c, g, or t
  misc_feature (433)..(433): n is a, c, g, or t
gaaactcaaagaattcctagagtatccagagaaaaaggcttgaagactgtgcagccaggaacaacactgtaaattccactgcaggattcattcattgaggacaccatagcagccatactgcacctggacactgcagctcacaccatctgcaccatcagcaagtgttcttggatgccgatgctagaaccactggccctgctgcctctgggaactggatgtagctgtcattgtgtcttaaatctgccagaatggatttggcatgttcctttctttttgtcacnagcagattcaaagaccatctgattggtggaatcttgatcacgtgtccatatctagtggcaagggagactgggaagtccagtgtcaggaatttcagcttctacaggaggagcagagcnctatctcaaaagaggatttccttaaccagaagctnagtt

SEQ ID NO: 5266 - DNA, 353 bp, Homo sapiens
  I.5266 (H90979)
  misc_feature (348)..(348): n is a, c, g, or t
taaatttattcaattttattgtgttttttaaaaagcagcttatgccacaagcacaaatgagctttctcagttttcaactcaaaatattatatgaaaagatggatatgtgtgtctgtgtgggaggggtgtgaattggatgacggttcttagggtattacagaattcagccagtggtggaagtctaaggttcttattgaatggttcaacttctttatcaaagaagttccatgaagatctttgataacctgtttaaatgtacagaatttttcaaaagccactgtgaaaagcagtaccataaagttattttttaactaaaatctgtaggaaagtgtttccaaaagagttccnttttt

SEQ ID NO: 5267 - DNA, 338 bp, Homo sapiens
  I.5267 (H90817)
  misc_feature (254)..(254): n is a, c, g, or t
  misc_feature (285)..(285): n is a, c, g, or t
tcacgaccactaaaagttgacatttgcattggcaataacccccccccccccgcttttttttttaatggcagagtttcgctcttgtcacccaaaccgaagtgcagtggtgtgatatcggctccttgcaacctccacctcccgggttcaagcgattctcctgcctcagcctcccaagtacctgggattacaggcatgcaccaccatgcctaattttatattttttttagtagagacagggtttcaccatgttggtncaggttggtcatgaactcctgacctcaggtngatccacccaccttcaggcctcccaaagtgctggggattatagggcgggacat

SEQ ID NO: 5268 - DNA, 314 bp, Homo sapiens
  I.5268 (H90766)
  misc_feature (2)..(2): n is a, c, g, or t
  misc_feature (6)..(6): n is a, c, g, or t
  misc_feature (8)..(8): n is a, c, g, or t
  misc_feature (38)..(38): n is a, c, g, or t
  misc_feature (160)..(160): n is a, c, g, or t
  misc_feature (215)..(215): n is a, c, g, or t
  misc_feature (280)..(280): n is a, c, g, or t
angtgntnttgctagtcaacacatattttattgaggancaaacactgttctgggcactgcagataaaacaatgacaccaagtccttgccctcaaagtacttacttatctacataaataaaatagtggttctaagggtaactctgtgataacaccattttnctcatttgcactccagttgcttttttgtgtagggataaaaagggatttattgggncaggcgtgggtggctcccgcctataatcccagcactttggggaggctgaggtgggtggatcaccngagggtcaaggagttcatggaccaaccctgaccc

SEQ ID NO: 5269 - DNA, 382 bp, Homo sapiens
  I.5269 (H90692)
  misc_feature (48)..(48): n is a, c, g, or t
  misc_feature (50)..(50): n is a, c, g, or t
  misc_feature (59)..(59): n is a, c, g, or t
  misc_feature (184)..(184): n is a, c, g, or t
  misc_feature (221)..(221): n is a, c, g, or t
  misc_feature (267)..(267): n is a, c, g, or t
  misc_feature (363)..(363): n is a, c, g, or t
  misc_feature (373)..(373): n is a, c, g, or t
aaatgcttgtggcattaatagtaaatcagaatcagacctccacctatntngtgccattncagcactaagccaaggagaaaaattattgaggaaattaatgcttcccttaagcacagtaggaacacgaagctaacatactgccgtataacctgatttcactggtattctttctgaaatttttgtntttctatttctattgcatattggacttcatggctaanacaaagtgcaattatgaggaggatgttttctcaaaatctgtagggnctggttgggtcacataacctttcagaagaaacattatctactgggatgacttagatgttattcaccaataggattatcaagggtttatctccaggntgttcattanttcactaag

SEQ ID NO: 5270 - DNA, 383 bp, Homo sapiens
  I.5270 (H90322)
  misc_feature (1)..(1): n is a, c, g, or t
  misc_feature (2)..(2): n is a, c, g, or t
  misc_feature (357)..(357): n is a, c, g, or t
nntttaaaattattaaggataattttattatcaggatattatcaggataatgatagcagaacactaaacgaaacacaagctagggccatatgtgactgcaggggtcacatgcccacaaacagctttgaactcatccccttctgggcctttctcaatcctgcccaccttcaaaatcaagtgaaaggcttctgctgggtggatgaggaagtgtccatggctctgagcctctggtctggctctgccccaggatgggccaaagtggctccctcataggcactttgtaggacttccctggaggaatggccttttatctcctattagtttataagtttcctaaggagaaaggggctacaactntcattcatcctgggaatcaccacatg

SEQ ID NO: 5271 - DNA, 345 bp, Homo sapiens
  I.5271 (H89843)
  misc_feature (27)..(27): n is a, c, g, or t
  misc_feature (31)..(31): n is a, c, g, or t
  misc_feature (275)..(275): n is a, c, g, or t
  misc_feature (342)..(342): n is a, c, g, or t
gtcaaaggtccaggagaaggaagcggntcanaatgcagtgatgagtgaagagccagcctctagatgctggaaggcccaaggaacaggttctcccctggagcctacagaaggaaccagtcctcggaacaccttcatttcagcccagtaacactggatttgagactccccacctccagacctatcagggaatagatctgtgttactgtaaaccattaagttcatgttgattttttacagcagcaataggaaactaaaacacaggacttgtagtcatnacaaagaagagtttgaattaaattcggcagttgactttaccccacaaacccaggggcaccagggacntgt

SEQ ID NO: 5272 - DNA, 343 bp, Homo sapiens
  I.5272 (H89150)
  misc_feature (269)..(269): n is a, c, g, or t
ctcctcctcgtccagtgtacagctgtagtgatggggaaacaggaaatcaattactaggttgccactaagtctacaaactattgaagaccagaatttacataaatcgtatgcagtcccacatctgacaggcttgcaaaaccttccacatttccatgagtaagcctatccaaatagtactacttctcaattgcaaatcataacaacctcttgtgtggccgtcagagctgactaagcagaaactatgattcctctgaattttagtatttttncctgtttggccaaaaatggatgtgtcctttagtggacgaagttattccttaaaggttcccttttaaccaaactg

SEQ ID NO: 5273 - DNA, 402 bp, Homo sapiens
  I.5273 (H86481)
  misc_feature (182)..(182): n is a, c, g, or t
  misc_feature (368)..(368): n is a, c, g, or t
  misc_feature (377)..(377): n is a, c, g, or t
  misc_feature (400)..(400): n is a, c, g, or t
aacttctccatttgcctctctcttcacacccaaatgccaaaggacacttttcctttcttttgtgggtagttgctccccaaggatctatgtgtttccaagactgtggcttcacatttcacgtataacttttttttgagacaaagtctcgctctgtcatccaggctggagtgcagtggcacagntctcagctcactgcaacctccacctcctcggctcaagcgattctcctgccttagcctcctgagcagctgggaccacaggcacatgccaccatacctgactaattttgcatttttagtagagatggggatttcaccatgtcggccagggctggtctcgaactcctgacctcaggtgatccacccgtnttgggcctnccaaagtgttggggattacaggngt

SEQ ID NO: 5274 - DNA, 328 bp, Homo sapiens
  I.5274 (H85939)
  misc_feature (178)..(178): n is a, c, g, or t
  misc_feature (249)..(249): n is a, c, g, or t
  misc_feature (268)..(268): n is a, c, g, or t
  misc_feature (270)..(270): n is a, c, g, or t
  misc_feature (271)..(271): n is a, c, g, or t
  misc_feature (287)..(287): n is a, c, g, or t
  misc_feature (298)..(298): n is a, c, g, or t
gcggtatatatattctgtaagggcaaatcctttctgccatacagcaaataacatatggggctgatacttcttaatgtattgcctagttttaacctggaaaaaaaataataaattctataaggagtttggatgacttcataatcaaacatttaataaatgttcaacaacaacaacaaanaacatgtaaaaccctgggccaaaactctgtgaaggataaaataaaagacataaatcacaaattatcttcangggcaacttttttaggtangnnaaagtatatctatctntccagggcttngatatttttgtaaaggcatgattactatgt

SEQ ID NO: 5275 - DNA, 333 bp, Homo sapiens
  I.5275 (H85865)
agcgcgtcctccgccagccctcgcgtctgctgcccccgccatccagttggtgcggtccatggcgagcgcatcatggcgattgaaggtggagagagaacctgtggagtacatgaacttatctgtattagaaaagtatctccagaggcagttggatttttgtcagctgttggggtgtttattatcttgatgctgctcctttttctctatattaataagaagttctgttttgaaaatgttggcgggtttccagatcttggtttcagaatacagtacaagggaagaattcacaaggataaaatttataattcctacatgggacaaagatgaggcatg

SEQ ID NO: 5276 - DNA, 431 bp, Homo sapiens
  I.5276 (H85701)
  misc_feature (329)..(329): n is a, c, g, or t
  misc_feature (363)..(363): n is a, c, g, or t
  misc_feature (389)..(389): n is a, c, g, or t
  misc_feature (396)..(396): n is a, c, g, or t
  misc_feature (402)..(402): n is a, c, g, or t
  misc_feature (422)..(422): n is a, c, g, or t
  misc_feature (430)..(430): n is a, c, g, or t
catttgtatagaattttaggaaatagggaactcttaaacactgggaaaattactccagttttgggaaatttactcaaaatttagatcttgtatgtactttgccctggcagttccaatctgtaggaattattccaacggagtagttggacaaattgaattttatgtataagtatgtttcttacatagaaaatctatagctaatttatcacccccaactacttatgtatcaattgatttaaaaaaatagattggggggtgttcattaaatattaatttaggtctatttaggtcaggttctggggctagattctgggagacacaaaagtgantaagacatagtccctgtcccctttaaagctcatnaatttcaagggttgggcggatgagtnaggcggncagcancacactttgaaagggcgctnttgtttant

SEQ ID NO: 5277 - DNA, 287 bp, Homo sapiens
  I.5277 (H85696)
gatttgcatgtgtatgatgtgtgtgcgtcggaccgcttctaggctactaagtgtcaatggaaaagaaaatgtattcaaaatacttaaatcaaaactagaagatggggaaaaaaagatttattctatacaaagccttgtctggaccactttagagagacttctatttttttaacccttctataaatatttgatggcacttgaaatattcctgcaataaaatgtgatttgtgtaaagaaaaaaagattttgtaatgtgaaacaaagaaagaaagtaatgtaattttcta

SEQ ID NO: 5278 - DNA, 250 bp, Homo sapiens
  I.5278 (H84972)
  misc_feature (186)..(186): n is a, c, g, or t
  misc_feature (199)..(199): n is a, c, g, or t
aaattgttttttaatctttttttgtgtgtatgacaaagagatactctaaatgttaatactaggttttaaattaagcaatggaaaatatttagaagtataagcacatacattatacatttgaataaaaaattaagtgtaaacatatcttggttaatagtatcttgttattaaatcatccaaaaaganaaatctgacagantagactccttcttttatttaagttgcttttaaaacttttgtttaactctgt

SEQ ID NO: 5279 - DNA, 257 bp, Homo sapiens
  I.5279 (H85536)
  misc_feature (102)..(102): n is a, c, g, or t
ctcctcaactgggagataagaaactcttcatcccagaatctttacaaactccccagtgctgtaataaacagtcagggttctcttgatataccactgactctnactttggacctctatctgagaaaattcacccaaaccattattggagtaaattaaaaactaatcttttcctaccagaaactaacatttatagagcacctattctaatatgacctacatattaggagtaggcaggcatacactggggaaggagaagg

SEQ ID NO: 5280 - DNA, 349 bp, Homo sapiens
  I.5280 (H84793)
  misc_feature (290)..(290): n is a, c, g, or t
  misc_feature (327)..(327): n is a, c, g, or t
  misc_feature (340)..(340): n is a, c, g, or t
tgtaaaatttgatatacacaaaagacaaaatgaggcatgtatatgtctcactagactacactacattagactgtctcagtagcttcaggggagtctggttaggtggtacaaatgctttgattggcatcccaaacctgtttctcaagctgctagttaagaagagaggtcagtagaatgaggtatctttgggttcctcagatttggaacacaccttaacaatagcgcctttcaaagtgtgttgctgtctgcttactcatctgcctatccttgaattatgagctttaaggggncagggactatgtcttattcacttttgtgtctccagantctaggcccagancctggacct

SEQ ID NO: 5281 - DNA, 144 bp, Homo sapiens
  I.5281 (H84789)
ttatcttaaaataatagcattggaaggacatatgatttaaacaatcaatgttggaaacagtggctttaggattattatctggctgcccctcaacaataacaagtgattcgatcgacattccttagccaaaaacaaaaggcaaaa

SEQ ID NO: 5282 - DNA, 380 bp, Homo sapiens
  I.5282 (H85155)
  misc_feature (13)..(13): n is a, c, g, or t
  misc_feature (360)..(360): n is a, c, g, or t
attcggcacagtnttttttttttttttttttgttccttccttctcagcctcctttcctaactttctttccccaaacatcaagtgttgagagagttctttggttataaacatcctgggtcctcttcacgtctcactctattctttctcaaagggatctaatctactcccatgattttaataagcacctagaagatagaattcccaaatgtttgtttctaattcagatccgaatacacacctgctaactcaacatcacatggatgtctcagaggagcctaaatttcactcatcatgactaaaaactcaacttaccattcattgtcatccaacataaatgtggcctatatcagtaggtggttncaacaaccacccagttatgg

SEQ ID NO: 5283 - DNA, 388 bp, Homo sapiens
  I.5283 (H84762)
aaaaaaaaagagttattgtgacatacacaatacaaataggtatatagtaatttgttaaaaccattagatcatgttcatataagcttggaacttatttaatgtctccaatgttgtgatggcttgcttttataatttatgattggttttgttatcaaaaaatcacagtttgaactgagagtgaaagtagaccaacgactccttttttcttatctctcatcttgctgtctgaagaactgttgaagcctccttgagatggctcttgtctgtcttgcatgtagggatgtaccttgtaactattgaagtgtccaattggaggagtgttcaagagtcagtcaagaactgtccatctgggctagagattttgtgtttcatccacttcaagtcagtg

SEQ ID NO: 5284 - DNA, 341 bp, Homo sapiens
  I.5284 (H85117)
  misc_feature (78)..(78): n is a, c, g, or t
tggagttcagcgattcctacttggacagcccagatttcagggagcgcttgcagtgtcacgagattgagctggagcganaccaacaagttcatcaaggagctcattaaggacggctctctgctcattggggcgttgaggaatctgtctatggcagtgcagaaattttcccagtcattgcaagatttccagtttgaatgtattggtgatgctgaaacagatgatgaaattagtattgctcagtcactaaaagaatttgcaagactactcattgcagtagaagaagaaaggcgaagactgatccaaaacgctaacgatgtattaattgcaccacttgagaaatt

SEQ ID NO: 5285 - DNA, 312 bp, Homo sapiens
  I.5285 (H85097)
  misc_feature (80)..(80): n is a, c, g, or t
  misc_feature (165)..(165): n is a, c, g, or t
  misc_feature (178)..(178): n is a, c, g, or t
  misc_feature (195)..(195): n is a, c, g, or t
  misc_feature (281)..(281): n is a, c, g, or t
  misc_feature (288)..(288): n is a, c, g, or t
  misc_feature (297)..(297): n is a, c, g, or t
aaatacttcatacataaaaaacataattaaaacataaaatgtttaatacagaaaatacttaaacacagacaaagtaattnaacacattggccattttgaacccagcaccagcatccctgctacgttggagtaggtactcagtcccatcatcagcgacttcattgnggcaactgcaggngagtccacacttggggntacaagttctagggttcacctggggtcctcagagagccggggctccatcaatctcaaggggtgaggtcaaatactctcacatgggntttacgnggggtcaantactgctgccgggtc

SEQ ID NO: 5286 - DNA, 337 bp, Homo sapiens
  I.5286 (H84529)
  misc_feature (306)..(306): n is a, c, g, or t
  misc_feature (323)..(323): n is a, c, g, or t
  misc_feature (333)..(333): n is a, c, g, or t
ggccttctgtaagtgtctgtgactcatttaatcctcaaaattgccatataaagtagattatattattctttcattcttacagatggaaaagttttccctgttttattccttgcctgatgagttctttatcttgtacccattatagaaaacttttcctagtcacccaattctagtttagagatacatgatatatttttacagcatatagcatttccttgctactacaattccattataattatctgttggtttgtatcatccactagactataaaccttgtgagggcaaacactgggccaattttanggacactatttatgttncttaacggtnggtc

SEQ ID NO: 5287 - DNA, 244 bp, Homo sapiens
  I.5287 (H84214)
  misc_feature (117)..(117): n is a, c, g, or t
  misc_feature (154)..(154): n is a, c, g, or t
  misc_feature (202)..(202): n is a, c, g, or t
  misc_feature (240)..(240): n is a, c, g, or t
atctgtaagtagaagtaatattaactgtaaaattttggggtgtacataaagagattagagtgactcataacctgaaatgtaaccactgatgaagttagggtgaattggtaaggtttnctttccaatctctcaaatgagccattaaaaaatgttnccatggttataaaaaaattactgtggttttagtgtcaaaatatataancttaatcctgtcaagtatgtattaaaacactctatttngtat

SEQ ID NO: 5288 - DNA, 398 bp, Homo sapiens
  I.5288 (H83996)
  misc_feature (366)..(366): n is a, c, g, or t
gagagctgcgtggagttcagttacccggagctgctgctgtgcggagaacaacggaagctcattcacacagaagacccatttaatgatgaacatcaggagaggcaagaggtggaaatgttggctaagaagtttgaaatgaaatatggtgggaaaccccgtaaacaccggaaggatcggctacaagatttaattgatataggctttggctatgatgagacagatccatttattgataactcagaggcttatgatgaattagttcccgcttctctaacaacaaaatatgggaggcttttatatccaacactgggcactctacagtttcgccaagctttcagatacttgaaggaggatgatattaccagncaaccaaaagcacaagccacccaaggtcccca

SEQ ID NO: 5289 - DNA, 436 bp, Homo sapiens
  I.5289 (H83995)
gccacaggggcttcacttctgtctccataaaagacttaagataatcttcagcagactggcttttatttggttctaactcatagcatcccaatttgatctcaacaaggttacataacaaagttctgatagtgtcatcccagtggaatttctttcttggtcctatgacacgttttcctggtttctcatcatcatcctcttcagatccatttttttctcgttcttcatctgtctgcaatttggcacacttagcttgactacgagcctggcagtcctcctgggtatttaaatagctgttcaggcatgacattgctaacagccagtttcagtttttgcagaggttctcttaaacgatcatcctgggacattgaggatgtaacttcttcagacgttttactagtgtttctttattggcatgggcacaaaagcttcaaggtgg

SEQ ID NO: 5290 - DNA, 299 bp, Homo sapiens
  I.5290 (H83981)
  misc_feature (178)..(178): n is a, c, g, or t
ggattctccaccatcggcccccgcggtgaccagtgctcccgccccgtcccccttgcagggacagtgaatacaaacaaaaatagttctctacagaacgaagtttccaggccccccaccccttccttctctcctcctcccccagacggtgagttccgtggtcaccgggcctccgtgaggnctggggttctggtgggttgcaggaaaaataaagaatagaaaacaggaccaagtcagcgactggaattgtaggcaactggaggtcggggtccgccgccgcccgtgagcctggcacagccagg

SEQ ID NO: 5291 - DNA, 273 bp, Homo sapiens
  I.5291 (H83980)
  misc_feature (145)..(145): n is a, c, g, or t
  misc_feature (263)..(263): n is a, c, g, or t
ggaacatcaagggatgcccccccattcttagggatggtgaccttcctcaccaaatcctccattgacaatgtgggattcacctccaatccctgagagccttgccccaggcagtcacgggcttgtctggtccttggagcggatggtntaggcaggggtcagcctgagaaccacgtaggggtggggtgcaggaggcggcaggacatggtggtggtggtccttggtatgaaaccatgtgcttccaggagcagcgagtcagaagccgngccaggacca

SEQ ID NO: 5292 - DNA, 194 bp, Homo sapiens
  I.5292 (H83404)
  misc_feature (180)..(180): n is a, c, g, or t
tgttttcataatgttgtgacacaaaaaacagtataaacaggacaaggattttatttttaaatttaaactatcaactaaagcagtttgtgactgtttatacttgccaactaatgaactatctgcgaaaccagacaggatgctatctggaaaatagcttaaaaattgatgctatttatttangtaaattaattttc

SEQ ID NO: 5293 - DNA, 410 bp, Homo sapiens
  I.5293 (H83403)
  misc_feature (328)..(328): n is a, c, g, or t
  misc_feature (363)..(363): n is a, c, g, or t
  misc_feature (392)..(392): n is a, c, g, or t
ctcaaggatactaagaaaaaggagaaagatgaagggaaaagtagattaagaaagaggaaaaataaatgtttgaatgcaaagtgtaatagaaatacatttgcaactagaatttgaggtttaaattataacattaaattggttgtcatgatggtatataacagcgtcttttgaaaacatttattttttattgttgttatattgtcacctcagctgagaaagtcttggaattggaaatgggctctgaaatacatttggtgttcaaaatgtatttccatcattggtagctacgattctggttaacctctctgcttcttgattttctcatctnaagttggggccactactatgtctactggcaaaagnctttgggagggttaattgggggtaatgcnggttaaagggcttaggac

SEQ ID NO: 5294 - DNA, 485 bp, Homo sapiens
  I.5294 (H83233)
  misc_feature (154)..(154): n is a, c, g, or t
  misc_feature (381)..(381): n is a, c, g, or t
  misc_feature (402)..(402): n is a, c, g, or t
  misc_feature (436)..(436): n is a, c, g, or t
  misc_feature (441)..(441): n is a, c, g, or t
  misc_feature (469)..(469): n is a, c, g, or t
  misc_feature (484)..(484): n is a, c, g, or t
tctcgaactcctgacctcaggtgatccacctgtcttggcctcccaaagtgctgggattacaggtgtgagccaccacgcccagccaaaccttcttttattagtgaactatcaattaactagaacttaattgtcacccagcaaataggcttgccgnttaaaggtttaactgatttccatatactttcctatctttcaaaaaaaggtgaaagaaaattttttaagattttttaagttgcccattataatgttctatcaataacatttcatagatatctgcattttttgctttctgtgcacttcattttaaatagttaacttattttctgtcatcacagaaaatagtattaaatgagtttaataggaaatccacaggtgccagtnaaaaggttaggaagattgttncggactgctaattgccgggctatttcggggggtnagtantcctgcacggtattccacctcttcaagngtcctggttcgtgtnt

SEQ ID NO: 5295 - DNA, 470 bp, Homo sapiens
  I.5295 (H83079)
  misc_feature (364)..(364): n is a, c, g, or t
  misc_feature (428)..(428): n is a, c, g, or t
  misc_feature (438)..(438): n is a, c, g, or t
  misc_feature (463)..(463): n is a, c, g, or t
aagtttgtcggcccttgccttggagagctgagtttctggaggctgctcacattccttggcttatggcctccttcttccaacgtcaaagccagcaacattgcagcaatctgacttattttgttgtcatgtctcctgaccacatctggaagggttatctacttttgaagacacatccagataattcaggacaatctgtccattttgaggttcttcattgaatcatgtctgcaaagtcccttctgcaatctaagtaagaaaaatcaccaagaatattatttttggtatttgggaattgaatttgccagggaattgcaaggcactgctgacctaacttaaagaccttgggctttgggaaacattcttnaccccttgggcaggcttcttccaggagtttaggacttgggcaggcattcaaaggacacaacggnaagcagggcnttttgggagatccaaagtgggggtnggaaaag

SEQ ID NO: 5296 - DNA, 449 bp, Homo sapiens
  I.5296 (H83000)
  misc_feature (5)..(5): n is a, c, g, or t
  misc_feature (220)..(220): n is a, c, g, or t
  misc_feature (342)..(342): n is a, c, g, or t
  misc_feature (347)..(347): n is a, c, g, or t
  misc_feature (402)..(402): n is a, c, g, or t
  misc_feature (448)..(448): n is a, c, g, or t
agttnatgttcttttgacaagctgtagacaagatacttcattgtctctaagtagtgcagtgctggcaaatatttctcacgaacaaggacgctttgaagaggtggaattactgtgcaaggagtactttacctccaaatagcctgcaatttagcagtctgaacaatcttctaatcttttactggcacctgtggatttctattaaactcatttatactatttnctgtgatgacagaaaataagttaactatttaaaatgaagtgcacagaaagcaaaaaatgcagatatctatgaaatgttattgatagaacattataatggggcaacttaaaaaatcttaaaanatttnctttcacctttttttggaaaggatagggaaagtatatgggaaatcagttaaaccnttaaaccggcaagccccatttggccggggtgacatttaagttccant

SEQ ID NO: 5297 - DNA, 329 bp, Homo sapiens
  I.5297 (H82860)
  misc_feature (292)..(292): n is a, c, g, or t
  misc_feature (312)..(312): n is a, c, g, or t
  misc_feature (321)..(321): n is a, c, g, or t
gagacatatgtgactctttgagcttctgtcatccaggtgccatttctgatgcagcacatgtgcactgaacagttggcaaagaaggaaaaagattatggtagatgtatgtgcagatagtctctctaatgatgtaaaatacgtccagaaagaaagcagggctttgttgtaaaataaaaaatttcccatgactttttgttctttctgaatgtgatttgaggcatgtttctgtaaataaggaatatatactaacttatggatgtatataggaaccaaaaataggacttactcatcngggaggtgatggggatttantacccctanattgggcc

SEQ ID NO: 5298 - DNA, 338 bp, Homo sapiens
  I.5298 (H81858)
  misc_feature (279)..(279): n is a, c, g, or t
  misc_feature (335)..(335): n is a, c, g, or t
tgcctttcgacacgtcttgtaattttttgctaaatgctggatatgatatactgggtaaaagaaagaaataaatatgcctttggtgtgaagttttatgtagacctggcaaggcataagactatgtttaatgtttgtgtacaaaccataggtgtcagaggttataattttctctatctttgtttttcacatccttgctgtcttcaggtttccctaagggactcctaaacaatctgagccttacagttattttagttgtgattccctggttattatttatgnagccatggttggatgtggcaggtaagggtggtggggacaggggagggaatcattcnttc

SEQ ID NO: 5299 - DNA, 444 bp, Homo sapiens
  I.5299 (H81857)
  misc_feature (1)..(1): n is a, c, g, or t
  misc_feature (271)..(271): n is a, c, g, or t
  misc_feature (276)..(276): n is a, c, g, or t
  misc_feature (371)..(371): n is a, c, g, or t
  misc_feature (402)..(402): n is a, c, g, or t
  misc_feature (410)..(410): n is a, c, g, or t
nctattgatacttttatgtttaccactgtattactaaatataataatttatattaaaggcagtggctgttgaactattttaatgttgtcattttacttgtgagataaactttatactttatcccacttagttagcacctaccagaagacaccaaaatggtttatttcaaaattactttttaaaaattattacttatgagtttttcttttatggaatttttgaaagatgatcagagctttccagtctttttagcagagatttgcccccaggnaaatntggttttaccagcatctaaccaatatgggttttatcagagtttaaccaaagtagggagaatggaaataccccatttaggacccctcctgctttcntggtcttcacctaagggaggggttggaccgnagaagcancgaagatcgcagccaaggaggcacagaccacttt

SEQ ID NO: 5300 - DNA, 335 bp, Homo sapiens
  I.5300 (H81378)
  misc_feature (1)..(1): n is a, c, g, or t
  misc_feature (15)..(15): n is a, c, g, or t
  misc_feature (306)..(306): n is a, c, g, or t
  misc_feature (328)..(328): n is a, c, g, or t
  misc_feature (334)..(334): n is a, c, g, or t
ntttagtttccaggnttaaatagtagagctgtagtgaagctaccttgtcacatccagaggtcaagtctgcaagcgaggtcaggacttccacatggtcactacgaggctaacttatattcttcctcagtgaccactggctaaactgttacagctttataggcagctaagcatttgaaacatgcactcccaggcaaacaggctctcttgtgcctctctcttccctgaccatatttagtcaaccatagcaaaaaatagcctctcagctgtcgattgtcgatccaaaaggctgagggaagcctcaatctngctttctgcccattggattgtncatccng

SEQ ID NO: 5301 - DNA, 410 bp, Homo sapiens
  I.5301 (H81335)
  misc_feature (363)..(363): n is a, c, g, or t
  misc_feature (369)..(369): n is a, c, g, or t
  misc_feature (374)..(374): n is a, c, g, or t
  misc_feature (387)..(387): n is a, c, g, or t
  misc_feature (404)..(404): n is a, c, g, or t
ccgtattgattttccaggggttctttgtatacagtaatttgcaggagttgtttgttacaaactttataaatatcttctcctagtctctcttaactctgtgctatgatactatttaataacctgggggttttgtgttagtttattatatattgaacatgttccatgtctttaaatatttatttgtttttactacataattttaatggtaataagctggtatttgagaaattgtttcacaaacaaacattaatactgccccctccagcctcatctctcatttccccatctgtggctccagccatccccagggtttcagttgtcttatttgtctgaggaacctcagccgggggtcagagggctccngtgganctctntggccaaaggcantctgtgcttgttccctntggggg

SEQ ID NO: 5302 - DNA, 379 bp, Homo sapiens
  I.5302 (H81279)
  misc_feature (4)..(4): n is a, c, g, or t
  misc_feature (8)..(8): n is a, c, g, or t
  misc_feature (9)..(9): n is a, c, g, or t
  misc_feature (12)..(12): n is a, c, g, or t
  misc_feature (13)..(13): n is a, c, g, or t
  misc_feature (110)..(110): n is a, c, g, or t
  misc_feature (295)..(295): n is a, c, g, or t
  misc_feature (304)..(304): n is a, c, g, or t
  misc_feature (331)..(331): n is a, c, g, or t
  misc_feature (338)..(338): n is a, c, g, or t
taangatnntannttttttttttttcacagtcttttctacttcataagaacgtgaatgaggcagacattacaaacaaatcgctcttcaggcaattccagcagctggctgntgaatccacatgatgagtttccaaatctctccactgaggaggacatgaaagcagaaacactgggaataaataacataaatacatcccctccagggaaaggcagagaaggtgcaggtaggtgcagagggaagagaagaaaaagccgctggccacgtgacacatgttgaaggtaaacacagaaagtntaatgaccnaaatactctgaggtaggataccccccntatttcncctgacaaaggcaacaagtaaaatggggggtttttgaaaag

SEQ ID NO: 5303 - DNA, 377 bp, Homo sapiens
  I.5303 (H80947)
  misc_feature (287)..(287): n is a, c, g, or t
  misc_feature (344)..(344): n is a, c, g, or t
  misc_feature (360)..(360): n is a, c, g, or t
aaattttctaattaccacattaaaatagtaaaaaccaggtgaaattaattttaagaaaatactgtattttatatatatatctccaaaatattatttcagcatataaccagtgtaaaaactataaatgagatcattgacattttttttcataccacatttttagaaccctgtgtgtgtttacactgacagcacattccacttgagaccagtgctgcgggactggggagtgcaagcgtcagggtcccagccgaagccctttagcttgggacttcacagccacagcctgnagtcccagctcacaactccagaccaaattcccctcccaggcttcatgtggctggcgnttcaagacaggatggncacacatgggcctggga

SEQ ID NO: 5304 - DNA, 377 bp, Homo sapiens
  I.5304 (H80853)
  misc_feature (63)..(63): n is a, c, g, or t
  misc_feature (190)..(190): n is a, c, g, or t
  misc_feature (216)..(216): n is a, c, g, or t
  misc_feature (305)..(305): n is a, c, g, or t
  misc_feature (335)..(335): n is a, c, g, or t
  misc_feature (350)..(350): n is a, c, g, or t
gtttcagaaaaagtctagttaaaaaaaaaaatcttagtcagtgctcaatgataagtaatgganttccctgttgggcttgaattctctccaatgtcaatggggccttgatctggatgaggatgttgaaaaatacccggtccctctgagggatggggtttcgggggtgggcagggaggtaggagtggcagangcaccaggggccatgctccaaggatnagcccagccaacacagcaggccaggggggtggggatccaggccatgtgtggcatctgtcttgatcgcagcacatgagctgggaggggantttggtctggagttgtgagctggggactcnggctgtggctgtgangtcccagctaaaggggcttcggctggg

SEQ ID NO: 5305 - DNA, 389 bp, Homo sapiens
  I.5305 (H80458)
  misc_feature (75)..(75): n is a, c, g, or t
  misc_feature (293)..(293): n is a, c, g, or t
  misc_feature (357)..(357): n is a, c, g, or t
  misc_feature (377)..(377): n is a, c, g, or t
  misc_feature (387)..(387): n is a, c, g, or t
taaaaaaatttcagtatcaaaatctattgtgaatatgctattaaaatttaaaacaaaaggaatttttacctctgnagtcacatactatgtaatagagttatagacagtttaatgactatttcaatctgtgtaaagtgtgcaatgatcatgcctaaaagtcacttcagaaaattagagaaacatgacaatgtagaagggacagcaaaaacactacacatttgaatataaagtaggattcataataaaatgcatctgaatacttgtataattactcaaaagcatactgggacccngtttttttaccaaaggcatttttaaaaaaaattaactggaaattgacagtggattgtttttggntggcacttctaaggtttccntttaaccatnct

SEQ ID NO: 5306 - DNA, 305 bp, Homo sapiens
  I.5306 (H79970)
  misc_feature (1)..(1): n is a, c, g, or t
  misc_feature (26)..(26): n is a, c, g, or t
  misc_feature (30)..(30): n is a, c, g, or t
  misc_feature (290)..(290): n is a, c, g, or t
ngggtggcaatgtctaatatacacangctnggtaaaccaccttggagaaatggggtggccaccgtggtctgccctaaaaggcacacacctacctacagacatacagtttcagtccaacacatcatactgatgtcaaccctgtcagtgagctgcactgggctccactcccaaagggggaagctcattattcacttttattaaatcttgcattcactaaagaaacaaaaaaggggtgcacgttctttccctttcatgatgctaaagtatttcttctccaagcagggccctgnactccttggatgcac

SEQ ID NO: 5307 - DNA, 445 bp, Homo sapiens
  I.5307 (H79969)
  misc_feature (10)..(10): n is a, c, g, or t
  misc_feature (329)..(329): n is a, c, g, or t
  misc_feature (351)..(351): n is a, c, g, or t
  misc_feature (423)..(423): n is a, c, g, or t
agagaaagcnttccattgaaaggtagatactttgaggagtaaaaagacttctttgaatgctggtaaacaccgcatttattttgtgtatgcagtttgatttgcacatgtataaatggagatgcttttcatttttgtttggactgggtttgtgtcactgctcattacagtttgcctttttgtgtgtttgctgtgcgtttggagatattagtcagtttctttagtgatatttgtttccttgatgtgccttttcgtttttctttggggtttttggaatccggatgctgttgaagggcaatagcagactcctccagctaagagacaggacatgnttcttggagccactgtagctgnttggaagctggacaccagacgctccctattaaccccccccaccagggccataggcgtggtatggcaggtggnaactttccacccacagagggag

SEQ ID NO: 5308 - DNA, 357 bp, Homo sapiens
  I.5308 (H79407)
  misc_feature (306)..(306): n is a, c, g, or t
  misc_feature (354)..(354): n is a, c, g, or t
attcggcacagccttgaagataactaagcaaaagtagaattggtgggacaaagaggagtggaattgttggaaggtggccgggcgcagtggctcacgcctgtaatcccagtgctttgggaggccaaggtgagtggatcacctgaggtcaggagttcaataccagcctggccaacatggtgaaaccccatctctactaaaagtacaaaaaaattagctgggcatggtggcaggcgcctgtaattcccaggtactcaggagggtgaggcaggagaatcgcttgaacccgggaggtaggaggttgcagtnagccgagattgcataccagcctgggggggacaagagcaaaactccttnttc

SEQ ID NO: 5309 - DNA, 448 bp, Homo sapiens
  I.5309 (H79382)
  misc_feature (311)..(311): n is a, c, g, or t
  misc_feature (322)..(322): n is a, c, g, or t
  misc_feature (329)..(329): n is a, c, g, or t
  misc_feature (376)..(376): n is a, c, g, or t
  misc_feature (386)..(386): n is a, c, g, or t
  misc_feature (409)..(409): n is a, c, g, or t
  misc_feature (425)..(425): n is a, c, g, or t
  misc_feature (444)..(444): n is a, c, g, or t
ataacttctctgggtctcaatttcttttgtggtaaattgtgatgttaatgtgattggtgtgatattaatgtgatttcttcagtggtaaaattgtgatattaatgtctacctgcttcatagacttaccatgttgattaaatgagataaagtatataaagtgcttagcatagtgcttgcccataatgagcactcagtaaacgatagctgttcatattatcgtcatcatccctgtccctgaaacttcagtacaagtgatgtggtaaaaactagaatagtcaaccaagaggctgattgctggtaaagtaaacctnaccataggttnctgtagnctaccacgtacaagctatctaactttacctactgtcttcacccattnctattaaatncacctcaactttcctggggccantgttaccaagggcccnttttcctcattggatattngacc

SEQ ID NO: 5310 - DNA, 435 bp, Homo sapiens
  I.5310 (H79296)
  misc_feature (406)..(406): n is a, c, g, or t
  misc_feature (422)..(422): n is a, c, g, or t
  misc_feature (434)..(434): n is a, c, g, or t
aggagttttgctcttgtcccccaggctggtatgcaatctcggctcactgcaacctctacctcccgggttcaagcgattctcctgcctcaccctcctgagtacctgggaattacaggcgcctgccaccatgcccagctaatttttttgtacttttagtagagatggggtttcaccatgttggccaggctggtattgaactcctgacctcaggtgatccactcaccttgggcctcccaaagcactgggattacaggcgtgacaacttgcggcccggccaccttccaacaattccactcctctttgtcccaccaattctacttttgcttaggttatcttaagggtcgtgccgaattcttgggcctcgaggggcaaatttccctataggtgagtcgtatttaaattcggnaatcaagtcaaaggtngtttcccgtggng

SEQ ID NO: 5311 - DNA, 362 bp, Homo sapiens
  I.5311 (H79271)
  misc_feature (334)..(334): n is a, c, g, or t
agaggggacatataaattaatatttacattctatcattacgaatctgttattagtgttatcacactatggccaagtacctatttagacaatttaaactttgatttctaagaataagtaattgggaagggagaaaaacattttaattatataatatttaacacattgcacctaaattaaaaagtaattattctctggaggattaaatgggaataccctaaaaacacaaagtttttaaagagtggtatagattcccagcttactgtgaaaaattcccaactactttcaaaggattttaacaactccaaaatgggctgacagtagggtaaacaggantataaaaccaggatgggttcagacaatc

SEQ ID NO: 5312 - DNA, 450 bp, Homo sapiens
  I.5312 (H79244)
  misc_feature (408)..(408): n is a, c, g, or t
  misc_feature (444)..(444): n is a, c, g, or t
gaaggatcttcttgggtggcagtacagggatgacaaggaagggaccaaatctcagttgttcacatttttacttagtttggattccaaataatggggcttctcataaaagatttggaccctgccccgaggcttttgtaataaatttggccgctttgtttttttccctaattatttcattcgtaaaagtcttatcttcccaataaagatggtaactcctctggactgggtctgcttttcgcattttccttcttttatataccaccatggtatagaacttatttttgcttaataaacagtttggacatcaggaagagacagagctgtatacaataggtagtttacagtcaaatatttactgctttaaaataaggcagaattggctgggcacggtgggctcacgcctgttantcccaggcattttggggagggccgaggccgggcggnttcatt

SEQ ID NO: 5313 - DNA, 427 bp, Homo sapiens
  I.5313 (H79151)
  misc_feature (1)..(1): n is a, c, g, or t
  misc_feature (33)..(33): n is a, c, g, or t
  misc_feature (173)..(173): n is a, c, g, or t
  misc_feature (254)..(254): n is a, c, g, or t
  misc_feature (373)..(373): n is a, c, g, or t
  misc_feature (412)..(412): n is a, c, g, or t
  misc_feature (423)..(423): n is a, c, g, or t
nctgtcacccaggctggagtgcagtggcttganctcggctcactgcaagctccacctcccgggttcacgccattctcctgcctcagcctcccgagtagctgggactataggcgcccaccacgacgcccggctaattttttgtatttttagtagagacggggtttcaccagggntagccaggatggtctcgatctcctgaccttgtgatccgcccgcctcggcctcccaaagtgctgggattacaggcgtgacanccgtgcccagccaattctgccttatttaaaggcagtaaatatttgactgtaaactacctattgtatacagctctgtctcttcctgatgtccaaactgtttattaaggcaaaaataaggntctatacccaggggggggatataaaagggagggggaaanggcggaaaggnggac

SEQ ID NO: 5314 - DNA, 392 bp, Homo sapiens
  I.5314 (H78135)
  misc_feature (343)..(343): n is a, c, g, or t
  misc_feature (369)..(369): n is a, c, g, or t
  misc_feature (380)..(380): n is a, c, g, or t
gagccacatggtgctgcaactgaggttcataaacactaagaagcaggaggagaaaagatataatcacgttccagatttaaaatgccagaaaatcttacaacattcaggagcaaatgtgtcaacaaccaatactaagattttcaaagtgaagagcatttaagtttcagttcatatttaaatagtaaatgaatagctttcccccaatcatctctttatatttaaaaaaaaatcaaataacagtctccactaaaactgtggtacgtgtggcattaaaactgtattcattacaaatggccttaaaactggtatatatggtacattaaaaaacggcattaaggttacnatgggatggaaacggtaacacaggcnacaaatgggcntaggaatggggg

SEQ ID NO: 5315 - DNA, 374 bp, Homo sapiens
  I.5315 (H78134)
  misc_feature (286)..(286): n is a, c, g, or t
  misc_feature (344)..(344): n is a, c, g, or t
  misc_feature (371)..(371): n is a, c, g, or t
tagtataccctcttttctcagctccccatcagcccagagccattgataaattatcacatcactggttttcagaattatttttttgaagtatagaatcacttatttcaaacaaaattgagtatacaaaacagataaatatgggtgggttttctaattaaagttggagtgggaggctagtgacctgcctgctctaaacccctttacctcctactcaggtccctgaaacacaaggaaaatgccaaaattaaagaaatgcttttttcaaatgaaatatcgggcaataganaatgagagacaaaatgcctaacttaggtcttttgtcttgtgaatcccagagaaatttncattttatttattatgatagtaattgnagg

SEQ ID NO: 5316 - DNA, 371 bp, Homo sapiens
  I.5316 (H77872)
  misc_feature (197)..(197): n is a, c, g, or t
  misc_feature (213)..(213): n is a, c, g, or t
  misc_feature (259)..(259): n is a, c, g, or t
  misc_feature (267)..(267): n is a, c, g, or t
  misc_feature (298)..(298): n is a, c, g, or t
  misc_feature (312)..(312): n is a, c, g, or t
  misc_feature (318)..(318): n is a, c, g, or t
  misc_feature (338)..(338): n is a, c, g, or t
  misc_feature (349)..(349): n is a, c, g, or t
  misc_feature (368)..(368): n is a, c, g, or t
taattgccctgagtcaactaattgacaaaggaaaatgctatgcttaaaagctcagttctcagtgtaattatttttctctccccacatataatcatcctttaaatataaaagctattatagagatgcagtttccagcaaactttatctcacattgaggcccttgactttatgtggtgtttcagatcagcttttttgtncaagggtcacacattncattccagcatcacttaattctttagctgttagtcttccatccagncactaggngttaggaccctgggagttgcaaaaggcaagncttggaggacagtnaccccnttatttcttcatgggagctnaaacatttggnggagggtatttgggtgtanttc

SEQ ID NO: 5317 - DNA, 416 bp, Homo sapiens
  I.5317 (H77826)
  misc_feature (1)..(1): n is a, c, g, or t
  misc_feature (2)..(2): n is a, c, g, or t
  misc_feature (242)..(242): n is a, c, g, or t
  misc_feature (243)..(243): n is a, c, g, or t
  misc_feature (355)..(355): n is a, c, g, or t
  misc_feature (365)..(365): n is a, c, g, or t
  misc_feature (389)..(389): n is a, c, g, or t
  misc_feature (401)..(401): n is a, c, g, or t
  misc_feature (411)..(411): n is a, c, g, or t
nntattaattctttctaaggaaggtaaaaccatctgatttaattcctttttgtaataacagcacacatgcattcagtgtgtactctgtgtcaggaacttcatgtgtgataatatgagaagggtgtcattattttccccattttccagaggaagaaactgaggttaagtaatgtgggtgaagttatagagctaatattgcagagctgggaatctgctggttccagaacttgccctcttggggnnttgtgatattgactgcatgtctattttgggggagctaacttcctgttctctttctacttataagtagggcctaaaagacataagctataaacacggataggactcacaaaancatccagganaaagccataggccatggggtaacnaattaacggacnggggcagtgnctatt

SEQ ID NO: 5318 - DNA, 341 bp, Homo sapiens
  I.5318 (H77787)
  misc_feature (131)..(131): n is a, c, g, or t
  misc_feature (299)..(299): n is a, c, g, or t
agagagctagcaccatgagcttcaataccctgctattccccatctgcaatatcatcctctttaactgtgtgttcattttctgccttacacattaggctatacgctacacaagggcataagctgactgcctntcttgtccattgtcaccagtgagcaagcctcgcatggtgcctggcacatattataaacacattaagtactagataaataaataaaggaaatcttgactagcagagtaggctcaaaatatctgtagacagtgagacaagagacagataccaagccttggaaatcactgnagagtaaaagagctgaacacctgttcagattttttctgggga

SEQ ID NO: 5319 - DNA, 454 bp, Homo sapiens
  I.5319 (H77619)
  misc_feature (12)..(12): n is a, c, g, or t
  misc_feature (25)..(25): n is a, c, g, or t
  misc_feature (29)..(29): n is a, c, g, or t
  misc_feature (30)..(30): n is a, c, g, or t
  misc_feature (31)..(31): n is a, c, g, or t
  misc_feature (159)..(159): n is a, c, g, or t
  misc_feature (187)..(187): n is a, c, g, or t
  misc_feature (201)..(201): n is a, c, g, or t
  misc_feature (431)..(431): n is a, c, g, or t
  misc_feature (443)..(443): n is a, c, g, or t
cttaattaaccngctagggcatgantcannnctttagggccattccagtttgaacttgggcatattagagcatcttagttctctatatgtacacattttctcatttattcttgttgccttccttgattcccagaaaaatctgacaggtgttcagctctntactcttcagtgatttcaaggcttggtntctgtttcttgttncactgtctacagatattttgaggcctactctgctagtcaagatttcctttatttatttatctagtacttaatgtgtttataatatgtgccagggcaccatgcgaggcttgctcactgggtgacaatgggacaaggaaagggcagtcagcttatgcccttgtgtaggcgtataggcctaatgtgtaagggcagaaaatggaacacacaggttaagggggggtggatatttncagatggggggnttaggcagggg

SEQ ID NO: 5320 - DNA, 406 bp, Homo sapiens
  I.5320 (H77534)
  misc_feature (330)..(330): n is a, c, g, or t
ggaaaaaaaagctcatcagctagttaatgtattttacgtgtggcccaagacagttctagtgtggcccagggaagccaaaagatcggaccacccctgcaaacggttcttagatgaaaataaaatgtttggccctttatgactttaattgttcttggctgtcttataaattagttcctttattgaagtcactagaataagatacttaacggtttcctttttaagatgggaggtgggatgggaatgaggtgttagtataaactttgccaagtttgtagcctgcaaccttgttcaatgaaccccactgccctaaagatctgggggatggcagtntaggggggctgggactgaggtccatctgggaagggctagactttgagagtgcaaaaaggatgaaccagggcgcagg

SEQ ID NO: 5321 - DNA, 472 bp, Homo sapiens
  I.5321 (H77533)
  misc_feature (1)..(1): n is a, c, g, or t
  misc_feature (378)..(378): n is a, c, g, or t
  misc_feature (404)..(404): n is a, c, g, or t
  misc_feature (426)..(426): n is a, c, g, or t
  misc_feature (444)..(444): n is a, c, g, or t
  misc_feature (462)..(462): n is a, c, g, or t
ntttcttttttttttaaataaattactcagtttcaggtattctaagcaacagaaaatgaactaatattcatgctgatttatagcagaacagtgtaagtcaacattctttcaaaaccaggataaaaattatctcatcataagttatcactgctcacgtacgtaaccacggacgggttatctaaccactccacacctattttttttccttgttaaaatgttgatgctacctgtctctaagtaaattaaatgagctaataatacacacagaatttaaaacaatgcctgaataatcaatcagtgttgcctattacattatttatccctgtttatggctcttctgtaccctctttaggaaaataattccaagactggaaattnttaacctcttaggacaggtgtgggtnggctcacaccccttacacttcngcacttttgggagggccngggcaaaattggctttgngggtttggtg

SEQ ID NO: 5322 - DNA, 478 bp, Homo sapiens
  I.5322 (H71813)
  misc_feature (2)..(2): n is a, c, g, or t
  misc_feature (5)..(5): n is a, c, g, or t
  misc_feature (7)..(7): n is a, c, g, or t
  misc_feature (227)..(227): n is a, c, g, or t
  misc_feature (240)..(240): n is a, c, g, or t
  misc_feature (255)..(255): n is a, c, g, or t
  misc_feature (257)..(257): n is a, c, g, or t
  misc_feature (272)..(272): n is a, c, g, or t
  misc_feature (298)..(298): n is a, c, g, or t
  misc_feature (371)..(371): n is a, c, g, or t
  misc_feature (404)..(404): n is a, c, g, or t
  misc_feature (447)..(447): n is a, c, g, or t
  misc_feature (456)..(456): n is a, c, g, or t
  misc_feature (462)..(462): n is a, c, g, or t
  misc_feature (477)..(477): n is a, c, g, or t
tnatnanatgtgactgggatactaacagaaaatgcagtttaatgtaattaaatagaaaagcattacagagtgggcacaatgaattgaataaggactttgtattctatttagcagtcatgcacattggtgaccaagaaaggatttacaattcattgtcaaaaaatccttttaaacggtcagtcttttaaggatggctgcagcagaacaaggcaaactgaatactggantgagatgggaaantcaacaccacctaangnctagttttgtgtttnctcttgggagtccctctagaacaganttcagggtctactttcatatttcctgctatagtgctctatcaagagcaggctggggtggggaacatcaccagnccatgcccacagccggggaagagctgctccctnccatttaccgggttgggcccgggctttttctggggcagagggnggcttgccnttgggnaaggcatttagggcnt

SEQ ID NO: 5323 - DNA, 443 bp, Homo sapiens
  I.5323 (H71812)
  misc_feature (10)..(10): n is a, c, g, or t
  misc_feature (394)..(394): n is a, c, g, or t
aaattgggtncaaagaatcaggaaatatatatagtaagtaacaattgtaccaaaaattataatgggccatggaattgcttcatattgaaattataaataatctgtaatgctattaatactagaataatggtagcgcttctcatcttcagggtgcctcgtgagattaaccatggtggttatgctggtgacgtgtttacataaaacctgtgctttctgaatgtgtgttgcagtcttaacattcttgaaatctttgcagaccagttctcaagatgggataggaaagctggactctaggttaccaagtgaaatcggcccgactcctcctgtgttgagactagtcatctactgttccttccattgagacagaactgttgcctgtgtttttactagtccngttgaatgcatgggtggtattttgaattccggggttaaaaacagattga

SEQ ID NO: 5324 - DNA, 410 bp, Homo sapiens
  I.5324 (H71257)
  misc_feature (67)..(67): n is a, c, g, or t
  misc_feature (339)..(339): n is a, c, g, or t
  misc_feature (397)..(397): n is a, c, g, or t
accccttgaaatgtgacctgagttggaaatgggatctttgcagatgtcattagtgaagacgaagcancactggagtaggctgggcctaaatcaaatggctgttagttttataagaagagggaaatttggacacagacacacacaaagaggaacaaccagcgtgtgaagacagaggcagagattggaatgaggcagccacaagccaatgaaccgctgcagctcccagaggccagaagaggcaagggaatatcctcccctagaggctgcagagggagcacagccctgccagtgccttgattcgagacttcgagacttccggcctccagaactgggaaagantaaatatctgctgttttaagcactttggtttgtggtgctttgtcacggcagcccctgnggagtagttccag

SEQ ID NO: 5325 - DNA, 344 bp, Homo sapiens
  I.5325 (H70861)
  misc_feature (162)..(162): n is a, c, g, or t
  misc_feature (165)..(165): n is a, c, g, or t
  misc_feature (173)..(173): n is a, c, g, or t
  misc_feature (174)..(174): n is a, c, g, or t
  misc_feature (315)..(315): n is a, c, g, or t
  misc_feature (332)..(332): n is a, c, g, or t
attgtctgttatattacatttattaagaagtgataacttgtaataattggatgttaaattaaagaactctctcctagttattgccgtctcaattataactgtcgttggctggcagttataatgatatatgagggttgtattttacgcagccgaccatgaccnggngagtaatnntcccccagctatggggcaactcaggcactccttggcttccaacgccttgcttgggtgctgattggaatattaagtttctgcaagactgaggatgccgaaatccacacggagagccgcgactccacagctgagagccccctntggcaatctccacccgnctcctgcttctc

SEQ ID NO: 5326 - DNA, 437 bp, Homo sapiens
  I.5326 (H70413)
  misc_feature (382)..(382): n is a, c, g, or t
  misc_feature (423)..(423): n is a, c, g, or t
  misc_feature (434)..(434): n is a, c, g, or t
attcggcacaggatttttcaagatttggtttttctatgagtatggccaagaaggaggtaaacggaactgtcagactttttttctttctttagacagataactgtgatgtctgttatacagatccctgccagaagtactgaacatagctttaaaaattgtgactgttggggtttcgttattaattagctttgtttatatagtggttacacattaatgtcttctaacttttagtatatgttaggctgtttgccctgttggtaactggcctccagttatgaatggagtgtaacaaacagaaaagtgaaccactcatagtgtgcagctaaactaccaaccagtcttgttttggtataaattattgctctgtggttctttcccattncagtgctctccggggtgtccatttctttctagctttctgtnatgggcgcccncat

SEQ ID NO: 5327 - DNA, 367 bp, Homo sapiens
  I.5327 (H70373)
  misc_feature (169)..(169): n is a, c, g, or t
  misc_feature (271)..(271): n is a, c, g, or t
  misc_feature (299)..(299): n is a, c, g, or t
  misc_feature (312)..(312): n is a, c, g, or t
  misc_feature (332)..(332): n is a, c, g, or t
  misc_feature (339)..(339): n is a, c, g, or t
  misc_feature (363)..(363): n is a, c, g, or t
tggacattttcaaggaccacaactattcattagaacacacagtgcaatttcttaactgtgttcttgaaggggaccctgtaaaaacagttgtagcccaagagtttgttcaccaaaatgagaatgtcacatctcatactggccagaagtctaaagagaaaaagccaaaganattaaaagagactgaagaaacaccaagtgaactgtctttccaggactttgagtacccagactatgatgactacagagcagaggctttccttcaccaacagangaggatggagtgctacagcaaggccaangaagcttatcggntagggaaaaaaatgtcgccnccttttntggcccagcagggtaacttcttcntgag

SEQ ID NO: 5328 - DNA, 391 bp, Homo sapiens
  I.5328 (H69743)
  misc_feature (363)..(363): n is a, c, g, or t
  misc_feature (370)..(370): n is a, c, g, or t
  misc_feature (380)..(380): n is a, c, g, or t
cccttctcagtagagagcctccaatcaggattaaggtcatcatagcctggagtctggtgaaattgtgaaaacagctgtggattatatcaagattcatcgcatcaactgccatcttcccacttactcttcattcatctacttaagattagtccaacacctgctcattttgaccccattccccttgttgcttcagagatgggaatcgcccaggatgctcagtttccctgaggaaggtgaatgggctgccggggggcatcccatctgggaggaaagggctcatcttaaaaattccatcctgttcttggtcccgggggggactggtaaaacttggacacttaacatccttaataattcccggtggtnttggggnactggcaggnaaacccggttt

SEQ ID NO: 5329 - DNA, 336 bp, Homo sapiens
  I.5329 (H69709)
  misc_feature (18)..(18): n is a, c, g, or t
  misc_feature (45)..(45): n is a, c, g, or t
  misc_feature (192)..(192): n is a, c, g, or t
  misc_feature (203)..(203): n is a, c, g, or t
  misc_feature (219)..(219): n is a, c, g, or t
  misc_feature (221)..(221): n is a, c, g, or t
  misc_feature (232)..(232): n is a, c, g, or t
  misc_feature (235)..(235): n is a, c, g, or t
  misc_feature (237)..(237): n is a, c, g, or t
  misc_feature (251)..(251): n is a, c, g, or t
  misc_feature (296)..(296): n is a, c, g, or t
  misc_feature (302)..(302): n is a, c, g, or t
  misc_feature (315)..(315): n is a, c, g, or t
  misc_feature (324)..(324): n is a, c, g, or t
  misc_feature (332)..(332): n is a, c, g, or t
cactactatgtccttttncctcttttaataccaccctttgggggncatgaatcaggtctcaaagcactttaaatacctctcacaaaagacttttaggacattactaaatgtcatacaacaattaatacaaaggtaaccttttctgagaaacaatcagagcattttaaactttaaaactgtagctgataattntcttacatatntggtaatcaataaaantnctctgtaatanctntnacagggtaacattnggcatttggattcaggtaaaagcatcaaacctcacttggcatttnggaaanacatcataattgngtgggggtntcataatnggag

SEQ ID NO: 5330 - DNA, 372 bp, Homo sapiens
  I.5330 (H69375)
  misc_feature (61)..(61): n is a, c, g, or t
  misc_feature (328)..(328): n is a, c, g, or t
  misc_feature (335)..(335): n is a, c, g, or t
  misc_feature (345)..(345): n is a, c, g, or t
aatcgatggtctggaggttggcaggccagttcttcctcatgaggtcatctagggcctgagntctttcatctggtggcttgtggatcttctgaggttgttcctcatctgcatagtggcagatggcctaccacaccacgtctgcatttaagccattaggaaagaggggatgagagggaagggcacatttctttccagttgagggcatgacccaaaaattgcacacatcacttttgctcccaaaagttgcagggttgcacggacatctaactgcaagtgagtctaagaaacgtcgtctgtaagtgccagtatgtctattcttgtggaaaanggagaanagagagattntgggacaattaggcagcctttgccata

SEQ ID NO: 5331 - DNA, 328 bp, Homo sapiens
  I.5331 (H69281)
  misc_feature (1)..(1): n is a, c, g, or t
  misc_feature (4)..(4): n is a, c, g, or t
  misc_feature (73)..(73): n is a, c, g, or t
  misc_feature (223)..(223): n is a, c, g, or t
  misc_feature (263)..(263): n is a, c, g, or t
  misc_feature (287)..(287): n is a, c, g, or t
  misc_feature (314)..(314): n is a, c, g, or t
nagnttcttggaacaagtatttatttaactttttattatggaatatttcaaatacacataaaagtagaaagantagcataataaacccccatgaacccatcatccagcttcaacaactaacatttttcccgatttaatttcaactattcatcacccccccatcttttgcttgagtattttaaagcaaattcagacatcatatcatttcacttatgtatatctnagtaaatgtctctaccagatgaggttttgctttgtaattnaatcacatgtcaaacctaacaaanttaattctaatcatttaatatggattnaacatctaggtctt

SEQ ID NO: 5332 - DNA, 454 bp, Homo sapiens
  I.5332 (H68690)
  misc_feature (220)..(220): n is a, c, g, or t
  misc_feature (397)..(397): n is a, c, g, or t
  misc_feature (444)..(444): n is a, c, g, or t
ttgccaggctggtctcaaactcttgggtaatccacccgccttggcctctcaaagtgctgggattacaggcacgagccactgcacccgacctaaaacctgtacttattctaatgaccttggtggcttcccagtgccctgcaggatcagctgggggtggctgggctgggtttacctctgtcctgtggtctctgaactgatactgagcagtgtagctgctctntgagacttggaataagctaggaggaaaagagaaatattgggacatatttttaacatgcttttaaacatccctgaaacataacacagatatatggctgtaagtccacagcaacacccgaaggcccaaccttcttacaggtggggtaacttgttctggaatggcctgtgctgggtacgngggaaatgactggagagagggagccgggaaaggcccggtggcacacnttaccttgtt

SEQ ID NO: 5333 - DNA, 357 bp, Homo sapiens
  I.5333 (H68523)
  misc_feature (236)..(236): n is a, c, g, or t
  misc_feature (288)..(288): n is a, c, g, or t
  misc_feature (302)..(302): n is a, c, g, or t
  misc_feature (324)..(324): n is a, c, g, or t
  misc_feature (346)..(346): n is a, c, g, or t
  misc_feature (355)..(355): n is a, c, g, or t
tgctcaggcatgaatataatgttgggagatattgacccactctgcctcagtttctccctgtacaagtggctttaccttcaccttctttccaaagaccagcccttccctgatttttctgggcaaagctttgctaaagcaaaggtaatatcagggctggggtgggtaaggacagcaagacctcaacatgaatgaggaagtcagtaaggatttgccttgtcctcaccagcctcttaggngaactaccccatcctcccgagggtcctcaggaggcccacgggccctcactantttgaggtcgtctntttcagtagggaattcagggtnttagggaggtcaggtggaccantttgggggnca

SEQ ID NO: 5334 - DNA, 344 bp, Homo sapiens
  I.5334 (H67731)
  misc_feature (329)..(329): n is a, c, g, or t
  misc_feature (341)..(341): n is a, c, g, or t
gatggctgccccaccccagcctatcatcccaggagcagagcaggtttgatgcggatctgaatgagacagtgccctgttcccaggctctggagagaggatggcaacctgtagtatgcccagctggtcgggcggggatgcggggatgcaggagagagcccatagcttctactcccagctcgcggccctgcccatggtttcctcttttgtttccaagaaaagccaaatggaaacattctggttttgctgggaaaagctcctttgctatctgggccaaaaaatggttccatccctttgaggagggccgagaggaaaagggtcattttttcccnttgtttttactngga

SEQ ID NO: 5335 - DNA, 370 bp, Homo sapiens
  I.5335 (H67314)
  misc_feature (363)..(363): n is a, c, g, or t
ggcacgagaaaatacacattgggtttcaaagacagtatgaaaagatgtctgtaaaataaatcattaaccatttctaatattgattacatgttcaaatggtagcattttgaatgcactgggtttacaaaatacattagaattaatttcactggtttctttttacttcttttcaatgtggcttctagaaaattttaaatttcacacatggcttacattgcatttctattggattgcactgcaccagagtggtcactgacttctcagacctgatttctactgaacagacgactcaaagtagtgagggccgtgggttctgaggacctcgggaggatgggggtagttctctaagaggctggtgagggncaaggca

SEQ ID NO: 5336 - DNA, 441 bp, Homo sapiens
  I.5336 (H66307)
  misc_feature (48)..(48): n is a, c, g, or t
  misc_feature (401)..(401): n is a, c, g, or t
  misc_feature (407)..(407): n is a, c, g, or t
  misc_feature (431)..(431): n is a, c, g, or t
  misc_feature (437)..(437): n is a, c, g, or t
gatctacagaaaagttgcagagatagtgtagagaattccctcatcctnctccccagtttcccctattgtaccatctcatattactgtgtttcatttgtcacaactaggaaaccaccgttggtacattctgttaactgagctctggacttagtcggatttcactagtttttcatgtaacgtcctatttctgttccagggtcctatccaggacaccacaggacagttgtcatgccccctcagtcttctctgggctgtgacagtttctgtctttccttgttttccatgaccttgacagtttggagagaagtgctaggcaagtattttgtagactgtgctcagttgaggtttggctcatgtttttctcagggcctagcaccagtgaaggaaacgaagaaaatttnccagtnaaaacaatggggaaaaaatgaccntttccnttcg

SEQ ID NO: 5337 - DNA, 153 bp, Homo sapiens
  I.5337 (H65529)
  misc_feature (100)..(100): n is a, c, g, or t
tataattaaagtatttataattacatattttataatttaagtatttataattacatattttataattcaatattttataaatagttaaaaagacgagganaaaattaaaaagatgaggttattgatctcaggaattgtatttgccaagtgaga

SEQ ID NO: 5338 - DNA, 461 bp, Homo sapiens
  I.5338 (H65331)
  misc_feature (359)..(359): n is a, c, g, or t
  misc_feature (371)..(371): n is a, c, g, or t
  misc_feature (381)..(381): n is a, c, g, or t
  misc_feature (405)..(405): n is a, c, g, or t
  misc_feature (411)..(411): n is a, c, g, or t
  misc_feature (436)..(436): n is a, c, g, or t
  misc_feature (451)..(451): n is a, c, g, or t
gatagatatcaacaaataagcactgggaatcttggactccctctttccctccaaattaagccacaattccaggcctcctttcagtttgaacactcactaaatttttgctgcttatagctcatcagggaaactcttgcagaactattcctggaactattccatgtggtgccttgggatttgagtctaatttccatgtttctctcactctcaaaactgacccctcatttatccactcatttattcgctcacccacccatccatccatccatccatccatccattatccaacagactttccttgaggtaccaggattcatacactaccgtattataggctccataggactctttcttcactnttcaggttcagnacaggagggntattgttaaggggtatggggtttncctttncggggggaacggccggggcattttnaacagggggggtttnaccagggggg

SEQ ID NO: 5339 - DNA, 443 bp, Homo sapiens
  I.5339 (H64938)
  misc_feature (378)..(378): n is a, c, g, or t
  misc_feature (397)..(397): n is a, c, g, or t
  misc_feature (426)..(426): n is a, c, g, or t
  misc_feature (439)..(439): n is a, c, g, or t
tttattagatagtctgcaaagcactgtgaaacattacatacattatctcaattattttttatgaaaaccctatgaggtggatatttacgtccacgtctacagataatgcaagagtttctgaaagaataagctacaaacccgtgacatgcaatttacctattaaatgaatctaaaagtttaaaaaagccgggcgcagtgggctcacgcctgtaatcccaacactttggggagggctgaagtggggcaggatcacttgagggccggggatttgaggaccaggctttgcccaacagggtgaaacctcggtcgttacttaaaaatacaaaaattaggccggggtgtgggtgggtgatggcccgctacttgagggaggctgcnggcacgggggattcacttngggcccggggggcagggattttgccgttnaggcccaggtttntggc

SEQ ID NO: 5340 - DNA, 460 bp, Homo sapiens
  I.5340 (H64937)
  misc_feature (346)..(346): n is a, c, g, or t
  misc_feature (388)..(388): n is a, c, g, or t
  misc_feature (401)..(401): n is a, c, g, or t
  misc_feature (430)..(430): n is a, c, g, or t
ataacttcaatcctaatgttattaagcatatcgattcagggtatagctataagatgaagtcctaaaagtataatttagactaaatacaaatacccatttcgctagctgttttgtttcagaggacttgttgagcagcttcactaataatgccatttttgaagacatggcaggttcagaatcaataaactggaagaattgttcagagcatcttttttcagacagtgatgacattgattctgtatatgataaagtgattctgcttctctttgacaacttgcatctctcctacatggaagtaagttttattcctgtcaatgttgtctttgtgtgtgacagattagggttnaaattatggtttgactttttcctaggcagcgtgatccagggncaagtgggcttanttttttttttttttttgaggacagagtcncactctgctgcccggggtgggagtgcagtt

SEQ ID NO: 5341 - DNA, 359 bp, Homo sapiens
  I.5341 (H64070)
  misc_feature (1)..(1): n is a, c, g, or t
  misc_feature (180)..(180): n is a, c, g, or t
  misc_feature (328)..(328): n is a, c, g, or t
  misc_feature (337)..(337): n is a, c, g, or t
ntgaacctaatttattattcctttttctttttaattcagtctttgatctgaaggtaaaagtctttcgctattcaagtcaacgttgtaaacattaaggcacaataggacatttgtaaaagtatttttaatttctatagatgaataaaaatattttatggtaacttatttctccccctcttnccaccccctaaaaggatagcacagcagaaacaatcgcttgtttgtgcttttgctataggttagagaaagtgaggacatgtcatttccctcttaatcaaatataagccctcatactgttctccactagccttgtgctttgaggcttggngtcaccctnttaaaatttgctaggatgaggg

SEQ ID NO: 5342 - DNA, 378 bp, Homo sapiens
  I.5342 (H64017)
  misc_feature (3)..(3): n is a, c, g, or t
  misc_feature (130)..(130): n is a, c, g, or t
  misc_feature (211)..(211): n is a, c, g, or t
  misc_feature (294)..(294): n is a, c, g, or t
  misc_feature (315)..(315): n is a, c, g, or t
  misc_feature (351)..(351): n is a, c, g, or t
atncaatttgtttccttgctcacttcctgaattaaatcctttaattttcaatcttttgggaaatggtaaaaaaaaaaatttatgtacatgcgcatttttttacacacagtttcatattttataatttttncaaaaaaaaaaaacagaagctcggggagctgctgggtgattttgccaacactgggtgggatgtaagtaggcagagactganggcacagacttgggggagggagagtctcctctgttcctcattctaggcaaattttaacaggggtgacaccaaggcctcaaagncacaagggctagtgggaggancagtatgagggggcttatatttgattaagggggggnaatgacatgtccctcactttctctaac

SEQ ID NO: 5343 - DNA, 438 bp, Homo sapiens
  I.5343 (H63111)
  misc_feature (43)..(43): n is a, c, g, or t
  misc_feature (70)..(70): n is a, c, g, or t
  misc_feature (118)..(118): n is a, c, g, or t
  misc_feature (256)..(256): n is a, c, g, or t
  misc_feature (315)..(315): n is a, c, g, or t
  misc_feature (350)..(350): n is a, c, g, or t
  misc_feature (415)..(415): n is a, c, g, or t
  misc_feature (423)..(423): n is a, c, g, or t
  misc_feature (430)..(430): n is a, c, g, or t
ttttatataaaatattttattagagtctttattctttataagnatctaactttatatttatacgctctgncctcccccgcctggccagttgggttgttttgtctaacgttcattgcgntctaattcggctggcatttgactaaggccttaatgggttttgactatactcttcccatctgcaccacagacctggggatgagagaggtttttcttttcttcttgcagtaaaggctgattgaggattcagaagctgggnattctatgggagatgagggaaatatcataggaataatactatcaaacacacgcctgggngccaagtctgcacacctgcatgtatgtgtgtgcangtatgtgtgtccatgtgccatgtgtgtgcatgtaatgtgtgtggcagtgtgtgtgtgtgtgtccnagtgagtntgtgtgncagtgttt

SEQ ID NO: 5344 - DNA, 396 bp, Homo sapiens
  I.5344 (H62459)
  misc_feature (12)..(12): n is a, c, g, or t
  misc_feature (98)..(98): n is a, c, g, or t
  misc_feature (161)..(161): n is a, c, g, or t
  misc_feature (358)..(358): n is a, c, g, or t
catcgggaacantcaaaatccatttctactaagtgggagagtgtaaaatcccagggagggtgggatcgactgtctcccactctgtttgaacttacttnccagcttcaccatttccacagcggtataatcctgcattgtggtggtctgccttctttcaggtngaggcaagtcttgtagggctaccctctgtgggtgtggttggtcttcttttatcttggtagtgaccatcagacatgctgagaggatgggaacctctatgggactcatcccagtcctcatcctccctgccactagatctcttcacggggtcccaggacttagggttccaggacaattttagtcatgatagtcctaactncatgtgggcagtcagtgaccctttcaaacaggctattg

SEQ ID NO: 5345 - DNA, 349 bp, Homo sapiens
  I.5345 (H61650)
caaatattcccagacattgataagattccagttctattataggtttttaccccaaaggaaagaaaatatatgtccatatatatattagactgttttcatactgctataaataactacctgagactgggtaatttatgaggaaaataggtttcattgactcacagtgaaggaagacacatcttcccatggcagagcaggagagagagcgagtgagcaggggggagagtaccacacactcttaaaccaccggatctcataactcactatgatgagaacagcatgggggacatccatcctcatgatgtaatcacctcccaccagggtccctcccccaacactggggatttac

SEQ ID NO: 5346 - DNA, 364 bp, Homo sapiens
  I.5346 (H61608)
  misc_feature (292)..(292): n is a, c, g, or t
  misc_feature (340)..(340): n is a, c, g, or t
  misc_feature (345)..(345): n is a, c, g, or t
cgccaaattaatgatcaaaaaatggtattttgtcggttcaacttacatgtccttaatgattaaaagctatgtatctgtttattatttacccattttaaaattagtcttatattgttaatttgatcttgatattgtaaaaatattgtctctttagagtggtttgaatatgatcttgataaaacaatgaattgaactagatgactttgaattttatgatatcatggtttccttatgattaaatgattatgtgacaacttcttctccaggggtaaatttccaacgttatatttcnggctttattggatcctttaacagttaaggggaaggaaagtcggaggcngggcnttggcccgcggaaaagggg

SEQ ID NO: 5347 - DNA, 396 bp, Homo sapiens
  I.5347 (H61595)
  misc_feature (274)..(274): n is a, c, g, or t
  misc_feature (366)..(366): n is a, c, g, or t
  misc_feature (391)..(391): n is a, c, g, or t
cacctgttcattggttcactgggctgctatctgtgggctgatgctctaccaagtgctcagcctacagcagtcaggaggcagccatggcccctgcgctgatggagcttgtaatttagccccaaactgatcttcagaaagaggtacaacaaatagttccagcagttagaataaaagcgacacatccaaagaaaaatcagagaagcacatataatttcccatgcagatcaactgtgaaatggatgaactcaggtaggcaatttcactgatctttganggcagagaaatgaggactattttaggatctttttagggcttttgggttttgaacatttgtaggatttcatttaccccaaaccataatccctnttaagtaggatttttggctgtttanaattg

SEQ ID NO: 5348 - DNA, 399 bp, Homo sapiens
  I.5348 (H61594)
tcctaaattaaataagttactcatagtcgaataatttgaaaaactgaattataaaggaagaaaaaaagttttcaatttttaacagcaaaaattctacttaatatgggattatggtttggggtaaatgaaatctacaaatgttcaaaaccaaaagcctaaaaagatctaaaatagtctcatttctctgcttcaaagatcagtgaaattgctacctgagttcatccatttcacagttgatctgcatgggaaattatatgtgcttctctgatttttctttgggatgtgtcgcttttattctaactgctgggaactatttgttgtacctctttctgaaggatcagtttgggggctaaattacaaggctccatcagcgcgggggccatgggctggcctcctgga

SEQ ID NO: 5349 - DNA, 463 bp, Homo sapiens
  I.5349 (H61453)
  misc_feature (146)..(146): n is a, c, g, or t
  misc_feature (189)..(189): n is a, c, g, or t
  misc_feature (194)..(194): n is a, c, g, or t
  misc_feature (296)..(296): n is a, c, g, or t
  misc_feature (364)..(364): n is a, c, g, or t
  misc_feature (387)..(387): n is a, c, g, or t
  misc_feature (420)..(420): n is a, c, g, or t
  misc_feature (429)..(429): n is a, c, g, or t
ccaacttctgccttttgattagcgcatgcaggaccatttatagttaatgtgattattagtatgattagatttgtgtctattattttgctgttttctatttgtcctatatgttttcttctttttctgccttattttttattaatctntttttataattccactttatttccttttattgactagctacanctctnttattttagtgggtttaagggttatagtatcgtatgggcagatgcacctgacagcaataactcaaggcataccctaacaatgaccctatgggtccaactagnaatgtggggttcacacttccaagctaaggaaatgtggggagtggcccaactcaggaggatctgctccntttctaggggagggacatctggnaccatctgaacctctgggccccattcttggggnttgcagggngtaacagaggggtccagggccctttgattcaggg

SEQ ID NO: 5350 - DNA, 370 bp, Homo sapiens
  I.5350 (H61080)
  misc_feature (315)..(315): n is a, c, g, or t
  misc_feature (334)..(334): n is a, c, g, or t
  misc_feature (364)..(364): n is a, c, g, or t
ctttaatgagatatacctgagctacaataaactgtacatattaaatcatataacttgatgttttatcatatgtatatgcctatgaaaccgtcctcaatcaagataatgaatatattcttcacccccaaaagtttcctcgggagccttgcaatccctgcctccagctcctcttccttcctgtctccaggacccgggaaccactgaactactttcagtttctaggacattaggtgtgggatttcctaggaattttatggtaaaaggggaacatatcttggcaggcggggactctcgtgtgtgggcttctttcacttnggcataatggttttggggntggtaatcatttcaatggccggtatccatngggtcc

SEQ ID NO: 5351 - DNA, 198 bp, Homo sapiens
  I.5351 (H61046)
  misc_feature (1)..(1): n is a, c, g, or t
  misc_feature (2)..(2): n is a, c, g, or t
  misc_feature (3)..(3): n is a, c, g, or t
  misc_feature (6)..(6): n is a, c, g, or t
nnnaanctgatagaaggtcttgctctgtcacccaggctggagtgcagtggtgccagatcatggctcatgacagtctcaacctcccaggctgaagtgatcctcccaccttacctccccatccccccaatccccagtagctagctgggactacaggagtatgctactgtgtccagataattaaaaaaaatttttttcctt

SEQ ID NO: 5352 - DNA, 274 bp, Homo sapiens
  I.5352 (H60141)
  misc_feature (1)..(1): n is a, c, g, or t
  misc_feature (108)..(108): n is a, c, g, or t
ncttgtcagcaagtaatggacagagcccttccattgtggggctcacaagagcaagtgaaccaagtcagattgccttggttagcattctggtactgccacttctagctntgttgtatttggcaagctgcttaactttcctgaatctcagtgtctgcatctgtaaaataggaccaccaacacccacctcagagagttgtcggaagggatcagggaaactatgtttgtgaagcactcagcccaatgcctgggctcagtatcaaagttcagtaaggca

SEQ ID NO: 5353 - DNA, 411 bp, Homo sapiens
  I.5353 (H60140)
  misc_feature (356)..(356): n is a, c, g, or t
  misc_feature (409)..(409): n is a, c, g, or t
tatcatgtgtaatctttcaaaatgaaaaaagaataaatcaataatatagtgattttgtttggcttcacgtaataatagcagggggatcccccaccgtgtgagtcattgatgtatagtcatacactgcagctgtgactgtctcaaatttagtcatttccaggcgaatttgcagttaaatgattaacctataggtactatgagttgccattaaaaagccaagcctctcctgatgtctttcctgtcctgggcctattgtgaagcctttaggtgggcatctaccttcagttcatcaagatttaaaaagacagtttggaccctttttgtccaaggctttcccggggtcttttcatgccccnggggaagggtcctcctaggcacgtgggcagggtggcattacttcttcaggcantt

SEQ ID NO: 5354 - DNA, 631 bp, Homo sapiens
  I.5354 (H59670)
  misc_feature (391)..(391): n is a, c, g, or t
  misc_feature (435)..(435): n is a, c, g, or t
  misc_feature (442)..(442): n is a, c, g, or t
  misc_feature (477)..(477): n is a, c, g, or t
  misc_feature (483)..(483): n is a, c, g, or t
  misc_feature (498)..(498): n is a, c, g, or t
  misc_feature (516)..(516): n is a, c, g, or t
  misc_feature (535)..(535): n is a, c, g, or t
  misc_feature (556)..(556): n is a, c, g, or t
  misc_feature (570)..(570): n is a, c, g, or t
  misc_feature (578)..(578): n is a, c, g, or t
  misc_feature (583)..(583): n is a, c, g, or t
  misc_feature (588)..(588): n is a, c, g, or t
  misc_feature (618)..(618): n is a, c, g, or t
  misc_feature (624)..(624): n is a, c, g, or t
aattcttcaaaattccttaaaataaatgtgtgtgcatgtgtgtctgtgtatatatatagcctatgtaatgtctaatatagatctataatatatattagataaatatacacatacttatcatatatatatgtgtgtgtgtgtgtgtttctcctattggttctgttctctggagaacctaatacagaaacaaatctgtttattcttctagcctctgtatcatcaggcctctttgttagagcaggtgagctttaccctaactaattcagaggttgattcgttttcatgcatgtagatacttgtcatttagcttctattatctgcctgtattttaaggttctttgtcttaaaatgttatgactccagggatgttatatattaagtatattaaccntttgactattatatatcctggcaaacatcttgtaatcagtcacntgtcccnttattttatttgggagcggctttcaacccagggcngtgggncccaaacccgggggnggcggactattcccgtcngtggggttgttaaggaccngggtacatggcggaggtgagnagccgggcgcgggncatgaccnccggngctcngctcccgtcagggccggcggcggcataggntctctnggggctg

SEQ ID NO: 5355 - DNA, 321 bp, Homo sapiens
  I.5355 (H59625)
  misc_feature (5)..(5): n is a, c, g, or t
  misc_feature (208)..(208): n is a, c, g, or t
  misc_feature (236)..(236): n is a, c, g, or t
  misc_feature (244)..(244): n is a, c, g, or t
  misc_feature (280)..(280): n is a, c, g, or t
  misc_feature (287)..(287): n is a, c, g, or t
ttttnacattaaaatcagcataatttatatcctttgaaaggttcaataaaatataacaaccagttagatggcaagtgggcacagagcaaatacacaaaaatcaatactttccatagataccattaaataatcaataggagaggacatttgcaataccaacaacaatcataaataatctaggcataggcataaccaaaattctggagancctacatgaagaaaaatgtttaatcgtnttaaaggncataaattgagagatgtattatgtttcccgtaggcngcttcantattgtaaaagtgggcaattatttgagttgctcc

SEQ ID NO: 5356 - DNA, 430 bp, Homo sapiens
  I.5356 (H59303)
  misc_feature (374)..(374): n is a, c, g, or t
  misc_feature (410)..(410): n is a, c, g, or t
agacgaacaaggtcctgggtccctacatgtcatactggctagagactgggaaacagattaactgagagaagccatcaagcctgaagagacatcgtgtttgaaatgtgtaaggcacagtgtacccgccgtggatcaaaacaacctgaaggacagacagacagacacaccgaggatcagcagatatcagtggggacaggtgctgatgatggtgcaaatgagagtcatgaaggaaagttaaatgatgaccaaagaccaagtaccttccccacaatgctttgacaagcgcttttataagcaccctgggaatttagacactacccggggagaaaaggaaagggagacaagcatgaatttgttcttgaggaaacccctgnatttattcatgtgttaccccaatggcaacagggttntaggtattaggattattttt

SEQ ID NO: 5357 - DNA, 308 bp, Homo sapiens
  I.5357 (H59258)
  misc_feature (3)..(3): n is a, c, g, or t
  misc_feature (28)..(28): n is a, c, g, or t
  misc_feature (83)..(83): n is a, c, g, or t
  misc_feature (139)..(139): n is a, c, g, or t
  misc_feature (147)..(147): n is a, c, g, or t
tanatgattaagtcacccagtttgtggnactttattacagcagctcaaggagaattacaaagtggatggattgagtacaagtnccttcatcgtaagtggaagcagaagttcctaactcttttagtatttgtcatctganctactttnctatcttttacctcctccaatagataagttattaggaagggcaaatattgcttcttgattttttgttttccgtctatctaaggcttgaattttatgtgcacggtaagggtaggatgtgaaattcatgggggcatcaaataggggggggggtaaaatataat

SEQ ID NO: 5358 - DNA, 465 bp, Homo sapiens
  I.5358 (H58113)
  misc_feature (1)..(1): n is a, c, g, or t
  misc_feature (434)..(434): n is a, c, g, or t
  misc_feature (452)..(452): n is a, c, g, or t
  misc_feature (457)..(457): n is a, c, g, or t
  misc_feature (463)..(463): n is a, c, g, or t
naattttttaaaggaaaatgttccctttgcaaacaaggtacgtttattctgcaacttaggagataaaatgagatttctgtggggagtctatgttgtgctttctggtggccttaaaagaaacagacaaatttgtgctaaagataaaaatgaattacattccacaaagccaactctatgagactaaacagagaggattgccttgagacaagatgtgaagttgaacatcagtccgaacttttgaaagaaccctcgagggtggggctggggaggtaggcaatctcgacgcaagcttcctctactgccttctgtgcaagagggtgtctcctcggagacagaatatgatgtcatcacttgatcatcaagagattagggttcattcaccagactgtactttctttaatggcttacaggtcttaacgcagagctgtcccgtnttgctccaaacaagtccntgccngggggntt

SEQ ID NO: 5359 - DNA, 453 bp, Homo sapiens
  I.5359 (H58112)
gaaaggagtgtggtgatcctcggaacatcagcagacaggctgttcatgataggaacacattgcagcggggaaggaggatggctgagatatgaaatacccttcaaggtggacgcatacccaggggcatgtcattcggtggcaggggccagcacggacatgcagcactgaggcgtgtgctagcgcccagtgcgttcgacccaggcacggacttgtttggagcatacaggacagctctgcgtttaagacctgtaagccattaaagaagtacagtctggtgaatgaaccctaatctcttggatgatcaagtgatgacatcatattctgtctccgaggagacaccctctttgcacagaaggcagtagaggaagcttgcttcgagattgcctaccttccccagcgcccacctttcgagggttttttttcaaaagtttcgggattgatgtttcaactttc

SEQ ID NO: 5360 - DNA, 415 bp, Homo sapiens
  I.5360 (H57394)
  misc_feature (329)..(329): n is a, c, g, or t
  misc_feature (331)..(331): n is a, c, g, or t
  misc_feature (366)..(366): n is a, c, g, or t
  misc_feature (397)..(397): n is a, c, g, or t
aaatgtccaggcctcctcctcagatcttaaccaccatcactgaacctgaaatcctgtgtttcccaaagtgtccttgtcactgtcatgagaggatcaaggagaggaccttgttttctttccccactcacactctacaccaccacaggcccagcgagagagacacacactcaggagctctcacatgacaaatgaaggaatggaatgaagaaatgaatgatccaaaacctctttagagattggatcttggatgcagaatcctaggaggttctagccacacctgtcccttgtccttcagaggctggacatccatgtttcatccccccacttancnctttgcccctaaagccaccccacctcatgtaattntgaaaggtctttaaggccaccggagggtttnttcggagggggttccttg

SEQ ID NO: 5361 - DNA, 398 bp, Homo sapiens
  I.5361 (H57346)
  misc_feature (231)..(231): n is a, c, g, or t
  misc_feature (273)..(273): n is a, c, g, or t
  misc_feature (275)..(275): n is a, c, g, or t
  misc_feature (309)..(309): n is a, c, g, or t
  misc_feature (325)..(325): n is a, c, g, or t
  misc_feature (335)..(335): n is a, c, g, or t
  misc_feature (394)..(394): n is a, c, g, or t
ggaacttgtctggaattatgagagtggatggaggaactgcctatccctgtcccatggtcttgtccacaggtcagcctcacaaagggaaagagccctggatgggaatacagtggaaggtcattctcttagtgacctggggacattggctcgagaggaagcctggcaggagtggcaactccagatgatttctgtgcctttcctctttcctgggaggtgggccaggccacagtnttagtgggaagggaactgaacagccagagtggttagagggantntctagggaaggcctagaggttgaggaagaagctntgcaggacagggcttnccagtcagantgaagtgggaggaagatgagggacacagagaagcagagagaggcagatacacctggcanttag

SEQ ID NO: 5362 - DNA, 412 bp, Homo sapiens
  I.5362 (H57206)
  misc_feature (382)..(382): n is a, c, g, or t
  misc_feature (400)..(400): n is a, c, g, or t
aaataaactttaattttaaattcggaaaaaagaaatgccgtagagaatcagttttcattcaaataaatttccacttatttttaacccctgggagccctctagtgtcctgttcgcaaacagactcagaaatgtcagtctcatgaagttcaaaagatcgagaatgtttgctatcttggtggagcagccgcagccaagcaagtaacttgtaaaatgaggaatgccatcacccctcgagtgtccatcccacataacttggggttagagcacaagcgttcccagggaactactcaccttaccatcttggccgtttcatttgtcttccaccagttctgggaaagagaaggcctaggaagttcaggaaaaaaagggaaaagtgcttttnggagaaaatcacctgttntcctcaggaact

SEQ ID NO: 5363 - DNA, 384 bp, Homo sapiens
  I.5363 (H57135)
  misc_feature (2)..(2): n is a, c, g, or t
  misc_feature (7)..(7): n is a, c, g, or t
  misc_feature (324)..(324): n is a, c, g, or t
  misc_feature (332)..(332): n is a, c, g, or t
  misc_feature (337)..(337): n is a, c, g, or t
  misc_feature (348)..(348): n is a, c, g, or t
  misc_feature (353)..(353): n is a, c, g, or t
  misc_feature (383)..(383): n is a, c, g, or t
tnatgantggtaagggcttgcatgtattaattcatctaatcctcacaccagctctatgagattgatgccattattaagaaaggtaaaacaagtattcaattatgataccccgcatttcaattacattgccatgacttacctcattatagcctcatataggttaccatagactagttctaaatttcaaaggcaaaaattgccaaagatttgaatccaaagtagcatgcagactacagtcctgattatattttaagtcttttgttaagtataaaagaagatagtgaagcaaattctgggataatttgctgcattagtaccttaatnataccacnttttnctggacctggnaatcnaggggtttgaccaggggggtcttcccaccng

SEQ ID NO: 5364 - DNA, 415 bp, Homo sapiens
  I.5364 (H56331)
  misc_feature (330)..(330): n is a, c, g, or t
  misc_feature (361)..(361): n is a, c, g, or t
tataccattttatttgactattacacatcttagggaagtgatttggatttagagagaaaatattgaggtagggtttttctatcatacaatgtcttggattaccatctgcttacaaacatgattatggacccaaatgctgagaggaactgagcttcaaactcatagaattcttggagttttgcccagatcaaatgtgcttgatgagtttggacactatacatgcttttaacatactaaagctgaatgataaaacctcaggtactccgtaaatctgaatactttgtgaacccacaggagttgttcagggtacgggtatgacttctattgggncaatctgtgcccaaaaactcctctatgttcnggtccaaccccatgctttcccagtggcactgaaagggggatttgtttggggcca

SEQ ID NO: 5365 - DNA, 404 bp, Homo sapiens
  I.5365 (H56288)
cagcggtggcccgcgcgcattctgacccctgactcttccagccagaaagatggtggttttctaaaggaactttagctgtcctgcacaatgccgatctgtgtcttgcattttgggtaaaagccataaaaataagaaactcagcctgtggctttctttcttccaaggctgggcttctttttttaagtgacttcatgcagtttgttgcttttaaaaatttgtccagaatcgttttctgcagaagcatggtctgttaggagcttactggccgtagcagaagcaattgtttcctgaattcttgacatttatctttgctgtattcatttagggcttgggagagtccgaagataaattcagtcactgtcagattaataattttgtcaggacaaagaataccgttatggatt

SEQ ID NO: 5366 - DNA, 320 bp, Homo sapiens
  I.5366 (H56086)
  misc_feature (87)..(87): n is a, c, g, or t
  misc_feature (160)..(160): n is a, c, g, or t
  misc_feature (177)..(177): n is a, c, g, or t
  misc_feature (204)..(204): n is a, c, g, or t
  misc_feature (247)..(247): n is a, c, g, or t
  misc_feature (254)..(254): n is a, c, g, or t
  misc_feature (271)..(271): n is a, c, g, or t
tttaaaacagaaatgcagtagtaagctaaaccttttgccattcatagggaaacaaatatcagtaatcctctttgttctaaacaaaanttcataattatttatacattttaaaatattatattgtttcaaatgttgttagtggggcaataaatcataaagngatacaaccagtcgaanttagacttttaaagatttactctcaangacattgcaacaactccaaagtccagggttcttataggactantttattngtaacaacatttacaangttaggctttttaaatgctgagttgtatctgatttaatgcagtcaggaa

SEQ ID NO: 5367 - DNA, 439 bp, Homo sapiens
  I.5367 (H54870)
  misc_feature (20)..(20): n is a, c, g, or t
  misc_feature (251)..(251): n is a, c, g, or t
  misc_feature (321)..(321): n is a, c, g, or t
  misc_feature (372)..(372): n is a, c, g, or t
  misc_feature (408)..(408): n is a, c, g, or t
  misc_feature (434)..(434): n is a, c, g, or t
cttattgcctgcaaagctgnctgaaaaagtagtttctcaagaaaagcagtttctcaagaaacatttcagtaataaatgaatgagtgaaatggtgtgtaagccataaccatcttagaaacagctgtgaaatcaagcatgctcgctgggagatgtggctcctctccgcggcacagtgtctatatcactgatcaggtggacagatagtcccagaaggaggccctcaccaacccatttccccagacacagtcagnaactggggtcagctgcagagatgggaaccgcaagagggatggagacccttaacaaggaccagggaaagtngtgtatggcattaaaggaaagggaagctgttcttggaaatgttgccagtgnacctcatccctgttccctgagggccagcctggagtncttgcagttgcagttgacccttttgncgggg

SEQ ID NO: 5368 - DNA, 473 bp, Homo sapiens
  I.5368 (H54817)
  misc_feature (168)..(168): n is a, c, g, or t
  misc_feature (405)..(405): n is a, c, g, or t
  misc_feature (411)..(411): n is a, c, g, or t
  misc_feature (419)..(419): n is a, c, g, or t
  misc_feature (433)..(433): n is a, c, g, or t
  misc_feature (444)..(444): n is a, c, g, or t
  misc_feature (457)..(457): n is a, c, g, or t
  misc_feature (463)..(463): n is a, c, g, or t
  misc_feature (469)..(469): n is a, c, g, or t
acagtgtgttcatggctttatttgctgttagtccgaggcctgaggtcaccctggcagatgggtcacttgcactgcaagcactcatgctggcctcagggacagggatgaggtcactggcacatttcaagaacagcttcctttctttatgcatacaccactttcctgggnccttgttaagggtctccttcctcttgcggttcccatctctgcagctgaccccagttctgactgtgtctggggaaatgggttgggtgagggcctccttctggggactatctgtccacctgatcagtgatataggacactgtgccgcgggagaggagccacatttcccagcgagcatgcttgatttcacagctgtttctaaggatgggttatgggctttacacaccatttcactcattncatttnattaactngaaaagttttcttngaggaaaccgnttttcttggaggnaactantttttnaagg

SEQ ID NO: 5369 - DNA, 403 bp, Homo sapiens
  I.5369 (H54512)
  misc_feature (209)..(209): n is a, c, g, or t
  misc_feature (265)..(265): n is a, c, g, or t
  misc_feature (280)..(280): n is a, c, g, or t
  misc_feature (349)..(349): n is a, c, g, or t
  misc_feature (358)..(358): n is a, c, g, or t
  misc_feature (388)..(388): n is a, c, g, or t
  misc_feature (395)..(395): n is a, c, g, or t
gagacagagtcttactctgtcacccaggctagagtgtgacgttgagatcttggctcactgcaacctctgcctcccgggctcaagcaattctcccgcctcagcctcccaagtagctgggactacaggtgtgctaccatgcccagctaatttttgtagttttagcagagacaggatttcattattttggccaggctggtctcaaactcctnacctcagacgacctgcccgcttcagcctcccaagtgctgggattacaggcataagncaccatgcccagggncagaatttgcccatttttaatgcatgttctccatctttcataggaaaaagccatatatcctactaaggntatttatgnaggaccataggttttaggcccatgacaagnttgtttnatcctttg

SEQ ID NO: 5370 - DNA, 435 bp, Homo sapiens
  I.5370 (H54423)
  misc_feature (360)..(360): n is a, c, g, or t
  misc_feature (372)..(372): n is a, c, g, or t
  misc_feature (390)..(390): n is a, c, g, or t
  misc_feature (395)..(395): n is a, c, g, or t
  misc_feature (401)..(401): n is a, c, g, or t
  misc_feature (415)..(415): n is a, c, g, or t
  misc_feature (423)..(423): n is a, c, g, or t
tgttgttgaatattccttaatggagtcgatgaatttgcagagacccctccaagattcttttgtttgattcctttcatgaccatcaccctagaccttcaagtttgctgactagatttgggggttgtgtgtttagaaaggataacaagcttgtcatgggctagaacctgtggtcttcataaatagcttagtaggatatatggctttttctatgaaaggtggagaacatgcattaaaaatgggcaaattctggcctggggcatggtggcttatgcctgttaatcccagcacttggggaggctgaagcgggcaggtcgtctgagggtcagggagttttgagaccagcctggcccaaaataatgnaatcctgtctcntgctaaaactaccaaaantagcntgggcntggtagcacacccntagtcccngctacttgggga

SEQ ID NO: 5371 - DNA, 421 bp, Homo sapiens
  I.5371 (H54358)
  misc_feature (1)..(1): n is a, c, g, or t
  misc_feature (403)..(403): n is a, c, g, or t
  misc_feature (412)..(412): n is a, c, g, or t
nttgggatacacctaccacattatccaaccgttccacccctaactagagaaaagaaagcctgtctacatagacttgtacacaaatcttcagaacagcttcacttgtagcagctccaaattggaaacaattcagatgtctatcaacaggcaaatggattaacaatggaatagtattccaggatgaagacagaattattgatacgtacgacacagatgaatctcagaagtccagacctggccggcgtggtggctcatgctgtaatcccgacactttgggaggccaaggcaggcggatcacgaggtcaggagttcaagaccagtttggccaacatggtggaaaccccatctctacttaaaaattcaaaaatttagctgggcattcgcagcacgcgcctggttaatncccagctantttggggag

SEQ ID NO: 5372 - DNA, 353 bp, Homo sapiens
  I.5372 (H54279)
  misc_feature (5)..(5): n is a, c, g, or t
  misc_feature (224)..(224): n is a, c, g, or t
  misc_feature (348)..(348): n is a, c, g, or t
tttangtcttcaggctattgtgaaacatgtcctagctgttagcttacctctcctcattaagagctagaaatgtctaaaagcaaagcccaggaattctggagctttagaaggccctaggctaatttaaagcgacataccccatatgtgacagtcattttaaaatggctttgaggcacaactgacataaacgatacacacttaaatttggtgacttttgagcgaancattacaatctagaccccaaacatccccctgtaagtatcactgcccccattaaaatattttcatgtccaggcaatcggtgatctttcagttgctttattggtttgtaatttttagggattttcngtgtg

SEQ ID NO: 5373 - DNA, 425 bp, Homo sapiens
  I.5373 (H52974)
  misc_feature (410)..(410): n is a, c, g, or t
  misc_feature (423)..(423): n is a, c, g, or t
ggtattttttagtggagacagtgtttcactgtgttagccaggatggtctcgatctcctgaccttgtgatccgcccacctcggcctcccaaagtgctgggattacaggcatgagacaccgcgcttggcctcccctagcttttttaaaatgtacaccctcctaagtagaatgaagaccaatggatgtagcttaaagagctacataaaatatgcagtgataagctacaatggatgtagcttaaagagcaacataaaatattcagtgataatactttattgcaactaaatgaactcttgcaaagtttcctccagttgtgaaagtcatgggctttcaggataataatgagggctttttccctttttaattggactagttttccctattaaccatcatattaccgatttggttacntgtggcaaggggntg

SEQ ID NO: 5374 - DNA, 358 bp, Homo sapiens
  I.5374 (H52810)
  misc_feature (4)..(4): n is a, c, g, or t
  misc_feature (6)..(6): n is a, c, g, or t
  misc_feature (338)..(338): n is a, c, g, or t
taantnatttccctaggtccagcccctagaaccaccacacagattccacccagaacaaaatgctctacaaataagaaatgctattgcttacattattttatgagaaagcactgacatatcctgaggatatatccaagacatttcaccgtcttttaacagaaaacataattcagtttgaatgttagatctgcgtctagaattctgtttaaaatgaacattaaagcaaaaatcccaccatcctattgtactcaggaatgaaccaatctccacaaaccatgaaatagttaagggctgattcattcacaactaattcaggtaaacttaatggaaaggcgggncaggaatgtggggtttgaag

SEQ ID NO: 5375 - DNA, 453 bp, Homo sapiens
  I.5375 (H52773)
  misc_feature (298)..(298): n is a, c, g, or t
  misc_feature (390)..(390): n is a, c, g, or t
  misc_feature (430)..(430): n is a, c, g, or t
  misc_feature (449)..(449): n is a, c, g, or t
tggagaatagtggggctgacatctctgcgattcttctagctgtttctccatgctatttgtcttaaagttcacaaaaatggctacagtattttatatcatatccacattcaaaacagatgaaggtgatggtggcaggaggagtggggtgggagatttcagtgtaagtaatttccatccctctatcaacaaaagcaaaagtgtttgctgagtccatgtcaggacatctgtttacttctctgtggctggaaaatgatgacatataatcatataaggaaagggtgggaaaatgaggaccttnacctcaggcaggacaaacaggctggcccttcagcgagggcttttcttagggggggaggaggggggctaaatgtccatctaggggtcactaantatttggggctggctaacaatatgggcctcataactgtcntttattcaggctttcaatnccac

SEQ ID NO: 5376 - DNA, 374 bp, Homo sapiens
  I.5376 (H52697)
  misc_feature (312)..(312): n is a, c, g, or t
  misc_feature (344)..(344): n is a, c, g, or t
  misc_feature (356)..(356): n is a, c, g, or t
  misc_feature (371)..(371): n is a, c, g, or t
tatttaaacctggagttaacggaggtgaagactgcttagcttcaggtcctgggtatgatgctgagcagctgaacaaccttgaaaagtcgtttaacctccctaagtctcagtattctcttcttcaacatagagataataatagttcttacctctaagagttctgagatcaggaaataaatcaatgaggcataaagctcttagaattgtgcctgggaatataatgtatgctcaataaactttagccattgctattcttattttataatcttttgtaggatattgatgaagtaggaaactgaaaaagtatggganatggaaataggctctaaagtaataaaaggganaatgtccccgantggggtataattttnagg

SEQ ID NO: 5377 - DNA, 481 bp, Homo sapiens
  I.5377 (H52638)
  misc_feature (42)..(42): n is a, c, g, or t
  misc_feature (450)..(450): n is a, c, g, or t
  misc_feature (465)..(465): n is a, c, g, or t
gagttttgctcttcttgcctaggctggagtgcagtggcagantctcagctcactgcaacctccacctcccagattcaagtgattctccggcctcagcctcctgagtagttgggactacaggtgtgcgctaccacgcccggctaatttttgtatttttagtagagatgggggtttcaccatgttggccaggctggtctcaaacttctgacctcaggtgatctgcccgcctcagcctcccaaagtgctgggattacaggcatgagccacgttgccagccattttctttgatattctatgcactaagtaaattactaaatctaatcctaaattattggcttatcaataaatttttggggactatcctccccactccaaaataaaataatactttccgtagtgggtttttggattacaagaaacatccttggcaagtaaaaaaagtaacatttngataatccttggaantgggagggaaatactt

SEQ ID NO: 5378 - DNA, 430 bp, Homo sapiens
  I.5378 (H52637)
  misc_feature (379)..(379): n is a, c, g, or t
  misc_feature (418)..(418): n is a, c, g, or t
  misc_feature (427)..(427): n is a, c, g, or t
gaccaacctggccaacatggtgaaaccccagtctctactaaaaatacaaaaattagccgggcatggtggtgtgtgcctgtaatcccagttgctccagaggctgaggcaggagaatagcttgaacccaggaggcggagattgcagtgagctgagatcatgccactgtactccagcctgggtgccagagtgagactccatctcaaaaaaaacccccaaaaattaaaatagtagcagatgatagggaaaagtcctatatgacatcagtatagctaattacatgcatggatttcaaaaccatttctatatatattttatttcaagttttataatagttaaaactatagaagtatttaccttccaattttcaatgattattcangattgttactttttttaacttggcaagggatgttttctngtatttcanaaa

SEQ ID NO: 5379 - DNA, 352 bp, Homo sapiens
  I.5379 (H52503)
  misc_feature (10)..(10): n is a, c, g, or t
  misc_feature (74)..(74): n is a, c, g, or t
  misc_feature (228)..(228): n is a, c, g, or t
  misc_feature (253)..(253): n is a, c, g, or t
  misc_feature (306)..(306): n is a, c, g, or t
ggcattacanacctttttgcacataacaatgctttcagaacaactttctttatgactattctcaacagttaccnagtattccattgtgtggatatacataatttgtttaaccaatcccctatattttaatattacatttccaacttttcactatgataaagagctctgggatgaataatgaccttgattatttcttaaaataagcccctaaaagtagaattgctgggncaaagagtgtgtgagcatctacggnctcactcttcaaagctaccctctagacccttatcttgaagggcagtaggtcanggaacttttactatttaggggaaggctactatggggctttctcaag

SEQ ID NO: 5380 - DNA, 520 bp, Homo sapiens
  I.5380 (H52284)
  misc_feature (380)..(380): n is a, c, g, or t
  misc_feature (404)..(404): n is a, c, g, or t
  misc_feature (422)..(422): n is a, c, g, or t
  misc_feature (480)..(480): n is a, c, g, or t
tcctctaaaaccacagtaaattgctccatttcctaaattacctcttcaagagaagactggttttgatgtcatttttaaataaaggagaagttgaatttcaaaaccaagtggaacaggaatgatgtgacttggttgacattgattttaacatttggttcatggtgagtgttttgctttattgttaaaaactcgccactaaaagcatgacagaacattttatcaaatgatggcgtcatcctttaccgtaagtttgcccctagcaagacagctcttcctgagacgtgcttgcaggcccctatgtgggttttcccaccgcagtcatcatccgtcatctgtgaccttgctgcatttactccatgctcacaccccagcagcccgcnggggtttgggcatcgcccttcagngggcatcaaacttccccnggtggcaatgttacaagagttaggccagggaggttggcaggagtgttttgggttttgntttttgttttttttgacatgtcggctgggttgggagtatt

SEQ ID NO: 5381 - DNA, 404 bp, Homo sapiens
  I.5381 (H51694)
  misc_feature (223)..(223): n is a, c, g, or t
  misc_feature (268)..(268): n is a, c, g, or t
  misc_feature (280)..(280): n is a, c, g, or t
  misc_feature (309)..(309): n is a, c, g, or t
  misc_feature (325)..(325): n is a, c, g, or t
  misc_feature (363)..(363): n is a, c, g, or t
  misc_feature (380)..(380): n is a, c, g, or t
  misc_feature (396)..(396): n is a, c, g, or t
gttatctagttaataaccataaacctagttaacagttctctgtattacattgtccctgttaaataattggtatagtttctgtcccctgactgatgtatctttataagcttaattctctattacaatacatttgtttatggttgtgatttgcacctctgggagggttaggttctaagatcagggtatcaaacaataaaacttgttgggtcccccaatacactgnctccttaaatgtaatcgaaattgggctgttgggccctgggggatnggagccagctanccctagctaaagacactgttggggcagtncaggagcagaattttngccagctgaaggagaaaggcctcttcatctgggctgtnggtcaagtgtccagttnccccagggctcttttngcaaaaca

SEQ ID NO: 5382 - DNA, 438 bp, Homo sapiens
  I.5382 (H51121)
  misc_feature (322)..(322): n is a, c, g, or t
  misc_feature (337)..(337): n is a, c, g, or t
  misc_feature (383)..(383): n is a, c, g, or t
  misc_feature (400)..(400): n is a, c, g, or t
  misc_feature (418)..(418): n is a, c, g, or t
gaggtttattggattcacagttccacgtggctgggaggcctcacaatcagggtggaaggtgaaaggcatgtctcacatggtggcagacaagagaagagagcttgtgcagggaaactctcatttttaaaactatcagatctcatgagactcattcattatcacaagaacagcatgaaaaagtcctgcctccatgattcaataatctcccaccagattcctcccacaacatgtgggaattcaagatgagatttgggtggggacacagccaaaccatatcattccccaactgcattcaatgctgctccccaaatttgacctgggnataggaagcctgggntgcatgtatctcatgggcacacttaaacttctctctcttacaggtnttttcagcttccccttngagtggggagggctgggnttttaacactagcttgatgg

SEQ ID NO: 5383 - DNA, 357 bp, Homo sapiens
  I.5383 (H51025)
  misc_feature (19)..(19): n is a, c, g, or t
  misc_feature (45)..(45): n is a, c, g, or t
  misc_feature (58)..(58): n is a, c, g, or t
  misc_feature (65)..(65): n is a, c, g, or t
  misc_feature (72)..(72): n is a, c, g, or t
  misc_feature (92)..(92): n is a, c, g, or t
  misc_feature (104)..(104): n is a, c, g, or t
  misc_feature (128)..(128): n is a, c, g, or t
  misc_feature (144)..(144): n is a, c, g, or t
  misc_feature (189)..(189): n is a, c, g, or t
  misc_feature (220)..(220): n is a, c, g, or t
  misc_feature (224)..(224): n is a, c, g, or t
  misc_feature (254)..(254): n is a, c, g, or t
  misc_feature (256)..(256): n is a, c, g, or t
  misc_feature (287)..(287): n is a, c, g, or t
  misc_feature (294)..(294): n is a, c, g, or t
  misc_feature (324)..(324): n is a, c, g, or t
  misc_feature (332)..(332): n is a, c, g, or t
  misc_feature (348)..(348): n is a, c, g, or t
  misc_feature (354)..(354): n is a, c, g, or t
aaatattcaaacagctttncattcttggaataaactgtactacgnaacaatgcattanccttttnatatatngctggatttgctagtatttngttgaaaatttngacaactatacttacgatattggnctaagttttttccttngggatcatgataatgtgagcctcatagaataagttgagaagtgtnccttatttcctgaaagaaattgtaggaattngggnattatttatcccttaaatgggtaggaattngncaatgaaaccatacggggcccaggaggtttnctttggncaaaaggtttaaaattacaaatcccaattnctttaacnggataagggggccatncaggcnagc

SEQ ID NO: 5384 - DNA, 343 bp, Homo sapiens
  I.5384 (H48445)
  misc_feature (290)..(290): n is a, c, g, or t
tagaatcagtgggagccctgagtttgttttcctgcaattagacaggcccgtcttttggccctccatgaccccctatcctgtacccgtataaactccagacaccaggcatccttcaagtccatgtgtgacctgattcttctgggaggtgagacaagagctgagatacagaaactgtcacactgaccctctgcgcttgcaaaaaggcagagggtctattgagctggttaacacttaagccgtcagctgatggtaaggctaaaagagcacactgtaacacacgcccatttggnttcccgggaatcacgggatcctgcccctgggacactgccgtgggggctgggaa

SEQ ID NO: 5385 - DNA, 446 bp, Homo sapiens
  I.5385 (H48440)
  misc_feature (1)..(1): n is a, c, g, or t
  misc_feature (2)..(2): n is a, c, g, or t
  misc_feature (5)..(5): n is a, c, g, or t
  misc_feature (272)..(272): n is a, c, g, or t
  misc_feature (356)..(356): n is a, c, g, or t
  misc_feature (426)..(426): n is a, c, g, or t
  misc_feature (440)..(440): n is a, c, g, or t
nntanttggagtcccactcttgttgccctggctggagtgcaatggtgtgatcttggctcactgcaacctccgcctcccgggttcaagcatttcttctgcctcagcctcccaagtagctgagattacaggtgcctgccaccacgcccagctaattttgtattttcagtagagacagggtttcaccatgttggtcagctggtcttgaactcctgacctcaggcgatctacccgccttggcctctcaaagtgttgggattacagggcgtgacacncgcggcctgaacttgttaactgtgttcacagggaggcattattgacagtaggacaaaaggtgggaaggcaacctatgtgtctgnggggtaaatgaaatggggttctatggcatacagtgggagtattatttcaggccttaaaaggggagggaanttttgatcataggnggacag

SEQ ID NO: 5386 - DNA, 453 bp, Homo sapiens
  I.5386 (H48354)
  misc_feature (13)..(13): n is a, c, g, or t
  misc_feature (394)..(394): n is a, c, g, or t
  misc_feature (407)..(407): n is a, c, g, or t
  misc_feature (426)..(426): n is a, c, g, or t
  misc_feature (435)..(435): n is a, c, g, or t
tttcggcacagtnaatgatgtatgatgttgaacatgttttcaaatgcttacttgctgtctgtaatgtttgctcaggtcttttgtccattttttaatcaggttgttcatttttttgagttttaagtgtctatatatatttttatatatatataatataagatacatattttgatacggagtttcgctcttgttgcccagggtggagtgtaatggcacagtcgtggctcactgcaacctctgcctcctgagttcaagtgattttcctgcctcagcctccggagtagctgagattacaggtgcccgccaccacgcccagctaatttttgtgttttagtagagatggggtttcaccatgttggtcaggctggtcccaaactcctgacctcaggtggtncacccacctcggncctcccaatgtgctgaggnttacaggcntgagccacagcgcccagc

SEQ ID NO: 5387 - DNA, 410 bp, Homo sapiens
  I.5387 (H48322)
  misc_feature (402)..(402): n is a, c, g, or t
ttcggcacaggagagagctaggagcttcaataccctggaagagatagtaatcctgcctgctttgtagttcttccctgtcttgtagcactcaaacctttgtctttcccacaagactgaaaactccatgacacaggaatatttcttatcctgtgaacctttgtgtcataccacctatagtagtgtttagtataaaataaattaattgtttggaaatctatcctaaaaaaaaaaaacctagattcagtaaaagctctgtggccaaggatgtttgtgttacagtgaacaccttcgagcacttcaggcccaaaaaggggacagcaaatattccaacactaagatctagggaactgtacttcattaatacccattctctccatccaagctggccataaacccaagttnaggtctcc

SEQ ID NO: 5388 - DNA, 368 bp, Homo sapiens
  I.5388 (H48263)
  misc_feature (14)..(14): n is a, c, g, or t
  misc_feature (15)..(15): n is a, c, g, or t
  misc_feature (18)..(18): n is a, c, g, or t
  misc_feature (19)..(19): n is a, c, g, or t
  misc_feature (299)..(299): n is a, c, g, or t
  misc_feature (357)..(357): n is a, c, g, or t
cacatcagttaatnntannaagactcacctgatcacatcaacagatgcagaaaaggcatttaataaaatccaacacctgttcatttcaaaaaacactcagaaaactaggaacagtaagaagcttcctcaacttgataaacaacatatatcaaaaacctacaactatcatcataattgatggtcagaaattaaagctttcccactaagatcaggaagcgggcaaagatgttccctctcatcatccttttccatcatatcatactgggaagtcctaggctaattcaataaggaaaaggganataaaaaggtatacaggattgggaaggcataaaataaaactggtctttgttgacaggncaacatggtgg

SEQ ID NO: 5389 - DNA, 386 bp, Homo sapiens
  I.5389 (H48230)
  misc_feature (231)..(231): n is a, c, g, or t
  misc_feature (365)..(365): n is a, c, g, or t
gcctctgttgctcagcctggagtgcagtggcgcagtcacagctcctgggcaggtgatcctgtcacctcagcctcccaagtagctgggactacaggcaagcaccaccataacctggctaattttttgtattgagacaggatctccctatgttgcctaggctggtctagaactcctgggctcaggtgatcctcccaccttggcctcccaaggtactggtattgcaggcgtgantacctgaggaaatgacctttagtaagccttccaaaagctatgaactccagtttccatataaataagtctttagttttagtagagtggggatttgttttgttttactgttgtgtgcccagcactctaaaatgggnatctgaatatgataactgttt

SEQ ID NO: 5390 - DNA, 498 bp, Homo sapiens
  I.5390 (R99700)
  misc_feature (458)..(458): n is a, c, g, or t
  misc_feature (464)..(464): n is a, c, g, or t
  misc_feature (473)..(473): n is a, c, g, or t
  misc_feature (478)..(478): n is a, c, g, or t
  misc_feature (497)..(497): n is a, c, g, or t
attcggcacaggaaattatgcctctaatattttatgacctgccaattttcattcagggttactgttttttttttcacgttatagtctaagatttattattaaacaatgaaacaggttaacactaccatttggctttaatgtttgactaccgaaaagctaaccattcatcaaatttgttttttaattgtggttccctgggtcactcacacatatacatcgaaacaatttattagtgtaaagattaattgtggtaattttattgtcttgggattagatgaagagaccttcaaaaactccttttgatgaaacaagtaataaaatgtagaaacagcgagttctgtggttcaatatttatatgtctgtgctaggaagctttaccataaatttggaaaactttttgtagggtttttggcagagtggaaaatttgccatacttcaggcacacttataagcccctnttgtcntcagtcggntggcnacgtccataatgtttgatnt

SEQ ID NO: 5391 - DNA, 304 bp, Homo sapiens
  I.5391 (R99678)
  misc_feature (22)..(22): n is a, c, g, or t
  misc_feature (148)..(148): n is a, c, g, or t
  misc_feature (149)..(149): n is a, c, g, or t
  misc_feature (196)..(196): n is a, c, g, or t
  misc_feature (210)..(210): n is a, c, g, or t
  misc_feature (287)..(287): n is a, c, g, or t
  misc_feature (293)..(293): n is a, c, g, or t
aactggaaaaccccttccatcngctgagagagaacagctacgactagaattgcagcaattgaaccatcagattagccagcagacccagctacgtggactagagagggaggcaaacaccctggcaggccagtcacagcccccaccaccnncacctccaaaatggcctgggatgatctcaagtgagcagttgagcttngaactgcaccaggnagaaagggaaatctggaagagaacacgggaactgagtatggaaaaccagtgttctctggacatgagaagcaaactgnatacangtaaacaagca

SEQ ID NO: 5392 - DNA, 372 bp, Homo sapiens
  I.5392 (R99618)
  misc_feature (232)..(232): n is a, c, g, or t
  misc_feature (353)..(353): n is a, c, g, or t
  misc_feature (364)..(364): n is a, c, g, or t
tcaaatgtataaaccttttatttaaaattagacagactcaaatacaaattaaataagtacaatataaaatagtaagccttcataaaacacatcataaccactttaaatcatttactatttctacagcaaaattaaagagaaatctaaatacagtccaaaatcaaattatttttaaactcttattgtcaacattaaaattattacaaaacattcaaagatatttaattaggangatgaacaaggccagggtgtagtggctcacacctgtaatcccagcactttggggagggccaaactgggtggatcacgaggtccaagagttttgagaccatcctggggccaactgggtgganacccccttctnttacttaa

SEQ ID NO: 5393 - DNA, 406 bp, Homo sapiens
  I.5393 (R99595)
  misc_feature (267)..(267): n is a, c, g, or t
  misc_feature (304)..(304): n is a, c, g, or t
  misc_feature (329)..(329): n is a, c, g, or t
ctgtaattttatttttaaattatcttttaacaatacacttctaattttgttcctagccacataattcaagttaagtgtttccataaacttcataagtagacttagagactttattcactttttcagggaatagtgaacatatgaggctcttaaatagtaccagattataattatttaatctaccctataaaaggaaatttataaaatattggaataaagtatccttttaaatgtattattttagctacaaatgaggaacataaggantcagtatttttaaaccataaccatcaataagagaggncaggccagggcacaggggctcacgnctggtaatcccagcactttagggaggctgagacagggaggatcacttgagccccggaagtttgtgacccggcctgag

SEQ ID NO: 5394 - DNA, 216 bp, Homo sapiens
  I.5394 (R99572)
  misc_feature (39)..(39): n is a, c, g, or t
  misc_feature (60)..(60): n is a, c, g, or t
  misc_feature (80)..(80): n is a, c, g, or t
  misc_feature (153)..(153): n is a, c, g, or t
  misc_feature (183)..(183): n is a, c, g, or t
  misc_feature (203)..(203): n is a, c, g, or t
aatattttcatgaagaaacatttgcaacattggacagtnaagtctatgaaaaatgacttnaaactatttcctacctactnatactaatgattctgagcaacaagtgatcaattcataaactatccttaaggctcaatcagttcacaagtaaancaaaacatccattaaggtaatgtggctctnttcattttaagttcaaatcnaatgttgcagttt

SEQ ID NO: 5395 - DNA, 373 bp, Homo sapiens
  I.5395 (R99533)
  misc_feature (369)..(369): n is a, c, g, or t
acctttcatgttctaatctgaaaatataattttaggaaaggatgacacaataacatatgggttgattctaagaagctaataagtggccaggcacggtggctgaagcctgtaatcccagcacttttgggaggctgaggcaggtggatcacctgaggtcaggagttcaagaccagcttggccaatatggtgaaaccctgtctctaccaaaaatacaaaaaaattagccaggcgtggtggtgggcacctgtaatcccagctactcgggaggctgaggcaggagagttgcttgaactcagggaagcagaggttgcagtgagccgagatggcaccattgcactccagcctaggcaacaagagtgaaactctgtnctca

SEQ ID NO: 5396 - DNA, 462 bp, Homo sapiens
  I.5396 (R99532)
  misc_feature (1)..(1): n is a, c, g, or t
  misc_feature (332)..(332): n is a, c, g, or t
  misc_feature (394)..(394): n is a, c, g, or t
  misc_feature (419)..(419): n is a, c, g, or t
nttttttttttttttgagacagagtttcactcttgttgcctaggctggagtgcaatggtgccatctcggctcactgcaacctctgcttcctgagttcaagcaactctcctgcctcagcctcccgagtagctgggattacaggtgcccaccaccacgcctggctaatttttttgtatttttggtagagacagggtttcaccatattggccaagctggtcttgaactcctgacctcaggtgatccacctgcctcagcctcccaaaagtgctgggattacaggcttcagcaccgtgcctggccacttattagctttttagaatcaacccatatgntattgtgtcatcctttcctaaaattatattttcagattagaacatgaaaggttaaaaactgnaagggcaaacccaaaccaaacactnttttgctattttggatattaattaaggcgggccgcaaggttaa

SEQ ID NO: 5397 - DNA, 386 bp, Homo sapiens
  I.5397 (R99473)
  misc_feature (366)..(366): n is a, c, g, or t
  misc_feature (382)..(382): n is a, c, g, or t
aagatccctgaatctctcacaaaaactgactgagcaactgggataacaaggtattaactacgacaaaacaatgtaacagggtgtcatcatggacgttttgtgaggttaaaccacagggacccaggggaatcaccaatttttttggaagaaggaaaggaaaggaaaaaaatgtttaatggccctgggaactggaaaacctagaaatacaagtgctaacatctgtgttcctaaattcagagattcttaccaggcaaaaagaactcagcagattaatctgagaacagcagctgaggctggccaggaaggcttcctggggcctcaactcataggctgaggagtgaggggtgggcaaaaagcagtgctgtngagtggtctgtttccnatgg

SEQ ID NO: 5398 - DNA, 377 bp, Homo sapiens
  I.5398 (R99472)
  misc_feature (314)..(314): n is a, c, g, or t
  misc_feature (320)..(320): n is a, c, g, or t
  misc_feature (330)..(330): n is a, c, g, or t
  misc_feature (341)..(341): n is a, c, g, or t
  misc_feature (355)..(355): n is a, c, g, or t
  misc_feature (362)..(362): n is a, c, g, or t
  misc_feature (369)..(369): n is a, c, g, or t
ggtaaagaaattatttgtgcttgaacttgcagaaaactgccttttcccttcttctcttgcatcttaacctggagcttcccttttcttgagcctcagtgtgcttcccaactcaatttataattgacttcctgcagtttctccttaggacagggctttgttttgggggtggttaatttgtagggttcataggaaacagaccactcacagcactgctttttgccaccctcactctcagctatgagttgaggcccaggaagccttctgccagcctcagctgctgttctcagaattaatctgctgagttctttttgccntggtangattctctgnaattagggacnaaagttgttagganttgtaanttctcanggttttcc

SEQ ID NO: 5399 - DNA, 408 bp, Homo sapiens
  I.5399 (R99145)
ctttggcagtactccaccagttttcttcactccaggctgaaaggtcaacttttctgggccatgctccctgctgggctggtaaaccaactttgagggagaagggggaagtccagatatgtagtgtttgctatttctatgatgtaaatgctcccacaatggccgatttcaagctacaaacagtccaacaagtggcttgcaagttcctggaaatttaacaattagctcctgtacatgactggcacaagctgctttccaaactcacattccgcatgcctcagttctgctcactttctattggtcaaaacttgctgtcagtgggtggggaagtgtaccccttctcttaaaggaagccttgcaagtcttgtggacaatgaaacagggagagtttccctgattttcctcccggcc

SEQ ID NO: 5400 - DNA, 360 bp, Homo sapiens
  I.5400 (R99139)
  misc_feature (113)..(113): n is a, c, g, or t
  misc_feature (358)..(358): n is a, c, g, or t
ggagggaaagtataacttttatttacaaataattattgagcatgctagatgctactagaacaaaagttacagtttccactgttaaggagaaacaatggagaaaccagcgtgantccagtgctttcttcgatttggtgcactgaagaatcccattttgggagcagaaaaaccctgtgtgttgtgttagctgttccttatcaccaacgagagtaagtattgttaccctcactacatctatgggtaactgaggcacaaacgttgtgaggcagttaatgttcccagggtcacccatgggccagctgggagggcagcatcgccccgtggaacataccctggggcccacttttatggaattttnaa

SEQ ID NO: 5401 - DNA, 400 bp, Homo sapiens
  I.5401 (R99076)
  misc_feature (360)..(360): n is a, c, g, or t
  misc_feature (386)..(386): n is a, c, g, or t
atagagtttcactgttgtcacccaggctggtctcagctcactgcaacctccacttcctgggtacaagcgattctcctgcctcagcttcctgtgtagctgggattacaggtgtgcaaccacaaggctcggctaatttttttgtatttttagtagagatggggtttcaccatgttggccaggctggtctcgaactcctgacctcaagtgatccacccacctcggcctcgcaaagtgctgagattacaggtgtgagccactgtgcccagccgagacttcattgtttaatgtatatttttattttttccaaacaccagctcgaatcagagtatatttttattttgccacatacctttaaaaggnatttattgtgtcataatgttttaaangttaaatatatggt

SEQ ID NO: 5402 - DNA, 469 bp, Homo sapiens
  I.5402 (R98315)
  misc_feature (374)..(374): n is a, c, g, or t
  misc_feature (390)..(390): n is a, c, g, or t
  misc_feature (434)..(434): n is a, c, g, or t
  misc_feature (467)..(467): n is a, c, g, or t
tagaaaacatatgctccatttattttgttttataaacttttgttaaaacacagaagagtaagaaatgttttttgtttctttgccccatcaggcggcagtgatgggggctcaggggtcagcgcaagacctaatgacattcacacccacagaaagatgtgggtcgttctgatgggacccagcccgctttgataattgcttgatgtaaatttcacaattcatcttaatcagggcagatcacagaaaaatttggcaaaagtaattggcttggtaatgacaagaaatagaagagcgttcatttctgaccctctcctctcctctgtccactctcagggagagccatgcggatttttaggaagctcctgagacccgcctgnaggttcaggggtgttntgggtgggggaaattgtggcccacgtttgtccccccagcaaccnttgtttgttccctcagattttatgttttagggntt

SEQ ID NO: 5403 - DNA, 344 bp, Homo sapiens
  I.5403 (R98256)
  misc_feature (186)..(186): n is a, c, g, or t
  misc_feature (199)..(199): n is a, c, g, or t
  misc_feature (295)..(295): n is a, c, g, or t
  misc_feature (305)..(305): n is a, c, g, or t
tgacttcgatataaaataaaagacgagcctgcagctgtctgcagagagagaggaaatcataacaagggaagcggcacagtctaacctctcaccaggtcacaggccccacgaggcagcgtactctcctttgttccctgccatgacccctagagcaatgccctgcccacatgggagctcagtagcaanctaactaaatgancacactggactaaggacttcagggaggggacagggcagccatccgcctgttctgggtgagcctggtgaatcactctagtcagtgagcagataggtnagaggaggtnattaaccccaaatttccctttcaacgtgacatgtgtctg

SEQ ID NO: 5404 - DNA, 412 bp, Homo sapiens
  I.5404 (R98070)
  misc_feature (264)..(264): n is a, c, g, or t
  misc_feature (282)..(282): n is a, c, g, or t
  misc_feature (296)..(296): n is a, c, g, or t
  misc_feature (322)..(322): n is a, c, g, or t
  misc_feature (334)..(334): n is a, c, g, or t
  misc_feature (369)..(369): n is a, c, g, or t
  misc_feature (378)..(378): n is a, c, g, or t
  misc_feature (393)..(393): n is a, c, g, or t
  misc_feature (401)..(401): n is a, c, g, or t
  misc_feature (406)..(406): n is a, c, g, or t
gtgagtgggttgatagtggtagacaaatgtttggtgtctggtcagtgccaatctgggctgtgggacttggtcagtggagaccttgggaccgagtcagcagagacgcttgtcagtggggccctggtcaggcaggctggtccgtggaacttaatcagtgggggcctggtcagagaggacttgatcattggtggcttttgtagcactggtctacggggtgacctggtcagcggggatctgagcagtgtgtgcctgttcagtggggcntagtcattagggtcccantcaggggcatcttntcacctcagtcctgggttagcagggncctgggtcactngcctgcctattccctgcaggcctgggtcagtgggncttcgtctntgggaccagacgatnaggtcatnatccngccgaa

SEQ ID NO: 5405 - DNA, 388 bp, Homo sapiens
  I.5405 (R98021)
  misc_feature (7)..(7): n is a, c, g, or t
  misc_feature (99)..(99): n is a, c, g, or t
  misc_feature (128)..(128): n is a, c, g, or t
  misc_feature (168)..(168): n is a, c, g, or t
  misc_feature (201)..(201): n is a, c, g, or t
  misc_feature (232)..(232): n is a, c, g, or t
  misc_feature (244)..(244): n is a, c, g, or t
  misc_feature (349)..(349): n is a, c, g, or t
  misc_feature (355)..(355): n is a, c, g, or t
  misc_feature (364)..(364): n is a, c, g, or t
  misc_feature (375)..(375): n is a, c, g, or t
  misc_feature (385)..(385): n is a, c, g, or t
tcctcgntattcccagctggacagagccgtttgaacaacaaatgcaaaaagcctggatctctccaccgcagggtctatttttgcaaacctgcttggtgnccctgctattagctgcatgcacatgtttnccggctccagccacatgcccgtaagcacttaattgtgggngcagttagtcaaggcgggcggctctctgcaganttcaggggtgagggaacctaattacacctgnaattgagtgctntagcaggggacaaaagctgcctgttcagctaattccaggcaccaaaattgcccccacaggacggaatcccgggtacaggcttttcgagccaaggctatgagttgnaattanaggatgggncaactcgaatntttaacggtnggg

SEQ ID NO: 5406 - DNA, 349 bp, Homo sapiens
  I.5406 (R97202)
tttggcattgttttaatccaggctttaaacaaatttgaatcttactaagagtggcttactttcaaagaaatccctgatttcccatcctttgatcctaatgattctggggcatgacccgtgctgattattatggatggactcctgttaacttggcaaatcagccatggacctgtgacggccatgggtacaagacaaagctgctaacagaaagggaatatggattgtgtggaggctgggcacggtggctcacgcctgtaatcccagcactttgggaggccgagatgggtgaatcacgaggtcaggaggtcgagaccagcctggccaacatggtgaaaccccgtctctacta

SEQ ID NO: 5407 - DNA, 379 bp, Homo sapiens
  I.5407 (R97201)
  misc_feature (270)..(270): n is a, c, g, or t
  misc_feature (354)..(354): n is a, c, g, or t
tgagacaaagtctcactttgttgtccaggctggagtgcagtagtgctatctcggctcactgcaacctctgcctcccaggttcaagcaatttcccagcctcagcctcctgagtagctgggaccacaggcgcccaccaccatgccaggctaatttttgtattttttagtagagacggggtttcaccatgttggccaggctggtctcgacctcctgacctcgtgattcacccatctcggcctcccaaagtgctgggattacaggcgtgacacncgtgcccagcctccacacaatccatattccctttctgttagcagctttgtcttgtacccatgggccgtcacaggtccatggttngattttgccaagtttaacagggagt

SEQ ID NO: 5408 - DNA, 332 bp, Homo sapiens
  I.5408 (R96864)
  misc_feature (17)..(17): n is a, c, g, or t
  misc_feature (22)..(22): n is a, c, g, or t
  misc_feature (70)..(70): n is a, c, g, or t
  misc_feature (74)..(74): n is a, c, g, or t
  misc_feature (132)..(132): n is a, c, g, or t
  misc_feature (145)..(145): n is a, c, g, or t
  misc_feature (171)..(171): n is a, c, g, or t
  misc_feature (204)..(204): n is a, c, g, or t
  misc_feature (229)..(229): n is a, c, g, or t
  misc_feature (259)..(259): n is a, c, g, or t
  misc_feature (264)..(264): n is a, c, g, or t
  misc_feature (274)..(274): n is a, c, g, or t
  misc_feature (311)..(311): n is a, c, g, or t
aatggttgcaggcaccngtagnccgcgagctgaggcaagaggatcacttgagcctagaagttggaggttncagngagctatgatcccaccacagcattccagcttgggcaacagagctagaccctgtctctnttaaaacaaacanacaaacaaacaaacaaacaaacactngggaaggaattgcaattaatgctagaaccagcncctatatatgatttgttgacccatntcagggaaatgactttacaaaaaggtttancatanggtcatctgnctaattacttcatgggccaggctgggtttgggcattnggggaaggaaggcactgggga

SEQ ID NO: 5409 - DNA, 366 bp, Homo sapiens
  I.5409 (R96663)
  misc_feature (49)..(49): n is a, c, g, or t
  misc_feature (99)..(99): n is a, c, g, or t
  misc_feature (232)..(232): n is a, c, g, or t
  misc_feature (315)..(315): n is a, c, g, or t
  misc_feature (365)..(365): n is a, c, g, or t
tccactccccgttctccaaaatgtattgagaaccttacccatcccagangatgagagtttacaatctgtgacttctgttcttagttgatagtatttctntatgttgcccaaagtaacagattcaacaaaaaatgtactgagatccccatgtaacaggtactgagccaagtgatctcacatacctgagctcattacatcatttatttctcataccaaccctgcgagaggtttnattatccccatattatgaatgagaaaactgagcctccactatgttaaatattttgtctagttgcaaggcaggatgcaaggctnaagctttgggtttctttggggatgtaccttaacgaggtaattcaattggnc

SEQ ID NO: 5410 - DNA, 237 bp, Homo sapiens
  I.5410 (R96622)
  misc_feature (98)..(98): n is a, c, g, or t
  misc_feature (135)..(135): n is a, c, g, or t
  misc_feature (185)..(185): n is a, c, g, or t
  misc_feature (192)..(192): n is a, c, g, or t
  misc_feature (225)..(225): n is a, c, g, or t
tcacattgttattacaacacagatgagctgaaacgtttttgtacagatttggaggatgggaatcctaaaaagaaatcaagcatatagaggtagttgantagcaatatggggggaaaaaagcattatcttatattncccttcagttcattacagtgcaagagtaaaatggctgcttaccaaacaantggaaancacacacacatttgccactgtttacgtggcttncttgatatttta

SEQ ID NO: 5411 - DNA, 393 bp, Homo sapiens
  I.5411 (R96478)
  misc_feature (265)..(265): n is a, c, g, or t
cggatgagggggcagggtagttattaattagaagatacgggcaaaacactgggatggcttcctgacaacttaagaggtctccgagttatattctgggttgggaaacactgacccagcccttattccttcaaggactctagtcattggcaaggaggattcatgagccccggtgacacagatgggggccctgctctatattcaactgtccagagaagatctagtcacaacccctcatctcaaatggactttggttcagaaaacaganctaaggaaaagtggtttccttggactcaaccggtctgaatttcccactaaccacaacactgacttcctgaggcaagctgggctaatcccacgtttacagggcattacttgtacatcacagggctgggg

SEQ ID NO: 5412 - DNA, 428 bp, Homo sapiens
  I.5412 (R96477)
  misc_feature (67)..(67): n is a, c, g, or t
  misc_feature (146)..(146): n is a, c, g, or t
  misc_feature (171)..(171): n is a, c, g, or t
  misc_feature (264)..(264): n is a, c, g, or t
  misc_feature (379)..(379): n is a, c, g, or t
  misc_feature (387)..(387): n is a, c, g, or t
  misc_feature (425)..(425): n is a, c, g, or t
agggacccattagcagaggcagcgtctggcctcagacatccactcatcaggtccagaccagaccgtnggccttggtgtatcttctgatccactccgttgctaagttcccctctgtacctaaactctgtctccctttacttcacttngctttttagagatttctcagccttngtgtgtgttgtccccagccctgtgatgtacaagtaattgcctgtatacgtgggattagccagcttgctcaggaagtcagtgttgtggttagtnggaaattcagaccggttgagtccaaggaaaccacttttccttagttctgttttctgaaccaaagtccatttgagatgaggggttgtgactagatctttctctgggacagttggantatagagncagggcccccatctgtgttcaccggggctcatggaatnctc

SEQ ID NO: 5413 - DNA, 366 bp, Homo sapiens
  I.5413 (R96155)
  misc_feature (249)..(249): n is a, c, g, or t
  misc_feature (278)..(278): n is a, c, g, or t
  misc_feature (306)..(306): n is a, c, g, or t
  misc_feature (327)..(327): n is a, c, g, or t
  misc_feature (344)..(344): n is a, c, g, or t
ttaaaacataaactcattcaagattaagatacttttgtaagacatgataccagccattttgtctatccccaaagaactgaggctccagggaatttaaccatgctaatgtaatctttttcacattattaactgaagaaaaatgagtgcccttgaaatattttttaagattaggaaacaaaaggcaagtcagaaggaaccgaagcaggatggtaaggtggatgcctaatgatttcccataggaacttaagnttgcctttgtttgatgagagaaatgagcngggagcattgtcgtgggtggagaagggnctttctagtggaatctttccnggggcatttttctgccnaagcattggctaactttctcaa

SEQ ID NO: 5414 - DNA, 422 bp, Homo sapiens
  I.5414 (R96154)
  misc_feature (1)..(1): n is a, c, g, or t
  misc_feature (19)..(19): n is a, c, g, or t
nacttcggcacaggctccnatgctgaatgcttccttccctcgaacatcagactctgggttcttcagttttgggactcagactggctttcagcttgcagacagcctactgtggaaccttgtgatcgtgatctatttggaggtactaagaaaaataagacatcagtctgaaaagagctcctatcaaaacaccataaattctgctaaaaggcaagcaaggagaaacatcaaatttatggtgaagcttggggggaagaatgatgaaatcattgatactctatgaaaagtttatagggacaatggccccaaagaaatcagcagtttacaaatggataactctttttaggaagggactagaaaactgttggaaaatgaagcctgaagcagcagaccatccatgttaatttttcaagggaaaaaattaa

SEQ ID NO: 5415 - DNA, 406 bp, Homo sapiens
  I.5415 (R95927)
  misc_feature (201)..(201): n is a, c, g, or t
  misc_feature (267)..(267): n is a, c, g, or t
  misc_feature (374)..(374): n is a, c, g, or t
  misc_feature (379)..(379): n is a, c, g, or t
  misc_feature (389)..(389): n is a, c, g, or t
atgcaggtctgcaaagagtcaattgcattgtatattgaatgcaaggtctgatattgcaagtatatatgacatggtataacatataaaatattacatattttacacagtgacagtacccgcctcttctaaacactaaaatttaatagaatgaagtaaaaagcctattaaataagaaacaaacactgcaatcataaacaaaangcactaagcaaaatactttaaaattgttgtgtgtgacatctatcttgtctaccgggagttagggantgggtgggagcccaggaaaaaaactgaggctaacaaaaacaggccaacaccctccggggaactcttcccggggaatcgggccgctgggtgcccgttcacagggtggnccccntctggatggncccggccgggggttcag

SEQ ID NO: 5416 - DNA, 275 bp, Homo sapiens
  I.5416 (R95879)
  misc_feature (162)..(162): n is a, c, g, or t
  misc_feature (186)..(186): n is a, c, g, or t
  misc_feature (204)..(204): n is a, c, g, or t
  misc_feature (267)..(267): n is a, c, g, or t
aggttgcccttatgcatcaggacagggagaagggatgaggatattaagatcagcagtcatggtgttcatccactctcaagttatctttcagaaaaggaaatgtggaaatgaggaacatttcagtacaccccagcacacaaaaaggcaggtaccactaaagtnttcaagtaggttatacgtggcttnttggagaacacacaacantgaaaacatacaccagaggctagttcaagtccccattttatttagttgatacttgaaactgantggaagcc

SEQ ID NO: 5417 - DNA, 380 bp, Homo sapiens
  I.5417 (R95878)
cctccaggttctctctccatttctgcctgtgactgctgacaccctgttcaccttctccacgttgcccttctagcctctctgtgcgtgaggtcctctagttcttacagaatgtcttgtcagtgctttcaccgtgacctgccccccaccccgagagctgtccaggtgtcagtcaccctaggatgaaatgacaccaatattggtgacaagctggccttctggttatgctcaggagaatcattaaccatctttaaataaataaatccctgctgctactccccatacaatttaggaacatgtgccttgtaacttttgatgtggggctcttgtttgaagccattgttgttttccctgctgcctgcatcatcatatgttatgtggat

SEQ ID NO: 5418 - DNA, 364 bp, Homo sapiens
  I.5418 (R94894)
  misc_feature (1)..(1): n is a, c, g, or t
  misc_feature (360)..(360): n is a, c, g, or t
nattattgattatcttttgttttgtctcttcaagaactcttttcctacacctgaggctttaaaagatactgatggccaggactcactcagaccaattaaatcaggattatgggcatttttaaaaaaagcttctcaggtgatcctaaagtataactagatttgagaaccagaagactcagactgtgagcttcttgagggtagaaattgtgactgcttgtttatacagctcaggactcaatgctgggacaccgtggtgcttcataatcaccggggtgatttttgatgaatttaattcatctctccaaggatcatctcaaattccatgttttctagggatccttcacattattacccataggnctta

SEQ ID NO: 5419 - DNA, 484 bp, Homo sapiens
  I.5419 (R94893)
  misc_feature (406)..(406): n is a, c, g, or t
  misc_feature (422)..(422): n is a, c, g, or t
  misc_feature (443)..(443): n is a, c, g, or t
  misc_feature (461)..(461): n is a, c, g, or t
aaagataatattccttccagagattggagccaaatctcctcatagaaacaggagaaagagacaataagggcttcccgtaaacattctttatcctaacagttttgcaaattgattggggagagaaggtgtaaatacttaaatcaattgatattgtttggctctgtctccccacccaaatctcatctcaaactgtaattcccacgtgttgaaggtggggcctgggtgggaagtgattagatcatgggggtggtttctaattgtttagtaccatcgccctagtgatgggctcatgagtgagttctcacgagatctgatggtttaaaagtgtgtgggcacctcccactttggcacttcttctcttcctgtggccatgtaaggggcattgtatttgctttcccctttgganttcccgccatgattgntaagttttcctgaggggcttncccagccagggtgggaancgtggaggtcaattaggacccct

SEQ ID NO: 5420 - DNA, 457 bp, Homo sapiens
  I.5420 (R94810)
  misc_feature (1)..(1): n is a, c, g, or t
  misc_feature (346)..(346): n is a, c, g, or t
  misc_feature (369)..(369): n is a, c, g, or t
  misc_feature (417)..(417): n is a, c, g, or t
  misc_feature (424)..(424): n is a, c, g, or t
  misc_feature (440)..(440): n is a, c, g, or t
  misc_feature (450)..(450): n is a, c, g, or t
  misc_feature (456)..(456): n is a, c, g, or t
ntcaatccctgtgacatttttaaacttcttccctatattacagtcatccttgtacatgactaatattccacaatggatcataaattgagggtaaagcctgtgtgtaatttgtatgttaattttccaatgtacctaccatagtgccttacacagagcagatatccagtaggtcttggaataaatacatgaaatatataaaatgcttctatggaaagacaaataaggaacaaaactcaaacttttcaaaacttactatcccaggaaattcacttttttcaagaagttttcagcagtatttcttgccctttcgcttgttttcctgtgcagagatttggggacctctatnttttcctactaacttaccctatnctccctgtggatagggtcattaaaattattacttggcactttctcttnctttttngggacttttccaaatnaggatggccntactgng

SEQ ID NO: 5421 - DNA, 445 bp, Homo sapiens
  I.5421 (R94727)
  misc_feature (12)..(12): n is a, c, g, or t
  misc_feature (14)..(14): n is a, c, g, or t
  misc_feature (15)..(15): n is a, c, g, or t
  misc_feature (421)..(421): n is a, c, g, or t
gcagatagtaancnncaatatgtattttaaggtatagctatgcttttgattttataagtgattttgtcatctttctaaaaacgagaacgcaaagactgtcaggagctgtttttattatgaagtgaattggggtctatagaaggggaggataagtaaagttggagactagaactcaacatataaccagccgataaacgttgctgttagaatcacttctgtgctctgcaaacttttattttctcccagagggaaaccaacttcagaacagttttaggataaagctgtgcagggcaggatgggacaagtgaaaggaatgttaccagtctcataggtgacaccatcgtgcttttgtgtaaggccaggagcctgaggctggaatgctggccatcccttctggctaaatccaggcaaaggaccctgncggggcagttgagggtaaggaagg

SEQ ID NO: 5422 - DNA, 389 bp, Homo sapiens
  I.5422 (R94626)
  misc_feature (230)..(230): n is a, c, g, or t
  misc_feature (280)..(280): n is a, c, g, or t
  misc_feature (338)..(338): n is a, c, g, or t
  misc_feature (360)..(360): n is a, c, g, or t
  misc_feature (367)..(367): n is a, c, g, or t
  misc_feature (383)..(383): n is a, c, g, or t
taaaaactatttttaataaacatcatatttacaacatgacgttttgatatacatatacatagtgaaatgattattccagttaaacaaattaatatatccatctcctcatacagttaccgctatttttgtgtatgtggtgagagcacttgaaatctcttctcttagaaaatttccagtattcggctgggcgcggtggctcacgcctgtaatcccaggcactttggggaggnctgaggcgggtgggatcacctgagggtcagggagtttcgaggaccagccngggccaacgtgggtgaaacccgggtctctacaaaaaatacaaaaattgtcccggggcnggggtaggtggggcacacggcntgtaatncccggctactcggggnggctta

SEQ ID NO: 5423 - DNA, 512 bp, Homo sapiens
  I.5423 (R94521)
  misc_feature (387)..(387): n is a, c, g, or t
  misc_feature (402)..(402): n is a, c, g, or t
  misc_feature (423)..(423): n is a, c, g, or t
  misc_feature (458)..(458): n is a, c, g, or t
  misc_feature (474)..(474): n is a, c, g, or t
  misc_feature (497)..(497): n is a, c, g, or t
ctgtttgaaaatatttccaatgagaagaaaacaaaaaataatcccctgacactgtattgtaaaaaaaagtctgtgcctattttccttttatcttccctaggcgcagagatcttatcagaatgtttttgggtcaaggtttccctttggaaactttacagggtgatgtgtcctcagccacctttcggttttctcctggtcctgggtttcagtactgtctggggataaatcaagatatcaactgtggctgtgtatgctagaatctctagtaaatttcagctcctggcctgggaatggaactctgggtatctggggaatggggagacagaggacaatctgagggttgggagtgtagcctctcaaggggagcaggtggatgccccggggctngaggagggatttccnggggatacccttccctttggnaagctaaccctttgaggcattaaggttgtgttcanttcaacccgacttccntttctcagagggacattgctggncagccatcagagccg

SEQ ID NO: 5424 - DNA, 385 bp, Homo sapiens
  I.5424 (R94509)
  misc_feature (28)..(28): n is a, c, g, or t
  misc_feature (61)..(61): n is a, c, g, or t
  misc_feature (344)..(344): n is a, c, g, or t
  misc_feature (374)..(374): n is a, c, g, or t
agataggaaatgaactctattatatatncctttttaatcttttttaaaaaattatactttnctgggatacatgtgcagaatgcataggtttattacacaggtacacacgtgccattgtagtttgctgcacccatcaatccgtcatctacattaggtgtttctcccaatgctatccctcctgtacccctcaccccctaaaaggccctggtttgtgatgtttccctccctgtgtccatgtgttctcattgttcagcttccacttatgagtgagaacatgtgggtgtttggttttctatccttgtgatagtttgctgaggaatgatgggtttccaggcttcatccgngtcccggcaaaggaccatggaactcatccntttttgtgggc

SEQ ID NO: 5425 - DNA, 381 bp, Homo sapiens
  I.5425 (R94382)
  misc_feature (327)..(327): n is a, c, g, or t
  misc_feature (345)..(345): n is a, c, g, or t
  misc_feature (374)..(374): n is a, c, g, or t
tacagacgaggtttcaccatgttgcccaggctggattctaactcctagactcacacgatctgcccacctaggcctctcaaagtgctgggagccaacacacctacccctaatgtacaagtgtttgtatggacatctgttttcatttcttttgggtcctataataactctatggtgagtcttttaaagaacttccagactgtttccagagtgggttatgccatctttataaacccaccagtgacctgtgaggggttcccatttctctacatcctccctaacacttgttattgtctgtttttttttaatggataggccatcctaaggagntataaagtgatatcggcngtgtagggttttaatttggcattttcccnggctagg

SEQ ID NO: 5426 - DNA, 460 bp, Homo sapiens
  I.5426 (R94303)
  misc_feature (1)..(1): n is a, c, g, or t
  misc_feature (237)..(237): n is a, c, g, or t
  misc_feature (345)..(345): n is a, c, g, or t
  misc_feature (361)..(361): n is a, c, g, or t
  misc_feature (396)..(396): n is a, c, g, or t
  misc_feature (406)..(406): n is a, c, g, or t
  misc_feature (415)..(415): n is a, c, g, or t
  misc_feature (439)..(439): n is a, c, g, or t
ngatggatatgttcattggcttggaatcattccacagtgtatacatacaacatcacattgtgccccataaatatacacaattatttgtcaattaaaagaaattagtatccgcaccctcactaggttggtgcatcaaagggccctctgtctgggaaggtgacatgaaggagggaaagatccctcctgatgggaaggacctgattgtagtaccctttcctgttggcttacccttgattnggacatagtgcagccacatgcagcagggtgttgtcatgtggacgatttcataaaaacacaacccatcttctagttctcacttcacctgagctcaggtgatccaccttncttgggcctttccaangttactggggatttacaggtcatgtaggcttactntggccccggntcccaaganacattgttaggtttttgttctttnggttaaggtagttcatgggtt

SEQ ID NO: 5427 - DNA, 494 bp, Homo sapiens
  I.5427 (R94271)
  misc_feature (331)..(331): n is a, c, g, or t
  misc_feature (417)..(417): n is a, c, g, or t
  misc_feature (430)..(430): n is a, c, g, or t
  misc_feature (444)..(444): n is a, c, g, or t
  misc_feature (465)..(465): n is a, c, g, or t
ctactgtagagttaataatattgtattggataccggaaattttctttttttttttttttttggagactgagtctttctctgttggccaggctggagtacagtggcacagtctcggctcactgcaacctccgtctccctggctcaagcaattctgcctcagcctcccgagtagctgggattacaggcgtgtgccactaaccatgcccggacaatttttgtattttttgtagagaccgggtttcaccacgttggccaggctggtctcgaactcctgacctcaggtgatccacccgcctcagcctcccaaagtgctggggattacaggcgtganacccgcgcccagccgaatactgggaaattttcttaaggagaaggagatttcaagttgcttttcaaccacatacacaaaaataggcnggtaattgtttgnagggagatgggttntatttaatttggttttaactnggattattcattttcaatttggtattatg

SEQ ID NO: 5428 - DNA, 428 bp, Homo sapiens
  I.5428 (R94207)
  misc_feature (256)..(256): n is a, c, g, or t
  misc_feature (358)..(358): n is a, c, g, or t
  misc_feature (385)..(385): n is a, c, g, or t
  misc_feature (398)..(398): n is a, c, g, or t
  misc_feature (403)..(403): n is a, c, g, or t
  misc_feature (412)..(412): n is a, c, g, or t
  misc_feature (424)..(424): n is a, c, g, or t
tataagagacaaggtcttgctgtgttgttcaggctgtcctcaaattcctgggctcaagcgatcctcctgcctcagcctcccaaaatgctgccattacaggcataggccatcagcgcccagccctattcaccacattttaaagttatcctctctcctgtccatactagctataaaacttgtcacattccaaaaaacaagaaggtgtgttaaaggatctctaagtgggagaactattatgtaaataggtatataagangtttgcaaattatagataccgtaagaggccattctacattcaggttcaagttcacccacagtgccctgacttttcagactcccttggtggagtctccggcgnttcatttctgcttacttttcttccctnactagtgtttccngggtncttctttcnaaacagtgtgtntcta

SEQ ID NO: 5429 - DNA, 420 bp, Homo sapiens
  I.5429 (R93670)
  misc_feature (277)..(277): n is a, c, g, or t
  misc_feature (362)..(362): n is a, c, g, or t
  misc_feature (392)..(392): n is a, c, g, or t
  misc_feature (406)..(406): n is a, c, g, or t
gtcttctggaatactattttttctttcacaaatcttagagaatccagggggcagaaattatttctgagttttcctctcaataccagcatctgattggctgaccagcaatgtacctctgagaaatggaagtcgggttgagtgaacacaatcttaatgcctcaaagggttagctttccaaaggaagggtataccaggagattcctctcagccccagggcatccacctgctcccttgagaggctacactccaacctcagattgtcctctgtctcccattnccagatacccagagttccattccagggccagggagctggaaatttacttagagattttaggcatacacagccacagttggatatnttggatttattccccagacagtacttgaancccgggaccgggangaaaaccgaaaggt

SEQ ID NO: 5430 - DNA, 233 bp, Homo sapiens
  I.5430 (R93657)
  misc_feature (60)..(60): n is a, c, g, or t
  misc_feature (112)..(112): n is a, c, g, or t
  misc_feature (145)..(145): n is a, c, g, or t
  misc_feature (196)..(196): n is a, c, g, or t
ttttttttttttttttttttttttttgagactccatctcaaaaaaaaaagaaaacaaaantagatgcaaattaatccaaacattaatttcaattattagataaattaaacangattaaaacaattatttaccagcctttgttttnaaatcttaataatgttcttctggttgtaggtggttacaggctcaataggangagagcctagtactaaactagagcctgactgaataag

SEQ ID NO: 5431 - DNA, 458 bp, Homo sapiens
  I.5431 (R93458)
  misc_feature (402)..(402): n is a, c, g, or t
  misc_feature (430)..(430): n is a, c, g, or t
  misc_feature (453)..(453): n is a, c, g, or t
gatgtgaaggaaaaatacagaccaagaatatatcttcagaaaattctaatctgtgctgggtagttaggggaaggctaagaggtttgagataatctctgagcaggtacaggagacaaagaaatggatagggatggattggtatggaaaggtattgcaggccaacagcattatgtaaatcttggtcaagagccagcataatggatttgaggaagtggaaagaagggaggttagtgtggcaggaggactgcctgggagccaggtctcagaagaggctagagagtgaggtaagggttttactcgaacttcatgtcctggctagagactcatgtttaattcaagccaaacagttttccagattccatgccagttttctacttcacctgtttttttttgtaaactgtnggttaaaaaaaaaaaattatattatatntattatatggccaaaattccagnaattt

SEQ ID NO: 5432 - DNA, 409 bp, Homo sapiens
  I.5432 (R93408)
  misc_feature (4)..(4): n is a, c, g, or t
  misc_feature (17)..(17): n is a, c, g, or t
  misc_feature (355)..(355): n is a, c, g, or t
  misc_feature (390)..(390): n is a, c, g, or t
gtanttatactttaagntttagggtacatgtttcttattagactttaaggtctgtgttgacgttaatgccagagaggtataatgaggcatgtccaacacccacttccccttatggcctgaatcagtctctcaggttacattttaaaagcgccctggctgagaaagtccattgagatagttggggggttgggggagaggtgcttagaattttatttttggtttacactaccttcaacatgctcagaacatttacattagtctacagttggggcaaaatcatctaacataaagcctattttttaataaagtgttgataatgtgaaataaggtgaggataataattacaatctcatgnaatttttggaataccatactggaaagtaaaaaacnaatgggttgtatggggtac

SEQ ID NO: 5433 - DNA, 378 bp, Homo sapiens
  I.5433 (R92993)
  misc_feature (228)..(228): n is a, c, g, or t
  misc_feature (232)..(232): n is a, c, g, or t
  misc_feature (239)..(239): n is a, c, g, or t
  misc_feature (268)..(268): n is a, c, g, or t
  misc_feature (288)..(288): n is a, c, g, or t
  misc_feature (372)..(372): n is a, c, g, or t
ccaactgttcataataaggaagttagatattattactgaatatatatcatgaatgtaaaaaaaaaaagttaaggccagcgtagtggctcacacctgtaatcccagcactttgggaggctgaggcgagtggctcacctgaggccaggagttttagaccagcctggccaacatggtattacttagtaaaaagtaaggaaaaaaaaaaaaggttagccagttgtgagggtntgancctgtantcccagctactcgtgaggctgaggcacangattcatttgattccagggnggcacaggttgcagtgagccaagaccgtaccactgcacaccagcctgggcaacagagtgaggactctgtctcccaccaaaaaantttttt

SEQ ID NO: 5434 - DNA, 310 bp, Homo sapiens
  I.5434 (R91821)
  misc_feature (163)..(163): n is a, c, g, or t
  misc_feature (189)..(189): n is a, c, g, or t
  misc_feature (235)..(235): n is a, c, g, or t
  misc_feature (239)..(239): n is a, c, g, or t
  misc_feature (264)..(264): n is a, c, g, or t
  misc_feature (272)..(272): n is a, c, g, or t
  misc_feature (286)..(286): n is a, c, g, or t
tgtgtgtgtgtgtggctgaaaacctgttatcaatttcacatgattcagtctaacatgaaataaaacaggatgcactgaaagggcagagaaacatcagtaaacattgaaaatatggcaggaaaagtaaaatggtcgatacaaagttggaaaatacagtcaagantctccctgagaaagtgtaagaaagancagggagacaggcaggaagggaaagaaagaaaggaaagttgaaggnttantccagaaaagcctacatctgactantacatttnccagaaagaaaaancaaatcagaaaatgggtggggaaa

SEQ ID NO: 5435 - DNA, 284 bp, Homo sapiens
  I.5435 (R91658)
  misc_feature (81)..(81): n is a, c, g, or t
  misc_feature (96)..(96): n is a, c, g, or t
  misc_feature (146)..(146): n is a, c, g, or t
  misc_feature (163)..(163): n is a, c, g, or t
  misc_feature (246)..(246): n is a, c, g, or t
  misc_feature (259)..(259): n is a, c, g, or t
  misc_feature (272)..(272): n is a, c, g, or t
tggggtgggaaatctttcagcttcaagaagtcctgtctcgcctacatatggccaagcacctcctgctggcccagggcaggntgggaggtgggggtnagatgaccttagctgctgggtgcaagtcagggtccttgggagtagaagtncccagtacaaaggggtnctgtgtgtgcagggagccatgaaagaggcatctctgccccactccccctcctagttcataagacaataatcactgaaagggantggggtgggggtnatctgggggtccntgcctgtaccct

SEQ ID NO: 5436 - DNA, 324 bp, Homo sapiens
  I.5436 (R91657)
  misc_feature (5)..(5): n is a, c, g, or t
  misc_feature (11)..(11): n is a, c, g, or t
  misc_feature (262)..(262): n is a, c, g, or t
  misc_feature (281)..(281): n is a, c, g, or t
  misc_feature (318)..(318): n is a, c, g, or t
cagancctccntcacaggcctcaggaggaaccaaccctgccgacaccctgacctgaacttcagccttcagaaccaagagacaatgaatgcctgccattgaagctaccgtcttcagcactttgttatcacagccctagcaaactcacagaggggcaactgcagtccggtgccagcgtgccttccaatattcagccatctcctcatgaagcctgggatgtgattcttgtgcctctagctctttcctgaggggcactggtacctncaggacctggagtgtactngaagaaatggtgcagtccaggtacagcatgggacccnagatca

SEQ ID NO: 5437 - DNA, 472 bp, Homo sapiens
  I.5437 (R91608)
  misc_feature (424)..(424): n is a, c, g, or t
  misc_feature (456)..(456): n is a, c, g, or t
tagaaaaagactgatgatatatatccgtagtatgcgctaccaaagcaaatggcagggacaactaagacccaaccttcatcaccaaagacaagtgtgaatgacacgctggttcacctaggcaaggcggattcagattcctcagcatgcggagttcctggaaattgataaaaatgggcacagcacagaaaatgggcagttcacaaaagtggtgcaggtgacccatgagaagttcacatcaccaatggttacagaaatgaaaatcattcaccagccacttgcccccaccagggctgggctgcgtgaccttggggctgtgtctatgatcatctgttatggcaggcaattacaaaacaaataccctctctcttttagtctgtattttttttctggaatatttttggcagtgggttttttcgttgttggncgtttttaacattttaagctgtgaagttggcnggacacaacacaaacc

SEQ ID NO: 5438 - DNA, 452 bp, Homo sapiens
  I.5438 (R91560)
  misc_feature (350)..(350): n is a, c, g, or t
  misc_feature (382)..(382): n is a, c, g, or t
  misc_feature (447)..(447): n is a, c, g, or t
ataaagaagagaggtttaatagactcacagttccacgtggctggggaggccttaccatcatggcagaaggcaaggaggcacaacgtcatgtcttacatggatggcggcaggagagaatgagggccaagcgaaaggggtttccccttacaaaaccatcctatctcgtgagactgattcactaccatgagaacagtgtggggaaaaccgtcgccatgattcaattatctcccaccagggtcccttccacaatacatggggaattacaagagctacaattcaagatgaggaattggggtgggggatacatccaaaccctatcacatgggggtgtctgctttgtaatgattctnccgagagctaggtttgtgttgtgtcttgccantttcacagctttaaatgtaaaaaccaggcaacaacggaaaccccttgcaatttttccgggaaaanttccg

SEQ ID NO: 5439 - DNA, 427 bp, Homo sapiens
  I.5439 (R91216)
  misc_feature (300)..(300): n is a, c, g, or t
  misc_feature (309)..(309): n is a, c, g, or t
  misc_feature (349)..(349): n is a, c, g, or t
  misc_feature (354)..(354): n is a, c, g, or t
  misc_feature (410)..(410): n is a, c, g, or t
tcggcacagcatggggaaaggggagttagaattggatcttgaaccatgacaaggatttaggcaggtagaaatggggagagagtgtgctaagtagagcaaagaggatgagaaaagggcaccaatacaggtgctgggggcacagcagcactgtgggaacaccagttcttagtgtgctactgcagggttatgtttattgcacatttttcatttaaatacctttagaattgtctctgcttatttttcagtcaaagcattaatcaccattattaatatgttagcccgtctgttctcgctaaggtngtgttaccnttctctgaagaaggtcatgctgtagctagtggtgtcagtnggttngacgcaggcattgccagaactgtcaattggtgttaagccacagtagcccttttccnatttaattcacgtaaag

SEQ ID NO: 5440 - DNA, 312 bp, Homo sapiens
  I.5440 (R91168)
  misc_feature (205)..(205): n is a, c, g, or t
  misc_feature (305)..(305): n is a, c, g, or t
cttttaaagaagggtgaaattccactcagtgacgtgaaatttccgtctgactatacatttcattcacatccactgttttggcactggtaacaaacagttgcattcaaaaccagcaaaaatgaaacaaaataactttttttttggaaattaatcttattgaagaaattcactttcaaactatgtccctataatcacaaactaaagngaaaacatctatgtcgttttcaatacaaatatgtacttgttttaggctgacaatatttttttttttcagctaggaaaacccttgacaacaattctaaggncaccagt

SEQ ID NO: 5441 - DNA, 230 bp, Homo sapiens
  I.5441 (R91004)
  misc_feature (226)..(226): n is a, c, g, or t
gaagactctaagagaaaaaagacagatgtcttctgaaggacaaggtattgggccagcagattacttttggactggagctacaacatgacttcttccctgggtctcccaacttctggccgacctggcagatttgtgacttgccagactccaaaattacataaggcaattccttaaaataaatctctctctctctctctctctctctctccctctccccctccctccntggg

SEQ ID NO: 5442 - DNA, 356 bp, Homo sapiens
  I.5442 (R89888)
  misc_feature (300)..(300): n is a, c, g, or t
tcacatagtttggtcttaaagcttaacagcttaaaattggcaaaaacaagcttgtgccttttaccatgtaatacttgaaaagtaagtacctctttgctacaagtagaatgaatagggaaaagtttaagcctgtttttttaaaaatattattttaaagagctctatttgtagaggcaaattataggcagattaccagtttcttataaatacaaacttgtacatggacattctgcaaacccagctgtcatattcttgcaactacttttgcaaaagcatactaaaaggttttaaaatgtgaanaaacattatttttttcagagcaggaaataatttactgttggtcttcattaatgtgt

SEQ ID NO: 5443 - DNA, 337 bp, Homo sapiens
  I.5443 (R89885)
  misc_feature (266)..(266): n is a, c, g, or t
  misc_feature (314)..(314): n is a, c, g, or t
  misc_feature (324)..(324): n is a, c, g, or t
gtttcccttaaaataattgtttaaaatttgcttacatagaatcagatttgtaagttgaactatattcttcagagaaaaacaggaatttgaattttaacttcaatacatcgaatactaatttttaaaatcaataagacaaaacaactcttgaatcttttctgtatacagaaatccctctcaagggtacaaaaaaaatcacactgacagaaaacatattttgctgtttgtaccttgacacggcttaactggtgggcaaaatgattccngtgttctgcctgctactatgtagttgcgtagttatcctctaccacccnccaccccatncctggcctgcagc

SEQ ID NO: 5444 - DNA, 478 bp, Homo sapiens
  I.5444 (R89849)
  misc_feature (196)..(196): n is a, c, g, or t
  misc_feature (199)..(199): n is a, c, g, or t
  misc_feature (202)..(202): n is a, c, g, or t
  misc_feature (205)..(205): n is a, c, g, or t
  misc_feature (246)..(246): n is a, c, g, or t
  misc_feature (256)..(256): n is a, c, g, or t
  misc_feature (330)..(330): n is a, c, g, or t
  misc_feature (338)..(338): n is a, c, g, or t
  misc_feature (383)..(383): n is a, c, g, or t
  misc_feature (397)..(397): n is a, c, g, or t
  misc_feature (419)..(419): n is a, c, g, or t
  misc_feature (425)..(425): n is a, c, g, or t
  misc_feature (434)..(434): n is a, c, g, or t
  misc_feature (442)..(442): n is a, c, g, or t
  misc_feature (451)..(451): n is a, c, g, or t
gcagtttaaccaatctttttaataaatccagcacattacagtggtataaatttatcttttttaacactccacataaaaacatgtgtcctctcttacatttaatcattagtagtctctaaaatggtaaaataaattgaatttacattagcaaatgaaagtgcaaatttgtacagctaggctcagcagcaaaagtgangantangantgaaaggtgaaaagctggtgggatgccatgcagagcgaggncttccataanggtctgtgccctgcggccaaacacagtcaacacaccaccattttcttgttgctcttaaatgaggcaaaaccaantttctttnttatttaatgaaatattaaatctttatttccccctaacataattngtgatcagtagggncgggggtaggtcccaccttcangggggncgttggcancacacggntttcgggancggcttggaatcttcgtaactcctcct

SEQ ID NO: 5445 - DNA, 409 bp, Homo sapiens
  I.5445 (R89846)
  misc_feature (359)..(359): n is a, c, g, or t
  misc_feature (369)..(369): n is a, c, g, or t
  misc_feature (384)..(384): n is a, c, g, or t
atgtctgttagatggctggctggaacaaagatgtgggaataaggaagaaaagaattcctagtctgcttgggaaggcaagactcacacatgttgaaagtattagagactgtgaagagagggcatatcattaagtgctaaattgcaaggtatggactttaaatcctaaaggaattcggagaagacagacctaaaggaaactccttcatcaggggcttgaggtggggagtggggtggaaagggcaaagtcctgctcttatcggaagtaactgggattaaaaatagggagcatgctctacacctgtgtatctacaccagctgcagggcatgggatgggggtggggggtggtagaggataactncggcactacntagtagccaggcagnccccgggatcctttttgccccccct

SEQ ID NO: 5446 - DNA, 379 bp, Homo sapiens
  I.5446 (R89802)
  misc_feature (128)..(128): n is a, c, g, or t
  misc_feature (158)..(158): n is a, c, g, or t
  misc_feature (161)..(161): n is a, c, g, or t
  misc_feature (184)..(184): n is a, c, g, or t
  misc_feature (202)..(202): n is a, c, g, or t
  misc_feature (329)..(329): n is a, c, g, or t
  misc_feature (374)..(374): n is a, c, g, or t
atcaaaatattttattttaggagacccctcaaaaaaagacccaccacattagacagacgccccaacaacacccttggcctttttttggtctttcctgtatttttccctttttaaatcaactaaaacantttgatgcttaaaataaaagacaggaaatnttncctgatgagactttagtcgagantatagatatatttctganccgggggcgggtgatcaggggcgggggaggagaaggatgtgccaccagtggttcgcgaggttccgtttctcagctcaggagggagcctgggctgcctgggacccgggctagggacccagagctgggnctccacagggcctgaccagggccaggggaaggaagacggaggagngagga

SEQ ID NO: 5447 - DNA, 358 bp, Homo sapiens
  I.5447 (R89801)
  misc_feature (30)..(30): n is a, c, g, or t
  misc_feature (62)..(62): n is a, c, g, or t
  misc_feature (272)..(272): n is a, c, g, or t
  misc_feature (343)..(343): n is a, c, g, or t
  misc_feature (357)..(357): n is a, c, g, or t
cggctgataaaggaagcaggaagcgctatnaaccatcagacaaggacaggcagagcctcctncagccaagcggcccaacacatccccagaccgaggttctcgggaccggaagtcaggttggagactgggctccccgaagccagagcggcagagaggccagaactccaaagcccctgcagccccggctgacaggaagcgccatgtgcaccccagtccaagagctccagcaaggtcacgagcgtgcccggcaaagcttcggatcccggcgccgncagaccaaatcagggaaggccagcacgctgtctcggcgggagggagctgctgaaacagcttgaaggccgtngaggatggctattnc

SEQ ID NO: 5448 - DNA, 323 bp, Homo sapiens
  I.5448 (R89583)
  misc_feature (152)..(152): n is a, c, g, or t
  misc_feature (239)..(239): n is a, c, g, or t
  misc_feature (294)..(294): n is a, c, g, or t
gagtttaataggccagacagaagggagaaggcagaaggaagaagctcccccgtacagagacagagggagggaggctccaaagccaagagaagggatccccaagtgcggtggacaccagccaggtatatatgcagaggctggagaaggtggtnttcgatttgcatagggctccggggattgggttgactaggcgcatcattcacatagctcatgaaaaagctggctcttccaccctgggncttttaatatgcaaatacatgggcgccatgatgttctacgctcgtcgggattccnggggacatgtaggggcaagggcaagaagg

SEQ ID NO: 5449 - DNA, 426 bp, Homo sapiens
  I.5449 (R89365)
  misc_feature (1)..(1): n is a, c, g, or t
  misc_feature (40)..(40): n is a, c, g, or t
  misc_feature (43)..(43): n is a, c, g, or t
  misc_feature (151)..(151): n is a, c, g, or t
  misc_feature (214)..(214): n is a, c, g, or t
  misc_feature (291)..(291): n is a, c, g, or t
  misc_feature (318)..(318): n is a, c, g, or t
  misc_feature (389)..(389): n is a, c, g, or t
  misc_feature (419)..(419): n is a, c, g, or t
  misc_feature (424)..(424): n is a, c, g, or t
ntcagtagagatggggtttcacaagttggccaggatgctncantctcctgacctcatgacccacccaccctggcctcccaaagtgctgggattatagacatgagccaccacgcccagcctaaagctcaatttttaaaggacagcacctganttcaaaaatcctaaggttcttctctcagtgccttgagatctgccatcatttaaaacatttgtnttgaagacttttcaatcttattaaaatatttgggctatattaaaggtcacatgacattagccgatgataaatatttntcctccccagccctgatttatgagggnccagctaggtaaataggtctctgattcaaacaggggattaaccattattcatggaaggcaaaatgaggccngcccatgtccaggtcataaatttaaatggnaatcncc

SEQ ID NO: 5450 - DNA, 426 bp, Homo sapiens
  I.5450 (R89176)
  misc_feature (388)..(388): n is a, c, g, or t
  misc_feature (393)..(393): n is a, c, g, or t
  misc_feature (410)..(410): n is a, c, g, or t
tgagacggagcttgattctctcaggctggagtgcagtggcacaatcttagctcaccacaacctctgcttccctggctcaagtaattctcctgcctcagcctcctgactagctgggactacaggtgtgtatcaccatgtcctgctaattttgcatttttaatagagatggggtttctccacgttggttgggctggtctcgaacttccgacctcaggtaatccacctgcctcagcctgccaaagtgctgggattacaggcgtgacagctcacacccagccatgaattactttatctaattaaactattaaataaccagttaaaatccatttgaaatatgaaatattatggattattaaggaatagggcaggggtgcagtgggctttacanccgtnaattcccagtctttggnatctaccatatggctt

SEQ ID NO: 5451 - DNA, 430 bp, Homo sapiens
  I.5451 (R89126)
  misc_feature (1)..(1): n is a, c, g, or t
  misc_feature (2)..(2): n is a, c, g, or t
  misc_feature (408)..(408): n is a, c, g, or t
  misc_feature (421)..(421): n is a, c, g, or t
nnttttttctcttagatctccaggttcccttccttaccccgggagcctttcttcatccaccgtcctgggggcgttcacagtgcttagaatcgcagaggttgccgtttctgtacatttcatgcagagaattaaatagggcactgcatttttcttcaagttaatttttatttattaaagtaaaacataatgtaccttagaagccagacagtcctacaagcttattatgttgtacagcggcgttccgtccccctccccagccctctctttctagaggcagccaatttcagctgtctctctctgcttacctacatatttccatgtttcttggttcatcaccgggtgggcaccttcagtctgggaaacacctgccctttcactttagggggaattggggcccctgttcgtttngataagtttttcntaccatttt

SEQ ID NO: 5452 - DNA, 425 bp, Homo sapiens
  I.5452 (R89075)
  misc_feature (322)..(322): n is a, c, g, or t
  misc_feature (354)..(354): n is a, c, g, or t
  misc_feature (395)..(395): n is a, c, g, or t
  misc_feature (403)..(403): n is a, c, g, or t
tattcacacaaggggttgcccaaatataattttgctttgactattgagatctagtgaaagtggggtatatgaattctaattgcaaatatccaggctcagaggcccagcaggactttctaacacaatcttttagcggaagttagaaatggtatatagcaggagagtcagatttgagaagcatatgtagattcgaagctgggattacaggtgtaagccactgcaccctgcctattcttataatcatatatttatatttcaaatgggattttaactgggttatttaatagtttaattaggataaagtaattcagggcggggtgtnggtggctcacgcctgtaaatcccagcactttnggcagggctgagggcagggtgggttaccccgagggtccggnagtttcgnggacccagccccaacccaacgt

SEQ ID NO: 5453 - DNA, 343 bp, Homo sapiens
  I.5453 (R88904)
  misc_feature (187)..(187): n is a, c, g, or t
tcttcaataccctgcttattcctgtgactcaagtggtaatcttctgcagcttggaagaaagaaaaagggatgggtaatgtaaaaatctgaatcactatactaattgtgggaaattatcctgcaaattctgccaggtaataaaagtaagtagggtatccataacccgaaggttttctttgtttagganaataaaaccaaagcttcatagaccaccaaagggaaattatcttggcaagtaaaattttagatgggaaattatctactacaccacacttgtggggaattgctatactcactctactgtttgcaataggggatacacacggtagcaccttctaactgg

(The sequence listing continues in the following parts.)
